United States Patent Application Publication US 2015/0376612 A1 - sequence listing, part 28

SEQ ID NO: 68648 - DNA, 1043 bp, Homo sapiens
aagctcttctctgacttgcagccttggactgtgttctgcttggctcactctccttcctttcctcctttcaactggttaactcatgctcagcttccaggtctcaacttgaaagtcatttctttaggagggattctctaaccctcgctctaggtcagggcccctgtttcaaactcttacagcatcctacaggcagccactggaacataggggaaggcactgcaggtgagggggatggaatggcattttttattttgtttgtttgtttgttttagagatggggtcttgttctgttgctcaggtggactggaactcctgggctcaagggatccttccacctcaaactcccgagtagctgggactataagtggctgctcagctaaagggagtgttggtggatttttaaaggcccttttcttttcagtaaacacaggctggcttggggaaagagtttcgattttagcccctgcttgcttcctcagttagtcaccttgtctgggatccaaactgctacagcatgaagcagaagctctgaggtcccttcatggcactcatccttcacaacactcacctaaattccatggaataattacagctgtgacgccttgtggagctccaggaggccagcgctcctgtttgtgaccttgaagcccacagagcctggccttagtaaaggctcccagagactgcacgcgacaatgcagcaatatctggcactactaagcaaccattaggttacacattcacgtgctttttttctagtgagattataaacgtttattgttcagcctacgctattataagatcatcttcttttgattctgaatatgtggtttgtggccaaaaatcaggactctagcttccctgaaaaataacctgatccacagggatggaatgtgtgatcttgactaggaaacaagaatcacagagctgtaagccagaaggaatctataaatcatcttcgtttaacttccccactttacaggaaatcaagaattagaatattctcatctgcaaaatggaaagaatcgatacagtggtctccc

SEQ ID NO: 68649 - DNA, 1025 bp, Homo sapiens
aactgcttgaacccaggaggaggaggttgcggtgagccaagatcacgccactgcactccagcctgggcaataagagtgagagtctgtctcaaaaaaaacaaaacaaaacaaaaaaactagctgggcatggtggtgtgcacctgtagtcccagctacttgggaggctgaggtgggagaatcacctgagcctgggaggtcaaggctatagtgagccatgatcacgccactgcactccagcctgggtgacagactgagaccctgtctcaaaagaataaataaataaaataaaataagagagtgacttgagcagcttcaaataaattttattgtttcctcactttatctaatattaattgaaatccttagtcttatgttggggttatcccaataggacgtgggaaagaaagttcaagctttcgccttgatagttctccatgatgctgcttaacataaacaatcgagttttcaaaaaccaaaactcttgatttcattaagtaaggagggtgtaatgtgtagtgcttgggccgttagaggggatgtggtcacaagtggtatatctgaggcttttgaaggagtgcattcaaggaagagccctgcttggtgtcagctactgaaccagagatccgaagaagtggacctcgccagcctcctgctccaccccgctaccagtcttagctggagctcccttttctttgtcatactcagccagttgctcattgctgttttagagtctggcccatgttttgctctttggctgtgcgattggcgtgaatcttctaagcaaatgaatagcttagaggtgaatactgaatcttttgcttcaagtagctcagcatttttgtctttcatttttactaagtgactagattcagtattcgaagatgttttggccaaatgattcattatttatttggctttagaaagagacttcaaaaggataatagaaataaacaacccagaggttttttttttaaattgaagattaataaaagagagacctctgctggctacagtggggtaacaac

SEQ ID NO: 68650 - DNA, 1726 bp, Homo sapiens
tgtcttctttttcttcacgagggcaggggtcgctgtcctattcaccagccatctagcatagccttagcaaatggtaggttctcaacattattgaataaagtaatgacataataaaaaaatagtattgtaatatcaatccgttccaaactctatggttagaaaagcggggaacataactggcgacacacgtagggaaggctctttaaaagggacctaaaggtcaactggagtccctggtgatcagccccttctgcactcggatctattccgcaagcctacgcgcccatattcactgggccccacctgcctagcggacgggtgcaatccccggcaagcccgcagggggcgcgcagagcacgtcgtccggggagaactaaaactacatttcccagcatcccgcgcgccgcagacccacttccggagacctcacacaagatggcggcacccgaggaacacgattctccgaccgaagcgtcccagccgattgtggaagaggaggaaactaaaacatttaaagacctggtgagaatggatgacgctggcttcttttatgtactctggtgctaggctcagggagaccccaggtaccttagatcccgctctgatagtgtacaaaagcatcttggggcctagcttgggttttccccagaatttcagagggctgggtttcggacgtgctctgagtttgggtggtgggagggctgctgggccctgagaccccctatttgccctattcgccactttagtgtggcaacgtttgtatgtgcatccaggaggttgtacatatggggaatggaattggtctctttataactggagctttggagtcagatgaaccaaccagatttgaattttgacacagtctcttactgaggacaagttgttacctctctgtgtttctctttccacatctgtaaattggggatagtaataagtacttacctcgcagaattgttgtgacgattaaatgagatgatacatgtaaagcacctggccttggccttggtgagcagaaagtgttcgttaagtcttgagctactgtctcatggtatagttaaagagtaggctctgagatgcacagtaaataccttttaaatcaaatacaatggttgtacatgatgggtctgacagtcagttaagtaggagggaggtaggggtgtgctgttcttggctaaggtatatttttctgaattccaagggtgtgacagatgtgttgtgtgaagcttgtgaccagttgggatggacaaaacccaccaagatccagattgaagctattcctttggccttacaaggtaggttgtatgacttcgtacagatttaatataaagttatctcaattagataccccttttgaaagctgttgcttgcatacttcaagtgaaataaggatatggtcactaaaggtacaaagtttgggtaatggtatttgaaaatgtcattctccaattttactgagcttactttctgtcttaatagctgaaagggtttgttctctgccacagatgctgactttaaggaagccctaggttaaagttaaagtatattaacgacaatcttggtagactttatgcatcagtgggcgcacacttagggaaggatgcctggaacacatatgtgtgtcttgaggagttgagaattcttgctgtgagccatgtttatcagatttgtaaaacagtggttaaagcagattgatggctactggaactgaaactaatgggatgaactt

SEQ ID NO: 68651 - DNA, 1068 bp, Homo sapiens
tttcaagacagcattttcttctgtctttctagctgttctttctcagtctcttcttctggttcttttccctttgccttacaatattgattctgtctttacccttttttcttactctgaaatactacataacatttctcattcagtcctcaagcttaaaccctgtctgcatcagtgagtctgtattcttcagaatcatctatggagctttttttttttttttaaatagagatttctaggtcccagccaagacctactgaatcagaatttccaggcatgggaccgggcatatatatatatgtaagtctcatcgattattctgaagcatctgcccctgaggaagtaccagtggtaggatactcatggctcccatgtctgttctaacccccacttttttcctgagctccaaacaagtatgtccagctggtttttagacatacctccaaataattatgcccaactggtttttagacatatctctaaacaagtatgtccaactggtttttagacatatctctttgagtttactataggaatcttaagttccaagttccctgtgtggaaaccaaagtccttattttcctcaccaggactaatttttctgttgcctatattgcagtttttggcttttgagtgtcccgtactaaaaatgtgtgagtcacccacatttccttttgttagtttctgaatctcattcctgtgctcattcctggcctcagttcaggccaccatcatatctcccctgaattacatccaatgtcccagttaagcctttgttttccctgttctggtcatttaagtcatttctgattgtaagtcatgttcaggttatgtcagggaaaagagatttgtttattgtaggattatcttctaggtaaagaaaacttctcagcagttacacagtcagaacaggggcagcaactgtaggggtcatgatttaatagggagcattctcactggccactgtggtagtgcatagctacctcatgggctacagccagctcggagatagtgatctcaactcaggagttaatttccaagtcttatgagttgtggcttgagtggtgatag

SEQ ID NO: 68652 - DNA, 1964 bp, Homo sapiens
taatttcttaagttaaatttggtggagagctgtggggtggggcagataactttatttgtttatttgttttgttttttttttgtcctgttctgaaatgtcactgtttctcctcaacctttcttggtagcaactcctggtcgactgattgaccacttggaaaatacgaaaggtttcaacttgagagctctcaaatacttggtcatggatgaagccgaccgaatactgaatatggattttgagacagaggtgagctctcaatttctttcctcctcttagagcatctcaaggttcctgtttcaaaatttggttcattgcccacttgtttcatgtagaacattgcattagtatcagtttcattcttgatattcttcaaattgcagtttctcagcacccttttatctttagaatatagtctgactctgacttcagaaatgggaaatatcaaaaccggattttcttttccctttcgtttaatttagaccttgacatacaccctgaaatatctttattttctttgatgacccactaatcccagcttacttagttgattaatactttttcttgacttttctcttaaatcagctctggtctactaatttaaactgttcttttctcagaaaggtattttttttaatagtatttggtagggtatcagatagtaaatattcagtaaactttagctgaatcaaattgaattttcgagtcccaaatcttcacagtgatatatttagtttgttagtgtctacctccttcactacctagaggatttgcagctcttccagtctgaatatcatattggcatcttttcctctttgtgctttaggttgacaagatcctcaaagtgattcctcgagatcggaaaacattcctcttctctgccaccatgaccaagaaggtgaaatttgctaggacttttgtttcttctttatgagaattgatacataaagtaaatagtaataacaataaggaaaaataaattgctttagtccgttttcacactgctataaagaactatctgagactaggtaatttatacagaaaagaggtttaattgactcacagttccacatggctgggaagacctcaggaaacttacaattatggcagaaggtgaaggggaagcaaggcaggaggtgggggcagtgccacactttaaaaccatgagaaattgtgagaactcactatcatgagaaccgcaatggggaaaaccacctctgtgatccaataacctcccaccaggtccctcccgtgacatgtggggattacaattcaacatgagatttgggtgaggacacagagccaaaccatgtcataaataaagagtgtttaggcatcagtgtgctattctggatcttcttccttcaggttcaaaaacttcagcgagcagctctgaagaatcctgtgaaatgtgccgtttcctctaaataccagacagttgaaaaattacagcaatattatatttttattccctctaaattcaaggtaaaatgtttactttgatcattcctgcctctccctcttcttttcaccaaagcatctgaaaatgtgtcaactcttgattaggtaagagctgtaatgcagattggcatcctgtctgtttgctttagagtgcatatcgtgcttatattatcaccgataagccagacatgccaggaattcacaacacattaaatcacaatactgaggtcatgatgtaatcatataattccttcccatccccatccttgaggtaatttttcctttgtctgcttattatgtggcttttatttaggatgaagcccctggttttgtgctttgatataaggacttctcctgtttgctgagtacagatctcctgcctgccttaaggctaagtggggaatatgtggttcacagagatgataatgctggttaaggaatgcaaagctggcagctggaggtctggataattgaaaagcgactataggcttagtctttaccttatg

SEQ ID NO: 68653 - DNA, 2763 bp, Homo sapiens
tcctgggttcacgccattctcctgcctcagcctcccgagtagctgggactacaggcgcccaccaccacgcccggctagtatttttagtagagatggggtttcaccgtgttagtcaggacggtcttgatctcctgacctcgtgatctgcccacctcggcctcccaaagtgctgggattacaggcgtgagccaccgtgcccggcctacagcttgtagtgcttagtgtatctcaaggtttctcagccttggcactattaacattttaagctttcgaattccttgttgtgggggttgttctttgagttgaaggattcctagtagcattcctggcctttacccagtagataacagcatcacacagtcttccacctgtgataatcagaaatatttccagacattaccagtgtcccttgaggatggcagaatcacccctggatgagaactgttgtgtctcttgtctttgtatttaactgctgtagacaagatgctgtctcatttgattttcataacaactctgtaatatgggcatgtatttctattcctgttcactagatagaaaccaaggttcagagaggttatgtgatttgcaggtaattgtgtaactggcagatgggaaggatcagagctgtaatccagctctgcctcgagatccagtgctgttttttaaaataccatgcagcctgcgaccatgtagatatgctttgtagatttatctgtctgtgaaagaagggaaagcattggatcaattttgtgctgcaaggagaacaaaaaagatgaagtagatttgtctcaacaaattgccccggccatttattttctccatgttacgaaatgaatctattttctttcaaaggttttgcagcaggactttgcatatgtagttttttttaaacttataatccatataacttgaatttatttaccctttttgttttaggattacatccatcgagtaggtcgaacagctagagctgggcgctccggaaaggctattacttttgtcacacagtaagtaaatcagctttagggccgagcaatgtagagaaaagagcagaactttcaagccactggctgagaacctgacactaccatttactacactaatcactttcatactgaaaaccaggatgaaggagttgaaagatgggaataataatacctatctagcagggttttggtgaaaattggagattatatatgtaaaagatctagtatagtatttggcatgtagaatggtacctagagctggagagcaattgcctttgtgtcaactcagaaagtattagaataactatttccaattgttttttttaaagaaacaaatttttatgtacccaaggctgttctgtgaataaataccttgagggattttctccctccctcctttcctttttttttttgtatttgtctcgctctgtcgcctaggctggagtgcagtggtgcagtcttggctaagtgcaccttccaccccctgggctcaagcaatcctcctacctcaccatagcttcccaagtagctgggaccacaggtgcatgccagcacacctggctttttaaaaaatatttttagtagagatagggttttgtcatgttggccaggctggtcttgaactcctgagctcaagcgatccacctgccttagcctctcatagtgctgggattacaggcacaagccacctgcctggccgatttttgtttctttttctttttttaagcagcaaggtttcactctgttgaccaggctggagtgcagtgacttgatcatagctcactgcagcttcaaactcctgggctcaagtagtcctcatacctcagtctcctgaatggctgggattacaggcacatgccaccacggttggctaatttttaattttttatagagatggcatctcactgtgttgtccaggctggtctggaactcctggtctcaagtgattctcctgctttgacctcccaaagcgttgggattacaggtgcaagccaccatgcctggcctcccttgagtgattttctaatgggctatgcacagagattgcacttaacccatatttagaaaagaaataatatgttcaatattgtttaaacctatggttcctattgcgttgtatcatataataatagtttgggaatggacaggcatttgcgttaccaggcaaccagagctgtgcagttttccttcctcaggtatgatgtggaactcttccagcgcatagaacacttaattgggaagaaactaccaggttttccaacacaggatgatgaggttatgatgctgacagaacgcgtcgctgaagcccaaaggtttgcccgaatggtatgcatctttcttttctcaccagtgtctgtgcaaacaatgttaactgtgtgccactttattatattaaccctcatactaaactgcagaagctgggtattattttattccaaatttaagacgagcaaactaaggtgcagagatggtaggtaatttgcattagaccatacaaccaaatggttgaatcaaggtttggcctcattctgacattcacacattcacagcacctgttcatgtgtcgcacgtggtgagatagttcatcagacttgaggtcagaagatccagctgtgaactgtgtgagcttgggaaatttgcctgatttctcagaatcagaatcagtttctcacctgtaaattgggaataacacttgcctgaataccttatggggttttatgagcaccagagaagccaatataaactacatagttactagtaggggttgatcatacct

SEQ ID NO: 68654 - DNA, 1045 bp, Homo sapiens
tgaggctggggaatcgcttgaacccgggaggcagagattgtagtgagctgagatcacaccactgcactccagcctagggatagagcaggtctacatctcaaaaaaaatttttaaaaagttaatttcataatgaaacataaaataatgcttttaaagactattgcgggctcaaaccttcgcgctgacatggctaaatgcaccaataaagttggaattgtcagtaaatacaggatccgctatagttagttaatttcataatgaaaagttaatttcataatgaaacataaaataacgcttttaaagattattgcgggctcaaaactttgcactgacatggctaaatgcaccaataaagttggaattgtcggtaaatacaggatccgctatggtgcctccttccagaaaatggtgaagaaaattgaaaccggctagcacgccaagtacaattgctctttctgtgacaaaaccaagatgaaaagacgagatatgggggtcgggcactgtggttcgtgcatgaagacagtagctggtggtggctgaacctacaataccacttctgccgtcacagcaaagtctacagtcagaagactgaaggaattgaaagaccagatgtttctccaccattggagacatcactagcctttaataaatgggttaacttatgtaataataaaaaaggaccattatcagcataattccctagggctattgtcctaaacttacttacttttttttctttgagaccgagtcttgctctattgcccagcctggactgcagtggtgccatctcggctcactgcaaccttcacctcctgggttaaagcgattctcgagcctcagcctccagagtagctgggaatacaggtgcccaccaccatgcctggctaatttttgtatttttagtagagatgaggtttcaccatgttggccaggctggccaaaccttcttgatatgcatcctattcaacataatatctttaacatacttgcacatatgttaaacaattacatacataataaatatatacaaatatgccatatccat

SEQ ID NO: 68655 - DNA, 1050 bp, Homo sapiens
gcatcagctcagtgaactccaagcagaataaatacaaagaaaaccaacctcaggtacatcacagtcaaagtgttgaaaatcaaagataaaaataaattattaaaagcagccaaagaaaaattatgaatgatgggtaatttctcatcagaaacagtagaggccagaagacaatagaaaagcttccccatcccctaatatggtttggctgtgtccccacccaaatctcatcttgaattgtagctcccataattcctacatgttgtgggagggacccggcgggaggtaactgaatcacgggagtgaatctttcccatgctgttcttgtgataacgtctcacgagaccttatttctgactggactcagacttagatgtagaagctcacagagaggaaagtctgtgtctcttcgcaatttgttcctggcgcttctctttagcctccttcattcccttgcctaaaagtttagcatattctgcagcctcttccttatttttcttagtacacggcttcttcagagcaatatgctgccctttgtgctgcaggaaatgtggagtaacaagatgctgaatcttgggtgctttggtcctaggtttcttacctcctttgtttgagggctttcttacaacatactggcggacatcatcttcttcagagagattggaaagtttgcagattctgctagcttttttgggccccaggcgacaaggcaccatagtatcagtcagtccaggaatatccttctttactttttttttttttttaacaataatcaagttgagaatgctcagattggcatccactatgcaaccacgaactgattttctctttctttctccagttctccttggtctgtaacaggaatgccccttactcagtagcaggtggacacggccatgggtcaagacaccctgcttcatgggaaaaccttgtttgttgttcccaccactgattcggaccacataacctttccattcttcacccagagtgtcagcagcaacttctgtggccataagcttctcataaaaagtacgaagtttgcattcatcatcc

SEQ ID NO: 68656 - DNA, 1049 bp, Homo sapiens
cctgtctggtctcaaacttcagagagcaaatgatcctcctgcttcagactcctgaagtgctgggattataggcatgagccaacacgtccagccctgtgaagttttttgagattaggcttcaaaatacctcttcagagtgttaggttctctggctttaaggtaaatattaatatagttaaactgggggaagggacatatgggatttcttcctggttcttcaacaggttttagaatttactacaggaggtagaggaaagttagtagctttacttaatgtagtaagctcaaagtcaaaaccctggctaaacatgcaaaattggtttcctaatccttttttagtcttctgtgtctgaggactgtgttaggagattcaataccttctccccactccaacattccttttctgcaggtccagaatggctacaacagtccctgatggttgccgcaatggcctgaaatccaagtactacagactttgtgataaggctgaagcttggggcatcgtcctagaaacggtggccacagccggggttgtgacctcggtggccttcatgctcactctcccgatcctcgtctgcaaggtgcaggactccaacaggcgaaaaatgctgcctactcagtttctcttcctcctgggtgtgttgggcatctttggcctcaccttcgccttcatcatcggactggacgggagcacagggcccacacgcttcttcctctttgggatcctcttttccatctgcttctcctgcctgctggctcatgctgtcagtctgaccaagctcgtccgggggaggaagcccctttccctgttggtgattctgggtctggccgtgggcttcagcctagtccaggatgttatcgctattgaatatattgtcctgaccatgaataggaccaacgtcaatgtcttttctgagctttccgctcctcgtcgcaatgaagactttgtcctcctgctcacctacgtcctcttcttgatggcgctgaccttcctcatgtcctccttcaccttctgtggttccttcacgggctggaagagacatggggcc

SEQ ID NO: 68657 - DNA, 1022 bp, Homo sapiens
gcaatcctcccatctccatctcccaaagtgctgggatgacaggcgtgagccacagctcccagcctaggcccttaatcttgctgttattttccatggactaaaggtctggtcatctgagctcacgctggctcacacagctctaggggcctgctcctctaactcacagtgggttttgtgaggctctgtggcccagagcagacctgcatatctgagcaaaaatagcaaaagcctctctcagcccactggcctgaatctacactggaagccaacttgctggcacccccgctccccaacccttcttgcctgggtaggagaggctaaagatcaccctaaatttactcatctctctagtgctgcctcacattgggcctcagcagctccccagcaccaattcacaggtcacccctctcttcttgcactgtccccaaacttgctgtcaattccgagatctaatctccccctacgctctgccaggaattctttcagacctcactagcacaagcccggttgctccttgtcaggagaatttgtagatcattctcacttcaaattcctggggctgatacttctctcatcttgcaccccaacctctgtaaatagatttaccgcatttacggctgcattctgtaagtgggcatggtctcctaatggaggagtgttcattgtataataagttattcacctgagtatgcaataaagatgtggtggccactctttcatggtggtggcagcagttaccagtaatgagcattagactctgggggatagaacacgggctgccctgagagcttcatgttggagctgaagttcaaggttcacttcctttgggtttgtacttgacccttcttcatgtgtctctcccgttccctctaaaacaagtgtgtttcccctcatttttgaggctgtcaatggtgtgagagccaggatcatcacggggcctgaggttttactccagaaaagcagaggagtggcaaccttggcttggggtttggcagcccaggaaaggcagggaggagagctca

SEQ ID NO: 68658 - DNA, 1011 bp, Homo sapiens
gctcagaatattcctctgggcaacagtgtcatccccctccttgggaacctcacatttgcacttgatcaggcagccagctgtttcctgtctccccctaacttctcttacgtaaagtggagggatgggtgggaaagagtggggatgtctcctggagcacaaacctacagtgcctctagccctgcctggccaggagtgagaacttggaaggccacatgcattttgctgacccctgcctataattcctccctattaaccaggctttggcctgcacctcgttgtttgtggtgtttggcccaccctctggcttaacacattcatgattccctctcatgttcattcatttcacatgtattgaacctctcctgtatgccaagcactgtcctaggcaattccgtttataagcgaacaaaacaaagatccttacccttgtagagtagggtatatagataacaaataatagacatgtaaattttaatagtatattatattatatcttacaaagtagtaagtgcaatggcaaaatttaaaagtagaccaaagagaatgggcagtgtttgggaggtcagtatggaggcggtggtgtgcagttcctgctgatgtggccagggaagccctcctggagaagaaagacttgaaaatagtgaggggttggccagacgcaacctgagggaagcccatcctaggtggcgcaaaggctgtcggacagggcgggcctgtgtggtcaaggaacttagaggtcggaggggctgaaacagagagcccaggggaagcacagagaggtgacaggagtgggcaggtctggtaaagacctagaagtcacttcagaggctttgccttttcttctgtataaaatagagaaggccattgtaggatttcaagcagagcagtgacaaaatcaaacccactgttgcaagaatccctctggctgctcttttgatcatatactataaaggggtcggggttggggctgggggatgaggtcagaagcagacggccggttaggagtttcct

SEQ ID NO: 68659 - DNA, 1016 bp, Homo sapiens
ggttccggattccaaaccaatttcaaagcgacccaccagctcccagtgacaaaagcgttaagattgaggaacgggaaggcatcactgtctattccatgtaaggagacaatccttcaggcatccatgggtggcgcttgattcccgtaccactccttgcatcacctctggcaagcattcgcgtcaaatttttatggttgctgaattaatttaagtaggaaatgctgaatcctaacagtttctcattttaatttcttcaggctgcagcacacacacatttgcattttatcagaataaatgccttggccagttgccaaattgatgggacgagcttaagctttgcttaagcttacagtgaatgtctacattagccatagcagggttctaggagactcagcaaatatcttaagtcaagccatggtctggattcgtggacacatgggaagcataaagggctgaggaatacctgatttctaccccacactccctttgaatgccagagagcagggagcatttgctagagctgggcttccatcctccttgttgttcctggatggtagtcctttgagcagagcacacatctattctcttgtcatcctggtcctgtttccaggacttcatgtggggtcattttcccttgactgtagagaatagcaggtgcaaatggttactagtttctatcccttgtgctccaaactgccctcagaaaccaagtcttctagatcattgatgactcctcacatttgttaaaacactcccatgtgacaggcaccaaaccaggctcagggaaagaccaggatcttcaccagaagtaatcataggtggtttggctccgctcaggagcaacctcatgaaaaattcacatacatataatattgcactggactgagtattggtccacttcagggacctccaaacttggctgccctgctgcaaccctgaacctgatggtgggaccattttccccggagctgtgtcaatgttctgagaatgtgagtttcaccgctgtgtgtagtcct

SEQ ID NO: 68660 - DNA, 1005 bp, Homo sapiens
tcggccttgaacgtcaggggtcttttcactctaaatcctgagcttttgattccacttggtcagtctccagctgccgagattaagcatgggaaatgatttggcacctataagttgaagataatgtatggaatcttctttaaggcagcattaggggtgatgacaacttccagagctgattcagtacttcgggcagcagctccaagttttttttcctttttttttttttttcctcctaaacctccagagtaggattgtactgttagaaagttgatatttaaataaaagtatatttattccacccaagtaaattttaaacattaggctttagaaaaattgatggctctacctaggtaagttttaagcattaagctataaacatttatttgctgataatttgtattagagggaaaagcagttgctttcatagctatctctagagagggctatttgggttttggttggatagctagtttgagcttgcagggggattacagggtccttgttctcaaggagcttccagtatgctaccctgaagcgaaccttgccatttggatgacgctaggttggatattaatttgcgtttctgtccccagacttcatgacctcagacagattattattttttttaatatgggctcattggaacattggaaggaacactgatagcatctgccttggaatgtgtgcataacactggaattaaaggagagacgtggccctttacctgcaggattaattttttacttttttactttgtatatccttagtgtagaatgatgtcctcccagaggggtaataagatgtcagacatttagctttatttcttttttttttttcttttagagtccttttttaaaatttcagtgtaggtcattgttattctctaagaatgagaatgcatgaaaatcttgctttagcaactcttgaggtcttttgtgttcttatgccccaaggctgtggtgttattactccctggagtattagttgtaggaactggttggggtt

SEQ ID NO: 68661 - DNA, 1052 bp, Homo sapiens
tcacttggtgctaaaaatccaattgcacaattatagggtggcttaagcatgtgttcaaaatgcttggaagttttaattgaatcagtaggtgatgtgaatgccaagaaagctctcaagatcttacgttatagaaattgaattgttgtttgctatctggagtaggtaggaaatagctctgccctccctttctctggtcagactgtacctgggattgtatctagttccaagaaccatattttaaaaagcacagacatatcacattgtgtccagaggagaatgaccaggatgttgaggacacctgaaacaatgcttctttaagtaatgggttgaaagaggtggaggtgtttaagttggagctgagaagagtgggggagggcactgggagatacaatactagcaccagtgatggtaatgataataatagaagctaaaatttattgtgtggctataagccaggcactaagaagcagacatatattatcttatttgattctcatcacaatcatatgagctaaaaagaataattattccatttcataaatagggaaattgatgctcaataaagttaagaaatttgagattacatagttcataagagatatagccaggatttggcttgatgtttgattgtgaagacttgagctcttaaataccatatcatatgtctcttatgattgatacctttgagtgtttgaaggacttacatgtgagagagggatcccagaaattaaaactaggacagataattggcaacttcccagaaaaaaattcttgaatcagtgtaaagaattggtttctagattggaggccagtggattccctaatacaggttacattcaggtgtttgctaagtaactggttgataggtctttgtaagtagctagttgtaagtttgggataggggtggggatagattatgtgatctttaaggtctcttgctgtgctttctcaagtaactctagagttgagaactctgtgtgctttcctgtttttcagatatatatatatatatttaaacattttaaattgtcaaaaaatacatacaccataaa

SEQ ID NO: 68662 - DNA, 1033 bp, Homo sapiens
cagtagagacggggttttgccattttggccaggctgatcttgaactcctgacctcaggtgatccacccacctcggcctcccaaagtgctgggattatagttgtgagccactgcacccagcctgtgacctgcttctttgtgccacttaattttttgaaaacaatttattgagattcatctatattgatgcattatacctggagtttattcattttcactactgtctgatttttccatggtatgaatatctcatgatttatccatttttctgttgatgaacctttaagtaatgcttccagtctttttttttttaaataaataaatgatgctgctaagaacatttttgtatatgtttcctattgcagtgtataagaatttatctaaggcataaacctaggagtaaaattgctggatcataccatagggtgtgtgcatgttcattattagcagtttatgttaaattattttccaacatggttgtaccgatttacatttccactagcaatgtgtgaattctctccaaatttggtgggcatcctctgagtccacacttttgggtggtggggggatggaagtccagactcctcactaggcctctgctgacaccacccccgtggagaggagggagagggctgccttgttgatgctagttggggtggaactcctttggtcctgctagatgaggatgacagtccttgcccccacctggctttctctgacatgaccctgatggtggtggtggtggtggggtaccttgttacatccaggagagggtgggagccaggctccacattcagcctttgctatatgagtgggtggagctgggctgataattttatctgtttggttggagtagagcagttattatctacaactttcctgtcttgctggactgcacctttcctgggcttttggctagggaaggcagccttttctggggctttttttgtctgtatctgtggtgtttctgggttgctggcttttccagcaccctatctgggtattatgaggccaaaagaaaacccaggggactc

SEQ ID NO: 68663 - DNA, 1058 bp, Homo sapiens
ggaacatggcatctgccttttccaaaggcaagaagttgtcatagtgaccagcctatgtgtccttcctcagggaaagccatttggactttaaacccaaactacttgtccaacggtaccttggctgccccagttgtggtactgccagacttggatgaagacggtgttcgagaccttgtggttctggccattggggaattgcaggtatgatctctattaaatgttttttgtttcttatagggactgcttctattttagttgtctcagctcctagtgttacattataaatgctgcttgaaatgttctttttacaagggtttaggtttaagtaaattctctttgtgaggttaagtgaatacttgaccattatgaacccattttctctggcagcctcatggctccatggactggggtgtagtggagctttagagttagttaggtctgtatgcgaattccacctctaccactttatatctttgaggccttgggcaagccgtggagcctgtccaagctctggtttcttcatatgtaaaaaaggcatgttatatctacttacatcattgttatgaaaattacagctaacatatttaaagtgcctagagtagtgcctaatttttgctgtgtatatgtatttttagttttactgtattatatatatgtacattttatgtcaattataaaacaacagaacaggctgatacaaagttcataaaagatacataggaaaaaatctaagtcaagcaataataacaacaatgaccaaagaaaggagtgtcataatctaggctgtgacaaggcagactttgattcaggacagtggcccttgaattatggtcctaaattatgatttgcaggaacttcagtgtactggttactctgcacacagataaaataagagtagtctttcccccaaatcacaggaaggaataaattaatgaacagaataatctcaattttaagtttttattctggaagcgtttttcagagcttttgtcaaagtttctctaagactttttctcagacttcctagtgtgtctgccaaggaaatgcttgtgcacaaa

SEQ ID NO: 68664 - DNA, 1028 bp, Homo sapiens
ccatcccgtctggccgcttattagctggtggtggttggcaggatagtggctcaggcccttggggaccctccatagtaaggaggtctccactggaggaagtggcttcttgcccactcttactctgtgccctttgtgttggtctctactcagtgtattgcccatcttgccctacagaatttacttgttttcacaatagggtacagctagggcatagtctcagttctgcttgaaaagtggtagacagttctaggaaaaccttgtagaggcactaggtatatagcgcagcagcttcatccttgtactgacctcttttgacctctctgccagcaacaagggaccccaggaacctgtataagctcctgagatggaagactctctcttcacaaggaaggaaacctaagtctgtgacttatagtgattgcgttcattgatctgggtttagagtgaagtgggcttggagaactggacctggtttttgattacaggaactgataaggtctagaacattagtgggaagggaccttgaagaccatttggttaactttctcacaccatgctatgatctctggttcagcattacagacatgttggcacccctactctcttggtgcactcaggctgatgggaataacactaatttgtgaggcgatccatttcatttttgggccagctccagaaaattctgtcctaagcagaaagaaatctgctttctcatagcttccactcattgttccagcttcattcccatagagctactgtgaatgagtctaatcccctttctataggaaagccctttaaccattagcctagtccctctaagcttgctactcaggactaaatatccccatttctcgtactgttcctcatgcaaccaggaagtccaaacccctctttttcttgatttctttccctttgcattctagtatgtccaaatctcttttaaaatgtggtacttatatctaaaaacagcattttatttgtagtataattaatatatcaacctaagggaattgtttcttattttgatg

SEQ ID NO: 68665 - DNA, 1052 bp, Homo sapiens
aaccttctgattacaaccagacaaagccttgtgctgcttcgggggcaaaatctgacaccttactgggcattgagacttcaaggcctgcgcaggtttgcattgtgttccttcttgtgtttgctgttttgatccactttcccatgtttaaaaattgtccaggacaattgcttgcaattcttatatctggggccagtgcaagagaagggagggagagttcttagttttcctgtttttcttgttcactattgattgcttactttgtccttatttgcagccagcctactcctggatatttcactgatgatcagacattagatttccttctgcagatacaggatggagttgggatgaaaaaggtaaaactttgggcctcagatcaatcaaagcatatgtaaagtatatactttgtgtccaaccctgtgttaggcacagcagggaataaaaagaacctaaaatatgatctctaacttcaaagaactcaaagtctcattgagtggataaaatgaaaactcacaattcattgctaaaatctgtagcactggaagcctttctaggataatctccttcctatgtaggagtttcttgttttggatccctagcttacagttaggcattgggggccttctgaaatctcttggtggggaaagacaggtataaagaaatgtaatgctttaacacacagctatacctaagatttcagagaagtctgtggtgactggggttttatggaagaccttataaaggagggaaatataagcagctttttaaagctgaatcgtatttatgtagacaggaaaacatgccaggtcaggggtgccaagagcagaggcccagagacagaaaggatagagcatgttccaaggacactgaatagatctttgatattgcatgaagttgcatattgtgagaatataatgattggatggatgactttcatttctttaacattacagcagaattacagagttacaatttttttttattatcgaccttgcattttggtttattttcactgtgaaatatatatctatttctatacattgcacattgtt

SEQ ID NO: 68666 - DNA, 1834 bp, Homo sapiens
atcttgctcaaaatgctaatgttccctccccatccccactcccaagaaatattatagtctagtgcaaagttcaaaagcttatcatggaaaataacaaagtttctgggcctttctggaaggaggaaatgtttacagactattggagctaaagaaaaggacgggaaaatagagaaatattctgacctttagttttcctgcttttctttgaacatctctaccatgaaaaacaataaagtcacgataactctttttccatagatctaatctgatggaatcttcagttgcagaagaagtgaacagagtggataccctctctactctcctgtcactgtaaaatcagttctatggagagaagacttcttcgtcctcatttaccacctccctgatggttgcaaaggcttgggaaggcatgttggagtctttgacggcagcatgatctatttggctggggcatcttacctaccttttcagtccctgcattaatcccctctaggaactctgcgtggatcgtttggaaatgtgaatctcttaagtatttaatttttttggtatgtctaatttatgaagtcttgctgggaaagccagtgaagtctatgactaggaaacattttgttgtacattgtgctgtgtgtgtgtatattttagtgttgtggtgaagttattttccaggtatgtcctaagcttcagggatccagtttcttgtccttctgaaatatatctggtttgtttggtcattttgagacttccagatgccctacctctgatgttgagggccacttatttctctccttattctttcccacctgtaccttggctacttccaaattgtagacagaatgagaaagatttatagtggaagactgagttagccatccaagcattttcatctctcttgttttatatcctatttccttagattttccatccatgtctattaagtgaccacaagaataactatattcctatcacaaggggagcaagaggatgtagtctcagtgacccatctctgaccaagtccacatgttgtgttatatgtggctctgatggttctgccagtcatgatcttttttctgtggcgacatcagaagtgtatgtttgcatgctgtcttcaacttagaggagaactggaagtcaggagcctttgatgtccttatcctgctgtatgtcttctctgcatctttttctatagggcaccctccttagctcccctcactctgttttctcttctattcagggatatgtttctggactttttcttctgctacttgagtccaggatgcaaccattttgtcctgcatctcttctttcctgtagagcctttgaagcattgtattttgggaaaattcttctgtaaatactataacttttataaatggttaagttatttagaattatctccagtgcttacttctcccttcttctgtataaatctgctacttcaattaagttctcctctaaacttttaggtcattgtttatatagcagaaaattcaatgttagcggatggaaaactgcttcttgaataaccttgataggtcatccctgagtgcacctcaggttctctctttacctgggcttgtatcttttttttttttttttttttttttttgagacagagttttgctcttgtcgcccaggctggagtgcagtggcacaatctcggctcactgcaaccttcgcctcctgggttcaagcgattctccagccttagcctcccaagtagctgggactacaggtgcccgctaccatgcctggctaatttttttttttgtatttttagtagagacggggtttcaccatgttggccaggctggtcacgaactcctgacctcag

SEQ ID NO: 68667 - DNA, 1012 bp, Homo sapiens
catgaatatggttccttctttaacctcccacatgtatgtacatagctgcctaacacaaaagctcaggcctatttgggactctcagatgtacatactcggagggacacacccagtgttgctacctactaggtcatggttagatcaatccaataccaggacacaggcttctagctaggccttttggggattgtcccataatttggtccatagttcatgtagcccacacctatacattgtcaccacccatcatagtaattacgggaacaggctgcccatcaaatgtagcctccttgtaattgctggccagcaatctgggtatcagccccttgagaagagctcctaacccttaaccagcgtagaacgggaattttctcaccataagcttcccttttctaatactcttcccagatccgcccaggtgatcttgaatttctggactgcacttgctattcagtaatcaaggaagcccaaatatggttccagttaggggtttacttgaatcttcagcacccagccccgacatacacacgtcctgagactgctctttgcaacaattcagtccctggtgtcctgcctgggtaaaaccatttccttcaatttacctgggagattcactgatactaaagcagaaagatgaaagcacaaacacctgtggtgattgctgcttctctcttcctttttaacaaaatgtttgggtcaaggttttcttttgtgttgtggagatggcatttccctggaactgcaatggaatcctctgctgttggtgcgcttggacttacgtggctgtgacagtttttctatttgctgagcctgtttcatgaattgtttcttcaaaccgggtagttaaactagagagccctttcagcacaggttgaaagcgtggcaagaatcctggagcagatgtaagacagctgactaggaagacagaggggcagtggtgttatcttgacgctgccatgtaaccacaggcgagacacttgtcttcttgctttcggaagttgaacttggtggt

SEQ ID NO: 68668 - DNA, 1652 bp, Homo sapiens
caacagtgccatgttagggttatgtttttaggattcccctcaatgcagtcagtgtttcttttaagtatacaacaggagagagatggacatggctcattgtagcacaatcctattactcttcctctaacatttttgaggaagttttgtctaattatcaatattgaggatcagggctcctaggctcagtggtagctctggcttagacaccacctggagtgatcacctcttggggaccctgcctatcccacttcacaggtgaggcatggcaattctggaagctgattaaaacacacataaaccaaaaccaaacaacaggcccttgggtgaaaggtgctatataattgtgaagtattaagcctaccgtatttcagccatgataagaacagagtgcctgcattcccaggaaaatacgaaaatcccatgagataaataaaaatataggtgatgggcagatcttttctttaaaataaaaaagcaaaaactcttgtggtacctagtcagatggtagacgagctgtctgctgccgcaggagcacctctatacaggacttagaagtagtatgttattcctggttaagcaggcattgctttgccctggagcagctattttaagccatctcagattctgtctaaaggggttttttgggaagacgttttctttatcgccctgagaagatctaccccagggagaatctgagacatcttgcctacttttctttattagctttctcctcatccatttcttttatacctttcctttttggggagttgttatgccatgatttttggtatttatgtaaaaggattattactaattctatttctctatgtttattctagttaaggaaatgttgagggcaagccaccaaattacctaggctgaggttagagagattggccagcaaaaactgtgggaagatgaactttgtcattatgatttcattatcacatgattatagaaggctgtcttagtgcaaaaaacatacttacatttcagacatatccaaagggaatactcacattttgttaagaagttgaactatgactggagtaaaccatgtattcccttatcttttactttttttctgtgacatttatgtctcatgtaatttgcattactctggtggattgttctagtactgtattgggcttcttcgttaatagattatttcatatactataattgtaaatattttgatacaaatgtttataactctagggatataaaaacagattctgattcccttcattgtgtgaatgtttttttctaaaaaaaatgtggagaaatatggataattatgacatttatccctcattaagctgcctatcagtttgatttggacaacttgacatttatttgagacattaagctactttctggtaatatattaggcatttctgcaatagctctttcaggtaactgaatattattaagcatagttttatcttgctttgattaaacctcttaggcaaaaaatggaacttcataagctaatacattagaaaggggttatgattataaatcagaaatgcttgtgacattaagaaatgaggcacttgtgaaatttctttgaaatagccagctcctctaatgtgtcttcaaaatataaagtgattcacaaaggcatgcatcacacctatttgtagcagccc

SEQ ID NO: 68669 - DNA, 1020 bp, Homo sapiens
ttacatctgcataaccacaagtcccactcaagtgtttcacaaataaaatgacagtcttcgccccaaagatgaattctcctggcattcctacgataaggatagggttgtaggggggtgggaacccctccagaggctcaggatttgtcattagcattgaacatactaaaaacatatgctttgactaaggcaggcttgttctgagcccttgaagcatgtttggtgttcttgatggccatcatcttgaagaaaaacctgaggtgcttccaaaaatattctaggcactaaattagtgaagacgtacactttgtggcaatgagtctgcaactgttccttgaaaacatctgatgaggctggaaaataaggtaaatgattatatatatatatgcttcccctcgctacaaaatatactgccataatcatcctggcttgtgtttccaccactttgcagaaatagttttttttgaaaactgtcagtgttctccaagatgctgtgtcatgtggcttttcttaacccacatctcccttcttgactctttaggatgtttgggattattgaaattcagtttttattggatctcctggtccttcagtctcctgattttccttgaacctctgttgctccttcttaatatatatatatatatattttttggccttctcttctttcccctttccttcaagtgtttttatggccaaggttttgtcctggactttttttctgtttcttacattttctcctttagtaacctgattcattgctatagcttcacatataatttctctgtaaatgaatcccaaatttatatctctagctttgacatttcccctgtccatttcatcttttttttttttttttttgagatggaatctcgctctgtcgcccaggctggagtgcagtggcatgatctcggctcactgcgacctccacctcccaggttcatgccattctcctgcctcagcctcccgagtagctgggactacaggcgcccgccaccacgcccggctaattttttgtgtttt

SEQ ID NO: 68670 - DNA, 1050 bp, Homo sapiens
aagataagaaaacggaagtctagatgatttgatgcaggccacaaatgatagctttggcataatttttttgacaggccctgcagactctcagaaccacttttctggtggtctcttcccatcttcttggtcattccagaattccacaagaaatttctttcagaggatcatttatatttttgaaagaattagtttgcatttgtaaaagaataggggaatagaaatattcaaatcaagtgttcagggtaggttctaccttcctagtgatgtatgcaggggaagagtgtcaatcctgggacagccaaggaggctcatctttccggaacagttggctgatggggacacaaccgggtgctccctcagcctttcattagactggtcttactgatagtcccttgcagtggacttcagggtggcacaagggcatgtaggacacaggtgctctgagctaatccatttaagagattccaggtgtgggtgaggcaggctgtataaagaacagacacttggcatagtctcaggaagttctggcactcacccttgtcattggagtctttgttttattgaaggtgttgtgatcatgatcaaagctttcatgatatcctactggaggttcccaccataatccagataaatactcgcaagcttccttatttaaaactagagccaagatgggcacagtggctcacacctgtaatcctagcatcataggaagccgaggcaggcagatcacttgaacccaggagttcagaatcagcctggacaacatggtgaaaccccgtctctacaaaaaatacaaaatcagcccagtgtggtggtatgcaccagtagtacccagctacacaggaggcggaggtggtagaatcacttgagcctgggaggtcaaggctgcagtgagccgtaatcatacctctccactccagcctggatgacagagcaagaccctcttaaaaaacaaacaaacaaaaaaaaaacaaacaaaaaaacaaaaacaacagaaaaatcagagccaagatttcaagtcttgtcttcccccttttttttttaaacaaa

SEQ ID NO: 68671 - DNA, 1040 bp, Homo sapiens
gtgcacatgaaaggactagcttctgtattggggccctctctcttgcatcccttgctctaagggaagccagccacctcgctgtgagcaaccctgcccaagtgacaaggaactgatgtccctgagtagcaacagatgaggactggggcctgcccgctgccatacagccctgtatacagccctgagccacaggacccagctaaagcgtgtctggaagctgaccgacagaaactgtgggataatcaatatttgtgctttataccactaagttttataactttttacacagcaatagataactaataaatgataagacaaaggggcttataaaaagaaattacatatctggttaagggaatcaggaagggttttgagaagaacatgattttattgataggctttaaatgatagggaaggttttagaggtgagtaatattggaagtgaggatgatatttcaggcagagggagtaacaggtgaagtacaatatttgtttattgaataagagtttttttttaaaaaaattgtctaggtgataggtacaaataagggggtagagagacatctttaagtaaagattgagcttaaagagcattagaagcaaagatagtttgaattaactcaagaagcaatcggaagccatgaaatgtttgtgagtgggagagtgatgtgattatgacttctcttcaaaaaattcatccagcagctgtgatggggtgtaggaacttaggtgcctgcaggaatgccgcagtcatcttgggcctgaatgaatgtggacaatcatggagcagaggtggctgcgagagtgatggcagaggtggaataaatctgtaacctactgggaaagatgagacaatgaccactgaagaattgaacttcaggaaatgggacatttatgggacactgggacatcaaaacaaggaacaaaattagtgacggggaagcagtttcatgggttcaattttaggatttctaattctgagttactgttgagtcaggagggaagtagaaatgtcaatttgtggttctggtgtgaagatacca

SEQ ID NO: 68672 - DNA, 1005 bp, Homo sapiens
gccttcattaatggagtaagagctgacagaattgacatttggtaggctcttgattcaggaataaaagcaaagtgagattttcactttaattacgatcttgtgttttttaccattcatgctcatagattaagaataagacctttaaacagaaaagagtttacatgctgaccctcatgagcagcgagaagtgacgggttggaaaacctcattgcctctctatagccaagcttgggcaaagagatttttacaagggataatagatggggtggctgttcctgagaggaggaggaaggagactgtgtctgaaagcctgcatcaaagggaaagaagagaaccatggaagctctctgggcctgggaagatgccttggaacaaggcaggccaaaatgtctcctgctccgatttactttgtgagtgttttgtccctgtagctgtgtggagctgaggcaaacaggactcacacagttctgacattccagtttaggagattcaaaaaatcttcctagggcaggtggcatctgagcttgggctttcaaggtggttaacgctttgatggtcagacatggggaggttgggaattccatgttcaggctacaggaggaaatgtgtgagattaatttggggactactgctgtccatacagcaacatggcataaagctggggctttagatctatgggaggcatgtcggtgtcctggaaaatatgattaaatagtgagtctactttgacctttttattttctctgctgattgagttctccttaggttgctggaagatactttattttatttctaaccatttagtctcccactgggaaagtatgagtttatgcatttttctttcgatcttaacagagttagaatatgatcatattgaagaatggcatttcttatgtctattcagtccttaattctcccactaatccctgctgttttccagccttattgagcctcagtgttttgccagttccagtgtatttctgtgacccatgagataccaataag

SEQ ID NO: 68673 - DNA, 1047 bp, Homo sapiens
caatatcacctttttattttcttgtgttgttatacggtcatgtgccctataatgacagtggttctgtaagatcataatactgtatcgttactgcacatcttctatgttagatgtatttagatgcaaaaatccttaccactgtgttacaactgcctacagtatccagtacagtaacatgctgtacagatttgtagcctaggagtaataggctatcccatatggcctaggtgtgcaatagctgtaccatcgagctttgtgtaaatacactccatagtgtttgcaccatgatgaagtcgcctaatgatgcatttcttaggacatagctctgtcattaagccacgcatgattgtatttccttatactttggtttctaatttgtatagtcagtaaaaattgattctaaaactcaattttttcatgaatcagattccgaccaaatcaaagagaagaataaaaagttagggcttcattaaccaatttgtttcttcagcaaagtcccatttaatgaccacattttccctgagtgaaaatgcactgcctttctctgaattttattttgtagtcattctaataattgcttgctatatttttctgactcccagtgcttttacatttctcattctcaaaatgctggctcccgacggttgttctcttgaaatagtcttcagctgtttatctgttctttgctgaggaccaggcacctggagaccattgctgcttacgatgctgctcagcagggcctgaggataagcagggagtagcatcaggagaggccatactcgactcagtggtggagtggtggtggcagaattcaggtcttgctttcgccactttgaatcaaagaaagcctcataggtattattgtggaactcaggaggaatctgtatcatttatagtcacagcagaacacagaagccgcactcaatttgtttaatttgaagatagttcagtcaaagggctatttaccaaggtgtggacagtgcacagaaaccacaagaaatgaactggcatcctggagctagtagcagctgggtgtagctaccacca

SEQ ID NO: 68674 - DNA, 1048 bp, Homo sapiens
tctttaaactctcacctacctccttccttctttcttttctaagcctcatagagggcgctcacaaagtgctacttattgattgaggaagatccactcaaaaaacacacctcacactgcaactgagagacgcagcgccaccacctcgggcttccttctcttttccacgcaggaggcggggccaatgtccctcattcaaataaaaaaccagaatttgcatggggaatggctagtccttgagcttattggctgatagcacagtgggcggggtacatagcacgaccccccggagccccgcccatattaatttgcataacggccccggcgcgtgcaagggagaagcgggtttgtttttgaatctgcggaggcggcggcggtggcagcggcggcgcggcgactgaagcgcgcgaaaagctgaggcggcaacgtcggggacggctgcgcgggacggctctgtaggaaggaacttggttccccctccctcagcttccgccccaaaaggtatatgtgaatcccaggggctgttaaaaccacattttcttaaattactattgtatttctgaagagtcaagaccgcattatggcggctgcgggagttgtgtctgcgcctgcgcggttgcggagctgcgggcggcgctgcatgggagcacgtgatcttgcggggtcgggctctagctgcagttgtgcagctggcggggcggtggctgcgcaagcgcaatattcattttcaagatctaatgttcttgttggacgccatttgggttctagatttaattttcctcgttcttgaggggtttctttgtgttaaccttaaattctcacaattttcaagaaaaacattactctaatgttgtactcctgggccgacctcaagctcttctctgttttttcgattttttgaaaaattgtggacttaattttctgtaaaaatgattttcatttgtggttcttgattataatttcagttttaaagtattactggattcaggtttatatttacggtggtaaagatcagcacctagtggtgttctcacgggaagtgcatttattt

SEQ ID NO: 68675 - DNA, 1014 bp, Homo sapiens
atttttgtttgctatgatatgtaagctataacatttatttggtaaatttttctgatgaagaattctagaaagaacatccattaccctgaggcctctttgaagaaagtggaccattaataaaaaaaatctgtttttttcttttaaacactgtactgtatgcatgtgtgtaagatacagttgtgtttgattttttaattgtaagtgtgctcctggttttattaatagttttttagggaaggtaattataaatatgctactgattagtttaaaatggtagtgtcaactatagttaaatcttatgtaacacaattgggggaagttatataagatttgatatgattctcccgttgtgcaaattctttcttactaagcaaagaaacttgcaaatgttttccatagacttcatttgtggttcatatatacaacaactggtttcttggttggttataactctttaagtttgaatcagtctactgtcaaatgaagacgtgcctcttgctttataatctcggttaatttagggaaatttttattgcctaaaacaaataccattagtaaatattacctagatgtaattgaaagtaatacttttggttggtggatttttaaatgacgtcacatatgagatagaatggaggtaggaaagattcttctttttttctcaagagaatatttgacctgatgtaattcttggatctctgaggtcttctacacagaagtatatttagagagcagttgtgtaattttctcccttttatgtttctggagtggttacctagcagcccctttctaccacatgctatttcaggcattttcgagttgaacatacacataaatatttcggttaacaaaagaactttgatctttgatcttagggcatggtacactttacatttccagaaaaatgaaatagtttggtgtatataagcgtatgttttcatttgaatatacagatgattgctttttaggttaatattgaaggtagtaagaggtatttgaaaatgctcttgaata

SEQ ID NO: 68676 - DNA, 1059 bp, Homo sapiens
ccttgttgcccaggctggagtgcaatggcacgatctcagctcaccgcaacctccgcctcccaggttcaaatgattctcctgcctcagcctcctgagtagctgggattacaggaatgtgccactatgcccggctaattttgtatttttagtagagacgaggtttctccatattggtcaggctggctcgaacttcctacctcaggtgatccgtctgcctcggcctaccaaagtgctgggagtacaagtgtgagccactgcgcctggcctcctatgtgcatttttctggggaaaaagtgatagctttcattagcttctcaaaagaatatatgatataaagtttaaacagaggttgacaatgactgtatctgggccttattcttagagcattattgcattgttttatttgctgtaggacggtacacaatttaaatatgtgtttgtagtgctatatcctatataaaatccaatacccactcacaattctattttacaattttcatagctgattttgactgtttttgcagatcaactttaggttcatttggttaattaagaaaaaaaagccagctaatggttttggttacaattccattaaatttacattgggtgaatttataaccttatactattttttttaattcatcggtattacacacttcctgtagactaccaaaaagcactatttcctaggaactctgggagaatttgtggtatctgtgacttttcaggaggatgttttcttggtgcagctataattttagtagggatgaattaggagacaatataaggttatatttctgttttcaatctggtttaggacatgatgacataaaagtagtatcagtatgaagttagacgtgggaaaaataagtcgcaaaataaagtattgtacaatattcgaaatcaaaatccttttttgttaaacacagacaattttttttttttttgatggaggaatttgaaaaggtaccttactccttttctggccagggtgaggcttaatctcataataaagataaaaaatttttattttagtttccttggtatcattaaattatt

SEQ ID NO: 68677 - DNA, 1557 bp, Homo sapiens
cccttggtactgtcctccacaatagtgagtgagttcttgtgagatctggtcatttaaatagtgtgtagcacctctcacctttctcttgttcttgcctctgccatgtgatgtgcatgctccccctttgccttccatcatgtttgtaaatttcctgagcccccaccccaagaacccgagcagatacactgtacttcctgtacagccagcagaattgtgagccaattaaacttcttaataaattacccattttcaaatatttctttatagcaatgcaagaatgaactaatacaaccatcagtgaagatttccttcacctgtcttctaggacccttgttttccaaatgctatgtctttttattgatttattctgtccttggcaggagaattcttagaattctccctgcctgtagaaagctacacattctctagtagctttttgagaaagggtgcatgggagatacaggttttaaagacaatgcatgtttgaaaaaggtcattctatgttttcatgcttgattgatagtttggctgggtatagaactctaggttgaaattcttttccttcagaattttaaagacactgctccattatcttcttcctactattatcaccactgagaaatctgaagccattctgatttcagatttctcctctcagtggaagcttgtagaattggttattagtctttagtcttatggaatttcaatggaacctgcccttgtgtggatctgtttattatggtctgctggcatgctttgggctctttggtctggaaattcttgcccttcaactctggaaagttttcttaaatgatttcattggtgatgtatttgtgtgtgtgtgtgtgattccaatttgaatatttggatggatactccaattgtatcttttcttctgatttgtaattttgtctttttgctaaggttggtttcttcaactttatcatccagtcctattgagtttttcatttttttctatcatgttcttaattttcattccttttctatagcattctattcttgactcaagaatgtaacattttgtctgcatatattcatttttttgaagttttcttattcctgcatagtctattgcttcatgtattttttttgtttttgttttcttttggtctctgtcatgttggaaacttttctcaattgccttccttaggtaactgcataatgtgatgtggaagattcaaaagttgattgccttatctaaattcgacagtttgaaacttccctttaggctgatctgggtcagccattttgggagagttctccagagaccttaggtcttatgtcttgtgctggtcagacaccctcagggaatagtcttccatttttatcaatagagaaataggctctgattgccagcactctgggagattcatgaaggggactagggatctctgcagtcaggacttagtccttctctttttgatatagtactttcaggttttgtttttattttattttttttaagacagaatcttactcttgctcaggccagagtgcactggcacaatcttggctcactgcaacctctgcctccca

SEQ ID NO: 68678 - DNA, 1451 bp, Homo sapiens
acctgtggtcccagttactccagaggctgaagtgagagagtctcgtgagcccagaaagttgaggctgcagtaagctgagccatgattgcaccactgcactgtagcctgtctacaaacaaataaacgaaaaaacaaaaagacttgtgaaaagtgctgatttttaattaggaaaagattaaacattggatagtcatggaattgtttactgaacattagaaattggttgcaagtgtttatgcttctgtaaataaacgattggtctcattacaaatgacccaatataaaacaaatttcttaaaacctgtgacattatacagtcaaggtgaatcctgcttttttagtaatattaataaaacttaaatcacttttgtttcctgtagattttctcagagtcatctatcataataagcacatagtagttcccatgtagtgcctgaaaagtgccctacaaaagttattttttccatcttggattctgaactgcagatgtttttaggccaagactaaaatcttagttgacatattagttgacttcttcctagaaagtaggagttgagatcctaaaaatgaaggttcttttgagatttttgtggtagaaacaaaaacactgagaatttcagctcactatttattgagcaaataactgtgttctatactatggaagagaatggaaaatgaatcaagatgcgatttatatccttatataaagattatttgcataaagatacaagtaatgaaatggtggtaagtataatgatgatatgcataaaagatattgagagagtaatgatacctggtttggggatgtgcgtattaaggagagagtaagcaaagaattatcagtgatagggtaatataggttgaatcatgtagaggatatatcaagtaaactataataggatagtttctttgggataaaggtgttggccttgacactatttatctgaataacagcctaattattttccttttctaaactgtttcatcagacacagaaacagaaccaatgtgtgaagggatggataaagctctgtcagctggtactaagtgttgtctgggttgtatttctgcttgtatcagttttgtgaaattatttaatcttattggagaattctggattttcggattagggatgtccaacctgtattattagtagccagcagctttctcttggtagactatgtttagactaagaaaaaagtagtcaggatttacattggaaaagtatttggcaagagaagggaggcttgaagaagatatcatccatttgacagtgtgttccataatttaaatctttgtggatcagacttcctaaaaacactttgcttccagaatgtaagaaagtgttcattaggcagctctgaatattttggctatgtgtaccatctttccccaccccccaattaaacatagattccagtgctacagtaatatcaattctgttccagcct

SEQ ID NO: 68679 - DNA, 2341 bp, Homo sapiens
aaaattttttttgtagagacagacagagatctcgctttgttggccacgcaggtctcaaactcctggcttcaagagagccttccgccttggcctcccagagtgttgggattataggtgtgaagcactgtgcttggcctaaatcttgcttttaatgaatagtctttgcttgagaatcacagttgtatttttaaagaattaatatggcttggatcaagtttaactttttttttctgatatactgaagttgttacatacattattcattttgcctcatggaaaatacataaggaccttttaaagataagtaatttaaaaaacttttattatggaaaatttcaaatatatactgaaatagaatgagataataaattctgtgtgcccattgctcagcttgaaccattgtcaagtcatagggccaatctccttttagctatatccctattactcccctatacccttaaaactttttagtaaatacctatatttagtgatagatagaacaagatacacaggttagctagattttaggaaggtagactgaggaagagagaaagaaaatgtggattctattgctgatgtgaacaggttctctctgtgcttttgtccttcccttctctttgattgatatgtttctgccaacccacatttgttggagctctttcaaatttgtcttgctaatatatctattagactgagttttactcttttttaaaattcccttctttccatcagggtgcctataattctttgtttttatttgcttttcactcacatcaaaaagttgggaggtctttgtcagggcatgaaatgtaatttgccctgggactaaacactcacctggggatgttaatgtttgtgaccatctgtactactgaagagaagaaattatttttatatctatggtaaattactcaataagctttttgccatcttctagagattctgttatcaaggttcaaaaatttaattgtaggctttaactgttctgctagatttgagcactttggggcttttagattctgtggagaaaatctttagccttctataaattgaaattaacttaatcaatcaagtcattttcaggatttaaacaattttctagaaattataaaattgaaattcttttcatgataaaactataaaaggtaaaaaaaaaaaaaaggccttgagcaaggtttaactttttttttttttttctggactgaaatggaggctttctttcaagcgaattccctgatgtttgctctgtgtgatttggctccatctctgtaactgctaatatgtggcatggatttcaagttgtttgggatctggatgtgcccaaagtctgtattgcaagacgggattcacaggcattatgttacaaaactggcttgctgccttctgttttctttttctgtgtcctgtgtagctgcattgtttgttgcagtatatgcattagctgttgtctatgttcagtttcctgcaggctgacaaagtgggaggggctttgtttgttacatagctgagttttcactgtgtgagttcttgagtgcacattgcagccatcttaattacacttttgtgcaactgagactgtgcagctgtctcaaaatggctgctaacctagtctttgtagctgcttaggcagcaagtatgtcagtgaggagacttgtcacatgcatcaggaccagaggtaagaaccaattactcttttatcttaaacattctcatttttttcttttttaaaaaggaatttaactgagtttacttagaggggtgaacttagagcttggtttttaaaaagttgaaatgtttggtagaacctttaagcctttattatggaaacagtacatagcatggtggggtcaaaggttaaattcctgtaatttctcaccattttatgttctgtcattgccagaacatttgatcaccatagtagtgcatttctggccctaattaatgtaatattccttttgtgtaggctattttagtgtgtttggtatttatttgtagaaattaaaacaatatattatctgaatagattttttttttaaaggatccataagtaagccttgttttgcacaaagactacaatttttctacggttttgtgaggtattgtgtggaagctttttggaaagaagggtaattatataaatcatgaaaaaaaatttttaatactgtccaaaatctttttttttggcattatgggttgcagttctttctcatcatgctgcctcctcccagtatccaactctttgacatttttaatgctgctttgcttctttgttcaaattactttttgcttaagttggcattcagattcagattttgaatttagaaataaattcacatctagt

SEQ ID NO: 68680 - DNA, 1036 bp, Homo sapiens
tgtgttaaaggacatcactatcaacttgatgttcttaatggtgatactgaataagaaaaagttaaagtgtattcaagctatgcagtttactgaacagataaatgaaataacattttataaaagatttttgctcaaattagttgagctaagaagtttatcactgaaaataatgagtaaatttcctaatagaatgttttcttaaccgtacactagattagataatggccgttaggccattacaaactttatttttgttgaaaacttacatctatttacatttattaatttaacatttacagtgtctatgtgaagactaccttgatgatgcatgaaacatgataatttataatcttgatctgacttaaatttgaattccacatttcccagagtgaaagccagcttgttaacattcaaataataccacgacattggtaactctaaggaagtgctaaaagaatgttatgcctttttggaaaatggttttctagttagagttcaactttagagaaaattgaaaaagtgattaacttgcacaggaaacagtgactcccctgctttactgctcttcacactttgaaaagagaaagtgatttgagagaaagcctaatgtctattcaaataagtgattgttttttaattgctcaggttagaactctcacaaagagttctctgttggtgatatgtaacagtctgttattagtcattaatatgtgaatatggaaattgtgaaaacagcacaaattgatttagcaaatcttcatcagtttagtgaaagagggaccttaacactggagagaggtctgaggagttgcttctgcatctgcctgagggaatcttgtctttccttctgaagtaaggcagatacagctagccaactgccagtagaactatctgactcgtgtatccctttgttggatatagaaatacctgtaccatggcatacatagtggaaaacattagtatagaagttaggaaaagattacttctgctctcgtactgttattaagtaattgtgtagttttggataaatatttaa

SEQ ID NO: 68681 - DNA, 1051 bp, Homo sapiens
gctgcagacctaatagttggcagcatagaaagcagtacaaagaattctgattctaggcattttcactttgaaatagtcattttgaagatatactctgtgtgttctgtgagcttcattgacatattgtctgacgttttttggcttttgtggtaaatgggatgtatgctgcacaaactacccaacagatgtgaaccactatttgaaaggaattttaatatgtagccaacctactgtattcttgttttttttttaatgaatatgaatcaaacaagaaatttagactcgagaaggctgacctagaagtctgcattagcttttaatgtttatacaaatgaactaagtagcagtggtttacagaagaggaagtccttttcacagtgtcaagctgcccacaggtaagagattcaggtcctttttctgtgacacctaccccccaggctttatgtttttctctcaccattggaagtttttaaaaatttgtttgtttttagttctaatgaaaacaggattggtagatcgtttaatgttaatattcaggagattttgaatgccacatttggatttggtattttttaaaatgtaattttcatcttctcaaaattccttcacatttgaattgaaatgaactaacagtggacttcatatatgaatattactcatgcatacaatatgttcatattacatagaaatcagttttagatctcttttcattatagtctgttactatattctcacttgtagtgacaccaactggtacacgcagagagatgacattttgtaacctcacttaagtataaagttttagtttaaatttaccactttgaattcacctttacaaatcagagtgcttatgttttcaaatatggctcattgacatacattagataatgtatatttatacatataacttggtcaattttctacttccacccttattctttccatttctctatatttaaatttattattattttaataaagtgatttttaaaagtctaaaatgaatgtattaattaggaattccactaaatttcatatttcttaacctggg

SEQ ID NO: 68682 - DNA, 1033 bp, Homo sapiens
gttacatgatgctgcttttattagccaaccacagtgactatgtaaattgtatttcagtttctgttgctgtgaaagaactgataagatggctgcagggggctccctttggggtatgttttttattttaaagagggttttcatcaatatgtagtaagaagcaaaggtagatttcttttaaaggggcattttatttttgaaatgggaaatcaaactaagcaagctttataaaaggctgaaaaatgactctcttgtgtatttgattaattttaatgctgctctgttttgcctctattaggcaacttataaatgggtatattttattactttttgtatgtaaacatgccagcatgctagtttacaagtctgttaaaatgttctagattattgtctttgctttctaaaagaatagtttttttcatgtaggaattattttagatgtcagttacgtgtacatagcgcatcattcttttagccaatacttaattgtattctatgtgctcaacactacgtagttcactaatattatactagaatacttcatattcttcttcttttgtgaaatgacctcagaagcacatcatcatgatatcagcatatttaagatgttttctaatatcaaagctttggacacttaaaatgtattaattttccctgagatttgacagagattaaaatttgaaagaagtaataattttatactagatactcgataaaaatgtcaaagtgttccattaaacaatacataaatgtagtattagagtccatttataataaaaatttctaaaaggataccttcagagcattggcaaatacagagaatggtggcagaacatgccatgtgaataaaaacaatattgataaaatgtgacaaagccatatgtaacatcagaaagttcaagaagtatacctcatttaaaaacatttatcatcattaattacatataaggccttttggttatagtaccattttataataaaagagaatgtttctgtttcacttaagactttctagtctttctggtaaaagatagtt

SEQ ID NO: 68683 - DNA, 1088 bp, Homo sapiens
tatactaaatttgagcagataagtatcaaagtgagtgaacagattcagtagtctatttaatgggcagtaagcagtaaagcagattattagcatcttttgtgcaacccactattctttatgattttatttttagagtattgcaaattctcaagcaaaatttagaagtgtaaaataaaatcatacagttttcaactgagaatgggattcttaaagaatctaatagcagagttgcatttctaaagaggttagaaattatcagcataaagtgattatttaatatttaattcagccatttaatgaaaataaactcaaattaaaattattttcagtagaaaaatgaatgaaatttttattcagaaaaatgttgtactctcaggcaacagcatgaatataattggaatgcctttgtcaaagatagaaatgccatgtccacttaaaaggttttgcttgatgttttctaagcttttgctttagttttattttgaagtatacttcatcagatattcattactttgaattaatacagcatttgttttgtctatgtgttgtatatgctttttgacccaacaatcgtggtacttagttaagtctgttcttggaaagcagtacagaccctagtttatttaatcaaagaaaccctaccatgacctgtttttcaaacagagcatctagagttatattcctaatgtttccatttcattgttcaccttgattttcacatcctttgcatttttaatagagctcttgccctcatcttcttcccttgttgctgggcaaggtttgtgacactgatgtctgattggttttagactatttcggctttgagccaatcagacagtgaatttcagttctctcacaggactgaaacattgaagcagctgttgatatatttttcctgtggggagattatataaactaagagtatggctgcagcaagctccctcttgggtatgtttgaaaaattacaaggttcatctgtaaggaaggggggaaatgaggtttatttttaaaacttggttattaagaacacctaataagtagtgaatttgagaaaaaaattctgataacaaattttccatttttatttt

SEQ ID NO: 68684 - DNA, 3133 bp, Homo sapiens
tgtccatctaatatctgagaaatgcggatattatgaggctaaagttcaaaagaatggcctttcagtattttgaaatacttaaagggtaactatactacttatattataaacttaattattttgtagttttggaattagtaaggaaaagtgacagcaaaatacaatgcattgtatctgtatcttttgcagaaaattttgcagttagcaaaactttgtaatgatgggaagggaaaaaccttgaaggtgtgaaattttagtctgtaattaaaaacccttaacataatgttttgtattatattatacaaattttgtataattttgtattaaggttttgtattattatatatacattttgtattaaggtttctgtttaaatgaagagtaatttttctaaatagttgatttagttatataatttaaataaaatggctagaataagaaatatgttctaagtaattggcttaaagtgagagaatgaatacagaatgtatcacagtctagaaattctctgacaaagtgctagaatctcaagctgaattggcttccagcaagtaggctaggcttattattttatgcgcttcagccaaagaccagcaggaacacctttgtaattgaaaaagttaggtttactatttgctgcagggaggaaataatgttcactatggggaaactgtaaggcacatcaatcagtaagaggatgttagaaaaaacctagtataggatttgagtatagtataggttgggttattttggggagagattaaggaagtagatccttatcgtggattgggtgacatcagaaagtgggggcacttctattcttgggtatctcaataaattttatctatatagggaggacagactattacaagataaagctgtaattgataaagaagttggcctggtgtggtggctcacacctgtaatcccagcactttgggaggccgaggcaggtggatcacgaggtcagaagatcaagaccatcctggctaacacggtaaaacctcatctctactaaaaatacaaaaaattagccgggcgtggtggcgggcgcctgtggtcccagctactcggaaggctgaggtaggagaatggcatgcacccaggaggtggagcttgcggtgagccgagatcacgccactgcactccagcctgggcgacagagcgagactccgtctcaaaaagaaaaaaaaaataaagaaatagccatcactcatttagtgaggggggatgtttggaattttgtgggttgcacagtgaccttgtctgacttgaatgttctctgagttggttttatgtccaaccagagaacagcatggcttaactgtaagcatcagatccattaacaacattgagccctaactgtgagtatcagttaagtttccaggcatcaggggctgcttttctttctttctcaggccaaagcaaatgtattctaccatatcattcctactggtgatggtaatggtaagtgactatccaatgtgaaaacagtattcctgcctcctgtacatcttagtccttaaagcaattttgttttattctactattgattgatgacattgtttttcttcagaaccacatccttgtgctcttttgtttgcctttattgcactggccagatgttaacaaggaaatggttacaggaaacatccttgttttcttctgatcctatttcaatatcagacatgatatctctagttttcttggtagataacctttatcagatttgagtaagtttccttgtattcttagtttctggcaagttgtaattatgcatcagtcttgaattttgtcaaatgaatattctgtatttgttgaggtaatcctttgttgattttgtccctctgttctgtttatgtggtgaattaaatagcttgatttgttttgtggttttcttttttgcttaacagaagtttatcgtctcagagttctggaggcaacacatttgaaatcacggtgttgtcattgccattctccctctgagggtgctgagggaaggatctgttccaggcctctctcctagcttctggtagttgcttggcttgtggtaccataacttcaattgtcacatggcattctcccagtgtgcatgtctgtctgtgtccagattttcccctttttataaggacaccaattgtattggattagggctcactttagtacccttatattaccttgattaccactgtaaaggccctatccgaataaggtcacattctgaggtactggggcttaagactaatatctttctggggatgtggggtgtgggatgctgcacaattcagtcagtaacatcctggtaccagacattcagtttaggcaaaactcgtaattgtacactctgctgggcatgaaataaagtcagaatgcatcatggcttgttcatggtcaacactgcttgatttttgaatgtgaaatcagccttgtatttttctaagcgagcttcacttggtcagaattcattacctttttaagaaacctacttctaaataagtcatagatgaaagaagaaatcatgatggaaattagaaaatattttaacagaataatgtaaatgacacattaaaatgtgagatgcaactaaagcagctcttagagggaaatttatagctttatatgcacacattacaaaagaagaaagattgaaaataacacttaagcttgaatctcaaggaaaaggatgacatgttaagctctttccaagaaaaagtaagtgaaaagagataataaatattagagtaaataattaaaacaagaaagcagatataaaaccaagaaatatcagccaagtaaaggttcatactttaataagtgaatagaattgataaaactgtagcacaacttaccaaaaaaagagaatacacacacacacacacacacacacacacacacacacacacacacaacctttgtatttattttgaaatttttttgtagtggcattactgagataaaaccacatatctactattcacccacttaaagtacaattcagttatttttagtatattcacagagctgtataatcatcaccataatcaatgttagaacattttcataaccctgtaaagaaatcctgtaccctttagcagctactcctcattttctccagaatcttccaaccctaggt

SEQ ID NO: 68685 - DNA, 2506 bp, Homo sapiens
tccttacatgtttcttaattcttcctcctttttcctttatctctatacctgttatttccctactgttgttcttacacttttatttttctttctcattttcttcaggtacttttttttttttttttttttttttactttatctaccttttttttgcttaaacatctccatactctgtgaattccatattggaaaaaaaaacttgtcccttttccccctaatactttctagttgattttctagtagactatggccatttttgattttgtattacacagatgcagtaaatatgataattagtatacaacaagcagtaggttttctatgtcttaaacattacatgaaatgtgctgcttgcatctcttctaagatcaatttgtattaagtctacaattaggtggcttctgtttcagttattaaactctctttctcttttttcttaaagattcagaatggacagtttagaagaacctcagaaaaaagtctttaaggctcgaaaaacgatgagagtgagtgatcgtcagcaacttgaagcagtgtacaaggtcaaagaagaactgttgaaaactgatgtcaagctgttaaatggcaaccatgaaaatggagatttggacccaacctcacctttggaaaacatggattacattaaagacaaggaagaggtgaatggcattgaagagatttgttttgatcctgaaggaagtaaagcagaatggaaggaaacaccctgtatcctaagtgttaatgtaaaaaacaagcaggatgatgatttaaattgtgaacctttgtctccccataatataactccagaaccagtctctaaactgcctgctgaaccagtttctggtgatccagcccctggtgatctggatgccggagatccagcctccggagtactggcctctggtgattccacctctggtgatcccacctctagcgagccctcctctagtgatgctgcctctggtgatgcaacctctggtgatgccccttctggtgatgtgtcccctggtgatgccacctctggtgatgccactgctgatgatctctcctctggtgatcccacctctagtgatcccatcccaggtgaaccggtccctgttgaacccatttctggtgattgtgccgctgatgatatagcctctagtgaaataacttctgttgatctggcttctggagcaccagcttccactgatccagcctctgatgatctggcctctggtgatctatcctctagtgaactggcctctgatgatctggccactggtgaactggcctctgatgagctgacttctgaatcaacctttgatcgtacctttgaaccaaagtctgtaccagtttgtgaaccagttcctgaaattgacaatatagaaccaagtagcaataaagatgatgattttcttgaaaaaaatggagctgatgaaaaattagagcaaattcagagtaaagactcattggatgagaaaaataaagctgataataatattgatgctaatgaagaaactctagaaacagatgatacaactatttgttcagatcgacctcctgaaaatgaaaagaaggtagaggaagatattatcacagagcttgctcttggagaagatgctatatctagcagtatggaaattgaccaaggtgaaaagaatgaagatgaaacttctgcagatcttgtagaaacgattaatgaaaatgttattgaagataacaaaagtgagaatatcttagaaaatacagactctatggagacagatgaaatcattcctattttggaaaagcttgcaccttctgaggatgaacttacttgcttttctaaaacatctctccttccaatcgatgagacaaatccagatttggaagagaaaatggaaagttcttttggttcaccatctaaacaagaaagtagtgagagtttgccaaaagaagcctttctggtcctctctgatgaagaggatatttcgggtgaaaaagatgagtctgaagttatatcgcaaaatgaaacgtgctctccaggttagcatataacttaaatgttaaagattttttattgactttgatgaactgtttaataaaacattatcataatgttttaaatttattttagctgcagagaaagttgagaatggtgatgactctatagaaagatgtcttaacttcatagaattcagaattagtgtgtgtactctgtgagtagcattgtactaaatactaagaagggagataaaataagtagaaaatatgcccttatagtctggaaatagagatgaagtagagcaccataacactgagataacagtttaagttagtacataattgactagagttgtagcagttctttcttgctatcacttagcgaacaaataacttagaactaaaagcctaatagtttaatctatttgcttcaagtgtaacaaattatattttcaattaatattcccaatgaaatcctgttctttaatattctttgtccaggaatgacagcaccattgttgtaagccagaaaccttaaag

SEQ ID NO: 68686 - DNA, 1068 bp, Homo sapiens
tgaagaagccagatacaaatttgcttatgatctcatgaatattaacagcacgtgaaacagattttctaagtgaagtcttctagtctatattctttataaatgtacttttaatgacattaattttatttttatttgaaattcattaggatatgttaagaataactattactgtgctagttttgtaaggctgatgattaagaattttttcctatacttacggaggaaaaagaataaataattaaagctgtgcatagttaaaaatctgacatgagaatgaatactatattttgtcagaggattcatgtgcactgtgacatttagttacaggaatgaatatgagatgatttcatctaccttcttcatgacacaattgtgaggcagttcttagtatgaagatttcaaggaaattctgtgttcacagtgtgcattgcttgaccattagggagttcttatttagtatattgaaagtcatttgaagtttaaagctaaaagctatataccttctaagatctccaaaacagtttacaaaatagttggttgagaaggctattatgatagaaataatattttgctaaggatggataatatgcattaagagctataagaaaaacacctgagtgtgatcattgtggttttccttctcagatgaattttctagacgaaaacgttctaaatcagaagacatggacaatgtacagtctaaacgtcgtcgatatatggaagaagaatatgaggcagaatttcaagtaaagattacagccaaaggagacattaaccagaaacttcaaaaggtattgtgtcaattataagttataaaccatattgaataaatagcaccactatcttcttctaggtttctgacattattctgtattttattgacataatgtggtttatcatagaaagaaagaacttgaagaaagtggttgagcttttaaagtctattactggccagatgtggtggatcacccctgtaatcccaatcctttgggaggctgaggtggatggatcacctgaagtcaggagttcaagaccagcctgaccaacatggtgaaactctgactctac

SEQ ID NO: 68687 - DNA, 1043 bp, Homo sapiens
agctggatgttgtggtgggtgcctgtaatcccagctacctgggaggctgaggcaggagaatcacttgaacccgggaggtggaggtggcagtgagccgagatcatgccacttcactccagcctgggtgacagagcaagactccatctcaaaaaaataataaataaataaataaataagtctattactatccttgataatttaattttaaaattctttctgacttctttttggctacatctttttttttttttaaaaaaggttatgattatcaaaacaagggagagaaggtaacatttttatttatttgctttggtaacaaaactgaatgttgtttttcagcttttctttttccttctcacattgaactttatcttattgtgaaaaggaaatgttagagttttaaatattagcattttaatctttataaagctggtttcatggttataagtctacattctaaactctttattgtgtacttgagggttagtataaaagtggtagagacagggtgttaaaaggactagagaaaggagtatttagaatacggagtttgaaattccccttacatctgtttgactagagatagaaataatgaaaatattcagtattttatgtttttcaacatgtgttcacaaatgtttttacaaagcttttcttagagaggaatattaaacttcgatgataactagtttttcaaggtcttatatatttaaggatgacattttacaatcaatgttttaggacaaaattctttcattaaaatatagcatacatatttgcactttgtagaaaaaagaatagtgaggctgtagaaactctcagtgttgtttttttcccctagtttctttttatttgacatatggagataataatgcttattcagtctttcttacagagctgttagaattatgaaggtagctatgtgaaagaattttgaaaactgaggtttcctgagagtttacttctttagaacagtgttactcaagtatggttcatgggtatgtgccaatgtctttgttgtggacccataatgagaatatgga

SEQ ID NO: 68688 - DNA, 1975 bp, Homo sapiens
taatgggttttttgtttgttttttgttttttttttgagacagagtctaactctgttgcccaggctggagtgcagtggcgcgatcttggctcactgcaacctctgcctcccgggttcaagcgatactcctgcttcagcctcctgagtaactgggattacaggcacgtgccaccacgcctggctaatttttgtatttttagtagagatggggtttcaccattttggccaggctggtctcgaactcttggccttaggtgatccacctgcctcggcctcctaaagtgctggaattacaggtgtgagccaccatgcctagccaaggtaatgtttttatcagattgttaaagactaacagaatatgtaatttaatttgtgaaaaagtaatatatgagcattcatttacacttctgttgaaagtgtcacagtaaagcctatacatccatccatatgtagtattggcaagggatcttttatgacttacagatatttccactttataattctcaatgagaaaatcaagtgtgattacaactgtgttaaaaaaataacaaaacacaggcttacatattcaggaatgtactggtaagtgagcaacactcaaaagttcgaggaagaaataggctaacctaattaagagtgtttacatctgagtactgaatttaggggtcacttagttttagtcataactgtattttccaagtatatagtttataatcaacttaatttattttctttactcagctatcttctgaggatcctgttttctataggtttctttttatatattcatggtttttttttttaatgctgtaatactatttgatttccattcatttttgtcttttttttttttttcaggccaagatagccaggttaaccaaacgctttgaagcagccaaagaagatcttaagaaaagacatgaagtaaaatttttctattcttgcataattaatatttagcactaagtggtaatcttaggaaatgctgaattaggaggaaactgtattacaaatctgaaatttgctttcatactgtgtactcctctatgtaatttctggatcttcagccctagaactaatgaacccctttcaaatcctcatttactattctcatatatcaacatttatattctattttaggttatgcaattcttttttttttttttttttttgagatggagtctctctgtcgcccaggctggagtgcagtggcaccatcttggttcactgcaacctctgcctcatgggttcaagtgattctcctgcctcagcctcccaagtagctgggattacaggtgcccaccaccatgcctgactgatttttgtatttctagtagagacggggtttcaccatgttggccaggctggtctcgaactcccaacatcaggagtccatctaccttggcctcccaaagtgctggaattacagacatgagccattgtgactggccccttaggttatgcaattcttgaagctgtattttctgtccatctttaaaattaggcttcagggatttgtcttaccttgtttctttcattttgcattcttgtcagattcccagtatggtctcttactattttccccaaagtattttagtattctactgcctgtagtattcctgttctccccttcctttcttccccatgtagtcagtcctcttttatgctttaattgtaatatacagagattagattaagtcactttattgacttaaacagtttgaatattttttaaagtatacaattaagtccaaacatagcataaattgacttccatagtctggcttttgcttgttggtgtttccttcatttttcctttgtttatcattttgccactcttctgttatttcctttattattcatattttaatatagtactttgtatattgcattatagtttttagttggatttattttcttttcctcctgaattttttttgtttttaatttttttatttgaacaaggtccatttctt

SEQ ID NO: 68689 - DNA, 1032 bp, Homo sapiens
tagtctgtctagtttttaaaaacagaacaaagttctactttctttatttggtcaaagaatcttgcagtgtaatcatggtatttatgtagaaataagtgtttggtgtacttggttagtatattttctttttctgcttcattatattgttcatctgtgaataatacttttgctaacttattataaggcattctttggtcactatatatttctttaaccacttgtcttaaatagtattctttcaagtaattgagaaatgcttctgttaagggtgagaaagactaatgtctgtatatattaggacctacttttggtattcaggttaagtactgataacagacattagaatacaagagttaagagttaagagttaatgccacagaccccagcatttagaagtctttgtgccagctatgcctcactgtttttgcttgcagtttaggattgtgaaacccaagtctagccaccctttttcccctgtgggccactgcttattctagatatcagttggtattccctgagtggcatatctattgactattggtgtgtatatgtatttcatagaaatgcaggcacagtgagacagatgctggagtccaaaagaaatgtaagcgagagtgcaccaccatcctttcaaactcctgtgaatacaggtaactttttttttaaataccaaaatacattttcttaggaattaaaggctttggttctcttttcttacattcttttgaggttgaaatggattaagaaattgggcacattggtctaagtacaaaaattttgttaaaaattcaggatcaaactgggtatggtggcacatgcttatagtctcagctacttaggaggctgaggaggattacccaaacccaggagttcaagtcagcttgggcaacataatggaatccagttggtctcttaaaacaaaaaaatttagggtcatagataagtatatgtgaaaatacagtatagatattcaaatctctattgtagtagttcacaaactttctggtctctagatccctttacaatcttaaa

SEQ ID NO: 68690 - DNA, 2219 bp, Homo sapiens
agagggaatctcccctcaatagttcctctcccaaggaattcaatcaaacttgatccaaagatacagacatggttcaaataataaaatacgatgagtaagcctacctgttattcattaatggtcatgactctttttagatttactatttgagtttatatattacttgtgttgtaaggcatttataatgtttttaatgtagtttcaaaaatatatatttttacttaactttttagtattttttatttgtttactagttaggtactctaaagtgattatagtaattttcagagaccgttttgatcctcagtagtcttgcatattaatcatcgatcatgtgctgtttttgtaatttactaaaactacatgcaaaatgcttctatgaatttaattctaaattaaattttggaatttaaatctggaaaaaaatttcatgataaaagactttacagtctttgcaatgtattacgcaatgtatttaatttgtgtctgtcatattttcttagttgataaattaatataaccatttaaactgaggcttctgttttctttctatagtatcttcaaccaatcttgtcactcctccagcagttgtcagtagtcaacctaaattgcagactccagtgacttcgggttccctcacagcaacgtcagttcttcctgcacccaatacagctactgtagttgctactactcaggtgcctagtggaaatccccagcctacaatctctttacagcctttgccagtgattttgcatgtacctgttgcagtatcctcccagcctcagcttctacagagccatccagggactttggtgactaatcaaccatctggcaatgttgaattcatttctgtgcaaagcccacctacagtgagtggtcttaccaaaaatccagtatccttgccatccttgccaaatcccactaaaccaaacaacgttccttctgtgcccagtcctagtattcaaaggaaccctactgccagtgctgcaccattgggaacaacacttgctgtgcaggctgttccaacagcacactctattgtacaagccacaaggacttctttacccacagtgggcccatcaggactctatagtccatcaactaatcgaggtcctatacagatgaaaattccaatttctgcatttagtacttcgtctgctgcagaacagaacagcaataccaccccaagaattggtaagtcaccatgtaggtttaatactagaaatgcaagcatcttaatagccttgtaatgattgaactttttttttctaagtggctagcgttattggaagtacaaaataaatagaattttcttgattatttttagtaattttttagatacctgagagaaatgatgttgctaaaatggggcttgagaggggttttattttgaattagaagttagtatctgtgttttatcttttagtaattttcctaagtttggtgaatttttaatttatggctttgtggcaagcattatgagttacttttatgatacatttgccagcaatatcgtttaaaacattttaaagtatcaaatttacataatatatgcttttaagaaaaaaagacacgtttatgttccttacccatttggaaaatcctttgtgcactcactcatagcttccaaatttgaacaacttaaaaataagtttttctttcacatttgctataaaatgtttgagtccttcttgttttatcttttccgtgttttcccatatgacatattatatgattgtttgtattttacttagaaatattgcaaaaaggagcacttgattatacctgtttaaaatctgccaaactctgtgtcttcctagttcctagaaagagtttgttttgtatgcattcttgaacttgcttattcttcatttctgacttcacatttatgtgcactacttttggaaagtcatgcaagggtaggcatcatgtgtctagtaaaattgctacagtatttttcttattgatgttgtaagtgaccatgtaatataggaaacaaattctaaagtacaaaattacttttataagtgagatgtacaagccttagtttttatttgtcatatagccattactagtgtagttactccctaagtgttttctcatataaaacaatgacggtatttcacagagttgttaagaaagtaaatgaatggcagatcaaaattaatgttggattgaagctggatatcactcatcattatcatatttataagaataaa

SEQ ID NO: 68691 - DNA, 1344 bp, Homo sapiens
ggctttttaggattcccaaaacctaaactgaaaccaaactttggtacatctctactacatttagtagtttgtgattaattaattaggttatataattaaaattttctaagctctatacttatgtgggtattatgtttacttaaaagaacatatgctatatgttcatgcatttgtatgtattttattgtagctaagtatatccttatggattttaaatcactattttctgtttatagtgaggtaaatgtcctaagggcttggaaatttaaagctcaaactatagctaatttcattcattcacaaagtaatgaatgtctgtattatcttaggttctttagatacacagaaatgtataaaatagtcactatgatctcaccaagcttacaatcaaatagggaatgtggtaattaaataactaattaattataaatgtgatgagtgttagaatttgcaggtttttgtgagaggacaaaagagaacatgggaaatctggaaagatatgaagtaatgaacagaagaatgggggaaatacggttaaagggtttttgtagggggtaatgtgacatccatgaaccctggttacagtatggagaatggtttggaaggggtaggaatagtgttaggaagaccaattaagaggctggaggctcttgtactgtacaagatgagagatggtggtatgaaaaagatttaaaagttatttaagaggtagcattggcagtacttggtaattaataaaagttcagatgtgtggaagagatggagaactcaaagatgactcagctttctaagacattgttaaatgctgttccatttactaaactagatattaaaaaaagaacagatttgggggaaagttatatacaatccatatacaatgtactctctcagatttcattaaacatcttgttctaagactatataaaactagagttggctaggcatggtggcttatgcctgtaataccagcactttgggaggctgaggcaggaggatggcttgagctcaggagctcgccaccagccttgcaatatagtgagacccccatctgtacaaaaaataaaaaattagcttggcatggtgatacatgcctgcagtcccagctacccaggaggccgaagcaggaggccgaagcaggaggattgcttgaacccaggaggtcaaggctgcagtgagccatggtcgtgccactgcactccagcctgggcaacagaggaggtccctgtctcagaaagaaaaacaaacaaacgagagtttaaacacagcaattatttcttcaaccatttcttcaaggacataattaaatgagcgaagtgtttgccttttttctgttcatacaattat

SEQ ID NO: 68692 - DNA, 1023 bp, Homo sapiens
ggtcagcttggatgtgcagttaatagcatagcataccatatgatttcatagtataccataccatttttttagggcaaaaatttagattattttctataacccaattctagctttaatgattgcctttggtgttgtggtagattaatattgataatttagagtagtattgatcaacattttaaatgtcacaaaatgaatagtgtttctgtttaatcttatttgctctatgcaacagatagcttagtttttttaagaaaacgtcttgaatttcttttgaaaattatatttcatatagtagatgtttaacacatgagtatcctgggacatttgtctgacaaactctctttattcaggtacagccatttaagggtccagattgaaccaggttactcattagtctcattttacctcacttatcatctcattttttaacacgtatatctgccagagttttctttgtaaaatgtagaagttttgtttttcagtgtggaaaagccactggcagtgattcaagtggtgtcattgatctcacaatggatgatgaagagagtggagcttcacaaggtacttcaatagtaattgtactaagcaacgttttgataccattttttttgtcttaatacggtacagtattctacaaagacagatgtttatggcattatgcttggtttatttgtgttctttttggaatggaagttttttagattagaattttaaaatttggccaggtgcagtgtctcacacctgtaatcccagtgctttgggaggccaaggcaggaggatcgaggcaagaggtcaggagtttgagaccagcccgggcaatgcggtgaaaccccgtctctataaaaaatttaaaaattagctgggtgtgatggcatgtgtctgtggtcccagctgcatgggaggctgaggcaggaggatagcttgagcctgggaggttgaggctgccgtgagctgtgtttatgccactgcattccatcctgggtgacagaatgaggccctgtctcaaaaaaaaaaaaaaaa

SEQ ID NO: 68693 - DNA, 1052 bp, Homo sapiens
agacttctctgagcctttactatgctaatttataatgtaaatctccaagaatgatttaagatataaagtatttctcaaacttacttggctgtgcaaaataacgttcagctacatatctataaaactggtgattattgcacatggaaaatataatatcatgtgctgagttacttcttattatcttaaagacattacttttttctaaaacacccaaatattttaaaaataatattttggggaatcagtctagttgagctttggaaaacaaaagttaaatagctgtacaactgattatatgacagtaaagtcggttttgttatttaaaactgaattgagaaatgtatgccatccttcatccgggttgaactcaagccagtatgattattctttaaaagtttcaaattatctctattgctttcacttatctctattgctttcactaatttttaatagacagccatgactattataatggatccctaaagaaaaaaataaatacaggtttttgagaggacacaggtaggcttaattctggattaaaaagtaaagtcctaaaagtttgttttcagtgctctcaccatttccctagcatccatgcctcatggggtctttttgttgccccacctttgggtctgtctcaaattctcacattcctaaagcacactgttttccaatggcattaaagtatccattgttaaagccttgggttttatttacatttagtgtggaattctataggacagaaattgatggggattattttggatagaaggacttttgggtcacaatcttcatagtggtttcctgtttttaagagttttttctgagatgcaaatatttatttcataggctattgaagaccttttttgagattagtcattctttgactattttaaagactatatagtgatgataagcaactatctgttatcaaagaacctaaataattgtagtaattgaaattcaagatcacagtgaaaactcatcagtttatagatatttgtctagaagagtgttcttcctataggtaggtagattatatatttatgcaa

SEQ ID NO: 68694 - DNA, 1313 bp, Homo sapiens
ggctcactatagtccaggaaccaggccgaactacagcatgggccaggtactgaataaatggcaggaatatagttagggcagtaggtggctctaaattttctctttttgtttccctggtgtatgtcacagcagttttctgtggggtgaagtgagtatcctcaaccaaggagctgggcatggagaaaatgagaggaacctcattaatacatggcaaggatgacttattctggctttctgtcctggttgaaaagatgagactgcagagatttttatgaagatactcccagtttgtctgtcttttgagtcacactgctccattatggccatttaccttttacatgtggtacacaaccagtgttctaggatttttgttcatagttctcctggtaacgatccatttatttctccctgtgctggacctcctgttgcttgtgtctcgtgtttttctctttattttctcacgtactggtggcacatattctccattgactatttgagaaagggtttgtggtagttagaatttttttttagtgcttgcatgtaagaaagtttttttatccacaggctgattgatagcttggctgaatacgaacaggacctctaggttagaaatatctttcctttcgaatcttgaaaacattgcttcactgccttcaaatatttaatcagttttccaccaaatttacaatagaattatcattttatcctgtaatttttttgtttgtttgtaggtgttacagttcgagtgcctcaaacaaccacatatgttgtaaacaatggactaaccctgggatcaacaggacctcagctcacagtgcatcaccgaccaccacaagtgcatactgtaagtgttgatgcttggttttgcaaaattctcaactgtagaggtataaaatattattgtatttggcatttttctttaaaatggttatatccaagggaagtgttaggtcttcctgctttttcagaagtttatttctaaaaattgatcttaccattatgaacacatagttcctagggatgatgatcatttagaatcattgagtttgcttgtggtgtacagtgtacaaaaacaggtccacagttggggtatatgaagtgaaatatagaccatttctaattcatagttaaattaaaaaggacatttttcatttctccatgtgttaattttattctttcgttctaaactatgccacatctaactgctacattgtcatcaattaattgttctaaagaatccaatgatattgggaattcattagttaagaggtaacagagataaccaaagatttctccttagatttagcctccaa

SEQ ID NO: 68695 - DNA, 1401 bp, Homo sapiens
ttgccaaatttgatatggtatttggtatttcctagaattcttgatataaaatgatacttctacgtatgttctctaaggtgttttaattctaacattctaaaatagttctttttgcaatcatcattaatcagtgtgacctgtttcttcaggagcccccacgccccgtgcacccagcacccttaccagaagctccacaaccacagcgtctgcccccagaagctgccagcacatctctgcctcagaagccacacttgaagttagcacgcgttcagagtcaaaatggcatagtactgtcatggagtgtcctggaggtggatcgaagctgtgccactgttgatagctaccatctctatgcttaccatgaggaacccagtgccactgtgccctcacaatggaaaaagattggggaagtcaaggcacttcccttgcccatggcatgtactctcacccagtttgtatctggtagcaaatactactttgcagtacgagccaaggatatttatggacgttttgggcctttctgtgatcctcagtcaacagatgtgatctcttctacccagagcagttaaaccttggagcctttatattttcctcttttaaaatttccaccttttggtcttgtttttaatcttgtgcatgataccccatgtaaaatccaccttgtgcaagatttcttggacagatgtgtgtatacactacatttgtttataaccagaagcaaaataaactcagcccacaaagctagaatcttttcctggacagtttaggctttggggtttggaaatgtaaatgtgtaccttgctttagttttgaggctggggaatatgtgtgggtgtttatgtgtgtttttccttatgtaggtgttattgcattggagtctcccattttcattctcaaatttacctcttaaagtacgaagtaagtagatcaaaggatttgagatgtgtaactggcatgattctgcttttgaaggatctatagtatcattttagttaagtgggtcaaacagaatcaaaacaaaacccaaagaaataaataaaaaacaaaatggctaaatagtttaaaataggttaattcgaacacaggaaaggatctatttgttgtttcttttgtctggtctcctgagttgttaattaggtgaaaaaagatctgcaatggccccctccctttcctaatctggcttttacatttattttgtgccttaaagattaactacaaagataaacatggccaaaaataaataaataaatatggccatatgtccgttgttgcttagtcttcccttgcagccttttacccttgatttctccttcatctctaccaaatatagcacaactcctcaagtaattttttttttttaagatggagttttgctcttgttgcccaggctagagtgcggtg

SEQ ID NO: 68696 - DNA, 1811 bp, Homo sapiens
ataatttaggactggagggctgagttaagttttaggaggagaatgtggttgagaatattttgaaaggaatttatggagtttgtgaaataacttcgaagtcctcttcctttacaatatttgaattcatatttgtaccttctcaaaatagtgattcatttttcctagaattacaggagggagctcttttactaatgttgttttgtttgcaactttgatggcttataataggaagtattctagttgtaaagaaaactctttagagacttttgactggtcagtatactgaggtgtgagatttgattcatgatgaagaaagcctatagattgccaaaaaattaattctccaaaccacctttcactctcagaaaatgagaccacaaaggagtatgctataaatcaaatttgccaaccaattatgtagatattactcattctaggactaatgatgatggtaaagaagttgccagtgttatggcaatgaaaatttcagaaaggaggagttgatgatcttctagatgtatatgaacacctgtctatatctgcatgtatatgttttgacctgcagtggttgcaatgttgatatgtgttcaagattattcctgtctacaaaactgaaggcccatgttcaaattgttctttattgggtgtttttatggtcacgtggtaacaattttcttacctaacctacaaaaggttctcttgatgaacatttttatttatatttactaatcttttttaaaaaaagctttcatagcattatataatcagatgaagaaagcccagtagaataaaaaaaaaattcattagcctagcctatattatgttttctgtcaaaggaaaacaaattctcaaataggaattctaaaaatatttactaaagtaaaataactacttaaaatgttttattccagttggaaggaaggtacagggagaaatcgcaattatttaggggagaagtatatttattataagatggtgtcctcaaattagcctaccatggcacgtaggggcagcagctatattagatttactagaggtgctaagttagaacactaggcttttattgaggcaggttttaatattgatagatgctttttgtttggtttgtttcttctgggagagaatggaggacttaagtagaagtagctactgataacagactttctagtagcagtttccactccacggttacctttttagtttcatagtatcttttcacaaagtattacaaataagctagattctcccagtttgggaatgcaagtttgctacatttttagcctggcaatatttgtgtaggtattgccttattggaaattctggaaacctgatactgcaacctgcaatgtaggatgtttgtatggcatttaaaggtaatggtgatgtttattattctatactttgcattctgtgagagtaattttcactctgtcttaagtgtgagtaagcctcttctaaaaatcttgttcttgccaagaaatttataaatcacatacgaagacgtctgttgctaacagttaactttatgaggtaactatatccttctatttctctggactcatttttaaaaaatatgccgaatactgcatactgtttaaggtagtatataagtttatgagagaagtggagagctttcttccttgaaaagtcggtatttgttgagataccatttgcctcacagagaggtgttccccactcccatccccattgccagataataaatattttgagaaaagtgacctaaaacagctgaaatcttaggtgcatctgtctgcagacctccttaagcaggctgtatcttacaattccct

SEQ ID NO: 68697 - DNA, 1565 bp, Homo sapiens
ttttgttgtttgctcttttgctttaaatattctccaaattaccatttatgcaacatggttagggttaatactgcatggtattcatttatcttgtttcatgaactttccagtactgtacaaggtcaacaaagtaatgcctgtggtatcctcatctctcacttttttactctgtgattttagcacagtaaggtactgcaaagaccttccttccaaatgttctccttgactttatttcttgggccaattcagtatcctcaacatcctaagattttgttgttttatcactgacctgtggttggcctgttttattctaatttccagaaaagtcaagtcccagtatttgcaatatcaaataactctaaaaccgatgtgtgattctaccttccttactatttttactgggcaaatgccctatttttttaattattattatttttaacttttgggacacacaaaaatcagcaattctcatgaagcgtttgttagtgtggcagacttgtctaattcctgaaactcattcatccccttgagccagccaatggggaggaataggataatgcaaacacatgttttgttttctcattttcaaataatttaccatgttaaaataaacttttctttgttttttatttgtagagtcagctaagtacccatatttaaatgccgtctttattatttttttgaggtctttgtttttgtctgtttttgttttgttttgttttgtaaataaggtaactgggcaatcaaacaccttttggggattctggctttagtattttatcagccattttaaaattaaatataaaaatcctttgtaagaaacttgcatcctaatttttctttattgcaattgaaagtgtaaataataagacaatgtaagtaagaccttcctaatgtctaatacaaactgggctccagcaagtggccctatttttattagggttttgaaggtttgtgtgtgtgtgtgcgtgcgtgtgtgtgtttttcttttttaaatgtatagtagagtggtgtctgtataagtgttacctgtagtggggttttgtccagcaagcctgaaatttatactttgaaataaaactactgggtttttaacattctgagtactctgattaattctggttattcacccttgtggctttttttctttctttcttttttaagaatcttccaccttgtttagaatcacccattacatactgtatggtatggcttatttaatctacttggcaattccatggcactcagatcacatgtaactctccagtttcgaaagaaagttgctatgcagggttgctgccagattgtataggtgcttttagcttataggaggcaacagtaagctttactgtattgtatgcctaacctacatcacaaaaagactcaacttatgcctgttaatgaccagaaaaatcactaactacaatcaccaactactactagaggttcctttgaaaacgaagctccagcatcccctagggttttgtcattaggcatattcatccagggaaaggggaaagagcataggaggagtacagattcttatgggcgaggcctggaagtgg

SEQ ID NO: 68698 - DNA, 1051 bp, Homo sapiens
cgggcggatcacctgagatcaggagttcgagaccagtttggccaacaaggcaaaaccccatctctactaaaaatataaaaattacctgggtgtggtggcccatccacgtaatcctagctacttgggaggctgaggcaggagaattgcttgaacctgggaggcagaggttgcaatgagctgagattgtgccactgtactccagtctgggcaacaagagcgaaactccgactcaaaaaaaaagctaatattgtgactttggtagtgggagagtggggaaggccatggatttaattttttgctgaacgatgattttctaaaatgtcctcctcctccctctttccaggtggcagatatctacctagcatctcagtacacatcctatgccataagtggtcccacagtacaaggtggcctccctgtttttcgctgggaccgtttcaacaaaactctacatcagggcatgccagaggtctacaactttgattttattaccatgaaaccaattttgaaacttgatataaaatgaaggagggagatgacggactagaagactgtaaataagataccaaaggcactattttagctatgtttttcccatcagaattatgcaataaaatatattaatttgtcactttcatttcccactgactttgttgtttttacagtaagcactcactataaggtagagcactgtagaagaaatgttacatatatatataaataacactaagcttcggcatacatgctaatacacaagagggtatggaagaaacagctccttcattcaccagaattcatgttctcctttcacgcctgctcacacagaccacatctcccagtgtccctcagatagttgtgccacatgacaattctagccattggaacctgagacgagtgccacttccaggcctcgcccataagaatctgtactcctcctatgctctttcccctttccctggatgaatatgcctaatgacaaaaccctaggggatgctggagcttcgttttcaaaggaacctctagtagtagttggtgattgtagttagtgatt

SEQ ID NO: 68699 - DNA, 1172 bp, Homo sapiens
tttttttttcaattaaaaaatgtatagactcttctctttcattttataaaggaggccaaagctctatttattgagtataaaatgtacaatattagttaaatacttaaataacttcttataattccttctagtacagagatgataaacttacatggattctgtatccatagggaagaaaaggagttttgaagaatgattcttgagaaatatgctacgtactgttgtatcgcatgatatatttcatggatgccgtatcagtcactttcccttggtcacgccggaaaattttggctcgtggagctaaatcataagagtagtccaagcccagcttctgaactaacagtggatagccactccagttgtagattttttcatggaaaggaacattgtaggagggccaatatcctgatttggaatggaagggaagtaagggagggattgacagggaaggagacagaaaaggagagagagcaaaagaaatgttatccatgttcatttattttgaaaatgggcacaggcatttaattacaaaataatgtacagaaaataaagctttgcatgtgaaccctggcagccaaacagccttttaaatttcctaaatcagcacagctctaggttatttcattaggggaagaagagcatcagaattctctggttttcacccaaaattcttaatctctaagccaaaaaacaaccatattctctatagagcaaaataaagtataatgcaaggtggtctggggagctcatctaagtggatttagttactgaaatgccaagaaatggttgttcacagtgtggccctataaaggaagatgtcaaatggtaatcatgaagtagtggaagaacatagcactgggaatagaaagcctgaattctaggctcagggcttaagaatcaggtcttaggcaggcaacttcatttgttttgtttctgtttctttttttttgaaagacgtcaatggggagggagaggagaagtccataatgtaaggggattggggatgatcttttaggttacattaggcttttaattcctttgactctaaacatttataaaggctcagcttcattcaaagcttcatagtgtgtgaaggccacatagcctactagtcactgagcaccaaatatgtgacacagctctctcttgtaaaagcagaatttcagaaacat

SEQ ID NO: 68700 - DNA, 1091 bp, Homo sapiens
tctccccctactatgtcttcagaagacccacgtgtgaaaaattttaaattttaagtaattgctttgaaatctcggatgtaaagcttttcaggtttttatagagtttcatagtaagtcaggaattccgtttgaaaaaacagaaggagggagggacagaacaaggaacgtgcataggatctggcctacttttatttaagcgctgagaaaaggcaatataaattcttttagctcatactgttttaactttaaaacgtatcaccatgaacctttctccaaacatcagaaaaaattttcccaaaagagcaaacaacaaaaaaatcaggctggtttcgctgactgcttcctggacttaacaactatagcatgtctccagaggtggggcctagagctccgcccacttttttgatgttttcaaacaggtccgcatcgagagactataagccctggtctgcgactggcaatcacagtgggcagcccgattttctgctgagtaggcgctgtgatttcagaatgtctgggcgaggtaaaggtggcaaggggctgggtaagggaggcgccaagcgccaccggaaggtgctgcgggacaatatccaaggcattacaaagccggcgattcgccgtctcgcccgacgtgggggcgtcaagcgcatttctggtctcatctacgaggagacccggggagtcctcaaagtcttcctggagaacgtgatccgtgacgcggtgacttacacggagcacgccaagcgcaagaccgtcacggccatggatgtggtgtacgcgctgaaacgccagggtcgcaccctttatggtttcggcggttgagctgtccccacagcttctctacagactccaaaaggcccttttcagggcccccaaactgtcacagaaagagctgttaacacttcctagataacgggtaaatatcaaccctttgatgtcgccttccggataccggaaatgggatattcgcggcccgagcatctgctcgggattagacttggcgggcacggggagaactagacctcaaggagggggttccgcctgtgcttaggtacgaccctggaggtgccgcgcaacgcagtagtgacctc

SEQ ID NO: 68701 - DNA, 1133 bp, Homo sapiens
gctatttactctgtggttttgtcatatgtaaaagtcataacacctgttttaaggattgagattgttcatttactgtgtgccacatattagacaataaatggaaaaaagtaccatgttcaatgggggtatgggtttatccttataggttaaattataggtaaacattaataggactttttaaaaaatgcctcattgttagaactactactcacagttaccacttggggtcagtggaacaaaatgcatatatggttttgacatttgagtctaaatttcttaaagggatgaggcatctgagggattgttaccaaaatgatgaagaaataaggacaagggacatcaagacattcataagaaaaagcacctttgccttcccctgggaagattcacaggaatctgtccagctcttattacatgatgagcaacatagacaagatacgaggcattgtaactgccctgtcgccacccgcctctcccaccactacccaaaggattcttagcatcccctcacatactctgcctgcctcaacgttcagtcagcccctcaccatttttgtttttgagagttttttttttaacccgaatagtttacgggctgtttaaaatgcatactcctacaaaatcagctcagcccatgatccatgatgaacaaacagtagttcttgctgatgtgtgattatgaatttaaaaggccagtatttctttaagcataagaccatatggaaaaaggcctaagacaaaatctgatgggaactgaattccagtttttaatagagttataatccatagttttatttacacacaaacacacacacacacactctttcctgcagagataagcaagccgttcagtgtggctgtggcttggccaggatttgtttgatctttgtttttcctgcagggccagtcttgtctttgtgtccccgaggactggtctgtttagttgtgcctgcctggaatcaaaaggcttagtcaggccccataattggtgatgactggcatactatatgcaaacttcacaatgccccttccagtggttgaaaggtcgcataccatgctgtgtaagaactttagctctctgcaatgagacttaaattcagattcactctactccttattagttatctgatttt

SEQ ID NO: 68702 - DNA, 1028 bp, Homo sapiens
aggggctactgctgctccccaaagaaagtcagaggatgattctgctgtgcctcttgccaaagcagcacccaaatctggtccttctgttcctgtctcagtacaaactaaggatgatgtctatgaggctttcatgaaagagatggaagggctactgtgacagcttttgatgccagaaaaggcttctgttcacaacagtggcccatggagaaagaggctcttattaaacttagatgaaagagctgcttccattgtcagggtattttctaatttcagttcaaggaatatcctaaaatttagccttgttcagaatttactgcacataaaaaagggtatttcatccagaatagatcagttattgaagcagtgctgctaacatccattccctttcataccaccattttcaccctgtttcttcccctcctccagttctttggaaatttgtgatcgggggatcttagttgcttatttgttttgactcttgtgtgctgtgggcactggagtagagatttctggagaaaaaaaaacagtttatttcatcttgccttttgtgtttgagttatttttaatattttcctgtaaatattttgtaatattttacttgtaatgaaatggatcacaatgtcatttcctaatacaaggcaggatatgtgggaagaatatgtacaattatttgattaaaattatttcccactgacctaaactttcagtgatttgtgggaaaaataaataaatgttctacaccaagatactctgtgttactgataatatgtaaacataatacctattttatggacagaaaaagttaaatatttaaaacttgggtctttaaggaactgcctttctggtacagaatgagaatcttactgaaaacatggtaaaaactacattttaaattttaagggataaaaaggagtaattatttcccttttttaagattgtcatactggctttagagaaactgagaggtgttaagaatagtatggtttggcttttattatttaaaagatgtcttaccttcagtggttact

SEQ ID NO: 68703 - DNA, 1057 bp, Homo sapiens
taatcaataggatcttagatttgataaaatgtacttaatatttcatttaaaagtggtatttgaagaactgaaatctgcagttcttggtatatgaatattgtgtatgtctgaactgtccataggacatgagttcttttccagtaatgatgacagattgtgattagttgcattctcttactccatgtgcattgtttttttctttgagacggagtttcattcttcttgcccaggctggagtgcaatggcgcgatctgagctcactgcaacctccgcctcctgggttcaagcaattctcctgcctcagcctcccaagtagctgggattacaggcgtgcaccaccacgcccagctaattttgtatttttagtagagacagggtttcatcatgttggtcatcaggctggtctcgagctcctgacctcaaatgatccacccgcctcagcctcccaaagtgctgggattacaagtgtgagccaccatgctcggcctccgtatgcatttgatgaccagggttaaaattttatttcctgcccattgacctttttgtgcaggggaaatggtatggaatataatgcatggggatcagtctcctgaccttgtccttactaatacctgcactatgcagctggaatagaaccttgggatgtgagatttgagatagtaatttgaaaccagttgatgtccctttatattttaaagtaggatgttatttagagaagaagagaacataatactgtaagtacaggaatataggctgaaggtaaatactgttttataataaaatattcctgagtttcaaatagcaaccaatatgaattcagcttattttctgtaagttgttatccatttatttaaaaattggcaaccaatatttaaatgtccttaatagtagttaaattttattagttcttacagtattcatcttgcctattttattcatttaggtattcctccacctcgtcctggcatgatgcgcccacctttggtgcctccccttggacctgccccccctgggctgttcccaccagctcccttgccaaaccctggggttttaagtg

SEQ ID NO: 68704 - DNA, 1054 bp, Homo sapiens
taagacggagtcttgttctgtcacccaggctggagtgcaatggcgcaatctcagctcactacaagctccgcctcccgggttcacaccattctcctgcctcagcctcccaagtagcggggattacaggtgtctgccaccatgcccggctaatttttatgtatttttagtagagatggggtttcaccatcttggccaggatggtcttgaactcctgaccttgtgatccacccacttcagcctcccaaagtgctgggattacaggcatgagccaccatgcccggctgtactcagatatttattgaatgaattctgtttccatgtatgtttcattaacttcttgaagttaatctgatttcaggttaaagtcaaaccatatttgagttacttttaagccataattattacttagtgtacatttgtgtgacattaatttatcatttttctcttttcaggagctcctccattcctgagaccacctggaatgccaggactccgagggcccttaccccgacttttacctccaggaccaccaccaggccgaccccctggccctcccccaggtccacctccaggtctgcctcctggtccccctcctcgtggacccccaccaaggctacctccccctgcacctccaggtgatgctttcaatttctataataaaaacttagcctgctgtttatttaatttgctctaagacatatggtcacatttcagtattctgaaatctgaggtcatcttacagtcagtggtggtttttaagttgccgttgacctggcttgaagtacagttcttccagtgggtatttgcacttggttcacttgaggaacttgtagccagagaacatgggattaaattctctatttgataattttttggttttagttgtagttacgaagccgtttcatgcatctgcatgagtaccaacttaaagtttaaaattagagtgtttttttcccttacctctacctaatgtcaaggttagacatgcagattttcttgtgggcttgttttatgtggtaggtatatttctagtttacaacactgaaatgtccca

SEQ ID NO: 68705 - DNA, 1640 bp, Homo sapiens
ctggttggttgatgacatttaaattagtttcatatttttgcaatagcaaattgtgctgctataaacatgtgtaacttgcttatattttatgttggccagtagatgaattttggtatcatggttaggctagtttcatgagttgggtaacatttcatcttttcctatgctctttatcagatttctgtaacttaatgtttggctgaatttcctcctaatattatttgtagcctttaaggagtagatcttcaactaccatttaagttttgtatattctgggcttatcacttctttggccaactttagtaatttatcttttcttgaaaattgtttttatctgggtgttcgtatcattagtatagctatctcatcctgcacctctgccaagtagtgggtagcaatcatatctagtactttatagtgctacgtagtaaacatttactgaattttgttgatgccaatctactccactccctcctttgtccccttaggtctgagtgtacggtttgcagatatgcctggaaaatcaaggaagaaaaagaagaacatgaaggaactgactcctcttcaagccatgatgcttcgtatggcaggtgaggcagggaaaaaatagtgaatcaccttttggtgtatcctcacgctaattactttacatacgtttttccatttagtatctcagcaaccttcaagtaagtaataagtccttgttttacaaaaataaggtttggaaccattatataggctgcctaaagttacacagcaagtaaatggtggggctggcatttaaatattggtctgtctggttttaaagcctgagttcattccactatgctgcattaacatagataagtagaatgttatttctttcacatctaagtattttattgaagaagactatttggtttttaattttgagaacacatttattaaccatgtgtattcagtcattgctgttctccaaactgtaagaaaatgaatcaactccatttactgggtttaaaatttctttcaggtcaagaaatccctgaggagggacgggaagtagaggaattttcagaggacgatgatgaagatgattctgatgactctgaagcagaaaagcaatcacaaaagcagcataaagaggaatcccattctgatggcacatccactgcttcttcacagcagcaggctccgccgcagtctgttcctccttctcagatacaagcacctcccatgccaggaccaccacctcttggaccaccacctgctccaccattacggcctcctgggccacctacaggccttcctcctggtccacctccaggtaaacacttacataatgtgaataaagtttaaatgaggttagaatgaagtcattccaaaaaatactatgtgttgttagtgttcatgttttcttgtttcctcctaattggattctcttaagatgtgaaggattctcaaaggacaagtaaaggttgttcattcccaaaccattgtttgcaactcatagttctactgacagccacctgtttttctccagagcactcttgttttcacagtttttcttattacagcagacagaaacttgaacatgtaatggaggttttctttagtattgctttttagtatgataggttgacctagctctaaattggcagcag

SEQ ID NO: 68706 - DNA, 1003 bp, Homo sapiens
ctcagctcactgcaacctccatctcctaggttcaagcgattctcctgcctcagtctcccaagtagctgggattacaggcacccgccaccacacccagctaatttttgtatttttagtagagacagggtttcaccgtgttggccaggctggtttcgaactcctgaccacaggtgatctgcccccctcggcctcccaaagtgctgggaatacaggcatgagccaccaacccagccagatttttcttatatattctcatcaacacacatgttctgaaaatggccgtcccaactctgagttgatactcactcagctaatatttattgagtttttactatatacggcattttttctaggcactaaggatacagggtaaacaaaactaaagttctgttcacatggaactattctcctaaaatgtttaccaactaaaaatactcctatccagtgtctaatggatagcctttgtcagttaagttctttttattcttagcttgctaataggttttttttaatcataaatattttttaggtatctgttgggatgtaactttttttgttttttttaagttctttagtgaattagattgctggcttttagaacacttggattcaacttgcttgtattttttttcctttttgtaaattttaattttgatagtttttggagaacaggttgtgtttggttacatggatgagttctttaatggtgatttctgagattttgatgcatccctcacccaagtagtgtatatactgtacccagtttgtagtctcctttccttcactcccctcccacccttccccactgagtccccaaagtccattgtatcattcttaggcttttgcatcctcatatcttagctcccacttataagtgagagcatacaatatttgatttttcattcctgaattacttcacttaattgcctccaacttcatccaagttgctgtaaaggccattattttgttccattttatggctgagtagtattccatggtggat

SEQ ID NO: 68707 - DNA, 1143 bp, Homo sapiens
catcatacataagtatagaaatgtttatcgtgttttaaattaggcttttcctggagatgtcactcttgctgctaatcctttaagacttgtatatctggttcccttttagctttattgtcatcagactagagcgtcattgtatacattcactgactgtgtatgtgtatacaaacatgattgttgctaaaggaggaaatgggttttcaaattagaactctttttaaaaaaatcttaaattaccaaaaagaagtgtttaaaattattggcagaggaaaattttgttagactgtatgagtagctatatatacaagaattttttttttttttttttggtaagaattaagttgttacagtctgagttgaatagcataattttctgtatttctgggtaccatgtagtggagggtccaatcatactacttctccatgttcccttcccacttttcagcccagcgaggtcatgatgatgatgtttctagcaccagtgaagatgatggctatcctgaggacatggatcaagataagcatgatgacagtactgatgacagtgacaccgacaaatcagatggagaaagtgacggggatgaatttgtgcaccgtgataatggtgagagagacaacaatgaagaaaagaagtcaggtatgtgcagatgaaggattcatggtattgatcaataaagagaaaacaagctgaaggtcctaatttattaatgaatctgtgagagtactctgaaatctttggaagtcgggatcatagctgtgttcatcttatatattaaaattttgaaagtttttgacacagtaagtactcagtggatgtttatgaggaaaagcattaaactgtatgtaataaaaatgtctatgtaataaagttcactttggggtaaaaggtataactattcaacagcataaacgtattatgggtatgttacaggaaagaaaggagagtagccatattaagaaaaacattgatgttgtattttataaatctgtttaaatatctacctttgaagcccttttatggtatcttacatgaaccaggatcataattataacccaggtacactcatgagtggaatcatgaaacatattatatctataatgtgtgtgtttgattattaaaaaattcaaataggacatttg

SEQ ID NO: 68708 - DNA, 1096 bp, Homo sapiens
gatctgttataaagattatagttaagtggtgagtcaaacaccactggatattttatttgtaatcccattgtatcatcatagctttattacaaagtgattaacgtctccattttttagatgaggaagcaaaaaatcagagaattcaagtaaaatgcttaagatctcaaaatttgacaggactaacgtagtaggtaaacacaaatctgacagaatcttcacgaggttttcagcacagagcagtgaaaattgatttttattacaatgaagatgaaagtcaattaggtggcatttctgagaaaggtaaaattagtggccatctaaaaagggtggggattttaataaatattgtagttcttcgaataaaattgaaaagagtatgtctggtgtctagatctcttaaaaattttttagcatatatggaggtttttatcatgtaacctattgatacctaattgaagtggcctcttatatttaattccataatctactttttctcttagagtttaacccagtgcaacagccacaattaaatgagaaagtactgaaagacaagcgtaaaaagctgcgtgaaacctttgaacgtattctacgactctatgaaaaagagaatccagatatttacaaagaattgagaaagctagaagtagaatatgaacagaagagggctcaacttagccaatattttgatgctgtcaaggtaatcaaggttttttttttgagagataaactaaaatattatacagattgagtatcccttatgcaaagtgcttgggaccagaagtgttttggatttagggttgttgggttttttttatattttgttttgtttttgtgtatatttgcatatattttggggatggaaccctagtctaagcatgaaatttatgtttcatatacacatagcctgaagataattttataaattttgtgcatgaaacaaaactacgacccatcacattaggtcaggtgtggatttttccaccatggcatcatatgggagtcaaaaagtttaggattttggagcattttagatattcagattagggatgctcagcctatacttagatttaaaaagttaatgggagaatgtcatgtt

SEQ ID NO: 68709 - DNA, 1949 bp, Homo sapiens
ggaaattttgagcaaattagttttgcgagcccttgtttcgcgttttatgttatgtttttccttcagattcatagttgttttttatgaaacattaaacaaaaatgtcttgacatttttggttgtcataattagagggatgctcttggcatgtagtggagagaatccaaagatgctgctcttttacagtgcatactgtaactttccacaataaagaattacctgtattaaattggaggaaatgctaatgttcaagattcaaagattttattatatctccctctctccttttaaaggaaaggaagcccggaagagagaattaaagaaggtatgattttagaggcatcttataaaactttaagtattgtttggtacatcttgtgatttgggattagtgggtttcagaataacatttctaatattttctagaaaaggtactttatgctttttataaaaactgtaagatatactaagccaaactttatttaggaactgaagtaactttgcagagaagctcactacaggttataatgccattgtttgattacttttcccagtgagttaaaaaatacttttgaaaataattcttttttttactcattaaaacataactgttttaaagtctactgatgaggatggaaataaacatgatgctagatagctttatccattttcctgattagctgtctattacatatattacattagcttaaatatatatatgtaggtttataatatttatagatatattagatttatatatccattttcccaattagcattctcctcttagctgttgaatttgtggcaaagtacttcaaaagaattagaaaggatttgccttatagtattgtgctttatagtattatagtataatacattgaagcaacacagattttaaataatgttcgattgtgttttcatgtttagcattaactcctgcaaaatttttaaatattctttatataattttagaatttagcttcaacctttgctttggacttcaactagcagaggttttacaacagggggcaggaacaatcacccaaggtcttcaagaacataaggggttaaaaaaaagaaatttaaagtgtatgtgtgtttaagtaactgctaaagatctcagagttcaaagaaatactttactaagaaagcacatcttaaaaatagcatttctttatctttttgacaagtgtaaacatttttaaggcaaaaaattacatagctgtttctggtggttgaaacaagtgatcagaagccaaggagttattctgtttagattcttaaagcaagttgaagtaaaactcctgagtgcctgacttcttgacatctgcccttttatttttctaagaacaaaaaacagcgcatgatggttcgagctgcagttttaaagatgaaggatccaaaacagataatccgagacatggagaaattggatgaaatgggtaagaatttacaaacaggcagctataacagtctgacacgtacagaggcaggcaggtaacgagtgaagcagcataggcgtaagtaaaacagaacagcatgatggcatttgatgcttggatttaatgttagtttcagggagacaaaatggagtgctagagggctgttgcaaactggagaccccagataccagaataagagggaagcgattatttggctttcagttaattgttattgtgagataacagaagcacagtttggccagcttgctttttgggagaagacttaatctgatttatgaaataaccttgggttttttgtttgtcgtcttttatttaatgttggcaactaccatgtaaatctaagtattaggcccctgtgaatataaggcaatttccaatttttccaatcagaagatccaaaaagatacttatccatttagtaaggatatagaaaaaaatcatcaaatacctaaaaaccaaataataaaatactataccaggattctc

SEQ ID NO: 68710 - DNA, 1072 bp, Homo sapiens
catctggctttctgaaacatctggctttcggggcagttggacacttggtgaaagagacattaactgtaataaactgggctgacaaaatcttccctttcttacctttaaaaagtgtctacttgcaaaaggaagcaaatttgtccgcctttattactggaaagactgcgcttcaaaaaattaagccccattattttggaataagaggaagaagtcatgtaatagggtactgtgttaataaaagttttagcttacaaaatattttttcctcaaacaaaaataagtattccctttaattaccttaagaaatatatattgggagtcaggtcttagtaagaaaaatatgtgtcttaatatttaagttttggggagctctcagtatagcactaatttcaaatatttgcatttttagttgtgttttgaactcttgagagtcaagcattatatctgaactagaactgaatctgaattaaatatgcttaaattaatgagtttttagtgtcttagaagtattgagaatgtacagcatacatgccaagaaaaaccatggagagaggcaaaggtgaggtatgtgttttgagcctagatccattacccccattcccttcttattcttcttttacaattacatgttaataaagggaggttatagaagaaggactaatgaattctgatgttcatggtttgtgccatatcgttaaagcattttctagttgtttttatcagttgacaaagtcagtgctgtgatccataagaaaaaagctaaactgatgacttgaggatattcaaagtggtcttcacactcatcacatttctgaagaatgatagagatctaaattttcatggtcaagaaaggtgatgccatctttcttggacattaaagtcaaaactaaggaaagaacagtctcacagaatttctaattaaaggaattttttttcagagattggtagggactagaaaaaggaagaaatacatttaggagatataagctatttctttgtcttcaccttcacaggtttttctttttttaatgaacaagtaaaccatacaaattgtcaacatgggacggagatc

SEQ ID NO: 68711 - DNA, 1149 bp, Homo sapiens
gtagctgggattacaggcacgtgctaccatgtccagctatttttgcattttttgtagagacggggttttgtcatgttggccaggctagtcttgaactcctgacctcaagtgatccacccacctcagcctcccaaagtgctgggattacaggcctgagccaccgcacccagcctctccctgttctttaaatatctcttaatataggggggcatggagagaaagtctctccaatattttcttcttcttttccatttttgtatttttccactttatccttctcaattttggcctcttcttccactttctaggatccgagaacgctctaagcctgtccacgagctcaatagggaagcctgtgatgactacagactttgcgaacgctacgccatggtttatggatacaatgctgcctataatcgctacttcaggaagcgccgagggaccaaatgagactgagggaagaaaaaaaatctctttttttctggaggctggcacctgattttgtatccccctgtagcagcattacagaaatacataggcttatatacaatgcttctttcctgtatattctcttgtctggctgcacccctttttcccgcccccagattgataagtaatgaaagtgcactgcagtgagggtcaaaggagagtcaacatatgtgattgttccataataaacttctggtgtgatactttcatcttgtaaatctgctttcttttgggaagatattgagatatttaaatcatggcccaccttacccaaaataggagattctgttcatctcatatctagtattaattagaaaaataactacataaaaagaaggaagctaagaaggcactcactcagccataaattctctaaaccctctctaccttggaatccgtgaatggaatctggtatgttttttgcaggattttcctattgtaaattgtggcaaatacagggctcccttcatttgcttttcatctcttatgcatcaaagtcaaaaacatttctgaatcaagataatctagaagagaaaaaaggaggaaaaggaaaagagaaagcagaagggacaaataaaagcaattggcaaaaactgtcaataatagtttatacacttaactatatcaataatcacattatatgtaaatagtctaaacaat

SEQ ID NO: 68712 - DNA, 1044 bp, Homo sapiens
cttcttctacaggagatctggaagccctcaaaaaggaaaccattgtgttaaaggaaggttctgaatatagagtcaaaattcacttcaaagtaagtatcctgccttgtgtgtttttgtaaagtttaaatcttttctttaatcagtgactacatttcttgcatgatcatgttgaggtactttttgtttgtttctcccctagtacccccaagctgggtctggaatgtcctcttcccagccctgagggctacctgttgagacccacgtttgcctcctgtcttttcctagccaggacttcttaaactcttcattatctcttaagccaatgggatccctctgtgaactccaaacacatcctcgaggcacacactgctttgtgttgtaccacctgtgtcatttcttcttcatagaatataagcacctcaatctagggtgaaattgtacatctctcctttccaatatttcacacaaaactttgtaaatagcatatagttcatgaatatatattgaaaagtggacaaacaagtgaatcaaccaataggaaaagaaaatgggacagggcctcagctctaattgctcaaggattatataaatccaggaagtgtgatctttgctaaagaactggaaattacaattatagttgtggaacaggtaaccaggaaagaggaaactaaataagaaataaactgacatctaatatatcccaatgagccatatatcccaatgagcagccaaaatcacaagaaaaataactttgactttgaaaacaaataagttagaaatgcagtgtttgcacttcgtggtttatgtttgctttggtggcctctcattcccacttagcctcagtctccagggcctgggctccaccaaggaagactccatctgctctctctatttgcacactgggaacttttttccccaaggtacaggatatgattcagggtttatggatgacctccctaccccatacaaatataactgaaaataatttcatcctggaaatatttgttgatgcctactctataatggacactgagctagggttca

SEQ ID NO: 68713 - DNA, 1040 bp, Homo sapiens
caaacacagtaatttaaaagcaatccctagacccccatctggaactaatttacttctcattttaacttctggcattacaaagcatgcattttatatagcattcattttaaatttccattaaattgctcaattttattttttataaagccaaatggttttttttttcaatgtcaatttattttgaccttcacagggaatagaaaaagaggacaggtgaaataaggggtaagagaaagggttccttcagaaataatcactatatgaagagatatttgtcccctggcttcatctgttaacttttttagtttagctaaaacatctgaggagtttaggtggaggagaacataaaaagcaagagatgccaccatgagatgaatctgaaaatagaattataagttaagtcctcttctacttaaactatctacctggaccatgttaaccatgcccactgcatgccaccacccaccagaaagtggcactctggcaaggatcactccctacagcttcaggctttgatgtccactgcttatggggcagtgcctagcacagtacctggagcatgataaacattcaataattgtgtatgtatgatagataggcagatgaatggcaggataaaggatggatgaatggatggatggcaattctctacattatgttttcattaatgtcttatgttcaacatgttcaagtccaacatcatttttaatttgttttcccattatattccccattatattctcaaagaataatgctacccccagacttttatttcatgtggagtctttgcactaatccctctccctcactgtccatttataatcaatgaatggtccccaagatgatcagatcaaattgagccattctcctacccagaacccctgtatgctcaaaaacttcagagtaaaatccaagctccttagtgtgacataggagctactttatagtctgggctctaaagaacctcacaacctgaccccctaccaacatagctccccctacatgccactctacccaccctgaaccacatgtgattccta

SEQ ID NO: 68714 - DNA, 1025 bp, Homo sapiens
cttcaaaattcctgcaatgccgaatgaaaaacggaggccatccactacagtggaaaatgtagagcaactccaagaaaagaggctggaagaaaagacaggcttagagatgtctgacagacttgaagatggtttccattttcccattttgcaagaggggcaatggatcctctaacaacagagcctgagttagtatgttatcatgtattacctcgtttaatcccctcaatatctctatgagataggcactatttttatccctattttgtagctcagatacaggcttagaggtttagagaagtaaataacttgtcaaatgtgagtagtagggttgagatttgcacgaaaatgcgcctgacttcagggtctgacttaagcttaaactgccttgttttattgatcatattgatcactctatttctttctcctgaggactcgcaaagcaatgataataccattctgctcttgcatcatttgttgcacattcttgtttagaaagaaaatactaacaactattagagattttctgaacctagtaatttcattaacaagcattccccaagtctacagggcaaattttttgatactcacaatgttacttcttgtgaaaattttgaagtgatttctgaatcatcagagagatagagattaaagtgacactgttttaaaagttggtaattatcatacaattgcatgaaagctgatgtggtatttgtggtaaacttccgtattaggatgggtaagcctgtatggcagggttcttaacctgaactccagatccagcaaagggtccacaggtagatttcagggggtctgtgaacttgtatgggaaaacatttcatctacattttcatgcacccttaaatgacatttggcactgccttccatgatgaatgtagaaacaaatcacagtgttagcaatacctgtgactttgtccctaatagaaatgatggatatttccattcgtatcagttgttgctgatatctcaaaatgttatttttcgtcatcattaatgtgaaatcataa

SEQ ID NO: 68715 - DNA, 1775 bp, Homo sapiens
atccaccacaacaccaacttctctttgttagattctaattgacagttcatcttcttgaatatataaggtgaattatcacaataaattttgtaaggaaaaaaagtaatttttatatactttttctttctatcaccaaaatggagacaatggggctttccaaaagagtcattttagtccttaagtcctttaagtactttagtccttaagtacttcaaataatgcaggctgttctttggaggtaaaatggaccttgggtagattcaccataatgataccttacctactgtatactcataaatgtcttcttagtgtaattcctgagaatcattcaatcaacactatgttgatgctgagttaattatcagaagtagaaaaattttctttgttgaagtctagggaacttctttcgtagaatggcttttatatggaaattatacctttattttcttgtacatgacagatacttgatgatcggaagcaatggtggaaagttcgaaatgcaagtggagactctggatttgtgccaaataacattttggatattgtgagacctccagaatctggattggggcgtgctgatccaccttatactcatactatacaggtgagcatgatttcttagtaaaatgtagtatgtacacatttacgaagttatcactcttaagtaggatttaaacacctttgtgtattgatcattttgagatgtagttggttatatattttttctagagtaattggtgggggagtggcaatggtgagagacacagggaagaattacacatatgttttctgatttacttctagaaattgttcaagatgtttagcagtaggtacctgattctctgaatgctttttttccccaatctgtagtatttctgacatttgaagaaatggtatttctgtctttttacccacagctctgctatccaccaggggcttcctcttgatagaggatggcactgatatcacggcatggtgtccagcagttcaccttcaccagcccttgctttcagtctcttaaatgttctgccactgaccagccttgaacttgcactcatctcaccttacactaatacatgagtacctgttcacctggattacaatatttttcctctcttgattttaagattaaaaggtacttaggatatagattagataggtcaggctctctcttcttgttcattgaaggcccatgaaggtccattcttatggcccatgccacattttcaggatttcagtgaccctggtcagctcattcaccctaacatctgaattaacttgctcttaaactccggaattttagacctgtgccaggctctctagagttaggtctgtaaacaaagacagaatggatggactctctcaggtacagccagtgaacctggggtggcttctcattcccccagaaagaactcttttaattttcaaagtctcgagaaaaagatcacatctgacctcataataatgtcatgaatttgagtagaagctgcgtagaatatgcagtgaaatagttaatttttatgccagatctaggcttaaaaaaatacagattgtccaaagctggaattgtggtcatacttctgctgccgtgacaatttatttcagtacttttggctcctcatgacattcatgcctggtgtcagtcctgtgcttatccagagggacttggccttactagaatccatgaatcaagcaaacattcaaaataaagaatttgtgtatagtttctctatctcggtaacttaaagtgatggcaatggaaattatttgctgtg

SEQ ID NO: 68716 - DNA, 1071 bp, Homo sapiens
ataaatgcatttacaacaagacttgggtaattcaggatctgatgatttttgtttaggattgaaagacataggtgacttggagtgacaaatatgggtggcagtactcagcttccttacttcctctgaaccctaagcaaactttggtagtcatcacagttagtcatttgtcatcatttctcttctccctttcagtattcgcagttgctctcaggacccagtgatttcctactgctgacttcactgttatgttcagagctgggcaaaaggtgtgggtgcttccaacagttagagcactcccctctttagaacagcctttaattaaagattacctaatctaatgtagtgcctctactctttcccagggaaatgataaactgaattaattgagctcagatttttttaatttaaatggctgaaacttgtttatttttatttatgtattaattacagtatcctgataatgtcacctgctttgtccatggataaactcagccctcctcctgatcactttgtcattagaattaactgtggtaaccatatgtccaagaattttctgaaacattcccagtttcaatattttgccccaatgaatccataaacaaatatacaaaatccataatgaaaacagccaaggaattccagtgcttcagtgtctatcatgctttctccatacctcattttcatataaagaaacaaagtaaaggctttggggagtttttatttgttttctcccaatctgagcatgtattctctatagcaggggtccccagttcctgggtcgtggaccagtactagtgcgtggcctgttggaaactgtgcctcactgcaggaggtgagcagcaggcctgcgagcattactgcctgagctccatctcctgtcagatgagctgcgcctttagattctattaggaggaagaatgctcttgtgaactgcacatgcaagggatctaggttgcacgcttcttatgagaatctaatgcctgatgatctgaggaggaacagtttcatcccaaaaccatccccatcatccccggccctggggtccatggaaaaattgccttccatgaaacc

SEQ ID NO: 68717 - DNA, 1819 bp, Homo sapiens
tactttttcatgctgtgagaacaatcttcttaaagctctcagtcacttcattcttctgctgtaaagcacgctagttccatgttctattgatttaagtacaactgttcgccctggaaatcaaggttatccacaatctaaccttgatctacccttccattctcatgtttctctccttttgtttgttgtttcgtatacatgcaattccccctttccttgtttttgcttatgctgtttttatccaaccatgatgtttttcccaccacatcaccctggaccaaactttttcaaatcccatcttataagctactttctccatctaataccttttaagtatccatttccttatctcccaaccaggtaagtctcttctcataacgattggtacttctcttgttatttatctgattcatgtattttattagcttttaaggcccttagagcagggcttgtcagttactcacttgcacaatgtctgccatagagaaaggctacaatgtatgtttatggaattaaatgagtaatttgtagtgcctaaggatagagcaatccattttgaaatttgtatcttctcagtttgttacagtcagactatgagatgtagcacggtaactaggtagcatgtctgatgagatcttcaaactttacagacataaatgtggtttttgtttttccatttaataaatttccttggattttgctctgatcctctcctctcgcttatttcattagagggtgttttaacgctgcgggcaaaacctccacctcctgatgaatttcttgactgtttccaaaagtttaaacacggatttaaccttctggtaagtgaaatttatgtatatagaattagaagaaataaatggaaaaggtgaaaatctagtcaggatgtttctgattaaattaagaaataaaattgtttttatagattttgtgggggtgtgtatgttttgatttgccttcagttaaaacagcaaattttaaaacatatatatctaagagacttgattgaaaaacaatgacttctattctcactctatccatgctaaagaatatattaaaactgaatctggtggtaaagaccgtcccctctgtgtctatgttggacctttctgagtgtctgtcttgcttgatagtaatctgttttctgttttcttcatgttgcaggccaaactgaagtctcatattcagaatcctagtgctgcagatttggttcactttttgtttactccattaaatatggtgagattttattagtttaagaaagaatcgttcttagtatattttttaaccccaagtgtctgtctggattatctagactgcttttcttcattaccttgcgtgggtactatttctttgccatttgtgtaaacatcaagaatgtaaaatttgagaatttaaaagaaccctgtaaatcatctagtttaagcaccttattttatagttgaggaaactggtatctctgacagtgctagggatatgaaaagaaataaagatttattggataccagtatttcaacgtatactagtatataatatccagtgccttgaataacgtagatgtttttctcattctcacaaaataatcatgagaagtctagttcttgatggatggtttgctccatgaagtcattcagagacccatgttctttttatcgaggtgttccttcatctcttgaactgtctctgacttgtttattcatttatgcactggttctacaaatacaaattgagagccttctatgtgcttggctttatagtagcccatcaggaacaaaacagacaaaaattcttaccttcttagaacttatattgtaacatagtg

SEQ ID NO: 68718 - DNA, 1051 bp, Homo sapiens
ctcccatacagatagcctgctgtttaaatgctgctatgttcagcatttaaataaccataatagagtgtcaaataggggaaagtttattttaagagaatattatttaagctgttaagaatttgttttaatgtcatgtttatgtagttcaacatggctccgtatgaaacagatttaggtatcttatgagtcaaaacaccatttcttctattcaaaaaaaaccttggttggctttattctctcattaaaatagtcatgaagttttaagagtactttgtgtttgtcgttctctgctagctgacctcaggttatttgattttcttttggaaaatgtatactaagaggttgtatgtgtttgtatgtgttataaatctttttcctttttgccaattgtaagcacttgactacctttgtcctggatcggaaagatgctatgatcactgttgatgatggaataaggaaattgaaattgcttgatgccaagggcaaagtgtggactcaagatatgattcttcaagtggatgacagagctgtgagcctgattgatttagaatcaaaggcaagtgtgtaaaatttatactattttattttcaagaaactccacaaatattaatgtttacaatcatttcagattgtttgaaaatggatggaagtttgacaaaataaaatgttcactttatttatagaatgaactggagaattttcctttaaacacaatccagcactgccaagctgtgatgcattcatgcagctatgattcagttcttgcactggtgtgcaaagagccaacccagaacaagccagatcttcatctcttccagtgtgatgaggttaaggtaaaagaatggtgaaatttttgtttcttctttaagcagattgtctgggagcttttgaattacctattttgataatatatctgcatattagttactagatttttagtttctgagcatctcgtaaggaaaacaaataccttagtatcttctctaggatttccatggcaagtaaataaagaaattagggtgatgttaatcaaatcagtagttcacacttg

SEQ ID NO: 68719 - DNA, 1017 bp, Homo sapiens
attgatacaaggacatggagattttaatctaaattttaaaagtaaatataaatgaaattcatatgtgttgtaaaatgaaaatttattaagttttcttaaaattctgtgttaatgttctgagtctgcatatgtatatatgcactttatatttttgtacttgctcagcttttatgttcagcagaactttccaaacaacttatctattatagaatatctatactaactaaaagaaataggtttacatttacaaaaaaataggttgttgggaaagctaaggtatatctatatgtcagaatgttaatggcttaaaggcctttaggtttgaccttgtttaatccttttattttacagtaagggtgctgaggcccagggtattaagtttcttgcccaaatttagtttcctacttagtgacagagccgaagctggaacaataaatcttataattccctctcagagttatttttcatcatagcattctgtttagaagaaatagggcaactctgaatttacaaataagcaagttgcttgattagaaaagtaacaaatagtgctcactttggcagcacatatactaaaattggaatgatacagagattagcatgacccctgtgcagagatggcactcaaattcatgaagtgttccatattttaaaaaacaatacaaattttaaaaagagagtaacaaataccaaatattgccgacatacattttatattttaatgttatttttttggttttgcagcatttcagaaaagaaaattaaaggtttctttttgctttttaagtagtttggtgcaataactttctacctgactttcttgtttttcctatcagcttatatttataattctaagtatcacatttgtgtgttttgtagatgtgtgaaaactgttaatatttaatggcaagccatgtgattgaatcatgttttaaatctcctctaacactatcccaatttggatattgcaaaaggagatgttccttgtaatgcctattattttaataatgtagtcta

SEQ ID NO: 68720 - DNA, 1053 bp, Homo sapiens
gggcaaattaatttacctgcgtgtgcctaattttgcttatctgtgtaatgggggtatctcacagggttgaaatgagcattaaataagttagtacatgcaaaatacttagaactgttcttggcaagtagaaaacactgtatgtgtttgctattattattgttgatattatcgatattatgtgctataggaaccaacagcattttctaaattgtgaaattctttttttacattatctagatctgcaacttcttggctgttgtaagaataaacaattctaaggttttgtgattgtttttctacctatgttagtgaattggcattatcactgaaatcagacattcataaaatggatttaataccatacatgcctatactttttatagccttattaatctgattgttgttggtttcagtttattaagtattgtgacattattaccatggtctaatagttatgaattgtagatctagagaatgtattcaataaatattttgtcattaatatgtgtacagaacaggaccaaaaatatatgatccctgactttaagggacttaaagtctggagaataacttgaagataacagaaaaagattttttggataagaataaaataattcagtctttcatttctagacagatatttattaagtgcagtatttattaagtatgctatgccatgatcttcatagtctttatttctatgtgctttcattcatttcaaagatgactaagagaaggctgttgcctatgtgccattttggtgcaatagactagtaaacacattgttataataaagggctaaatgtgcttagatagtagtgtgtaggaggtgcactggtgagggttgatcagaaaggatttaatagaggaattgagccttgagctgagctgtgaaagttatattgtgttcttcagcatttcaggggtcggaggatgctacagacagtatgaaacccttttaagcaggactatcaatgctgtgaaggtggcccatatttgtcttgttcacttcaggattccctgtgcttactggcatagtggctagtatataat

SEQ ID NO: 68721 - DNA, 1729 bp, Homo sapiens
gtgactacttctggtaaactgccctatcatagaaaactgaaggaatcagcaaatacccatgagctttgcttagaattgttccactatcattgatatcctgtgtatggatatgaatgactatggatggtttcagtccatgccatttttttaatatttggacaatgatttgtcatatatcagtctgtgccagattagcctttcataagacttcattatcatctttactgatagataattcaggagccaaaggtatatcagaattttgtttaacagcagggtattaactgtacctgttaacttactattaggaaactgtctgtttccaagcagcaacattttttggcatttggcagacctatggaccatttttaagagacagtatcttaaaaatgacagggattggaattgggatactctctcagatttctttcagctctcaagtttagtgatactttgaaatgttgggttggaattttatgattatagtgtttattttgattatattcttcgttttgaagggttttcttcttgctacttttaatactgattttctcatcgaggaattatattagtactttctgctgttctctccattggtttcaagacttaatattattatcctcttctcactcccttcagtttctgtgtcctgccgtgtttttttttttccctaatgtccttctgttgcagtttgggttccccagaaagcagattttgagatggaaattagtgttcgggaaagtttattagaaagtgttcttgggggccaggcatggtggctcacgcctgtaatcccagcactttgggaggccgaggccagcagatcacctgaggtcaggatttcgagaccagcctggtcaacatggtgaaaccctgtctctattaaaaacacaaaaaattagctgggcactttgggaggccggcagatcacctgaggtcaagatttcgagaccagcctggtcaacatggtgaaaccccatctctattaaaaacacaaaaaattagccaggcgtagtggcgcacaccagtagtcccagctattcgggaggagaatcacttgaacccagtaggcggaagctgcagtgagccaagattgtgccactgcacactccagcctgggcggcagagtgaaactccatctcaaaaaaaaaaaaaaaagaaaagtaaagaaaaaaaaaaagaaagcgctcttgggatcagcccctgtggacgaagggaaggaaggaaacactgttgggccaagggggatgttgggctgccatgtagtctcaaataaaatctgaccctgtggggtgcttcaaagctgagaggccacctcacccttgtccccagttggagaaaggggaccaaggctttgtcttccacatgtcaaccaatctttggatgtgggcttccctgggaagggagtgtgatactgggtgaagtgaggccatcctgaaagagctgatagttgaaggttgtctgcaggcagcaccacagcagttggggaatcagtccttcagtcctgaaaggagatgtgggtggcatgtcacagtttccattcaatcttttttgcaggggtgctggagatgggaaggaatggcccaggggatgggtcagaattttcaggaataaggagttgcagcatacagtggtcaggagcttgagagatggtagagaacaaaagtggatgtagaataggttctgccaggcaattgacttctgacattgactattgcttttctaaata

SEQ ID NO: 68722 - DNA, 1023 bp, Homo sapiens
atcactaatgaaagtggagtaatcatttctgcttcaaggatgactatatgatttcatttatccctaatatagtacacactacatagtaggcactcggtaaatctttattcattctttcaggaggcaaagcaggaacagattaactaattaccagctcagaccaagttaagaaaaataaagctacagattgtcatttcaaaatttgcctctttttgctgtctcactattttaaggagtgcccactatatcactaatatctctggcaagaaagcattccatgtgtatgtatgtaagtgtgtatcttcattttttgctgtcaccacacagacatcaggctttttcacaaaatctgaccccctcccttgaccattttttataactacctggcatgtatcactacagagcttttgttctggtccttctacttggactttggcagatatttgaactcttctgagccagtgctttcctcttcagggatttgtttttaagattttcttccttgccaaccacagagactgaattttatatcccacagatgagtctgagatttccagccccctccgtaaatcccatcactctgtcactcttgacagtgtaattatcccttttgtttcttgctgctttcctgcttgtaatctttgttcctcaacatgtccttcatctgaaaaaaaaggcacccaatccttcttgctttgtcagctctttaatttctcttgtgaaatagtcctcagatatcagctccccacaaaggctttctggaggagaagtggcattttgcttccttaaatctttctgtctattcaattttcatgagtgactgataactagccatcatattaaagtcttctgatcttatatttaagtatgattttttattagatttatgttttgttcagtgtttatgctgttcagtgtatgcatgtgctatgtgtacacttttaatatgtgtatctatacctgtatttgtaaaacagagaaacctaaaggccaaattctgcatcttatttttgaaccaatcaa

SEQ ID NO: 68723 - DNA, 1060 bp, Homo sapiens
catcatttattaaagcattatgggagaaccatcttgataaaagcatcttagtaaaggaaactagacttatttattttattttattttttttggggatggagtctcgctctgtcgcccaggctggagtgcagtggcacaaccttggctcactgcaacctccacctcccaggttcgagtgattctcctgcctcagcctcctgagtagctgggattacaggcacgcgccaccacgcccggctaatttttgtatttttagtagagacggggtttcaccgtgttggtcaggctggtctcgaactcctgacctcgtgatccgcccacctcggcctcccaaggtgctggaattacaggcgtgagccactgtgcccagccttattctttattttaatgagtcagaattttaaataccttgctttactgtatttacaaaagttgtagcaatgggtcagttgtcttaagttaaatttattagtatctaccaacattaaaggaaatattaaagtgtttcaattatgtttaaaataaaacacaagaatgaggagtgatggacacaagtaaaacaatgaatttgggatgataaaatgagttgttgatttagaaatatatactatatgccaaatggtcagatctacttggggatatagtgagagttaatctacttcgaatcgttgcttctaaagcaaacccagttgtgtaaagtcctacgtataaaggtagatattaaatccacgagggaagtaatcagaaccccaggtgcccaggctttgtaaaaaatttaaacagtaaaaacgtagtcacttgtacttaacttagatttaactaaacaaattcataaaatttcctgagtggaatgatggtttcagagagctagtgagtttcagaccttgaaaaaataccactcactgaactgtagtcattcttaactgtttaacaattgaaatctaagttgtcatatgtttaaattagtacagttctggttatgctgtgtcttttccaactcataactttcagtaatgaaaatagctttctatttaattagcctgaattaaattttcctctc

SEQ ID NO: 68724 - DNA, 1035 bp, Homo sapiens
cagtgagctatgataatgacactgtacttcagcctgggcaatagagcaagaccctgtcacaaaacacaaaaaaacacaaactctttgtctttgtcctattattggcatttttttctatataagtttttaaaaatattgccaattatggattgtttaaatatttaattgatagatacatattcaacatatattttacaacagtaagttacacagatataggttacatttaataacatgcacttttaaaaggtctacaatttaaataacctgattactatgtttatttgtaggctttgagctcaatatacatgcacatctacatagaagaagtacttaaatgtgcctattttacttacagtttataaaacgctagaaaaatattaaaaagattcaaaattaagtagctttgaggcatttaggattagacatggattcaaatcatagttttaatcttagaatgttagctttttcagtacttcctagggttactgtaaggattaagtcaagtagcattaacgtgggatgcgccataagacaatatttgatccttcatgatctctttcctcttcattttttccatctatataattttgaatcttgataaaaaagagggagcaaaaaagtatagggaagaatgaaatatatttcttaagcaaaagcaactatggtttgcatattgtgcttcaaaatgaatatttttcttttatcattttgttacatgcagaatacctttaacttagccttcattggactaaagtagaaacgtaagaattggagcttattttcatttctgaggtgagttcatttgtagaaaaattagtatacttaaatcagtctactgtttctttggaaactttgtcatttgcatgtacctgggaatactacagttatccatgaaatgctgttagtgtgaagtcgtggtgagggttccaggctaggcattcggagctccctgtcaatacctgggctgtgctacagatgcccttcagtgttgtgaccctagttccttgacatctttgtgtcagtttgcttatt

SEQ ID NO: 68725 - DNA, 1911 bp, Homo sapiens
ttgaggaatttattacagagcagtaaataactaatgcacaggttaaacagtattacaagagtactgcataaatgatggtctgcatttcctgttgcatcacattagggggcatgtaatgtcagtgtgacttgttactgatgaggcttgatcacttaagtggtggccacttcatctttttctttttctttttcttttttttttcttcagacggagtctcgctctgttgccaggctggagtgcagtggcgcgatctcaactcactgcaacttctggctcctgggttcaagcgattctcctgcctcagcctcctgagcaactgggattacaggcatgcgccaccacgcctagctaatttttgtattttttagtagagatgaggtttcaccgtgttggccaggatggtctcgatctcctgactttgtgatctgcccacctcagcctcccaaagttctgggattccaggtgtgagccactgtgcctggcccatctcttcatcttaaataaatacctttacctctttgttattaatatgcaatctgaaggaaagtttaattttggatagaatcagcttccaccaagtttcttgtcaagaacatttcactctacaccactgttttgagggtatttaaaatggtaacaattttagaaatcattttattcagtctctccattttgtagcttgatttaataaatatttctaggtttctattacagttactagggacataaaatttatgagatatgatcattatccacttggagcttatggatgaaaactaacatgaatggcatttaaggggtgtagattgggtaatacttaatttgtatttcaagatgattcaactgaaaggtttttattttccaaaagactaaaatgatgttattatgatgactgtagactctagtctcccaaggctggtcaatgctgttttctgaattattttcttatcacacagaattaaaagaaaacacattttaagtgcactcttatgttagacgttctgttagtcctgtagtttaggggtttgactgtatctttttctgaagatagaaatatatgtgttttaaaatatagatctgtcatgttccaaatttcttcctacgtaaataagaaatagtgagctaaatgaatgtctgtgaagtgaaggctgtcaggatactgttgtatgatttttgaaaaaatataaggtacaatgtattaacgaagtatgctagtatctaatatattgtcctaaatagttgttgattgggtaaattctatatagatgaaccatgctttttaatactggttgcatgcttatgaaaaaaagtggatcaaaggtaactatatagagcctttaaagtttttctgccaatatgaaaccatagttttcttattgtgtttgtttatttggttctgatataagaataattaagaaatacatttttcatttgtttttggtttgatactggcaaatttacttatatttttctgtcccaaattctatttgaatttcttggtagaacatataattgaagacaaagaagaaatatgtccatttatttcattgttatctctttctggtagaaccctgttgtctagactactttgctaatgtggtcagactcatgatacttaatttctttgtaggctctacagtttcacctgttacttgctgctagactgaatatttagcaacattttttcctaagtaactggctacaggaaaaactccataaatgattgaataaatcaatcaacagtttagtaagttaagtcagactacaactgttgccaagtaaaatggtgttatatctttatacagagggaagatgtgattagagctgcttcagaattataggaagatataagagtaatcctatctaggtggggaaggagcaatcaaaatacaaatcagttctggaaagtgt

SEQ ID NO: 68726 - DNA, 1041 bp, Homo sapiens
ctttgtaaaaaagtatggggacataaataggggtagaggcattggattatgtatgttctgtgtgtgaaatcattctggaatttgtgattttgatgtctagagtacaacactggctatggtatgggaaggctacataaaaatttcataaacaggatggagaaagaagagtgccatgcagcgtgtgcatatatagccttgggagtttagtttttttctaattttatcatctagatgagagcagcatacttttctttataaatactgtttaaagttgagaatctctgagtcttttccattaaggaacagaggccccttgttgtgaagctggcacagtcactggtgcaggatggtaaattgccttgctgtcaactctcctctgcctcttattttgttgcctcaaacatacattgttggaagactaaggcaatgatcaggctctttctgtgttctctgattagtgtactttctccatttattttggaattgacccacatgtgccatcttttagggttgttgaatattgtattccttatttcattgccttgctttgcatttttatttattttttaccaacttggaaagtttaatgtttgaacccagtcagatatcactattaagcattagcatacacactcattttccctcctatccaggtatgattatagtctgtcttaggaaaaaaaacaacaacaagcaactcctatctattttaaaatataagcctgtatgagtaatactaactgtaatcttttatttaatgttttctttttaaattatgtatttttgctttttgtgggtatataaaaggtgtatatgtttatgggggtacatgagatgttttgatacaggcatgtaacacataataatcacatcatggaaaatgggctatctattcctcaagcatttaccctttgtgttacaaacaatccaattatactattttagctattttaaaaatagctgtaaccactatgcagaatagtacaattaaattattattgactatagtcaccctgttgtgctatcaaatactaggtctta

SEQ ID NO: 68727 - DNA, 1070 bp, Homo sapiens
tctcaaaaaaaaaaaaaaccaaaaaaaaaaaaccacttttctccaaaagtagatatgtgtcaaaaaccaaaatactgttgccttttacaagacttttgtaattcctttaactccctgcagacattttgaaaatcacttctttgtaacactaatttactacagtttacttttctgaagaaatctctctccagtttctgttggccattttttatttagttcttctctacccccaataatttcagtatctcattttcttttaataattaaaacaatttttttttcttactgaaagctactgaagggtacagtttcttgatcctttcttctctctttctgggtgcatctgttattgtttttttcctgtatttatttatttttgccctcagcaagggactatttttcaaactctttaacatctgattgctgtaagatctgttggagtagcatgtaaaagtcaccagttgatatgggtagaaatacaagtatggaattgtgcacccatgacccttggtagtatttatacatgagacttttacttgtagtctacagtttattgtattcaaataacttataaagtgaaggaatcactactaggcatcactttttgggataaaggcttattttgtttcatttaggtacttttttcaggttcttttgttaaagtctgcctggtgtgagttttgatttgcaaactgaaaaagctttaaaatgctaaaaattggctctgctcctttttgtttggatttctctgggaattctaagttggctatgacctcataacttcaagggcttctaaggtcaattataacctgatagatatcattaaacaaggattaatctcagtttatagaaaaattctgactttcaatataaaataattcaatggaaaatgattaatggtcttctgtttttggagagtgatattgtacttgacattgataatgtttagttttaatggttgtagatactacttgtttttttattgaattacttgtattagatcttcattccccagaaagtatgagacctgatgttcttatctcaagatgagagcttaaaggaagaagagg

SEQ ID NO: 68728 - DNA, 3619 bp, Homo sapiens
tcgtttctgacaccctttttcaatcctcagatggctttaatagaaaagtatatttttcataactttgatagctttccaattactattctaactctttctcactgcctggtgagatctcagtcatggagagagaagtctgaataaaagagacattcatagtggttatgacagtgaaggttaagtttaggctgctagggggtttgaaacaaaggagggattgaagccttcatcgcctttaccttatttgggtactaagtaagtgattttggaaatagtaaaatctcattatgaaaagagtgaaatctagtccggaataaatgtgttaacagtgcttaactttaactggaatgcatcttaacaccattcagtttttatactgattagaaaggtccactgtggttttggtcatatattagaacatatgctgttggttttttgttttgttttgtgtgtgtgtgtgtgttttttttcattctgctttgtaagtaccccttatcactgtagggaattttagaatttgaattaaaatatatcttgagttatataatgtaaaaaaaaaatttatataggctactccatggcattgtaaagaatcttaaaatagatataaaagtgacttcatcttacctccaatgtccttcctccatctatatctgttatctctagctattttcatcttttctctctgccaggcagttagtagaatagttgaagaatgattttatcagctctcattggactacaggataaaagacctaaaaatatgggataatttaatccaatggctagcaaatacattttgtgttatgtttatggttttcaaaggcattgataaaatcaaactatcattactgggaaatatgaaattttcaataagattccaaactaatagataaagtgataaaatgattgggaaaacaagtggtggtagaatctgatataaaaatagtttggcggtagcaaaaggggaaacgctaaaattctcaagaacccatcagccatttttactaacactgtgctcttcataagctatatctagggaactttgattatatgctgtaaggaacaatatattatttaagtgtatattgaataagtattcaataaataactgcaaaataaaagacagttctgaatgtggaaattcctattcttgcgagattgagccagacatttctagctaacattgacgttattgggctaacgtgggcatcatttgggttttgggtattaggtgtaacaaatgcttgctgatgcatagaggccaatctaggtctgtgttagttcctgagagtgtgcatgtgaacttgaggggaaggtttttagagtaggtcactcacctaagccagctgtttttttctctcttccaaaagagtaccggattgctcctttgcaggggctgacttgagaacatggcttaacttttaaggctagataaactagttcagccagaagtgtattatttccccccaaaattacatttaaaagcttctagctatgatcatttcagctgcttcttcctccctttctaattattcttgctatttctgttactgatatcaaccataccaatcactggaaaggagaatacttgggcaaaaatttcttttaaaagaaaaattgctggagagaaatatgtacacaaatttatattgaatatataataaaatacatatggaactgccctttgtatgtgaaggtgagttttgtttgttgtagtggtgtcagatctggtttgattcatttcagctttttccagtgttctttcttgtgatacgcatatatgagataggaattttgctaaatcattagcaggcccattggcttaatgtaacccaatctagtttcttgatctaacagtcctggaatatacaactttacctaatagaaaataattttgtttcagttaatgaaatttatctgtcaataaagaaatattaaataagtgcctattaagtgctagtactaaataatgagaatactctaattgacaagatagacaacattcttatccttgtggactgcgtgatgttagacacctaaatgaaaagaagcataaaaacttaacagaagcatcaggttctaggtaagggctcaaaaatctggaaaataaaggctaatcttttttgcttttctcgccctctttccttaatatagattcacattttttcctattcaaatgtaatgatattcacattttgtattgtttttctacatatactggtactgtggatttataaaataagtctatttccaaattacatgtattttacaatgattccacaaaggaacgttggctatttatgagctttggggaaaattacagtatatcagtactccctttgaaagattttaaactattaaggtcaatttaagatcagaccagacaagtgtggtttgtgtcatttttatatacggtattcagtattttttcctgcaagcttttgggagtgaagaagccattattcataaaatgaattcatatgtaacaccttaggctgatcgtaaagtgttaaaccttagagatggggaaaattctattgtcttgaattttgaatgtgggtaactttaagactgccatatgaattgccaagttgcaaaattgtttttgcatttcacttgcaagcaaggaaaatgtggactccttctttagtggggccaagcgcattctaacacacctctcaaattacacaccactgaaatgatactcacaatgggtttggctcatatgtttctagttagctactatgaatgaaagattcataactatctgtttcaaaaaacttccttatttgcactgcagggagcttaattgtttggtagcagggtcaagaattgcttttaaatactaagcatgcatggattgggccattatacactgaactaaaaaaaagatttctgtgcacaaagaaggctttagataaatatttgtcaaatcattgattactttgttggctgtggaagaataaaagtccctgagttttcccaccctgttggtaatttggaccaaatattttggtcactattttttatatatatatatatttatatatttatatgtttaaaatatatatatgtgtgtatatatattttatatgtatgtatgtatatttatatttatatatgtatatatattttatatgtgtacatatatatttatatgtgtatatatatatatatgtatatgtataacaaacctgtaacctttcccttaccttgcctattgagcattgtagaatacaggataacagggaggaagaagtcattcatacttactagacagatggttggcgtccctgtggcaaccttgtgatctaataattttccaagttctgtctacctaactgaagagtaatagctgtttactgtttgcttaaataacactaggcctgtatgcaagttgcagggggggtggggtgaaggaggggggtagatatataaattcatctctgcagttttatcaaatctgtaaaagaggtgtagcatacaggcacctcttttccaaaagaaaaaattcattagttcctcattttggttattccttcttattcgtggctcaagcaaaccattaccagagaatcttttttttttaattgatgacacgctaaaaattagttat

SEQ ID NO: 68729 - DNA, 1043 bp, Homo sapiens
ccttcttttttggggacttggatttcttgaaattaattttgtgagtaacttggtaaattgatgacttattttctgcctgggcatgcaaactctgcatttgatagtttctttcatatatggaagaaatgaaaacactacctttaagtagatttactacctttattccccccataaaggcatgaacagcttgtttatgtttatatgcatgcgtacataatctccaatttctctttgcagtgtgttttcaaaacttcaactgttttatgacaaactatatgtgtttgggagtttacaaatattattctttaatccaggaatgtgaatttttgaaaccctatcttcagattgagttgtccttactgttttagtgtttatctgtattctcagaacctctgttgcgtggtctgttttcaaaaaagtactgtgtaccataaactacagtgtttttgttttgttttttgcacatcaagatccttttagtcgagagaacattaattttgtcagtagttcttttatttagctcctttgtggggccttgttagattctgaataatttaatagcaatggaatcctttctgtgataaaaatctggtcattggtccaatacttgtagcattattcacatgatactcatgcatgcaaaggtgtgggattaatgcgtatgcctgaagagtgtgtgtcagagtgtttttaatcattgttgaaaatcaccctctgaagattttcgtgtgcattaattctcagatttgcttaaagtattatcacttctattttaaaatgaataatccatggtggcctagcctgaacaataatatgtaagaaaaattggaaaaattataacttcctttaaatttaggaataaggtctatattttttgtatatttgtatgtttgctatgtttgcagaattacagaataaattgtttaaagcatatttctttctatgttattttaatttttttacatttcttacccaaactgttgaaacaaaaagtttcagtcccagttagtacaacatccataaactttgtccacatttcacat

SEQ ID NO: 68730 - DNA, 1488 bp, Homo sapiens
gaaattagcacttattatcatatttttacataaatacttaaaagggcatgagttttcctcacataggaagttgagcattactacatttcatttgtttattcattcatcttttatcgagtgtttgttgagtatctgttctgtgccagacaccaggaatacaaagatgagtaagacaggatctctgccttttgttgtcagaaggctcagagaatggaggcagccagacacccgttttagtacagtgtggagctgaaggaagtatatattaaaaaacaaacaaacaatggactttggaatcagaccttatctgccttggttttcttatcaaagaggtggaaatgtcaagtaggtactattatccatggaggatgttaaatgaaaagtgtgtatgcctgtgtgtgtgtgtgtgtgtgtgtgtgtgtgtgtgtgtgtgtgtgtgtgtttatcccagcacatagcagaaaggagagcctcactgtggccgagggagtcagaaaagtctttactggggaaggtgatgtttgagtctcatagaatgaatttttgaggcaaagcgagacgctcatctctctccaggtagaaagatgagcatgtttgacatgtgcggaataggttggcatgatgggagtggtgggaaattctgcacattcccacattcagagcttacgggagtattagaaagaactgaatgagcagttatttttcatttttgtaagtaacaatacaatagagtattcattacattgtagcagaagagaataaagataccaaacctgtttaagaattgcataaatcttctcttctagtcacatggccttctaaatgtagctctttatgtagcaaacaaattcatgtgttctttttcagtcctgtgatactcaagtgattatatggaatttaagaaagagaacttgcatgtttttgggtgaaattggaggtcctgtttcaaaccattcttacatttagtagcatagcaacaaaagaatgtaataatctatgaagccagatctagtcctgtttaagcctgtctaaaattctaagccatagtttctgaacagaacctgaaacatactatttaggaatgtactaaaaaataacttgttaaatgaattatgtgcttgataagagatcagagttctataattgaaaaattgtgtttttaatataaggggagaagaaaaagagaaagaaaaaatagtgagaaaaaagattgatagaaggaagagaagtttgtacttaaatgagggagaaacatttttcaagtcccttattgagggctgttgaattatcttctgttaacaccattagaatattactaagttattccttattatagaaatacatgtatattattgagatatttgttggtttaatgcaacaatagaatgtttccagtatctgaagtggaaaaacaaagctgcaaataaaaatatgtgtaaaatctgtctcttttgagaagacattgattacagtttatctaattttctg

SEQ ID NO: 68731 - DNA, 2411 bp, Homo sapiens
tctttatattgaaaaagcccctcaaagtaactgtgttgtgtattgcctctagtttattttcattgaaaggactccattcttccacagctccttgggttctggaaagtgagcactagtaatggacgtcatgtggtagtgagtctattggaattaaagtcaatgtcatcctgtctcacctagtatagattttttgtttgggatcgcagttttctaaacatattgctgtagttcttaagttgctggtgtggaaaatttttggtcacgaattcacacttttacttacaatttgacagttaaaacagtatagaattgtcacataaagggtaaggtagaatgtatcacaaatgcaatagtgataatataatgcctttattgcagaatacacagattgagactttgtaagattgcaccacaagtcattcactttatagcagaaaaaaaagaaggaaaatataatttgcttttaattctactattctgagataaccgctgtttacaagacttggtgcattctctttgtaatttttttcacttcccaatgtcattgaatattatatagtaatttccagtaagtgtaatttaacttatactgttagtagccccactcttaatagggtgatgtttcttttgtttcctgtcaggaacctaatgtctaattttgaatattttgcttgtttgtgatcaaacttaaagatttattttgtttttatttctagctttttcctgctttcaaggttttatcaatactgattcttttcagataccagttcttttctatgctatggcataggcttgctactctctactttgtgtttattacattccaaatcctagttattttcttacactctgtttcacaccctttaccctactgctttttattcttctctctactcccttcttttacatacctcttttaattctgcagcaggtcacttgaaccaaggtttgtataagaaaacatagtatccagaataggaaatgataggtttttaaaagttgtctctttaaatacttgaagttctattggatgaatattttaacactgatttatgtaatatttatatacaactcagctttcctgagttgtgtgaaacatacttggtagttacacggatcatcacaaaacaacataagttaatgataaggtacaaacttttggacatctgtagaggtatgtcgggggaaaaagtggaattttaattaaagtattctggctatagtaaatccctcctgggaattattaatactacatgaaattgtttgcagctgttagtgattgaaaatatttttgtaagaaaaattctgcattggaatagttgcaaacattttaagttgaatatatgcaagaaagtttaagggtcttcagtgcttcactacaaccttttcagtattttctagatgtattcctaaatgggatttaaaaaaatagaccttatttctcagaagttttggatttacaggaaagctacaaatacggtgtctatatacccccataccagcttcccctcttattaacatcttgtattattggtatttgttactattaatgaaccagtatcagtacattagtattaacaaagtttatactttatttagatttccttagtttttaatgtcctttttctgttccaggaccctaccatccaggacaccactaaatgtatttcctcgtaatgtctccctaggctcctcttggctgtgacagtttgttagacttccttgtttttgatgatgtttgaggagtactggtcaggtattttgtagaatacatttgcattggaattcatctaatgttttttctcatgattagactgtgattataggtttttggtagaaagatcacagaggtaacgtgccattttcatctcatatcaagggtatatactatcagtatgatttgtcactgtgatactcatctttatcacctggctgagatagtgtttatcagatttttccacttttctccacctttttcatgctgtgctcttagaaggaaggaactgtgtatagcctatacttaaggagtagagagttatgcttccccctttgatggtagaaatctatataaattatttggatatttttctccgtgggagatttgtctcttctcccccatgtatttatttactcaatcatatttattttgttctggactcatggatatatatatattatataaatataaaatctatctatctatctaaatattttgggttataatacaatgctactttgttacagcttgactccagtgcctctttgacatactaccatcaatgtgaattttgtttttttggaagcatttccttactttctggtattatgagatgctctaggttcatctgtatacatcttgccacagtcctagaatcagtcatttctccaaggaatctggatcattttgttgg

SEQ ID NO: 68732 - DNA, 1042 bp, Homo sapiens
tgagccaccgtgccaggccttgtctctccaattctaatcagtgcaactttttgcctatatctgcccagatgtttaaggatagtaggaaatttctttaatttcctataccataatatcaaatctaatgtatgtatgtacatgtgtgtatacatgtatggtatgtatatgtgtgggggagtatatatatattcccaaaacagtatctaggttaactgtcaagtgagagtcaaatctatacccctgtttgtcagtcagcatatcatctttccccctgcccaggttttgaaaaaggaaggaaggaaacaaacaaaaaacttcccaacatagcttcaaagaataaatcttacataagtgaggtagtcaaatagataatctattcagtttatgttctttctgctgaaatggccaatttttagaagtggtcaccaatttccaagcatgcaaattgtgttcctcagtttatttctgtgaaaatgtaaattttaaaagattcaaaagaattacagtcagcacctaaggaaatttaaatcagtgaccctcaaaattaacacttaatgtctcactttttaagatttgatattgttttaattttaactcagcctccctgcctaaaatagcagagtgtaacttttaggatcatctgtcatctactacagatagaaaataacaaatcaacatgtcaacattctcatatttccagggtcataaaaatactgctgtttcataaaagacaaaagaaagcaaagggaatgttatttatttccaaataaaaattatacaaactataatattgttttcccaaaaaagcattttcctgagtccaaaactctcacattagctttccaggaagagccccaattctacccagtagcaccctgcccaggctatggatcctttgtggactctatggatatatggacttgctgtaacttacttagcttgatggtctacagaaagaatttaaaaagtgattcactttccctttttgtctaaacatatgcatttactttatggtatcaattttagattaaataaataaaat

SEQ ID NO: 68733 - DNA, 1377 bp, Homo sapiens
agcggtggtgtggtgaggggggagggggcgatattaacatctgagatgagagccaacactggtccggtggagaaaggagtgtgttagggaatccgcagctggagccgagaggacgcttttgtagaaactattacctccaactaagacctctctccttattttatttttattgctatttttgaaggagctggtcagcatttgcctagactctcgggacaacacggtaaatagctttcaaggatttggggaaaggagaaattaggccaggccgtgcaataccttacaaagacgttcgctcttgtctcactggatattcctttgtggtattagcctcatttttcaaatgggaaactgagattcaggctaagatgtctgtccaaaataagactaaaatctagattgttttgacgcagatcagtattcccagccaattacagatgcttttcagagagaatgatctgttcagctcttcagttaatttattactgcacattccttagtgccttcagtgggtggtggtagttaaatagctgaaacaatttttccactttgtcattgaacatcattgtatatttacatttgaatcttagactttaagtaatctgaacttataaattacatgttttaaaaaatattttctagatggtaaacctatgctacgccagggagatacaggagactggattggaacatttttgggtcataaaggtgctgtttggggtgcaacactgaataaggatgccaccaaagcagctacagcagctgcagatttcacagcgtaagtgtagccaagatggctaactttggtgttctctgtagcttgtgtcctgaaataatcaaaaacttcagtgtcagatattcataaaattctgactcactggctgccatacagaacgcatgtttgatcccaccaaaattccatcgtggtccatcgtggtcctgtgtgcttctttgtcttcagtggttctcaaaattttcagaggcctaaatgacttattccgtatattttgattgagactcaggaatctgcattaacaaacgcaccagataatgaatgttgatctcctttacgaatgctgctctgtgtgtactccttagtgatatcctacattgatggccctaggtttttatttcaatcccggtttttgttaactggctttaggcatcattaaaactcattgtgtcaaaaacaaacaaacaaaaaaacaacaaaaaaacaaaactcagctgctcgtcatttcctaagtttttaaaggttgaaatctaaagcattcttgattttcccttatatctagattatcatcatcttttttgattctgccagcgggatgtctcctgactccaatgttccttcatgtagtaactgtggctgcctta

SEQ ID NO: 68734 - DNA, 1025 bp, Homo sapiens
aacagtgtgatcttgattctactatttattttcaccttaaagttttagagaaggaataatcttatttctgttcctgagtatttgcagacttaatgaattttttaaacagatttgaattttgcgactttaaatgtagtaaatactcttggagaaagactggaatatataacataattgaaaaaaatgtacccacaatattatacccataggtgcaagagtgataatggtagttatattttctgctagtccatttttctatgttatatatgtgggtgtacagtatttgtgtttttttttttaattactaggaccataatgaataccattttgatttgtttaaaaatattgttagccatttaaaacttctttgaaaacatttttacttgatacactgtatttgcatcataggttgtactaaattatgggttagtttccctgttttagcaccacggtgaatgttctagcacatctctgagtgtttctttacagtagataggatcctgtaagtagaattatcagttcaaaggctagaaatgagtttaaagttcttagttatacatgacacttaattgatttccataaggattataccacattacactttgatatttgaccagtgtcttaaccttgtgtctaaagggctaactgggagaaagaaaaggcggtaaaattggaggagagcaattaagcaatgtcaaggagtttatacacatacagtaaactgatagtagtagaatactatggcctggagccatcaattggtttattaatgctcttcactcactcctgcagttaggcaaatcccatgttggtggcagaaattttctggaccattgaatattctagcatttgagccagcaagttgctatgtagtgatcctgcataagtcatgactaactttaattaacatgctttaaagtatatgatgatgggaagtatttaggagctgggatactataatgttttgtattggaggcctttcatgatttttagggttaaactgaaaaagctaatgtccaaactgt

SEQ ID NO: 68735 - DNA, 1048 bp, Homo sapiens
ttcagcaattaataataatatataaataatcctttatgttaattacctactgtgaaaactttttctgtttacaaagataatatgtggttgtagaaaaatgaaacaatacaggtgaagtttatttaagagcaaaaatcccagtgtattattcatactgttttaattagccaacacactcatttccgggaagacatccactgcataaactggatatccctccatcaagatgtctttgtattgctgagatgagctccacttgggcatagtatccatttgatttttttttttttttttttgctaacagctttttttacatcagtgtttatgtttgagtaaatgagtatttaattgttccttgggtttcagaatttaagaacagttcaaatgtaactcgttatttataccatattcaagatttgtaaatactacttaaattttttttcagtttggacccaattaaatcctttgaagctcctgcaaccatcaattctgcatctcttcatcctgagaaagaatttcttgttgcaggcggtgaagattttaaactttataagtatgattataatagtggagaagaattaggtgagttgtccccttacagtgatgtggttacctttatcatatgttaagtcccagtaattaacacctcatttatatatatatatatgttacatatatatgttgaaagtaaatttttcagctaacttaagcttggtgcttacaagtgaaaaagtaaaggagttttaaccatttgggtcagatgcttttatagatctgtaaacaaagtatgcagaaatttatccttttaactaaagttcatcattatgctgatgttatgtattatggtacagtgagttttaggctttattggctgggagggaggggggaatcttatgtcaaagtcatatgctaaacacatgcaaggagatccgttctttctgaactatgttgtgggtgtataaccccatctacttggcccgtcttcctttttgccaacttaggaattcctaagactccgtaaagaacagtgtgtgggggaaaaatcagt

SEQ ID NO: 68736 - DNA, 1484 bp, Homo sapiens
tagaatgtttttggtttcatattttattctttttcaagattgagagaactgaattatttgcccaagatctgaagtcacagtgaataccagatctgcctagcctttctctttccaaaaccttgtgttctttgtactcttacaacttttctattctctggtgggacacagatgggagacagaataggaacattggtctagtaaagggctttgagaactaataaggtgatgaggcattagaaagtaaatgagaaaggttcatacttaaaggtactacttgaatataacagtgctcctaatctatacattttctcattaggttccatggattaaaatatttatggatcattgttgatctatatctcacctttctgtgtgacagaataattagtggactgtaggaaattaagaggcaaagtgtgtaaaagagctccacctggtggctctctatagtcataataaaaattgattccctgagaaataggcagtgagttttaggatatggaaattggaggttgaactggtaagactttaaatctactttctatagaattaatggggttttcatttacctctttttctccatccttaatgagacatgaagcctcatttgctttttttagagggacagtttgaaactagaatgtgtgctagatttggaaaggaataatcttacagagaaagggtcaatgatataccacttttgtgatgagaaattaattaagtacaggttttaatgtttgccttaagaattttccatctccccagtaacacagacagtattttttttttttagcatatcaatatttaacctaatagttaaaattatctaatagccctcttctttttcagaatcctacaagggacactttggtcctattcactgtgtgagatttagtcctgatggagaactctatgccagtggttcagaagatggaacattgagactatggcaaactgtggtaggaaaaacgtatggcctttggaaatgtgtgcttcctggtaagaatttttattcagaataataaaatttttaaaatgcatgattttatgtcatttttaatcattaattttatttcagggttcctgttttctataaattttaaattatatattatggtttaagcagcgagaagcccaggattataaattggccagagaaagggtcatgttcctttgtttaaattttttttggtatggctgggcacggtggctcacgcctgtaatcccagcactttgggaggctgaggcgggcggatcacagggtcaggagttcgagaccagcctggccaacatggtgaaaccccatctctactaaaaatacaaaaattagccaggtgtggtggtacatgcctgtaatcccagctactcaggaggctgaggcacgagaattgcatgaacccaggagccatgcattgagctgagatcacgccactgcactccagcctgggcaagagtgactcagtctcaaaaaaaaaaaaaagaaa

SEQ ID NO: 68737 - DNA, 1030 bp, Homo sapiens
tctggaacgtggtctttagtaataacggcattatttcttagattggaatatccttgaaggtggtggatatggggcaggtttggggtggtgtcttacctgggtattcccaggaatatgaccatgtgactatgcatacatcaaggatgtgccctaaatttcccaaaacttagacattttaaatttttctttcaaaaaacataattgaaccatttttaaatttatttatttgcagtaattagaatcaatcacttccattcatttgttgaaaagtaatagacataaataattgccaggtagaacaatagtaaatgtggtttttatgcagctatcgaaatgatcatagctttgtatttattatcttatttgttaaaatcagatttttttccttcacgggtattaatccttaatccaaacaggtttaaactgaaatgctaaaataagttatttgaattaggtactagggaaaaaaatctttcagtattaatttatgcagtatattaactgatgatttttaaaatagttttctaattgaaagtctttttaataaacatcgtaactaatttctaaaataaattaacatttttgcttcccttttcttattacaaaaggaattcatggttattgtaaaaattctagaaaatacagttagcacaaaaatgttgtaatattattactagtccaatcactgttatttatgatttggtgtatgtacttctagttcatggacttaaaaaaacattgagttcctttgagactaaacctgaccctcatgattaaaaagtctttaaggaaaacattggcatttggatgtatgaaagatgttttccaaatagggaatgtaccctctagctttcatattagaggatggggcccagcattctgagttttaacaaatcctgtgggtagtactgaagcatacccaagtttgagaaccaatggcttaatgatctccaaggtactatcaagttttgtacctagactattatgccctatatagtctattaaaatgtacagatattcttctatttta

SEQ ID NO: 68738 - DNA, 1050 bp, Homo sapiens
ttctcagtctttagttgaagaaaataattgagttagtgagtaacagccaaataattctatccagaaatatttgaatgatgttagccaggtaagaattctaaagactgaaaatagagttgtctataaaattctattaaaattatatatgtggttgggttaggtggcttatgcctgtaatcctaactctttgggatgctgcagtgggaggatcgcttgagcccaggagtttgagattagcctgggcaatatagcagactccaacaaaaagtttcaaaattagctgggtgtggtggtatgccgctatggtcacagctaccttggaaactgaggcgggacaaggttacagtgatgatcatactgctgtactgtagcctgggtgacagagcaataccctgtttctaaaattaaaatgtatatatataaaagttaaataattgaactcagtaaatatatttttcactgtagagattacaaatacaatattctagaaataacttgggtttttgaattatagagatctgtgtttccatcttagccctgacaagtatggtgtgaccttgaacaagtaatttaatatctgagcttcagctgtttccttatctgtaaaatggacctaatggctacctggtagagttagtgagactattaagtgagatatataattaaattacctttaacttgatgagtgatcaataaatggtagccattattgtaattccaatcgatcctatattgtgaaaatacttggctttcaccatttcacctcctccctgaaggcttacttggtctcctctgctagacttttcaacactgatctgctaagatactttgccttcttttatggtacctaccaatttcagccttgtgtttttatgttctaatgctgccttattaataggctgcttgagggtaggatctgtgcttatcgggcgtctgtatcacttatgtcaccttgaacagtacttttcataatgtgaagacttgttttcatcagtgtttgttgaatgaataaggaagcattgctccccttgtctgggaagttagaatggc

SEQ ID NO: 68739 - DNA, 1048 bp, Homo sapiens
aagataaatcaagggtaaatgagtaaatcaagatagctaacttgatcaagatttggacccagaactagtgtgctagataactagtgttcattaagatagggctaccactactattttatggctatcactgtgaagataaaacatctttgctggttacttaatccaccttcatgagcatctctgcagcatcttaatttcaggtcttccagaaaatgatatttgtcctaacactaatatgagagaacattcaatttcttcacacttatgcataagtgatgttcttaagtgtcagtgcattggtctttaaatgctgatgtttgggggtttggaattctttgatgaactactactgaccaattgaaatttgttttcccctcccccccttgcttactttctttcttccctccttccctctttcttcatttcctttcttaactctattagtggccgctggatttccagctggacagactcatttgaagacacgattagaagagatcagattggctgtggaagatggagctacagaaatcgacgtggtaattaacagaagcttggtgctgacaggccagtgggaaggtaggtgcatgcttttacctaagagagtttcaccattcttccctggtgaatcagatgatgaggtaagatgtggtatgttttagaggtcactgttctaggtgacaagttagtagatcaaatggtgagtttaggagaaagcaggctaagattacccatccttgtgcccctcataaatctaggcagttgcctacctacatgaacttttcagatccttttgagtgcttaggtgaatagttacttccatgcaatagattcataacttttaaaacaattttattttaccaacatgctttttcttcagaagggaaaagttactactattctatactgttttgttactcaatacatacttcactccaggcaagtcttttatgcaaagtttatttgaatatattggaggaaacttcccttttttatgttaatttttgcagtctttaaaggtatgggattattaagttgactaagttta

SEQ ID NO: 68740 - DNA, 1114 bp, Homo sapiens
tctgaaatggcctgagcaagagagtgagaccctgtctcaaacaaacaaacaaacaaacaaaaactattaaaaagtgttttcatttccctgactttcttaacaatttttattaaatacaatttaattttttcttgattattccaaactgtttcattactgattatattatcccagaatacagtgatgctttcaggggccagtggaatctctgagatgattggcctcatagctcacagtccagactcttgtgctttttgatttatgtatcttcttatttgttactgtttttttgcctactccttagtggttaagctttttactgtcagatcatgttgagctcgtgacggcacactgtccttccctgccaatccttctgtcactcctgtctagctggacatggaaacgtggataactacatttctcacttaccaccatagttttaaccctatagggtgtggcatgtattgtaggctctcaaaattacaatacctgacaaacattttcaaatgatttgccccagctgctttcctgacaggattagcatatccccctgggcatttgtgataaaagaattgaggtgtgtatgtgagggaggaataggcttctaaatggggaaaatccctccaggtgattttgttctccttccccaccagtcccatgtccttattaagaagtactaactcaggactctttcttcttcttcttttttttttttttgacataattccagttcttagttgcatatactttaggtgccagataatggaaacattgttgaatttacatacaacaatgtacgtaaattcatacattgaatacatttatatattgtatgttttattgtattactaatactaatcagttgattaattagtacatcttgtatttcctgtatgtttctatgccgttagcctggatctgtagttagttgtaaacaggagagtttgatgaataaagtgttattctggtgaatttagctaagaagtgcatctgcttcctgtgctcttgagaaaagaagactttcctctccctgggatggctgtgctctctgataaagatagcatccaagtggggacatcacccggccaggcagccaggccacccagtcattgct

SEQ ID NO: 68741 - DNA, 1112 bp, Homo sapiens
ctctgaatttaagcttttcatttatctcagagatatatatccatactatctgagacagcctctgcttttgtttgtgttaatgttttaaaatttagtgcagtatcattgatttttatactttcaaatataagttgacttattctttatctctgtgaacagcaggtctatccatttagacatccaagcttgcagcctaggagtcatgcttggttctttctttttctcacctcacataaatcagtgaagaagccttgagagttctctctagacctctttgctgtgtctgacacatcttccctccattctaagtgctgctgtcttaggccaccatcctcctccacagggattacttcagctgttcccctgtcttcctgacttttgttcccctccaatctgttctccacactgtcaccacaatttttttttaatgctaattttattatggtactgcttgcttaaaattccttcagtggtttcccttcatctttatggtaaagtgtacattccttgattcttattttaaaaaggtccttcctaagaccctggctgtgcctctgctgtgtcattttcccttcacaccatgttctccagccaggtagagttacttgcacttctctgcagatggtgccatccaaccttttgagtctttgtacgttctgtgcctcctgcccggaatgccttttgcccaaataactccacatcttggggttcagcacaggtaccacctttttcaggaattatttcccctgacactgcttctccccctgctgtttggcccattatctcctctgtgtgtccccacggcattcaagtaaaagccctatcatataacttatcacatgacattgtgattgagtgttgaatttctaggtgtccttctaggggccctatatttggatgaagatacctggtttctctggtcttgaatctgggccagccatattcttgtgtacttcttgagtgctctgtcaggcctagtagatcattccttggaactctactgaaaatcagcctactagtcagcaatggtgctgttgctctgggcacaactgctgtatctagaaaatatctgcagttgttatctgagagcaaaatctcagaaaaacctaagg

SEQ ID NO: 68742 - DNA, 1017 bp, Homo sapiens
agatgtggcttgttggatgcagctgcccctgggagcacagggctcctgccctaccaacatggtagagggtggagctcccacctgttcccagacctcaccagctccacggagtgtgcagccctagccacgcctcccccgctgcaactggcatccccacggtggctgctccagacaggccactgctgccatcactttgatccttattttctatttcaaattggcttttaagcctatccagtgaaatgtatgctgctgtacatttttagtttagaatttccatttgattcttttttataatttttatttctctactgacatgtccccactttttcactggttgagatcatattttcctttaagtacttgagtatatttgtaatagctgatttaaagccttatgtgctaatttgtacagctgggttatttcaagggtctgtattttgagcttttaattttttagtgcctgagttttattgttatttatagcaggagggcgagtctggtgacattctgttatgtctgttattcttctctgtttttgttttcccattaatttagaatcagaatctcaaagggaaaccatttgtcattacattcataacaatttattttataatttttgtagccatttagattatggtcaaaaagaaattctttggagaccaggtagagatatctaactatgttagtctggtcttacacatcattgtaagtaaaattgtgttaaacaactttggtcaactaaatgttagtagtctaaactgtaaggattattggtttaatcttgtttagaaatctttcaaaatgttttagagcaaggaacacagtcagaagaccagaactcttgttctgtcttgcatattttgtgaccttgaacaaataaattaatctggttatcaattcaaatgcagcaaggtatgtgagtgcatcataaactgtaaataaagtactttgcaagttattgaaaaatattagtataccttccttctccatcctacgtcaataagaaaggaaaca

SEQ ID NO: 68743 - DNA, 1041 bp, Homo sapiens
agatgctttgtagaagcagagcagtgatcagattttcattttagggacataacctttgggcaatgtgtttaggctggagacaggaaggccattaggaagctgtgataacacttcagctgaccatcacgagctcctgaactgagatgcaatgcaggcaatgcagtgggtatggagcagagtagatgcctgtgggacatatcggggggcaaatttgattgtgcttggtgagtgattgcatgctgagcagggaagggaagggcagatccaactcctaatggtgccatttgtcaggatagggaatttaagaggacgaagtctttttcccagcccaggaaccagcgcctctgtttccatttataagacctgcacccgttcattctattattggtttattgcagaacatagcgcagtctaaccgcttttcctctacttttctgttcttgcaacaaggaaaaacatagtaacgtttttaaggaaatctgatgaaggctatgaaggtgaaagaaaggctattttttggtttagaaaacattagcaagataacacatgtaaatcaaaatgcagaactaatacatttgttttagtgattcaggaggaaaaggaaattcatgcttttacttgaattatcaggatgatgctttgctttaccagtgacccaagaatgagtgttatagtatgctttttgtaaaaaatttatcaccaactggggcattgaaagtaagtttcctatgttacgcggctgctaaattggccagggacaacggaggaggaactgaatagtcaatgaaattggaaagaatttagatcatccatgtcacacaaagccagcaaaggctgtttgtagaacgttagctgctatcacactggcttgatattaacattctagtgaataattaaaatattcctgtttattttttaataaaaagaaaaagcatatatgttacctcagagtctgtaatgatacctatagttgcatccatcagatgttgagtttttttttactaggattgtagagtagataacttagacaattaaaaagca

SEQ ID NO: 68744 - DNA, 1013 bp, Homo sapiens
agatgggaggattacttgagtccaggacaggagttcgaggctgcagtgagctatgattgcaccactggtctctagcctgggtaacagagagaaaaaaaattaaaaagcttattctgaagaccagctcgcttcaaccgagtgaatgaagaaagcttttatgtttggaactattttctgctaaaactgatttctgagttgtgttctgttagacaatatctcaatcaaaacttctttgacaaaaacatctcatggtcatgcaagtttggggaatgctgcatgaatatacccctgcaagccattcacagtgcacaggcatttagaaaagaccctgcaagtttacaaaaagaaaaaacttctatatttttggataaattcatcataccaaacttattttaagtatggctaagttcttctcgtgtatcatttttaatattgaaccaaagaatagagcaagtgaatagttattaggttaagtcctgtagacatagaagattatgctctgtgggaatataaatttttaagcagacaagattactatgaacacataactgtaagagcataagcatgcaggtataagtggtcaattttagaaaaccttccttacaatctctttaaacatcaccccctccccattcctgtggccattgtctgaaattctgctgttcggtccttacactttcatttaagcctattaaaagttaagtctatttaaaggatgtaacacgttcagcaaatgtgtggccttacttgtggaaaaccagctaatagatgatgagaactagatgtggactttgtgaaaatattcaataaaaacaaaatccattgagctgagactgtaggtgacaatcccttccttaccctctcccctcttgctcccaatgaaaagaagtcaggacatttgtccaacccaaatcagaaacccaaaaccagaaaccaagaaaagaggaagtttttctttaggctgaaaattgcgttgccagtgagatttttttgtattaatgctctgactaaag

SEQ ID NO: 68745 - DNA, 1031 bp, Homo sapiens
ttgtatggttgtcaatcagaatgaactagaatctaagatgcttttgggtgagtagcagaagagaacaatggaatattggattaaattcagcccctggagagtggaaatcctagggttttattcttttagcaggttttgtgatgaaaatgtcaccatcaaaccagtcttaactgttcatcctatatacaatactttttagatctttatactttaaatttttcatcatctttagtttccatgtattaaatacaaaaaattgggccaagtcaacccagaaaacctcttctcaagagtaaatttatgatatttgtgacaaacaaccaaataaacagatctccagcatatgttgacactgttcactgtctctaacccagtttcccaaatgcctttttactttgtaggttatcattgtgaatctcattttccattttggtaataaatttaacagctgaatttttttctcactaaggttttatatttttaagttatccatgtattcattttggattttgacatttaataaccttcctgaaatacatgggagaaattatatctacaatgtagaagactctaacatgtactctaaggggaggaaataaatgccacactcaaagcaattatacaggaagtattaaagatattaaatatgtatcaaaaatttaaaatgcaggtttaaaagaaagtaggtaaaaaccctaactttggcagtatacatgttaagaaactatttatattgttttctgctgagcagaaatctaaaaacaaatggcctttaaatcagacctattagttttgtaataggaagttctgtgagagacagataaaacctctgtattaagtgtgcagtataacctattcatctgaaatatacatgattactgtatggttgtgtgttatttccatttaagagttttagtaaaggaagccaagcccttctgctgtgagggaaatatagcatgtgagcatatatattcgtgggcaaggcagtgccttgaaaacaagtgtgtggcatccagggagatcctagatga

SEQ ID NO: 68746 - DNA, 1050 bp, Homo sapiens
cgagttgtttagacaagagagaatagtcaagtgctgtcacaggggatcttcttattctattctacctctaggcagaattaagccttttttctcaataaattttaaaccaacattttaaagatattggtgtaaaatggtgtcaaattgttaacctacagagtgattacatgttttggtgtctcattgaagctctgtaaaaatgctgttgaacagatatatttaatttaaaaatttttaataaccacattaattaaatgaagagaaacaggtgaaacagtaattatattttatttaataaatctgcaatatatcattttaatgtgtagtgaatataaaaattattgagatttattacattgtatttttttgtattagttcctcaaatccccgtacttcagtttaaactagccacatttcaagtgctcagtagctacatatggtgtgtaactatcatattggactatgacgtgcagccctagacaaatcagtagagtcagtgactcccagttggcatcattgagctggtcctaaaaggtcctttaaccagaattctctctttggccagtgtgaaatttccagtgttgataccagtctttaaaaatcattttaaagaaccataattatgaatgtgttgaagtatttttcttcagtagtaatgcttagtttaatgtgtgactgcacatgctgttcatttgtgatatggttatgctttgtatccccacccaaatgtcatcttgaattgtaatccccataatccccacatgttaaaggtgagaccaggtggaggtaattgaatcatgagggcagtttcccccatgttgttcttaccataatgagtgagttcttaggagatctgatggttttataaggagttctcctacctttgctcggcacttcttgctgctgccttgtgaagaaggtgcctcactaccccttcaccttctgccatgattgtaagtttcctgaggcctccccagccatgctgaactgtgagtcagttaaacttctttcctttataaattacctagtctcaggcagttcttcatagca

SEQ ID NO: 68747 - DNA, 1033 bp, Homo sapiens
tagttacagccacaataactgtctttatatggagaagttgtgaatgaattacctttattaagataaatgtttaatttacctttcattataaaagaacacactgatggagaaaaattgtgatgaacagaaagtgagttgtgagtgtgggagtgagtatgtgtgatcaagatgtaaactcactttatgtccttttgttaaccgaagacaattttgtcactgacaagagattcctaaatgggttctttaacgaactaattctgctgcaacacagaggctttctcacaaggtgttggccagtgaaaacaggttaatgcagaaattaaacttccttgaggaatggaaagaattgcagagtaacatttattgaatgataagctgtggtggtgatatgaaaggtatgcaatataatgggaaacaatcttttcctgtcattattgaaggacacacataaattggtttttctgttgggaaacccccggtccagaaaaacttattacttttaataatatgaggtgaagagaaaattctcgaggagatgaacttattaaacaaaataatgaaatgctgtgaaacagcagggaaaaggtagctagacgttatatagctcttgaattaaatatcaatttttgcgttttatggaagttggatgtgctctttggaagactgttaagctgaggagggtgtatactagtttttgtcagcttttcgaaaaatgatacatattttttgaaacatatgaagttaaaaggaaaaatgcgtatgagttgcttttttaaaaatgagtttggattttccttttcatctcaagttacttgtttagctgcaaattatctcaaaggatttttttttttacatgattggagagcaaggttgtgtgtgtgtgtgtgtgtgtgtgtgtgtgtgtgtgtgtgtgtttaatgacactttcccttcctgagaggcatcttttaaatccagtctcttgatttgtgccaaatagaaacccaaaaaagacctttaatcctttgtccattggatgtgatgactttatatg

SEQ ID NO: 68748 - DNA, 1023 bp, Homo sapiens
tcccagccctgtgcatcggttctcttcaacatctttatctctaatataatgttcatatcatattaagaaaaaatagaaaacaaatgagattaattttgcagtttgtgtttttctctgccatcaattattaaatagtggcacatgcttaaatattttttaaatgcagatttcaagtttcaagggatggggaagctatttcaaagagcataataattgcaggaaggaatacatgaatgtgtacttcttattcctaggaatgcaattcagcttctcaaatttcattatacagtattcttcaacccaaagttttatctgatttagaaaaagaaaagaggtacacatgttctgacagagtacaagacacctttcccatcccttactcttttatgcttcttgcctgttctctaaaacctttggcaggtaaacatattactttcagatgagccaatcgcttggaaatgttaatacacttgagggaaggtatgtcaacatcactgtgaaaaagataccagtgaaccatactaatagtcaatgacttagaattatgcctttccccatatttgcttccttttcactatttttattcactggtttttgttcaagttcttatttatgcttctctttttacaactttgcattgttaataaaaattcagttttaactatagatgccttcttctcctcttgtgtttgatttattgctccaaatgggccaacctggatgtctatatttcttccactaaaatgcaaataacttactaggtagaatatccccatgttatttcttggtttgtttgttttcttttttttgaggcagggtcttgctctgtcacccagactagattgtagtggtgcaatcacagctcactgcagcctcaacctctcgggctcaggtgatcctccaacctcaacctcctgagtagctaggaccacaggcatgcatgtggcccactaccatgcaaaattttttttaaaaaaatttgtagatatgggtactccctatgttgcccaggctgatcttgaa

SEQ ID NO: 68749 - DNA, 1041 bp, Homo sapiens
gctcacaaaaccaaaaatatttactctctggtgttttacagaaagttttctgattcttgctccagtaggttagcctgactgtgctatcacagcataggagcaagacaggaaatggaactgcataaatctcctttcaagagtctgcaatcattacatccaccaacatgcccttggccagagaaagtcacagggctggcctcagaactaaagtgctgggaaatggactcaaccccctcagggagatgaaccgcaaagtcacatggcacaggggcatggatgcacagagggatgaagatttaggccacttatacagtcaatctattgcacttgtccgctttgttatgctagtatgagtttcaattcagacacatgtaaaagcattttataaactttatgacattatgcaattaaaacagcatttattctaatgtgtcataattttatcagattagtggtaatctgtgatatgctcagtatgagagcaatagttacaaactaagtaaaaaacacaatacagggtttgtgaacttggccttctccctctcatttgcaatgtgctgccttaggaagacagatgggacaaggaacaaatatttggacagccttatcgcctctataactaagttggttcccaaactgtgcccagtctgttctcttgaaattataatatgcaccctgctcccaaccaagtgtttcatcaaatttaatcagtttctgattattcacatattaaatgtagaccagagaatattgctggcccaaatgtaaaatttttgtgttagtgtttgctgaaataattgtatattatcttctatgggttgtatattaatcatgaaaataaagctgtgctaagttcttgtttgagctacccaatttataacttgatagtgaaaggaatataatttcctttgtaactcatctttcatgacaatacagttagagtctggatcctagaattgattctaataatagttttgccactgatacacatgagaaacccaggcaagtcacctacttatgctctattcatttcttcacatt

SEQ ID NO: 68750 - DNA, 1044 bp, Homo sapiens
actgtagtctcaaagtcctgggctcatgcgattctcccacctcagcttcctgagtagctgggactataggcacacacacctggctaatttttttttttttttttttttgtagatacagggttcctttcattatgttgcctaggctggacttgaactcctggagtcaagccattctcctacttctacctcccaaagtgctgggattacagacatgagccactgcttccagcctatttatttatctttaagagaccagtgtctctgtcactcaggcttgaatgcagtggtgcaatcatagctcactatagcctcaaactcctggacaccttctgcctcagcctcccaagtagctgtgctactacccaacagtcccatgttttaaaatatagtttggaactgactggtttcttcatcgtttatgttaaggtatgaatgacttacaatcttccttcaaatgccaaaaagagattgtttaatgaataaaaagaacatccaggtagtaaagttttaggcaggggaagatgtttttggatagagggaacaattagcttgtgggtaaaattcaaatgcctagccacctgtgttctgtttaggttcaagaaccttgcaatgtagttctcttacttggcctctccttacaactaaccttggaaatatactaccgagtgtatgttttagattgtctctcttgcccctccttcaggtcccctgtcagttctgtttctttgttcttctgggagttgggccattgctccgttgacattgatgactgtccctagcttacatatccatggatccttttcctagatccacaccagtaaaagtcatctccagtcctagccatgtcccaatttgggtagatggacccagaccaagaagattttttgaatattcaccatgatgacctgtctcaccccatgatctaatattaatttaatataaacaccacattaaatagggttgtgtataggttgttgtccatagcactatagtaagtttgctgttctgggaagcccagaaatattctgttggcttcccctctct

SEQ ID NO: 68751 - DNA, 2537 bp, Homo sapiens
agtaaattataattacctgtatggttctttaatcttttagaaagatacttagataaaacgtcaagggcttttttataagtattaggaatgcttgcttttggatgtagaaatagagaaagcagaagatacaggaatggaatagtttcatggtatggtctttctgtgaatatttttgggtgaaatcttttctttggagattatactatacattattagatggcctaaaaaaatacttgagtgaaatgcagtcatcaaatgtttttctattggttatttccatcctaaattaaagtgagttgatattgccacgaaaagggatacttcttttcttgtcaagctagtagtatggtatatgtgaagaaaaacagttttttcatttcaggtcatttattcaatgtaattttgactactgtacattaagcctagctcatcttataaaaacagaggtaacatttcaattttcaataacattttaatttctttgcgtgcattcttggatgaatgtttatttgatagtacaaaatcttattctgtgtgggctgagtatgtatgttttaatttagaactaagctgttaggaagacattgagtgagtttcttttgttttacgagccattttgattaggttttcttttatgtttacttaaacaaattagaattttatttgagtgccatgtctaatgcctaagtaggtttctctggaaaattaagacaatattaagaaagctataataattttactttaaagacatttttaaacttgtaggttttaatcattttggtattcatagccagtaattgtgtccaaaagtagcaataaataacttataatattatggaagtaatttctcctaaaattgagcatagtgttgcatatcactcattaaacttttaaaaaaactaaccattgataaatatatgatgtactgaatgttaggtgctactgctttatcttctgggtaatgtcagaagactaatttcttttaaggttagttaaatccctaatgtgcactgtaatttcctagaaactttttacttgtttgtattgttatttatcattctaataggataggggcactacttttatcttaaactttacaatttagagtaccttcacatacattattcattcatgaagtagtcagagttactactcccattgtcacacacataataaaacagcagaaacatgcctttggaacttacagtttgcaaagacagcaggatgagaaaccccaggaacataaactatatttagaatattcagagtggaggaaaagataggagtctgaagtaggaaagtgattcgtgttggtggctatagtttttcattgtcatttctttctcagatgaagaaaggtggttattgatcaaattgtatgtaaaggaggttacagggttatcggggtggattttgttcacatgggaagtggaaagataggaatgccaataaaagacatgtcagccctttgactattcctaatcctgtgttctggaaagttctcactgcaagaagggagacctaaagaatttcagttgtttctgcttccattgtgaagtgaaatatatataactcttaaattattcctctcctggacaaatgttggttggtgttaaaaatggcaggttaccagaaagaatttatctcttaattatattttggtattgacacttgcatctctgtaggtggtaagaggagaggattgtagtggggaagtcataggaactgaaatgtggtcttgaccttaatgactttggagctcagtcttcacgtctttaaattaggttacctggaaaaggcaacctctaaattccatttctaaatttctttgaattttgtactgttctgggatttataatattctggaaaacaaggaactcacaatgccaagcagagatgatgcgggaaatatggaaagctagcttttctatccttcttaactattttatcctccctctttaagctttggatagacaatcacagataagtatgatgtatgtagtgccagggttgtgtgtactttcttttgctgctttttgtgcttacgtttccttgtaaaatgtttgtatacatatcttcatgtaaacagatagtactgctaatgtaaacaaaggacctgatcagcgtaagagttgtataggtttgagttaatcagtttattttatacactttgaaattggttctttaatacaagtttgcagctagattaaaaaaatatgtaatatagagaatgtattttccttcacatccatttggccaaaaaacagtaaaatatgaaaaatcttactttgtttttttttttttttttgaggggggtttcactgtgtcacccaggctggagtgcagtggctctatcacaacacactgcagccttgacctcctgggcttaagcgatcctcccacctcagccttacgagtagctgggaccacaagtgtgtaccaccatgcctggctaatttgattgattgattgattgagagagacagggtcttcctatgttgcccagcctgatcttgaactcctaggctcacgcaatc

SEQ ID NO: 68752 - DNA, 1052 bp, Homo sapiens
tcgatgacctggagacagggccttacataggacctgtctgtcctatacaggatggaatttctttgaatttgttagcagatgctcttttcttgtgactgtttcatttttttaaataacagataaatataagatgaaattaagggtgaaaagttatgtgtatatgtgtatgtgtaagttagagttaatggtgtaaaaaaatggcacggcatggtggctcatgcctgtaatcctagcaccttgggaggctgaggcaggcggatcacttgaagtcaggagtttgagaccaacctggctaacatggtaaaaccctgtctctactaaaaatacaaaaattagccgggtgtggtggcgggctcctgtagtcccagctactcgggaggctgaggcaggagaatcgcttgaacccaggagggagaggttgcagtgggccgagatcacgccactgcactccagcctgggtgacagagtaagactctgtctcaaaaaaaaaaaaaaaagaagatgctagtttgagtcataagaattcagaggaggaagaggcagcctaggctgggctgccctggaacgacttgaagaggtgggagttgagctaggcctgagggtatagatgggattcactttcagatgagttgataagactgggaggatacattcatggggctgggaacacgtataatatgtgaatatgtgtgatgagtaatactaactaggcttgttagtgatggttctgtagaaaatgctaggatgatgggaggtgagtctaggaatgctgtttggaaccatactgtgtccggtctttgaatgtcaggctgaggtttttattttccgggcaagcctttgcagatgttttttagtatagcgttaattatgcaacatgaaggttttagggagatttcaatacaggcagcatggattggacaggagcaaagtgggaatcaaggagaccatttctgagtctgttgccataattgggtagttacttgaactaagtttgtggcagcgggaatggaaaggaaaggccattgatcaaagatgttaaagacgagctgaca

SEQ ID NO: 68753 - DNA, 1396 bp, Homo sapiens
ttcttcaaggctcttcctcacctgctttccacccctcccccccaacagaaagcttctctttaaccagaaaaaatggttacgtgcagccccaaattacacccgtttagctttttaacctaaaatgtaagttttcttctctagttgcaaattaaaaaaatctcggacaaggacttttgactaccttggatcacatgcctgttcctagagcagacattggcctgctagtcttcagtcattgtctgtccttagctagagccaaggcactaacattggcaagccatccagaaacatacagttagagaggaaggcccagttcatcattggaagtcaagatgtgaaagactagagatcagaggtcttcttataatatagtgcaaaatgcctaaaggccagggagacctgagcatctgtaaacttctgagaaaagaagtaatggtaccagtgatattcagggaagctttttgccttgtgttgcagaagtaatagttgaagttattcgggatggttcaggccaggaccagggaggatgaagagaaagtgctgaattttgaggaagaatgagtagaagccagtcctagattggctgtcctgagcaagtgagtttgaagaaactgatttagcacaagtggcagtagaacttcactgtggtggaaacctcaccctgctaggtgaggccagggattctcttcggtgcttctgaaattactggccacttgaagagtaattcccaaacagtgtcagtgcttgagtaatattgccaatgcttgcttgctatgatgctgtctacatggggagtggtttttgttccctatcccttccaaataacttggattatttacatatattgtttctttggatagacatgctctaaaaaagtttgcctctaaggtgaaaattccaactttcgctaaagtggttgaagttgcatattattaaatgttaaggccaggtgctgtggctcacgcctgtaatcccaacactttgggaggccgaggcaggaggattctttgaagccaggagttcaagaccagcctacacaacatagtgtgacccccaatctctacaaaaaaaaattgtttttttaattagctggtcatggtggtgtacccctatagtcctggttacccaggaggctgaggcagaaggattgcttgagcccaggaactcaaagctgaggtgagctatgatcatgccactgcacttcagcctgggcaactgagcgagaccccatctctaaaaaaatttttttaaaagctattcaacataaaatataaaactcagtaaaataggacatgatgacaaaattttgaaaagaaataactccttgcccaattttcacaatacaaagaaattatataacatggtaaaattagtgtgaattttttctctgtggaaa

SEQ ID NO: 68754 - DNA, 1187 bp, Homo sapiens
aaaattgatactgttatataccagttttctctcatgtaaagtggagaggataattcttgtcttgcccattttaataggcttatgatgttgtgagttaatttatatgaacaaactttgaaaaactgtgaaacattacataaagagataaagtacgtgggtatatgttttccaagtttatgccattggggttctaagagaatatgcctcaatatcatttatgctgaaaaacaacttaaaatgcatggcctgctcagagtggtttagaaatgtgatcatttagtcttcctcttatatagattttacacctcttgaaagtaggaactgttacacataagtcaatgagtatttgttgatagtgtagtgttcacttaataatatacgtatttcttttttctatttaagaaagccttgtgacttaggaattagaaatcagtttctttgtgaaatgcctagacagtggtactaaggagagctttccttaaagagaaagtttagggctgcacataaaaggcaggacttagcttgaatatattctacaggaatgaagaattcaaggtgttgtaacgttagggacacttacataggtgagtggaactgaagtgtgaggaggcaatactaaaggcagtatgtggtataggatacccaggagtgactatgaaaagacaactttgaatgaaggtgttgctgctgtttgaaaaagatattttgtagtttcttttttctttttttttttttttggcaaatgaatgaatttaactgcagaatgaattattaccagtaaagggggatggtggagagagaagtaaaagaaacttatgcctcaaattgggattgcaactgtataattaaacaggtttgaaatattgtattttatttttagagacagggtctcactctgttgcccaaggctggagtgcagtggcatgatcagagctcacctcagctttgaattcctggcttcaagtgatccttctgcctcagcctcccgagtagctgggaccaaggcgtgtgccaccacacctagctaatttatctatttttttttagagatggggtctcactatgttgcccaggttgatctcgaactcctgggcccacgccattctcttgccttggcctcccaaagtgttaagattataggcattgagcagctgcacctagcttttgaagtattttattttatttat

SEQ ID NO: 68755 - DNA, 1050 bp, Homo sapiens
aagttattttaaatgtattaatactcaggctctgcaaaggtgctggagattaggcatgctcaggcacgtactgctggctgacacaggcagagcccctgaccagtagtagcccctgaacacactacgtgtgggcgacgggcctagcaggtcacattccttctgaaccctctcttcttctcatttgattctcaggacaaccccacagagtaggaaacaggacaggcctggttcgattcaagttagtaaactttttatgcttacccagatgaatgagaagaggaggtaacatgtatattatctactttcaaaaacttaattacttaaactcttgaagaaggtggaagacttcaaaaaagaaattcttttgagaatttggaaaagtagatgcatttctcagaaatagttcactgaaaaaattgtgtatcagaaaagaaggatgaaaataaaaggaaatcagctagttattttgttgttaacagaataatctcaggctctttcacacctagtcatctggatttttacaatatcaagtcagcccctcccctccattattcttatgaaagtctggctgctattcctttctcagcaggttctctaaaagaagctctagaaaggaaacaaacattattattggtagtagaagtaaagtcctttggggttgtgagtctttactgtatataacacttcctttctgacctgctatttaagcctcattacagaagatgaccctgaaattgaaatatttcacaattattggtttcagttcctcaaaaacattaatggagacaattaatatattatcagagttgaatagaggtaaatcattataatcttgctgtatcagttattgctctatgacaaaccattcaaaaactcagtggcttgcctgtaatcccagcactttggggaggccagcgtggacggatcacgaggtcgggagatcgagaccatcctggctagcacggtgaaaccccatctctactaaaaatgcaaaaaacattagctggatgtggtggtgggtgcctgaggtcccagctactcaggaggctg

SEQ ID NO: 68756 - DNA, 2044 bp, Homo sapiens
tcccgtttgtttctttctctagtttctgtggggcctgctcttatctgagatcacctagtcaggtaagaggctttgctgatcttggcaggtctagcatggccttatccaggatgatgggaatgactcttcctctaataggttccggcttcatctgctaggcccaggcttgctgtgattgatgaagacaggcatccacccgagtgagcagaagcacctaagggtctcttgaggcctagattcagaactgggacagtgtcacttttactgctttctgttggctaaaggcagtcacaaggtcagttcagattcaaaaagtggagaaatggactccatctttggataggaggagttgcagactaacattgtacaaggttgtagatacaaggagaggtggaagatggaggcatttttgtaatccatgtaaggtacatgctgaaaaaattactgaacccagctaaagtttaggttcttcagtctgaaatatgggattacacttgatcctgaacacactgctgatcatatatgtactccttagattatatagaaatctatgtggacatgtgtgggatgaccctctttattaaaactgttaattcctaactcctgtagaatagagttattatgtttttttcttttgatgccctgtttagttggtttggtactttcactggggctgtgtcagtttaaggtccaaaatagatctgactgattctgttttgggggatggaggaaggtatcttaggtctcagtgtgcttctgagaagtctttcaagtagatgacctcccctgttctgcccacacccaaaacccactgaccaagcacttgctgtcatgttaccctgttttgttttccctgtggcacttatcactggttaaaattcttattcacttacgtgttttctttttctgccttgtgatatgagcctcacaagagtggggacctcctctgaccctctttgctgctaaattctcacagttaagaatagtgcctttctgttcttaggaaatgctcaataaatatctgttgaacatttgtaataaatattttgtaataaacaagtcagcagtttgttaaaatacagtgtgtttaaatgctatgtcactggtgcattgcagacacttgttgggtatttatggaatcttgagggagggccgtggtcagtaggagctcaaggagaatgaaagcttgaagccacaaagggtttttctagattaatccagtgaaagacagatgagcaggagagttagggtatgatagatttgttgaaatgttgaactgttagacttcaggctgggaaggagggaagtagagcaaaaagtgatctgatagattgggatagagattcttccaagaccagagaactcccacagggaagtagttaaacatgtatactgcaaggttggagatttggtgttgcagtgtgatcattgaagtcatgattttagatgtgccaggttatgggtatgacaaggttctgggattaagagaatggatggctcaggtagttgaaggaccttgggggaatggggaataaatatctgttctttgagagaatgcagtaggacagctgatgggagaaagtccttaacagccaaggtactgaggtaatgctttgaaaagaggttgagggtatagaggagtttgctaattatggagcaccatttccataggtagttaaatttgtaagatagaaggtggactgtagactaggtcagggatggaaaaaacaaagccttgtagggttaatgccaggtcagtagatggattgagagaggaattggagataaagttaatttgggcattgagaggtttgctgaatttagtttcagtagactcctagagaaaggtgaccctgggacttacagaggccgtgactcatttggccaagagtggtggtcagcccaggaatttgtgggttctgcctgtgctccttaaagggtatttgggtaggtagattgtgaactcttaatagcttacatactaagcagatacatagtcattagcagcttccatattttcactatggtttttcagaatatttta

SEQ ID NO: 68757 - DNA, 1075 bp, Homo sapiens
actgaaaatacaaaaaattagccgggcgtggtggcgggtgcctgtggtcccagctactcaggaggctgaggtaggagaatgacgtgaacccaggaggtggagcttgcagtgagccgagatcgcaccactgcactccagcctgggcgacagagtgagactccgactcaaaaaaaaaaatttaagtttataaacttagatttaaacttagactatgtcctacaatcaagcgtcctgtgtaaaggtggctgtggtatgctggtggcattgaaaactggtagcttgaagaatgtgtactttcagtacattccgtggatgtcctcttcttgatttttcttttttttcaggttctgagcttccactgactgtggttttccatttaaaggaacaaaaaagcactagtacctaaaatttgctgtaaaagacatttcacctgctttggtattacctcactgccatctgactgtatccctgcctttcctgatttctgtggctatagtagaagtcttgtggagtttgtggagtttttgaagtttgtgtagttttgaagttttgagaacagacctgtttgtagttatgatccagtggcataagctgacctcaggatataccagcttgctttattagtgacttaattttcttactgtagtaaattgggtgtgattttaacttgttcattctttgtatatgtatactttaagtatacatattttgtatatgtatattttaacttgtaagtgatcagacatctctatcatcatctctgaattaaaattaaaattgtttaactcctgaaaaattcaactgatgttatgcaacttggaacataagaccggacaaattactgaatctgacatttcaaatatttcctaatgtgcttttaacttttgctgggcacaaatggaatttctcagcctctgtcataaaaaaagagtttgttattgtttggtaagacagattaaaacacagctgggaatgaagtagttagcccagtctcaaagacattagcctccctctgtttatttcctcctgtttgtattcctagaagcaaacagctgtgcattccattttattcttt

SEQ ID NO: 68758 - DNA, 1987 bp, Homo sapiens
agttttgaagaaggttcgcaaaagggaaagtacagtacatcctcacttaatgttgtcagtaggttcttagaaacttcaactttaagcaaaaggacattcagcaagtccttgaaccttgttttcctccttgtcattttgttacgaggttgatgaaaaaaatggttttattgtacttcatttcattttatagatggcaactgaggcaaaaagaaggcagtaactgcccaaggtcagacaggcagtaagtggcagagttgggatctggctcccaagtccctgttcttcagtaacattatgctgcctctcataatgttctttttttcaataaactgtgtgtgggcttctaaaatagtaacagttctttatataaaaggggaaaaaagttttaaattagagcagggttgaagaaagttcaacttaaacttaacatttgactgaattttatctgactttttccatgtaatattgacgtcatcgaaacatactgtagttatttaaacgtgtcgtggttctaaatgtcttgcatctaatgttatataactaaatggccaaagataacagtgttacctcgttatccctgcttttgcctctttttatttgagtgtctgtggctgtcttttcctgcgggttttttgcgcccgtactcatctttcacacattattgattatcacgcctgagtgatctgccacatcccaaatttgtccttttataccttacctgactagtggctgtgatccaggaactttcctccctggcacctatgcaaagatcagtggctgccagctctaagttccagatcatgatttctctactctctgcaatttactagttaagtatcaactttccatgtttgtaactataataatgtagataatgataaactgaactttaaagaaaaccctatatatttcactttttccaccttctctttgaaagtagtaatgaccatggcaacataaatttatttttccctaactacgtgaatcatctgacctttgatttgtcaatctttgtgactcctattaatgtatagtccaccttatatttgtttaaattaagttatcaaattccaaataagccattggttttaaaactacaaagtattatctttttgctaccaaaaacataaacaattaaagaagtcactaaacatatattcgagacagatgataactactccctgtagacttaacacttcattagcaaactaatactcttcacacacccatgccccaccttccccacctcattatttacctgttgtatctgttaaggattgtttccctttttgcaatccatgctttgtatagaaaagtgaagaaagcaatctccagagtaaccttggagcagtaatctgatctcagattgttctgggagctaagaagaatagagccagagaggtaaaaagaatgtcagtttcaaaagggatactgaacatagcctacttatatgatatataaaagtgacatcagatgcaatcgcttgtttgatttaggaacctatgcaggaagaggccttgattttaatgttggcatcatacttgctaacaacactctgcaagtcttctgaggcttaatttttttttttttttttttttttttttttgctttggaagcatggttgtgggcagagctgggataattttgtgtgtgcgtgattcttagttatgctgacagctttcaggttttgaaatcctgtctcttccctgttggtttaacctgtgttatccacatttttttatctcatttatttcattaatttcattcactcagcccaaagatgattatttggcctctactgtgcactaggtgatgtgttctttactgggctttcttgttgtgagtgaacatagacatggtcgttgtacttatggagtcttcattttactggggcaggtagtcattaaacagttgtcatataaataaacataaaattacaactatgatcagcttggtgaaggagaagaatgcagtgtcataagatgtc

SEQ ID NO: 68759 - DNA, 1042 bp, Homo sapiens
ccacttcctgggttcacgccattctcctgcctcagcctcccgagtagctgggactacaggcgcccgccaccgcgcccggctaattttttgtatttttagtagagacggggtttcaccttgttagccaggatggtctcgatctcctgacctcatgatccacccgcctcggcctcccaaagtgctgggattacaggcgtgagccaccgcgcccggcccttgatttccctttcttgtatgcatacacccatacacataaaattttgccatctgtttatgaaaaagtacagctttaatttctttttattgccagttttcaatctctgcccatcagaatagtaaagaaaggattctccaaaaaaaaaaatgtgctccattatcggagccagacacagttgagtgtggggacgaaaccagtgctagctgggagcagtgctttttacttttttcccccaggtaacagtaatgacatggtactaatactttttattagcagtaagacctcaaagattctcaaatcactcactatttgaagctgtcattatcccacgaatccctttggctccagggaacaggacaaagaagaggaatacagcctaggggatagcttaaggtgtcatgtttgatttcttgtaattaactttatcatttaaaaaggcatcatgtatttttatactttttgaatttggccaggtctcatgcggatgatagtggtctagatagttcatgttagtagtgataaaaaattaggagccaccatcaaaaatcaaacattaggttttaagtattggaattaggaggtttttacctttcaggactcatagactgaagctactgttgctatagaaatgattttccacctacataatttgtgtttgagacaattctttcttaaatacatttttaaaactataaaatgaataagcgtaggcatcacagcacagaaataattcttcagatgggagaaaagtgatttgtttttaataatatcatgagtagaaccatgaaaacccaactacaaatctaattttattttaagatattt

SEQ ID NO: 68760 - DNA, 1051 bp, Homo sapiens
aactgaggatgcattcactggtagcaagccacatatttataaatgagtacaacacagaaattggtttgatttttctcttgtacattatattttgttcagaattcattattccctaggtaaatgcaggagacatcgctgaaacatcaaactgatcccatcattaaagacagtagcatattcagggattatgccagcataattttgtagaaaataaaagaagtcacaagttagagagacaggtgcagcattgcagctacacgaagtggagcgtgcagttttccaagtaggtagttaattttatccttagttttcatgattgaagtaataacattgataaaatgaaataagttaaaatatgacagtgttgggaaaatgtagaatgataatactccgtagcttttgagaacctgcttacctctttctagtgagagatccaggatttttctggttgatagagatctgtcctgggcagaaaatggcaaaactgagattcggctcatgacttcattgcttttattgtgtccttagtctgccttactgggcgttagtttccttaatctctacagaggagttgtgggctaatatgcagtgatgtctgtggattgatttctttaaaacaacaacaaaaataaaaaacaaacaactctcaaaacacaaagtagtagaagtagaaatatttatagtggctggtggagtgctgttggatatatcagtctaatttgttgaaacctagaaatcatgtatgtcctagttggtttattctacttgggattagaaaccaagtgcttagggtaaaggaggagagattctgcatttgttttattttcattgcagatgcacattacctctttcagaaattcctgagtcatacatgattacattatgtttttatgcgagacatttaattcctttgcactgggaaataagtttttcagttgcagttttttaaaatgtgaaattggctgctttatataacaattgtttaatgctctttttattattccatttttgatcccataggttgttgttagggcctctgtttaacagtatg

SEQ ID NO: 68761 - DNA, 1972 bp, Homo sapiens
ttccctggtatatgggggagaggtgggtttattgcagtaattacaggtgagttaattaagtagctgaaagttagcctctcatttgtaaagacacacaataataaccttttttagctaaaaattagagacactgaaaaaaaattagaaaaatattttttaaagagaaagggtctcgctatatttcccaggccggacttcaactcctagactcaagatatcctcctgtctcagcttcctgagtatctaggactacaggcatgtgccatgcaccaccacgcctggctaacaggataaatttatatgaaaagacttgtaaacaaaagtctttcaggctgctctcaaaacacacacatgattaatgatacttagtttttgtaccttgtatcaaggtgcagtatgctggtgattattttttagagcacggaaatgccagcggtagtaagcaaatctcaaactgtcagcttagaggtttattgtgcgtgtctgctctttgagtctataaagggattaacagctgaatatagactttaaatcactgttgggatttaaatttttactctgaaagactaggtcatttgacagtaatcaagggtattttcattctcaagactgttttgcaggcccagcagaaaacccctctatttaacccatgaggggagtcatcctcagggctgaggcatatgaaatctggggtacttcacacagaaaaataataaaaatgtagggggatttgccttgtggttgaatccaggaagttctaaattggcaataagcagatagggaacaattttgtcagatactgtggattaatggtatttaaaaggcaccttgttattatttttgatgcacaaataattttacatctgcaagcatattttagaaattcaccaatatgatgactaattatttggccaaaaaaattgacagtgattgttgcaattatatttctaaagacccatgcaatacaatggtgatttaaaatatgttggtcatatgagtttttaaaactgaattgtttgttatagaagtaatataaatatttaaaaaatatatatctttgaaaaatatagtgtttttttttttttaaactgtattccaaagccgattcctgagactgtgctttatatgcacctacggctcctaaaaaacatcagccacagcttcaagcctaagctcacccgagacccaagtcagacacctctggtgtggagcctggggatctgtttttaaagaactccacagtgcacagtcagcattcagaaccaccattctaaagttttatatgtttcacatggataggcagatagttgaaattgtaaaaaaaaaaaaaaatcaattttgattctctaatataatggaaaatatcagattaaaaagaactctatagtaatatttcactatttacttgagatgacctgaactaggtataacgaaatggaagactatagcacattggatagccacagaccagtactggtatgaattagaattgaattctgcttagattgtaaaggaacttaaatttagcactaagataagattattaaaggaaaataatgtgattaaatgaagtagaacaacagtacctaaaatgtgttatcttttaaagtttttgaaatctcttgttgaataaagcacaataattgtatagcattgaaataaagattttgaagtcttactataccactaactcaatatagtaaaaggtgatgctgaaaaaacattaatgtggctgtattggttattttgatattttaaaaagccctttagggctgggcatggtggctaacgcctgtaatctcagcaatttgggaggcctaggcgggtggatcacttgaggtcaggagtttgagaccagcctggccaacatggtgaaaccccgtctctactaaaaatacaaaaaattagccgggtgtggttgcaggcgcctgtaatcccagctgctcgggaggctgagactcgagaagtgctt

SEQ ID NO: 68762 - DNA, 1139 bp, Homo sapiens
ggtaatgtcaaggatgtttttgctgattgggacaatttgtattcaactgcaattcgactacattcattagcttcatcagaaataaaactgaggattatgtgtctagatctgggtgagctcaaagatgattactgctacatagtccttgctctcaagagattatatattacataatttgctttctatcttatggtttcagtagttatttttagcagcaaacagttatgttttttaaaggcagcaaaaatttatgttgttgggttattatttatttttactttttaagacttatttatataccaattaaagcccagaaaattagtcttgagcaagagttaacacatgctcctaaaattttaagttttttgtttggccagatgagggcactttttctttacatttctagaatttgagctgtgaagcagattgttttttcgcatccaagcgatttctttctttcttttattattgccagtgagacagttttggcatttttgatgttttgattgtgctgtattctcatagattaatcctttccatcaatcctttcctaaaggaaaagcttcagtttcttgcaaaggtgttgtatatgggaactttaaaatgaatgacaaaatttaatggaaccaaggtggttttaggaaaatgtccatgttatttgtaattttgcttatagttaataatggaagttgaaatgtacttttaatttgagtactctaacaatagcaagacgaagtagcattgactagaccctcctcttctcccttaccatatttctagtgcctgctttacattgaattaatgttgccttgcattattgccgtcagaattatacagaagtaatggagaagaaataaaataccagaaacattttgtctgctgcttagaaataaacaaaaataagtataagtactgaacccaacaagtataatattagaaatacagcatatttaactttcttatttgctgtcaaatgccagactgaataggataaggtttctaaggttatgtgtaatgtactaaaacaacacagactgcaactatttggtgtcagtgtgaacagtcttaagaagaaaatcaaagagaataatgtttaaacgtcccacaaaacaaagctgttgtcatttcgtcacagatga

SEQ ID NO: 68763 - DNA, 1068 bp, Homo sapiens
gtacttcttctctataccttttttttttttcttttaacattggttcttcactttggagaggagattaatggacctctttgaaactgtgatacagagatggcgtacatttcttttgtgccctgtccatcctctgtttcttctgagaatctaactcacatttaccttggagaaaaactccttattcagtacttgttattatactcaggtctggtcagtatttgttccatacctcctgatcctgtcattgaccagggtgtgcacattatgtaagctggaccagtaatactagatcctgggactttccttaagctctggagaacgagaatgtcttatgttggatttgaagctgtaaagatgtcagcctagagctgtcctcatggggcaataacagagagaaagacagagagaggaggggtagggatggcctgggaggaggagagagaagagtaggaggtaaagaacggagacagatagatacacactttatcatattagttgagtctctggatctagccattcctgaatctactcctgaacttttaaattaattgaaccaatacattccctccttttgtttaagctaatttgaattggattttctgttatttgaggctggaagagtcccattcccatgaagaatgcctgtgtacttaacatatcttaaagaatgcaaatgattcgggagtctccatatctgtaggggcccaatgaaacaaaaagtaatgaagatcaagttgttccaaggatagccattaactaattaataacacacacatacatataaaatcttgttatttattgtagttgaggggatgggatatttttattaatgccttttggattaatcaagaattaacacatttatcttcttcagtctctttcataagaatatcctttgtgaaatatttggattgcatttcatttgttatctgtctctctaggcttataaatatacttgccaaccacatacatgtcttaggactcagaccataaacccatagatacaacgtaatttgccagaggtcccataaaatactaataataaggctagttgtccctggctctagc

SEQ ID NO: 68764 - DNA, 1036 bp, Homo sapiens
ttcttgatctcattctagtggaatttggttacttgcttttctgtgcttttccaaagacattaatttgtttctttattaattgttaaaatctgcttacaacgtgcgcttcttcatttcctccttgtgtcgtatattttaaaagttattattcagctgagtcttactctttgaactcttactcttagtgtcagcttcacttcaccttttgaaagaaaaaacccaatcttgaaatcctcctttatcttgttaaaaagttttaggaaatattttgttatatttactggtaattatattttcagggatagaaatactggtttaaagctaggaaaacttccttatggataataatgcctttctcttgaagcattgcaaacaagtaaatgaattatcagttggataaatatttccttttttggtctttcaattccccaaataatttcttttaaaaaatactcatttattcaggttaatgcaaagcactgtgccaggtgctgcaagagagaaggctgagagataactgattgcattcaagatgtgtactacatgtgtggccctcatcatgaaatcagagagctttacatgctgcgcatgagtgataacaatctaaaagtcttagtaggaaatatagttattgcttggacattctagacttaaaaattaaccttgaaagcccagcatatctaatcatttctagcatgttggagaactgaagatgattcatttagccagaaatttcagttatctcagtgttattgcaagttccctatctgatcttcctctttttgcttgccttactcttgtgagacaactattaggtgtgttttaaatgggttgtcccaaaggagaagagactttcctattctcagccctctcaagataagcagaactgagattaggaaaaaagcaactgagccagagccaattttcacaggaatttaaaaatatcagtgtgaaaacaaaatgagcagtgaagcctagctatttaaagggcatgcaaaagagaagttggaaaaggaacatgagctggcagctaact

SEQ ID NO: 68765 - DNA, 1102 bp, Homo sapiens
aacaactttgctgccttgcagccattctcaatttttctctttccttcagttaacatcaccccacctcccctccagtctgtcatcagtgagccctgttgacacttcctcccctccaaaacgtatcccaaatctgctcacttctctccatctctgccacacctctcgtctttgccaccatcatctttcactcagacaactgtggcagcctctttgcttttcccctgcttctccgctcttgaccctttacaatccattctccacactagctagattcattttcttaaaatataaaaatgtaattcagatcttgtcaatgtcttccagtggctttccatagcacttagaataaaatccaaagttcattatctgacttgtaagtctaaccctagttgacttttctacttctacagctgttttcctctcaccctaccatactctagtcacagaggccttctttcatctcagatatgccaggcttagagcctttaaactaactgtccactctctctatccggatttcttttcccctttttgtgacattaagtcagtgcttaactgttggccctcggggcttttcctgacaatccattctctgagtcactgaacctgtcttagttctttgcataacccttttccactatctcatgtagtcttttgtttattgagtttcatcccccatgagaatatatgctccatgagagcatagacctttttactgctgttatgtgtaatacatagaacagtgtctggtacatagttaatgcttagtagatatttgtggaatgaatgattgtgtgaatgaacaaagggagcagatttttttaattacaaatttttaatacttaagatattaactatctgattaacaatatccttaggcagagtgggaaaaaaagtgactattctgattttggggaaaggagcgctaagaaatatttatttttctgtcttttagcagaatgcaggaatagttatccccatttttttatttacatagtgaaatattttttaaaaatttttctataagaccattactcagcagcaaaattatttcatgtatggttttgtttttttgtttttctagcaaaacatgacagatttt

SEQ ID NO: 68766 - DNA, 1031 bp, Homo sapiens
ccaaaataatgtataattaggtctattcattatcttgccatatgctaagtagatgctaaggatttatcactgcagtaaaagtcactggatcattacagttattttatggaaatatgttttaaaatttacaattcttttttgtaagacagtaacaaattattatgcagaatttatacctctgcctaagactcttgcaaatataagctcctgatttggtagagatcttcctaaagattgaatatttaaaaatcaaaatacttgttttctttttttgaaaaaatgccttctgtagatatatctgggtgagaaagcaataaaatataaataaaaatcttttatcaacaacatgtagtgtcattacttcatgactgattgtcagtgtgttgtactgaggagtgtcactggtttgtcccaaagaatgaagtggtggcagtgatggcagcatctgtttctaacttgtggtttatttctcattttcaagatcctgttgccactggtttttctccccagtggttggttaaaattcagacttgtttcatgaatacatggcagtgtgatcttaggagcttgcagttgctcagtagccaaccacacttagaaagtttgatgtaaatatttgtactgcaagatactctttgttgagataccaagtcccagcaaaaagtagcattaaacctgaagaccacagaagccatggaggaaaagcacattctacgacttgagctttttttctgaagctgtgtgtagctgattctatattttattctctaaggtgaaatctcaaactttttgaaaagggtcactaaaagagaatgaaatcatgtcttttgcagcaacatggatggaactggaggtcattaagtgaaataagccaggcacagaaagacaaacagcacatgttcacattcttaagtggaagctaaaaaaatgaatatcatggaggtcgacagtggaatgatgacagtatagggggaaggggagctggagaaaggttggttagtgggtacaaacatacagttagatggaaggaa

SEQ ID NO: 68767 - DNA, 1044 bp, Homo sapiens
tgtgaactggtgagcatctagagcagtggttcttaatcagagcaaactcaaaatttagggaggttttacagactggctccactgacaggtcaggttgaaaggtttctggaccctgagagtatgtgtgtgtgtgttctccagcttcacaaatggttctgctataacccaatggtaaacaaaacaacaacagattgcagtgttaagactcagcccgtagaatgtacaaacgccaattgtgaaccctaacaaactccaattgtgaaccctaacaaactgtggtctctgggtgataatgatgtgataatgataattgccgtataaggctcatgtattcatttccagtcttgctcctctcattccctccctttggttaggtatcagatggaaggcagatacgtttaagtcatgagcgagatccacccatcctcatgtatcagttacaaatgcactgtcctacctgcgttaggacaaatgcactaaaactgtataaagtcttcagaggatattcagttgtcatagaagtgagttatatctttggttgagtttttaaacattcattcttactggggtagtatttgggaaacattgtatcaggttttgctggtagagaaagggtaaatcagtaagttaaagaataagtgatatataaggatttaaaaaagaaggcctcaagtttaaaggatatatgtaattacaagatgatctcaattttaaatcagaacacttaagttggatgtataggagacaggaaatgcatgttagagagcaatttagtggtatggaggaattcataaagtgaatttgaaatgagtaagtactatgccggtgtgactggaattaccacctctttacctgtcctcatttacctgtttttctgtctgtctcttagagttgactccctcactcttccattatccagggtatagaacacttcttgccatctgcttccagattccatcccagaataattagtttttatctctttctttcttcccattgttgacagccgtcactttctagtattcgcattgtcaatacaagttc

SEQ ID NO: 68768 - DNA, 1152 bp, Homo sapiens
tggtgaaaccctgtctctactaaaaaatacaaaaattagctggcatggtggaaggcgcctataatcccagctactcaggaggctgaggaggagaatcgcttgaacccaggagtcggaggttgcagtgaaccgatatcatgccattgcaccccagcctgggcaacagagcaaaaactctgtctcaaaaaaaaaaaaaagttcattttttcactcgaatttaaaccttctgcctcttcattgaaacacatcatactcatggacgtagaatacctgttgtctgctccattggcccagccacctactttaggggactttttcttaaattgtattttgaaaaattgatagttggatttggtttccagctaagctctcattttttggcactcctgtgaaatttgaaacctaatttaaatagcagttttctttgctgtaacctaatgactaatacatgttctcaaatcattgtttattctaaaaagagaggatacaaatattaacagatctaggggcaagacttcctattcttagctacttaagagcctgagatgggctagttgcttgatcccagggtactctgcagatcgaatgttggcctcaaatatttgacatcaatatgattgtccctgagaatggagatagattgagtttccattaagattagtgtaaaattgatattttggtagtttagtagccatatttttctcaaaataaagtactagaaattgaatatgcaattcagagagaaatagtgaaaaatatgaggggacttcaaaaattcatggaaaatggatattgtgataaaactatgcatggatttaataaatttttttacaccaaaataagcctgtatgaatgtgttatagcaagtctgaacaggacctagtttgaggcactaagaaggataagacatcagcttgaaaagaactcctatcagagcaacatgaattctgctaaaattgaaggaagaataaacatcaaatttatggtaaagcttgggtggaaggatggtgaaatcattgatgattcacaaaaagtttatggggacaacactccaaagaaatcagcagtttacaaatggataactcattttaggaagggacaagacaatgttagagatgaagcttgcaccaacagactatccacatcagtttt

SEQ ID NO: 68769 - DNA, 1069 bp, Homo sapiens
tgtgtaaaggaatgctaattcagcagagcagacctagcagaagtgattagcataaaagaaccagaggactgagattaggaaaaccaggagaggggagtgttaactgtctcaggtgctacacatcagtcctttgagatgcggaccaagaagcaccttttgactttgtcagttaaagagacatcagtgacctttgctgaggcaatagggagaatagaattaagattacagttaatggaggagggaaagaggtgggagggaggaagtgagaagtacaaatagcctttttgactgagaaggaaaagagaaattcaacaacatcaaagaatgggagtgactaaagtgtgtttttcagctggtacataggagccagtagagagaaaaggttgaagatggagggaagagaagaaccagttgttaggacaaggtgccagggatgttgggaagaaaacagatccagcgacatatgatggagggtggacttaactaccctaagatttgagggcaacaaatatttgcttggggcatgggagtgattaggatggtggcttaaggagagtgacaaaaattttagaatagctgctaaagggagaatgaaagcaaatgaaagagttgtctgccagatggtgttaagagcccatctgaaagtgaaaaccatgaattgttcatcacatcattcaatctgcatgggtagatgctgcctttcatttgaaagcagcatatttctttccttaaaaaaaaaaaaaattggctgggtgcggtggctcatgcctgtaatcccagcactttgggaggccgaggtgggcggatcacctgaggtcaggagttcgaggccatcctggccaacatggtgaaaccccgtttctactaaaaataaaaaattagctgggtgtggtggcgcatgcctgtaatcccagctactccagaggctgaggcaggagaatcacttgaacctgagaggcagaggttgcagtgagctgagatggtgccactgcactccatcctggaagacagagtgagattccgtctcaaaaaaaaaaaattgctctaaaatgtatctgcttactaaaaa

SEQ ID NO: 68770 - DNA, 1053 bp, Homo sapiens
attgtgctgcaattttattacaaaaatgtctgccttcaaatggggtgatcttatagcatatgcaacagtgaatacacctaaaccaactctgccaggataatacaaaattccttctcagtaagttttagaggtgttttgttacagctgtctgatgagaacagtgaaggctttattatataatagaagatcaaattgatttgggggtaaggatagtaagcttactatattttaatcttcatacagtatttataggttatggtttatgttttttattatcttttagtttctctgatttatgttttttaaagggggctgtcgttggcttttagaactgtggaaaagttgtttcattgacttctttttcatgtttctgagaatggatttgttttcttttattgtatgaggagtttaaacttgaacatatttgaaactaacaaagccttcactgaaaaaaatgagaaggatcatgaatcactacttctctaaaacatatgcaaacccttctggttatagcaaactgtgttggcttgcttatctatatttcaaattacatgatgaaataattttgttttctcaacttgagatgctatttttaatttttgttacagcagtttcatatgaaaggaatttgttttagcaccagttatgttgcgtgctagatttagttgtaagacaactcagattgaggtatctaaaaatttttatatcagtagcattctaacaaggtatgtacaatatgttttgtaaaatggtttgcccatacactgttaaaaatccccattttgggtaaagggcatgaactgtagaagaaatacagtcagccactaaatgtcagtcagcatttaattaaacacttacaatgtggtaagcactgttctaattgcttgacatggtttttctcatacaataatcagaaaaatctcatgagtattacattattatgtttattttctgagtaaggaaatggagtcacggggaggctaagtaacctgcctgtggtcagaaaactgttgagaaaaggagctgggcttgaactggggtcatctgacttca

SEQ ID NO: 68771 - DNA, 1020 bp, Homo sapiens
aataaatgggaattttaaatacctgcatgttctgtttttcttttttccttttttcagccataatgaaaggaaagtgacctgcaaacatccagtcacaggacaaccatcacaggacaattgtatttttgtagtgaatgaacagtaagtaaagagtttcatggaatgcctgtattcaaaattgggttagcattgaaattgctgttatttatatttcaatttagcagttttcttatctggacatttgtagtcaagtataataacagaatgccagctgttcacaatgtgtcatatagaaacctgagttaaacatttttttcatgaagaatgtaatttcagaagctgtttttatagtacttcaaacgcagtaagctcaagaacccgggatgcaagcttagagaaactgtgtaaatggttagattattaaactaatttgagctcacttttctcatccttaaatcagatagtggtaattactatttcacaagagttttataagcatcaaagaatgtattatactataaagctattcacagagttagttactgaaattgttattgtttttaaaattagaataatctcataattcatttttaatttttcagttgggtgaccaagtagaatatctgcaataatgcctattataaataaacatgataggccgggcacagtggctcacgcctgtaatcctagcactttgggaggccaaggtgggcgaatcacttgaggtcaggcattcaagaccagcctggccaacatggtgaaaccctgactgtactaaaaaaatagaaaaattagccgggcatggtggaacgtgctggtagtcccagctactgaggagtctgaggcaggaaaatcacttgaacctgggaggcagattctacagtgaaccaagattacgccactgcactgtagcctgagcaacagagtgagactcttgtcttaaaaactaataataaataaacatgataataatgtatttttggcttaggaaaagcgttagctgtatttaaagttgttgta

SEQ ID NO: 68772 - DNA, 1090 bp, Homo sapiens
aataatcatgatgacagtaataataatagctttagatagactacagtaaatatgttttaaaaatcttttcagttattttatgtttaatgttaaaattcctaccctcccaaatagcaagggatacatatgcttttagtgtaaatgttctatgccttctttgttgttcttgttttgagatggagtctcgctctgtcgcccaggctggagtgcagtggcacgatctcagctcactccaaactctgcctctcaggttcaagcaattctcctgcctcagcctcccgagtaggtgggattacagatgtcctccaccaagccagctaattttttttttatttttcgtagagacggggtctcaccattttggcccggctggtctcaaacacctgatcttaggtgatccacccaccctggcctcccaaagtgctgggattacaggcatcagtggccacacctggccaacttttatttttcaagagaaagaagcacatagtctatcttagtaaattttcccaatgtctaatgttgcctccaatctagaagccatggtttatatttaacctaaatatatggatggttcataactttactccaagaaaaatagtcaccttttttttttaattttttttccttggtgaccatattccaaagcttctagatatcttcatctatagttgattacagatatatgtatatagatctacatcctttccacacgtcataaacattggcagcattaccacacctagtttctgatagaagcatttttatttattggaatatggagggttggctggctcctgagaggcctcctagagtggcatgatcttggcagtttcgtgcaggttcacacactcagcttgatcttttcagagtctggaagtgattaggctcagggaaagacctagatatggcaactagaatagtgagcaagtacaactgtcgagtgacctagacacatgctgttaacgagctcattctttcagtggccaggtggacatgggatgccagattctaacccaagattgcttgatgtgttggaattataatggtaaaataaggtctgtgccagccactcattaactcatctgat

SEQ ID NO: 68773 - DNA, 1047 bp, Homo sapiens
gaatacaaacaaaaggagttaattatatggttcagatctttgatagcatcagactatgatttcctgttgcagccatttccacaaccagactcatgtttgtctcatgagtcaacaagcagctaaccttggctgggagccatgtggctcctttcaagggactatctactgtggtcctttaagtgtagactttgtggtttaactgtcataaggcaatcttaatttgctttattttcagattcctaatggtgggagcacacatcactttttacgctctagttctttatgttttctttttccccctttctgtttatacattctggtgttgtgcttgaatgttaatatcacagcattgggtatttgtgtagacttgtccactgtgaccctttccagtcccctggcccccacccccgtaaagtataatttttcctagattgaatcccagaagtaatatgtacattatttcatctgatttactatgattttcttctctgatttcagagtggacaagattacatctgaaaatgcaccaactaaagaaaccaataacattcccaaccatagagtgctaattaaaccagagatccaaaacaatcaaaaaaacaaggaaatgagcaaaattgaagaaaaaaaggcattagaagctgaaaaatatggatttcagaaggatggtcaagatagacccttaacaaaaattaatagtgtaaagctgaattctctgccatctgaatatgagagtgggtcagcatgccctgctcagactgtgcactacagaccaatcaacttgagcagttcagagaacaaaatagtcaatgttagcctggcagatcttagaggtggaaatcgccccaatacagggcccttatacacagaggccgatcgagtcatacagagaacaaattcaatgcagcagttggaacagtggattaaaatccagaaggggaggggtcatgaagaagaaaccagggggtaagtgtctgtcttgtcattatgaacccaggtttctttgatgctgtgttggtggagattggtttctgagctactgattaa

SEQ ID NO: 68774 - DNA, 1027 bp, Homo sapiens
tgatatagctcagtgcttaatctctagctttttgcatattaagcctcctgtagtatttcttcaatttatgaatgaccaaacaaaccaaggtgtgtcagagtaaattgctttagtactagggcagtctctttgatggagtcagctttccctagctgacatatttgcacatagtcatgggattgccagctctggatgttttccagtttctggctttcgtgtgataggagacggtgaagatggggaggaagaccaagcagaaacaaaataggaaatacccatggagggaaagcctcaaggaattgaactctttatactggttatataagagcaattgggtacctttctccctctctccaccccgaaggcatcgaatcggatggttggcctgaatgcagcggttcttgtctggagacatttcgttcaattttgaacaacctctttttgagtagagacattgaaatcctgaagaacaaccaccatgatgaaggaaatttagtttaggagaaacggttgaaagaattagaaatatttaaaatacaaaataaggcatagaattttagagctctagaataagtttatgatgaaatcatcttctagatgagaaaagaggatcccagtttcagttggccattggctagattttaatagcatattaaagagctctctggtgcgataagattatatccttcctaatttttaatacctttttatttttaactaagtcattgtgatagatgagtatggttttttaaaaataatattcatatcgtggcaaaatttaaaaatagagggatttttttaaaaaatcaaaaagtttagggatcactggcatagttaaaagagtgctgctttagaaagtaggagacctgcattttagttctatttagcccgcaagctctttctgtaaccccaagtatgatctcttggaccaggtgtggctcacacctgtaatcctggcactttgggaggccaaggtggttggatcacctgaggtccggagttcaagaccagcctggccaacatggtg

SEQ ID NO: 68775 - DNA, 1023 bp, Homo sapiens
agaatttggaaaataaccctccttcatgtttacattttaattatttttttattttagagtaatttcttaccaaacattaccaagaaatatgccaagtcacagagcccagattatggcccgctaccctgaaggttatagaacactcccaagaaacagcaagacaaggcctgaaagtatctgcagtgtaaccccttccactcatgacaagacattaggacccggagcggaggagaaacggaggtccatgagagatgacacaatgtggcagctctacgaatggcagcagcgtcagttttataacaaacagagcaccctccctcgacacagtactttgagtagtcccaaaaccatggtaaatatttctgaccagacaatgcactctattcccacatcaccttcccacgggtcaatagctgcttatcagggatactcccctcaacgaacttacagatcggaagtgtcttcaccaattcagagaggagatgtgacaatagaccgcagacacagggcccatcaccctaaggtaaaatagctgctgattttgtgttaactcactaccttataaatgctgtgttttctttctagtatactattttaaatgtgagagacaaaagaatggggataaagtaagcaaggcagctcttttttgttttaaaaaataaataaaaatattttacaacattaagatctcatgtataaaaaatacctaattgcaacacttcatctctcaggaacacaggagcagttcttttgagcagatgcattctgttttctctgcttgataccatatctcatcagttctccgtgtagcttaacaccacatgcatttttctgttgtttttgttgttgttgttgttttgttttgagatggagtctctctctgttgcccaggctggaatgcagaggcataatctcagctcactgcaacctctgcctcccgggctcaagcgattctccttcctcagcctcccgagtagctgggattacagacatgcgccaccacacctggctaatttttgtatt

SEQ ID NO: 68776 - DNA, 1067 bp, Homo sapiens
tactattacttgtgatgaaatggtaaatgcataaagcatttctatggcataccaaagtgctaaccgttgtctcacagtaaaacacatgatggagttgcaagctgaattagttccttttattgtgaaacatatttttacttgaacaaaagacaactgtcaatattcagacgtggtatttgatagacacactttctcaaagtgaatgctatcctgtcacttcaaggaaaacaactgacagtatttgttactgataacaacgtttgagttttcaagcaaaaaatagaattttgaaaatcatgtatctgccaccctgaacttgacagctttccggtgcttaaagattggcggtgatattaacagttgtgatgtttttatattgtatactgacatatgtcaatatttagaacattgcataactcactgaaccaatattttccagatgaccagtgtttgatgtcacaagattcatttaaagtacaaatagaccaagtggatattaatgtaacagagtatcaaaagttcattgataaggtttcagatatcactttgtaactaacctttaaaaaatatcagttttttgagctatagcgcagtgtcaaagatgaacatctataattatcaagaaaaactattaaaattctctccttttttccaactatatatattgagggtagattttcttcacatacttccactaaaagagattatcacaacagattaaatacagaaacagatacaagaatccagccagacattaaagatttgcaaaactgtaaaacaatgccactcttgccactaaattttctttttaagaatataaagggatcctgaggtcaaagagtttttgagaacctctaaaccagattttagaattactctgttcaggccgggcaagtggctcaagcctgtaatcctagcactttgggaggccgaggtaggtggattgcttgaggccaggagttcgagaccagcctggccaacatggtgaaaccccgtctctactaaaaatacaaaaattagtcagacgtggtggcatgcgcctgtaatcccagctacttgagaggctg

SEQ ID NO: 68777 - DNA, 1159 bp, Homo sapiens
cgtaatttcttacaaaacaaaatataattttgtaatttaatatgtcagcggtaccatttacaggggagcatgtgcgtgaaagttgtcgtgtactgtgatataataggttgtagtaaattacctgtttttcttattccaaaattgaccttttcttgaattccacatcctctttctctgtcccttttttcttaattggtgcctactagaatgaaattctttcacatcatctccaaaggaacaccatatatttggatcatcaggtgggattcatagagattttcttacttttaatacttaatagaacttcttaaatataatacagtttttcaggcttctcagctatttcagtcacgttgaattaataacatgacttttacaagtgatagaatatgaaatctctgaccaggtggattcaggaattccataataaacagggagaaaggacaggtgtggaggtaaagagggatacaaatgctgggtcacctgaaattgagggcctaaattctctagacttcgttcttcttatcccattaaaacacctactccttgaggcttatctcagcttggagctgacctaattaaaggaacagacaccaagctgtgaattgtcttgttggaaggcaagaaggagggtgaatgtagtgtgctctgtattcctaaaggggagtttaaaggtgggtgaagttggctggatgcaatggctcatgcctgtaatcccagcactttgggaggctgaggcaggcggctcactggaggccaggagttcgagacgaggctggccaacatggagaaaccctgcctctactaaaaatacaaaaatgagccgggcgtcacagtgaacgtctgtaatcccagcagcttgggaggctgaggcatgagaattgcttgaacccgggaggtggaggttgcagtgagccgagatcatgcaccactgcactccagcctgggctacagcgcaagactctgtcttaaaaataaagaaacagagaaagagagagagggagggagtaagggaggaaggaagatgggtgaagtgtgtagtggaggtgatttgcagttgcctgtccttattccctgtttgctgtgtacttccaatgtttggtctttgccaacgtgtgtagagccagttttataggaggctcacattcctagcattacc

SEQ ID NO: 68778 - DNA, 2091 bp, Homo sapiens
atagagtctctataaatgtcaagattacctttaataaaatatgtgattaagtgacacattcagtatattatattttaatacttgtagagaactaattttttataaccttacacagaactgaatatcattttcagctttattactgaattcataatcaaattgtaccatttttctcctgattgtgtaggttctcaccctttagtttaccctttgaattatgatttatcatctattttattatatgtagaaatattcattaattgactatatcatgattatatgtatgaagtaaaactagttgtgacagtgttgcaattagtagttttttcttggaagtatttcacagcgtttaatacttgtttgaaatggtttatatgaattaaatctgtacaaccatggggtaaaatgtaaacaactgcactattaggaagatattaaagtagaggctatatttacagtgtcgtctttcaaatctagctatgctgtaaactgatgtttgctgtatgctcctcctgatttgaaatagatgaaagaaaatgaacctattatcaccatggttcacacaatgattgagaactcggcgctaagaccccaactgtaccagcaagtaaggtcttggacagtgaatgatactgctttatcatctgcaaaatccctcagtgacagttttgatttattctcagatttactcatgacatcagtgtttttcttattttattttttgtttatgtttatttggaaaaccacaattcatccatgcttttcaagatgctgcagtattcttagcatggcttcgctgaacattttgctgttgaatattaaatgtgccattttcctaaagtttttgtgcagagtatttgattgatatgtacttggaggtctgcagtacatttgcaaaattactagattttcatatggttttattaactttaaaagcattatacctattttttagggaaaaggctttgtaaaaatatttactttcaggggttgccctccacaacttcccccaacctagtgttttaagaatacattatatttgtatgggcgttatttaaatctagtttctgtactatggtatggtaaaacttaaagatagccactttttaacatactgggggtattttgtcgctgtattcttaccattctcaagcagtcgtcaagactatcataagttaccctattgtttttccttattcaaaatgtgtgtcatggagttggctggctttaacttaggaaccttagtaatctgcagatctgcaaaagaagtcatatgtttctatcaaatttttgtgtatctcatggtctaaatgtttctagctatgtgtttctcaacatcagcttctttcacttcaacaccctcaaattactctggcgtatgacctttacaatctttaaaaatcatgcagaagaagaaaattaactaacatgaaaaatgaatatatattttgatttaaatatataaggcacctagtaaaaagaacgactttgagctcatgctggcttttaaggcctctatttggttcagttgccatgggatctgcatcacagggccatgtaactgaggaatggatacaattgatcagagggtgacttatatttcagcacagttttcaaaatatttaaagtatattattagatgactgaaaatagtctcaaatttgcaataaagagattaacaaactattaaatatttaaagttaaacagctttacttatcaaaagaaaatggaatctttcaattcttaaagtcaccagattatagaccttggtactctattccaaagtaccacaccgagagtatttggaataagtattattccgaataagtattattccaaaactgataccttctgcagtgtctgaagctgtcagtaaaatatatcatctataagatgctaaattgacatgagatcaaagggattttgttgtaataggttatgtttttatcacattttgcatattttagatgagaatggtagcctggatttcaaatctgtttggtttggttgggtttttttttataatgctcaacattcatggttcaggatgcggaagtctgatagtttaaattatttggttgcattaaaag

SEQ ID NO: 68779 - DNA, 1759 bp, Homo sapiens
ttactttttttatcatagatctacctatttaaaacttacttcatattactttttttccagataggaatataaattattttcttggatctaggtgctttaatttacaatgacagttgacacttctcaggacacacctgaggatacttattttgaatagtataagagtattctaacttttgtcattaaattcatttttcatgtaatattcattcctatgaaagttttgtggtttaacaatcactgcatacccttaaatagtcacagattcatttgcatgaggtatgtgaaagtaatgtcttgaaatgaaatataaatccaggatttattgtatgtttggaatgcttatatttttaaccttctcctgattcccacatttctagatcaattcaaagttatctcctgtttaaatgatgcttccttttaaagctgtaactgtcaagcagtttctttcatagagaaaacatatagaattgtcatttatacattcttatgtattatgcgtatatgaaatttaattttttaaactggaatgtaattgggacacattacttctaaccccaccttgaaaacattgtgccatttagtaaacatgcaatgagccccatttaaattttttctactgtgtttttgttattttctcacagtcaatataaaaatcaaaagacaagaaaaatagtgaagtattgcctgcagaggctgtgatgttatctgtggtataactgactgggatggctattgaaatcttgctaagcacaatcagaagtaaccaaaatatcttttaaccaaaatgtactgggcagaagctgaagaaaggatatttaagtacactgaataattccttacaatatagtaacataaatggagtcaactaacacacataaactttttatgaaatttgactatccatagtttataacataggctttcagttttataagatttcgaatgattttcctcttttcaattaaacccatccttttccttcattatcttttagttcttaagacagaagagcaagataagtctatattgtgtatgtgtgtttatatattatatatatgtatacaatatgttataggttttgttaagatgtgttgacatttgagtgtacacatacacagtgtgtgtttatgtatataccgtgaaggatggttttggctgttgaactatgcttaatttaagtatttgatttgacacagttgctacgattgtatttgtcagtttttttattaaaataatgtgtgtctttaaaagaaatgatgtaagatactgtattagttttgtttgaccagcatattattatgtttaacaagcttgttacatacatcgttcgtatgtatcttgcatattatatcactgttaagtattttctactttgttgatcagtgtttgaattaaacttctaaaagtgtaagaatcattaaaatctatttttgttatgttatatatatttaatataaatccaaagtattaattaatagggtaaatatatttttaaataagattttttaagttgctatatgatttttttcttatagctgtcacaagatgaaggtagaggcacattatacaaatacagacctgaagaagtagatattgatgtaagtattagtatgatatatgtggtcagtactctgtcgtattctccgccaaaaacactggaaataagcatgaccaaaaaacttctttctcccaagtcctccaaagtgacatcaggtaaattcatattttatgtgtgtgctctaaattattattccct

SEQ ID NO: 68780 - DNA, 1084 bp, Homo sapiens
ccagctactcaggaggctgaggcaggacaatcacttgaacccgggaggtggaggttgcagtgagccgagatggcaccattgcactccagcctgggcaacaagagcgaaactccatctcaaaacaaaacaaaacaaaacaaaacaaaacaaaacaaaaattacctgggcatggtgttgcgcacctgtagtctcagctactcgggaggctgaggcaggagactctcttgaacctgggaggtggagcttgcaatgagctgagatctcgccattgcactccagcctgggtgacaagactgaaattctgtatcaaaaaaaaaaaattttaaatgaaccaggcataatggcacatccatgtagtcccagctacctgggaggctaaggtaggaggatcactggagcccaggagttctaggctgcagtgagctatgatggtgacactgcactccagcctaggagacagagcaagatgttgtctctaaaaaaaaacaaaacgaaaacctttctttatcaaattcttatttcgcctccggggactccgccccatctaagatagtctgcctttgatagctgtttcagctgcctgctgaatcttgcctacaaagattacaaacaaatgacacatcatgaagccatcttgctggcaggttggatgagaaagttttccatctgagaacttgctctggagctgtgctgaaggataacaggttgtaacttggctctaaactctgggactgttcagcaggtcccagtggtgacctccagttataattaggcaatgacccataaatgtgcagacagattagaaaattagaggaggccagcagcgagtctcatgcctataattgcagcagttggggaggccaaggcgggtggatctcttcaactcaagagttcaagacaagccttggcaacatggtgagacccctgtttccgtttctactaaaaatacaaaaatatgtgtgtgtgtgtgtgtgtgtgtgtgtgtatatatatatatatgtatatatatatagctaggtgtggtggtgtgcacctgtagtaccagctactcgggaggctgatgtaggaggcgggaggatcactt

SEQ ID NO: 68781 - DNA, 1011 bp, Homo sapiens
aggagagagaattgtttgagcccaggagttcaagaccaacatagggagttcaagggaaacacagggagaccccatctctaaaaatatttcaaaaattagctgggtgtggtggctcacacctgtagttgcagctacccaggaggctgaagagaaaagatcacttgagctcaggaggtcaaggctacagtgagcagggcatggggccactgcatagcagcctaggtgacagagcaatactctgtcacaaaaacaaacaaaaaacaaagcagcaacataaagaaaacaaccaaacattcagctgtgaaataattgcctttaagtagagtatgtaccaattcactcagcttgttggactctgatgtcaatgaggccaggagcttaccccccccggggggccaggagattcaaatacaggcaacatttcttccatcatcaacatccctacttccaatttgtcatcgcaaaagtgctgttattcccaagggattttaaggaggtgatgtagacaggacattttcaacactcctggggaaagtgtgtctttatatatttgtaatgtcagatcagtagtatcatcttgatattcaagggactgccctatcctaaaacataaacttgagaaacttatgttaagtgaatagcatggaagttaatggtcaaatgcagtatgtctcttaccaaaggagacttggacacagaagagcctcacatttgtaaatgctttaaatcctgatttccttttaggtcacaagtctgtcttcccttgccaacttcatacgtaatgcaatggcatcagcttttggtgaaagcttgattgattccttcttcttcttctttttttttttttgagacggagttttgctcttgttgcccaggctggagtgcaatggcgcaatcttggctcatcgcaacctctgcctcccaggttcaagtgattctcctgcctcagcctcctgagtagctgggattacaggcatgtgccaccacacccagctaatttttttgtatttt

SEQ ID NO: 68782 - DNA, 1003 bp, Homo sapiens
agtctccgtgtgagtgcgcgtagtcgcgcgcctgtccccgcgcgggctccgtagcgcgtgtgcaggctgacgcagctcgcgggccctcctcctgctctgcagcggcgtcggcggagttttgggcgtttgggaggggggcgagggagagagagtcgagagagggaggcggcggtggggaggaggaggaggaggaggagcaggcgccgccatggccgccgctatcaccgacatggccgacctggaggagctctcccgcctgagccctctgccccccggcagcccgggttcggcggcgcggggccgggctgagccccccgaggaggaggaggaagaggaggaggaggaagaggaggcggaggccgaggcggtggcggcgctgctgctgaacggcggcagcggtgggggcggcggaggcggcggcggaggagtggggggcggcgaggcagagacgatgtcggagccgagccccgagagcgccagccaggccggggaggacgaagacgaggaggaggacgacgaggaggaggaagatgagagcagcagcagcggcgggggtgaggaggagagtagcgccgagagcctggtgggcagcagcggcgggagcagcagcgacgagacccgctcgttgagccccggcgccgccagcagcagcagcggggatggggacggcaaggagggcctggaggagcccaagggaccgcggggcagccagggcggcggcgggggcggcagcagtagcagcagcgtagtctccagcggcggcgacgagggctacgggactgggggaggcggaagcagcgcgacctccgggggccggcggggcagcttggagatgtcgtcggatggggaacccctgagccgcatggactcggaggacaggtcagtgctctgaagcgtttccccttcccttcctcctcttgaactcccgggcccctcagagggggaccaaggcgacgttttgccgcgatccccctgctccccgaatcctcggcccctcccccag

SEQ ID NO: 68783 - DNA, 1006 bp, Homo sapiens
gatcatattcatgttagtgaatttctaggaataacacagccttttttcttcttttgtagcataagcagtactataatggatgtagacagcacaatttccagtgggcgttcaactccagcaatgatgaatggacaaggaagcactacttcttcaagcaaaaatattgcctataattgttgttgggaccagtgccaggcttgcttcaactctagcccagatctggcagatcacatccgttccatacatgtagatggtcagcgaggaggggttggttttgtcatttctttttttcgctccctgttttcgttagttttattaatttataattgctagttaggcttttttgctgaaagtaatttgggattatttttacacaggcttagttttttcaagtgaatttttaataattatttcccatatacttgatagaatcaaataaaaatagggtatgtgctggattttagtttgtttttagatacgttattttgaagaaattagacttttaaaagtatagtaggtgacagtattattaatgaatacagtgtattccagggttctgatgttttgagttgagaacatttagaattagcactttcttgattttcctttgttagaggatcctaaattattcctgacgcttaaattaactggggagactattggtaccaggattagtgtatgcaattctattaaataacaacctgaactcattatttgtgagtgagaattgatcatctttcccaggtcttgtcagagctgatttagatggaaagttctgattagttagtattgacctatatgtcctttcaggaatacatttaattgtgtcagttcatgtaacttctattaggtactgaataaagagctaagcaaattgggtaagccaaaagtaatgtgccaaaatattaatttatacattgtttcaactttacctagaattttgttgaatagttatcacacttagtgcatttttcagaaattaatgtcacagtgtaagggcaggtaa

SEQ ID NO: 68784 - DNA, 1230 bp, Homo sapiens
attcaggaatccagtcattgccaggatatctaattatttgttgcaaaaacagcttagtgcttctgctataacaatgattaattcaaaaccagatttttctgggaagaagatcccattatttttgtattgcatatagtggaaatagcagtaaactgggaggtcgtgaaacttgttgcattttcaagctttgtctaatgtatgtcatcttacttggcaacttacttcgtaaagtgaaaagactactagtcccttatgcttcctttctggaattagttctattgtactacttatttacttccgaaaatactagatattcactcattgatattcttctcgtgccctacacagcatgcctgacgttatttctgttttattttcttttagtgtgttgttggtggctgcaatgccagctttgcttctcagggagggctagctcgtcatgtacccacacacttcagtcagcagaactcctcaaaagtttctagccagccaaaggccaaagaagaatctccttctaaagctggaatgaacaaaaggaggaaattaaagaacaaaagacgacgctcattacgtaagtgttacactgagaaaatctggtgtatttcatggttttaaaagatatcttagacttttatgcaaatccactttgaacttcaactcctcttctattaaaagtaacaaacaggtaggatgcctgtctgtcagtgagagtgagaattcagtggcacatgtttgtagtagctaagggagtatatgtggccttcaaatataaactgtataaaattagatttgggggctactctgattctcttccaaaataacatttaaaatatagtaacattggtatttctagaaatattttagaaaatttgaacatgttaaaagtaaatatcaagtgaaagttaagtaatctatctactccaaagtagtgtgtgtacctgagctgggaggtagaggctgcagtgagccgtgatcgcgccaccacacttgaacctgggagacagagtgagaccctgtctcaaaaaaccaacaacaaaaaaaaccaccacaaagcaatgtgtgtggataacaaagcagtgttgctttttttttttttttttttttgagatggagtctcgctctgtcagccaggccggagtgcaatggcgtgagacagggtttcactgtgttggacgggctggtctcaaactcccgacctcaggtgattgcctgtctcggcctcccaaaatg

SEQ ID NO: 68785 - DNA, 1954 bp, Homo sapiens
tttttttatctttcttattaaaattttctttttataaaaggaaatgagggtatattatagacatattggacaaaattaataagcatcaagaatagaataaatttcattgaaggagatttcattatgtgtacctaattcacgtatgtggccaatggctgggcgcagtggtttatgctggtaatcccagtgctttgtgaggctgaggcagaaagattgcttttagggcaggagtttgagatcagcctgggcagtatagtgaatcctcgtctctacaggaaaacaaaaaaagaaattagctggttgtgatggtgtcgcctgtagtcccagatactcaggagactgaggcgggaagattgattgagcccaggaggttgaagctgcagtgagccgtgattgtaccactgcaactcaagcttgggtgacagagtgagaccctgttcaaaaaagtcaaattcaaatgtgtatattcctaatgttttggaaattgattaatccaaatatcaaaatacattcatttgaattttcttgtagagttgaatttctttgaattcagtgttatggccgcatgcatttttttttttttttttaatggagtttagtcttacagggtttttatttatttcttttttttttttttaaatggactttaatcttacaggttttgtttctgttttttgtttttttggttttttttggagagagagtctcactttgacgcccatgctgcagtgcagtggtgcactcttggctcactgcaacctctgtctcctgggttcaagcgattcttgtgcctcgttctccggagttgatgggaatacaggtgtgcgccaccatgcccagctaatttttgtatttttagtacagatggggtttcaccatgttggccagtgtggtcttaaactcctgggctcaagttatcttccccccttggcctcccaaagtgctggaattagaggaaggagccaccgcactgggcccttttatttctctcttagtaaagaaacttgctgtcagatttccagcaagtcaaaatcaagtatgaatttcactcattgagttaaaagctagccagtgtgttctgacaaatttctaatttgataagatattgccactgaaaatgtttaatttattcctcaattcatgtttaaaatttaacactgccatttcttatctgggactccaagtcctgctattaaggttgatagctgagcttccctggcttctgggaaacttgttcacttaacgtggactgatcaaagtagcagaaaatgccagaatgtgaaggcacatggaagtgtaaatctaaaattaatgttactttattattgacttgttttttaattcatagtctgcctgatgtgtgggtgaatgaaagtgaacgacatcagttaaaaactaaagtagttcatttatcaaagctacccaaagatactgccttgcttttggacccaaacatatacaggtaatttaattcttgcctttatgttttactttttgatttgtaattttctctccccaaattttggataaattaggacttagttttaagtgctgaattttaataccaagcatatctcattacttcctggcttttttttttttggatgtggactcacaaagagttaaaaattgtagaatccagaaaaacagtattttgctaataaagtttatatgcttgtttaatcccagatttatcttaagtatgttagattgtaatatacatagtaatttgaaaataagtgccctttaacaaggtaattctttttataataacagacttttgtggacctaagaatatgttgcatgagtctgaataccaaaactgtttgattttttttagcttaccctttctccaaactttccaaaagagcaattcaaatattatttgttttttaagacatagcttagagtgttcacatttctagtaattttatgttttgagctttttttagtg

SEQ ID NO: 68786 - DNA, 1068 bp, Homo sapiens
attttagctatcataaagatagcaaattttatattaattaagtgctttgaagggtatattcattccacgatgcacctttttggagtgctattcacctggagatttcctgtaatttgagacattattctgtgagtgaaattccaacataatgggcattgctatgtagaagcatagttttccctattacaataaaaggtttttttggctgggcccagtggctcatgcctatcatcacagcattttgggaggctgaggtgggcaggtcgctgaagtctaggagttcgagaccagcctcggcaacatagtgagaccctgtctctacaaaaaatacatggtggcacatgcctgtggtcccagctactcaggaggctgaggtaggaggattgcttcagcctggaagttcgaggctgcagtgagccaggattacaccactgcactccagcctggctgacagagcgagaacctgtctcaaaaaaatttttttcttctcaaacatcttttggtgaaagtgctaattaatacaataaaacttattctttgtggaatgaactagatcatcaaggagaagaagattgagagtaatctaccaaaaatttgggaaggttacgagttacttctctataaagaaaaataattgagtgttgttgatttatttgtacctaatttagagttatttctgtttactctttggagagatgaattaaaattagcatcctaaaagagtgatattttgggagagccactcttgccttttagaactagtcgtaaacctctcttagagagttgtcaaagggccatgaatcttaaattaagattaatctgtgtttctgcctgcatcctgcttccttctttccaagagtcttgctttctcaccaaaccagcttattttttttctgttcttatgccatataggaagcaatttagacattttagtgaaagtgacttaaaacaaaatttaagcttgaactgatgttctgaagtgcataggaacaatgttgcatatactcaaatttatgtgtgtgattccacaagtcttgttgattttattcttggaaatgaggttgttct

SEQ ID NO: 68787 - DNA, 5225 bp, Homo sapiens
ccaatgtgctgggaagattacaggcatgagcctctgggacccagccaagcatcagttttaaagtattagttggctaaaatatatgtattacacatggaattctttcttagaaatgcactagcaggctacatttaaaacttttattaaacaactatattatgtaactaagtatagatccatatgtataaatgttttggaaatacatttttattataatctatgatcatcacattgcctgtatcttattaatatttttaatgtctcttgaagcactcaaatgtgtttgattcagttgaataaaaggatttctttttctctttttctagaacaatgccgcagaagaggttgaagaggtaaaaaataaataaatacataaaaagcaaacaagcggggacacctgcagtcttagtcactgacaatgggtttagggaaagttgcacattagagtcaaccccttcttttttttttttttttttttaaatccagtatttaggataatatttatgcttagtgtaaacattctgtgaatgaagtagactcttcggtggaatatattaatatattactgtatatccacattttcatggaatggtactgtgggagactgagcaaacactcttttggcaacttagtagaacagcttcttaaaggctttgcatgcttgctgctttaagctgcttttttttttcttttcttccctttagtgatttcagtagtttatattggaaagaaaaacaattacaacatgtgcccttacaaataccaaaagcactgtaaggatatttgtcttgacagtgtttattgatttgaagtcatattaggaaatatttagacaatgaaaattatcaagagataatttacctttcaattatgataaatagatgtgattggttgccatttgtgttcttttgcagaactctgataagaaaagtgttcaatttgtatttaagcaaacagtgaacgacgtttgcaatcaactaaaaattcgtctatcgaattagggctgaaaattactgttaaagagtgttgcagtatgtctggtggctcccttttcaggactagggctttctcatggagtacagtatgttaatatttacctatataactaatctgttaacggtttttgaaaaacctttcaaattatttgaataatcttcatattttcatttaacctatatgactctaattttttttctgaggaaatcatttggtttttgagttgttttttcttaatgtaagaaaaattgtattttttttacaagtatcttcaaactgaatcttttatgcaccaaagttggtcttgaaaaggaaaataaaatcactttcttgcttggtaagcaagaagccatatcgattttttttaacttacagaaatggaaatatgtgtaacttgttagtattgtattaaacaaatgttgcatagagataatagaacattgcttgtaaataattcagcagatttgtaatatatttttatattttgaaatgtactgtagatgttttctagaggcatgaaagttaaatgtatatattatggtagaaataatattgaaggatattgtacttcactagtgctgccagaggaattgttaataaaagcaccttctttaacaataaatgtctttcacagacttaagggactatgtactactgttaatatctctaagaacaaaacacattgaacatccttccagaaagtctttgagggaggacctatacccataatagaattatggcactcatttctgacagtgatcaagaaatcagttatttccttactgttggaaggacattgtaaagtatgtggttatatgcagtgaaactgcagaaaatactcctggttgaggagttttcactttactacagtgatataaaaaccagcagtttttacactaaattttttaaagaaatattagacaaaaatatagaattaaaacctttggttccaaaatgggaaaggttccacgatacataaatcatttctcatttgctttaaaaaatttaaaagtgtaaaaattatgagagactttattcgttaacaatgggggtaaagagctatatacatgaaaatgagtcttataaaattaagtgaagtgcaaataaaagcactgctactataagacattctggaatggttgtttaataagggtattatccatttgatctatagcaatgtgattttatttttaaaaagaaaagcagtgtgttttctttttttgttgttttcttttgcttaagcacttcatcaattgctttattctgtatctgcgaagtaatctgcaatctcttttgttctttttaaaatttgatttgttataaaattgccaaatagaagtgtttcagatacatagtttgtacctgtatttttattttattgcctcatgttcttgtaagtcattcttaattgaccaatgattgtagaccttgcttgagtattttttctaataaaacaaagcaaatcacatttagcttcaaattgtaacaattcaattgaattttaaaatgacacctgaaaagatacatctgatattttctatatagagcacagtaaataagttttttcattgtgtagaaatacttagatgtcaaaaccagatttcgtgatccttgattaacttctgagtactcaatcaatcataatccttttgctgcttatctgatgttggtttgatactgttaacacaccaaaaagaatatggaattgaaatgagctagctttataacttgtatgtatacatatatacacataacatccaattatgactgggtaataagtgtgaaaattttaatttgtggttttcatttattaatgtctgcccatctgtattgttgctcctaccttcaaatatgacacctgaaataataagtctgttgtccagaatttatgtattgttcagcatcaagcaaactacagctcacaagcatacccatttatatgttgtctatgcctgctttctcctgcagtggcagaattgagtggtgagaccttaggtcctgcaagcccccaatttttactacaggttggcaatccctaatccaaaaatctgacataaaaaatgctccaaagttcaaaactttctgagtgctgacatcatgctgcaagtggaaaattccacgcctgacctcatgtgactggtcatagtcaaaacaattaagactttgtttcatgcacaaaattattaaaactgttgtataaaattaccttcagtctatgtgtataaggtgtttgtgagatataaatgaactttatgtttagtcttggatcgcatttctgagtctcattatgtatatgcagatactcaaaaatctgaaaaaaatcaaaaatctgaaatacttctggtcccaagcatttcggataagggatactcagcctgtctctggtcctttaagaaaaagttttcgattcctttgtctagttgacaaaaagtttggaaacataaacttagaccacacaacttgcattttaatatgacaatgttgatcttggtaataagccagtacattaaattttagtgaaagctgtttcatgtattttacagtaaatactgccatattaggtacctacaacaaatggtggtttttggaaacttttacggtgggtttttaaagttattaatagtccatcatttcatcatttgtgtttctgtatttattttgctaagaactaaataagattttgtacatcagattgtgtttgaaccgtaaggcacatctgctttatctaaaagaatcttaaggtggaaatagtgtaaaatttaaaattttttatatttctaataaactttttatatataaatgttacctaaagtggacacatgttacttctgaatttcacatgaaaggaaattaaagatggacaataattatctctcaatattttaagatttgttttactaattgaaaacagtatgtcagtaaatctttggccttagtgcttttttcccccttttacacattaataaaatgttttaaatatggtaatactcttaaaacggtagaatttgccacagttgtttaaagcatttttattttttctttgaattcttaattcatggtgaacagatgttgggttcttaaaatataaaaatgagaaaatatgtattaaaaatacttgatagagggttttctctttaatcacaacttaaaaaaagaaacctttaatacctctgcataagttctctgaaagaacttaaattcttagtttatatgaaaactgatatgtatgtctgtgtaacaaagcctgttgggtacaggtctacaaggagatactttgtttctaaaaaaggagttaaatcgtgtcacctgaattttttttttttgagataagtggacattttggggattttggttaaaacatatttctctattctaaaaattacagaatatgtattcataaaagggaagaaattgttagaaaatttcctgtgtacgtagtttgtttttaaattaaagaatcttgtgacctggtgtaggacattttgcatttgtaacactgcagttttaatatatttgctgttttttttaaaattagaatatgtttaaaatttaatggttatgaggctctgtagccttaaaatgttttatagtagtaaaatgtattattttcatcttaaaaaaaactaaatatttacattgcataatttatttattgaatcaagtttacgtggtctaacacatggttctgttaatctgaaaattgaaaaggatttgtaagcaggttagagcaggaattgcaacccagatttttttttttctaggtcagaattcttttcactataccaaactgctgctcacagtgtgagaacatgaatgtacattgtgataccactataaagttgtgtccagtgtttctgccacagccagtctagcatgatcattcatggcacaaaatagtctgtaaaatttgttaaatgagtattataggtgagtaatttttacagtaaaatactttggagaattaacagtgataaaacagtagtagggttgaagtgacctggcttaagccacattctgtgatagtgtcaggtaccttttcataagaaccttatatacggatatagtggttcatgcttgtaatcccaactacttgggagggtaagaagggaggattgcttgaggccaagagttccaggctacagtgagctatgattggaccactgcattccagtctgggtgacacagcgagaccccacctctttatttttcgctacggagtcttgctctct

SEQ ID NO: 68788 - DNA, 1121 bp, Homo sapiens
ctcttcctgtttttcccctcttctcttcaaatgcaaggaaagggtaatcttaagattcagaagagtgatttgtttttccccgcgtagtgagcagttttctcgcccccaactaataaaccatctattcttttcccattaagcaatatatatcacataaaaatttcatttagaaatgagcctgtctctggcagattcaccattttaataagaggccctaaacttttccatgctttccatgaaagctaaaggtcattagcacagaaggaaaagaaagagctgtgaaacatatccatactctgtcaatgacctgaggtggggtaggcaactgcaactgcaagactcatcaattgaacatatgtaggtttttagtatctagtagattacacaaaacacatacaggactttgtaaatttgaagggagaaggttggagaatatggcaaaggaggatcatatccgtactagtcagctaggaaaaacaagctgggaaaaaatgagaacagagtagatgaattgcataggaatttctgaaatattctaagaatgccatggattaaataggattttatgaacttgcctgggaagctaatgatcgtttctatgagaaaatgtatttcacttttcaactcaggatatctggaacatatctctctttgtcacagttccagaagaattcccaggaatttagctttccctttactctaatctcagaaggagctataccctctttgaagctccatagagagaaataggaacaaacttacccaaaacacacggtgggtatgagtgctgatttttatccccatggagaaagggaattttacagcaatgagcatagggtctctggtgaaaggtcatatccatacatatctttatagaaaaaaaaaaagaaggcttggaaatagtgagaacaaagcccagagcccagggcttggtgggaaagcaggccctggctccccttcctgcatgtgagttttgacttcttcctgtgctggtcagggctgcaaatggctgataatatcactgaagcctggactatcttcaaagcccgactggcacaaaatgacatattaatgtagtatctcatttcctttgcattctggggacaagtgggattggctcg

SEQ ID NO: 68789 - DNA, 1042 bp, Homo sapiens
attacaaccccaagtgcctaagctcttatttttgctatatgtatttttaatgactgaagattaaggtcctactgaacatggagacacgtaaaaagtgttgggtaaatggaatgaatgagagaacaaacctgccatcctcatacagtttgattattgcctctcttgtggaggtagtcatgtctaataacccatgggacatttagacaaacattagcagactccatgaccaatataggaaaaaactcatactaaagctgctcctgcaatgcacagattgcctcaggaagtgctagtgagttttccatcatttaaggccattcaagcagaatatggatggcctattgttccttcagcggggatttctgcacagggaaggaagtttagattgtctggaagagtctatgatgcaaaaggcagatggggaatctatatcatcagagaggagagaggacaatttcggtgggaatgcttaagtaaggcctgagagcatttagctatgattttcggcacatcgactttggaagagagtatgacctttgctgggcttatagacaaaaatgaatgagtgctgtgatatatcttcaaaaaagtaacactggttaatcttacatggaaaggataccataggaaggccgtgtgtgtgagtgagatacagtatgagtggtctctttcccaccctatacccaggacagttcacatagtcaaattccactgggactctaattgagagagcagagctgtttttcttaatgaaattcaagttttccccctagagatgagctcagaacaaaaatgggactatgttttcttatagaacagctcaatacaggtcacagtgggataaatttcacatacttaattgaatctttttgtgaatggcattctttaatgaatttttaatagaagatacagtgttttcatttagtagcaataaaaagaattgcttcctaaacattttaatagagaatttatatattgaaagctgtaatgcttactcaagaggttataccatgtttattccccaaaagcagatagtgtatca

SEQ ID NO: 68790 - DNA, 1042 bp, Homo sapiens
aattatcaacaatgctagactggtgaattatctatagtacttcattgttgtttaaatttttctttgactactaatttattggccatatatatttttatttttaccatttacaggtgagtcatcctgttctctttcacattgtttcaatctggaacaatatgaagagtgacatgttttatatgaactaatttcctccaagttatctattgtcattgacttgtaaactcactggtttcctgcattcttgtggatgtgattttggagccctattattaggacttttgcagtattggtggagtcacacaaaatgacctaaagatactctcagagatcagaaggagcatgtgagtttcaggcaactgcattcacacttcctgggacacataaatggaaaaggtacaaagatacagcaccaatactaactgaaacggcccttttatcatgaaacagctttaattcaatatacaggccatgagtgatatatagggtggcttactcattagtcattcacattcatacacagaggaaataacagaattgataccaactttgaacgaaagaatagtaaagcatatgttattttccatatagatcttgtcttcgcctatgcctaaattcacagtatactagttacttgctttaatattattattattttttgagacagagtttcactcttttgcccagggtggagtgcagtggtgcgatctcggctcactgtatcctctgcctcccgggtttaagcaattctctgcctcagcctcccgagtagctgggattataggtgcccaccaccacaactggctaatttttgtttgtatttttagtagagacaggtttcaccatcttggccaggctgatcttgaactcccgacctcatgatccacccacctcggcctcccaaagtgttgggattacaggcgtgagccactacactttaatattttaataactgtcttttccatacaacttcacagcatatcattgtgagaaaataaaacatccttaaaaccaagaataaatgaattgttaggagactatt

SEQ ID NO: 68791 - DNA, 1137 bp, Homo sapiens
caccgtattttcctgattagtatgtacatgctttttagaactggagcttcttgtgcccagcctatcactacaaacacagaaatgttgtaggctttggacatttcaatttgtgcaaagactatcaccctatttaagattagatgttaagcacggtcctaaatcttacagggcagatgactttttactcttggtgctgaatcctaccgatgaaagatattactgagtcagtacagacttcagcttctgtgtaaccctctaacgatccccagggcaatatactgttgtaacctttgatcacacttaaaaagtacatgggcaaggttcttatccttgagcagatgagtgcttttcatatgactagttaaaaacttactttatcagtagagacaatctaggctgtcgagagaagttaaccttgtaaaattatcaggttgagttccactttgatgtttttcttgggttattctagatgcttactatagtttgtcttttgtacagttaatatatgtgtgtataaattaggctatattcaatgatgctagctagcatcatcgtgtgtgtgtatgtatacatatatataacatatatattctcatatatatatatatatatatacacacacacatacatgcattatacatatatatatatatacaattccggaccgttgactctggatcaagggtccggaagtgcaatccactgttgattctttgctcacatagttaagtttcccacattgtacaatcttcaatgctttcactactcttctagacttgtgtttatatatcatagtaaatttttggaggacttttttttttccgtttatgtatgtgttacttttcctgaaaaacatcagtgctgttgtatcacaggattggagggaaattaaaggtagagctcaatttatgaaatgcctaacaagtgatcattgttaagcttttgcctaatcactaccataatagggaactaagtccccttccatgccattttgttctccccttttcccctcctctctgtttagatatggtcttttgaaattgaggagtccagaatctggtacaacagatatggtatgactggaacaaagcgaagggtggctgtcacctcttttgtagaacaataatttgtgaacct

SEQ ID NO: 68792 - DNA, 1219 bp, Homo sapiens
gcaagaaaacatcaaaaatattttgtatttgatgaattattcaactaatgaaaaaaaggagttcatgaccagcctggccaacatggtgaaaccccttctctactaaaaatacaaaaattaggtgggcgtggtggggcacgcctataatcccagctacttgggaggttgaggcaggagaatcgcttgaacctgaaaggccaagattgcagtgagctgagatcgcgctgctgcactccagcctgaatgacagagtgacaccctgtctcacaaaaaaagaaaaaaaaaagaaagaaaaagaaaaatagacttttgagggtaaaaaataattaaagcctaaccttataataaatggtaatattaattatagatttaaaagacaaatttttaaaaagacaaaactgtaaatataaaatagaataaaatccaggtaaatactcaacctatcttgggaaataaaaaaaaaattaaataaatctaaatctttttttattttttttatttttttttttttatctgtgaaaaacatttattctgagaatctaaaatctggacaaagtactggactttagaaaaagcctacacaaaattgtctcattcttccctaatacattaataatctaagaataaggaggtgaaaaaaaaccctttaaaaataacattgctccagtttgtctgcaggtatgtgatttaaaatatccctgttttattgaggtataggctgcaaactttggtaaaattagaaaaattaacaaaccctttcaaaaaaaaaatacaaaaacaaaaacaaccaaaccctaacgttatatctttcttggtacatatacagtaactacaaaaaaattcatttagaaaatgtgttcattaagagaaaaaaaaattaaaaaaaaaaccctcttgtaagttctcacttgctgagttaaaaaaattgaatgtaaatgatctataaggctcaaacggttcccaagcacccatccggtgtcaggaagaactggatgaccgcagtttctagaatctggttgacattttcaataattcagtgctaacaacaaagactgtcgtctttagaaagaaggaacgaatcaaaggcacttgcacgtgacttcatgtgctggcgtccgtccgtggccgccttcgtcggacagcgtcagccacacgcctggccccacgtggagcggagtccccttgaggccatttctgcgtggccccaactccctgctct

SEQ ID NO: 68793 - DNA, 1033 bp, Homo sapiens
agcagggagttggggccacgcagaaatggcctcaaggggactccgctccacgtggggccaggcgtgtggctgacgctgtccgacgaaggcggccacggacggacgccagcacatgaagtcacgtgcaagtgcctttgattcgttccttctttctaaagacgacagtctttgttgttagcactgaattattgaaaatgtcaaccagattctagaaactgcggtcatccagttcttcctgacaccggatgggtgcttgggaaccgtttgagccttatagatcatttacattcaatttttttaactcagcaagtgagaacttacaagagggttttttttttaatttttttttctcttaatgaacacattttctaaatgaatttttttgtagttactgtatatgtaccaagaaagatataacgttagggtttggttgtttttgtttttgtattttttttttgaaagggtttgttaatttttctaattttaccaaagtttgcagcctatacctcaataaaacagggatattttaaatcacatacctgcagacaaactggagcaatgttatttttaaagggttttttttcacctccttattcttagattattaatgtattagggaagaatgagacaattttgtgtaggctttttctaaagtccagtactttgtccagattttagattctcagaataaatgtttttcacagataaaaaaaaaaaaataaaaaaaataaaaaaagatttagatttatttaattttttttttatttcccaagataggttgagtatttacctggattttattctattttatatttacagttttgtctttttaaaaatttgtcttttaaatctataattaatattaccatttattataaggttaggctttaattattttttaccctcaaaagtctatttttctttttctttcttttttttttctttttttgtgagacagggtgtcactctgtcattcaggctggagtgcagcagcgcgatctcagctcactgcaatcttggcctttcaggttca

SEQ ID NO: 68794 - DNA, 1049 bp, Homo sapiens
cacaggtgtgcaccaccacgcccagctaatttttgtgtttttaatagagacagggtttcaccattttggccagcatgatttcgatctcctgacctcgtgatccgcctgcctcggcctcccaaagtactgggattacaggtgtgagccaccgtgcccagctgctttttttttttgttttttaaatgcttaaaaacagtaggaggacattccaaggggccaataatttacttatcacttagtggaggctccttgtggaaaagattagttcaatttgtgaatttgtaaacatcctaacactttaatattcttggaaccctcaggcctttatttaccaatagtgaaaaactagcaagtttttagttatttagtatattattggtatttgactaccagccagactgtattagctggacttaaaagtacttacaagaaacaaatttttgtgttgtccatctggttttcaaatgattgaagtctttctttagataataaaattctggtttgtatgattctaaataattcaagtattgtgtgtaaaatactggaagatagctgagtattccgatggaaaaaaagtgattaaatgcacactagactatcatcagtatgcttacaaatgacccatggcctattttggagcaggtctttagtggtttaacaagtcctggaggcaacaaattgtaaaaattctagactaaaagcaactacctagatcagtgagcctttatagcataatgttaagtctcaaggatgaattttgatgaggagtcattgtgctttacttttttgtctgtaatttcaagggaatggatctgattgtaatacctactgaagttgattaacctaatcatttgcctactaatggcctgatgcagtgacaggtcacttcttttctaggttaaatcatttgtttttgataagagaatgtggagagaaatttaaatgccttttcatatttatctggagtaatgccatatatatttattgaagttaattccttttaatacattttggaaagatgaccagccgtatttcccaggaatttgttc

SEQ ID NO: 68795 - DNA, 1043 bp, Homo sapiens
gacttgtatcatataataataatgaggacatagccagaaggaagtttcaagttgcagatctgagagtgaaacttttttgaggaatgtgccatgagaaatccactataagatggtattgctttagaattcctcccaaaacatgcctgtgggatgaattaacaggaccttggttatatcacgacctagtcaatggcatgatcccagctgggactgcctgtgctgttacagcaaatctctacctgtgacccagcatgaaagggaatttggaggccagggaaagtggctttaaattatgaggcttctttttcaacatttacagaaacaaccatcatttatatgtacatcaagcttaacttcatataaattgtgtatctagtcaaaagtatccaaggcaaaaatattcaatcttcaggcttttcatagacctagaactctttatgtgggcatataactgtactataaccttatacttttatttatttttagggcttgtagaaacaggagctattattggtcctttgattggacttttgttggcatcattctgtgcaaatgtttatgttgacactggatttgtgaacacaggtaattcaataaaatctatttgtacagtgtctagactatacaaagcatctcaggtatgttatcatatataatcatggccttacttgaccttcaatttgataaatgatctctactttaaaagtgagaaactctagtggaggaatttaaataacttttaaaatattccaaaccagaaagcagtagtgcaaaataaaatgctaatctgacacagaatcacatgctatttctagtgcacttcaactatatttcttggttttacaaaatttaagcatgtaggtttgaatttatttcaattaagcaatcatttgttgatgatgaaatagaactttaagcaatcatttgttgatgatgaaatagaacttgtagctgtttagttaatacctgcttttaaatcccttacatgatagacagataaccagcctaatttattactagacaatattacaacaccacatatt

SEQ ID NO: 68796 - DNA, 1038 bp, Homo sapiens
gagaagtgtcctttacattttttagtgaattagagatagtatgttttactttcacgtctcttgccaaaaatttagcagtagctaatggaaagagtttttgtgtttgtttgtgctatttgtttttacagcagctaaatgcaaattatttttaaagttttgtcagtgcctataattaacttttgttcttgtcagttgaaattctaaccagattatttaaaagaagacttgtataaaatttctacatggattatgctatgctggattactggttttatgtatttgttatggaactgaagaattaatttgagttataaatgtctcattggatgttaagtgctatgatacagtttaacaaggtttgtaagtcaaacacttggcacaaacattaacccctaaatcattcgaacaaagttgagcatctctcatagtagcatgcatttatgtttaaatgttttctaaaggctactatttatatgtggtttttcattcagtattaaagaacaaaagcaatatatctctgatatgtagttttagacccatttatgttattaattaatataaatttaaagccaatacatgctaggattaaagattatcatattttttacttatactaaaatataccccaaaagcatttggtttgctcgtaaagtcattatttgtacttaagaatataagtactattttttttaagcacttctagtctttttagattaagaagacataccataacctcttgttccactcactgcttttctgtactcataatagatatgaaggtaggatatggttagaattactaggtcttcttacagtaacttcccttgagatcagaaatcttcatcaaggcctgtcacaggtataatgagaatgcttaaatttaaaaatttcttgaagttttgtttttaacgtggggtcaacataccttttcaaccaacatgggattccctgaagtttaatacaaaactttgtgtgaatgtacctttttatgccaggggagaaagactagttttcaggagatctcaaaatggttcatga

SEQ ID NO: 68797 - DNA, 1089 bp, Homo sapiens
ttaaaccaaatgaatctttcatcatatggagaagatctgctagatccaaatattgatatagaagattattttgactaaaaatggaatttcttcaggaatcatataaagttccaaatgacaccagaaaaatcacaagtcaataaaatgaatgactgtattgagttaatgatgaccacactgaaaattacagaagtgataatgatattagtggaaaaatataaaaacataaattctaagtttgaaatcagttcaaagtttatttatagatatatctttccaatacaacactgaccgcttagataaaaatcttaagttatttatttctgtgttttaaacataaatatgtttacttgtgatttagctttggagcaaatttaggtaagttatctacttagccaaatgtactctagtagactagaaccattctttgtgaaatgtcaaaatatggctatggtttcaggaactttaaaatcggttgtattttactttaaatagagatgtagcaatatctcgtttgctaatatttatattgatgacttactccttttttgttgaattgtacttctggttttataacctgaaatcatctacaagcttgtccaactctagcccacgggtctaatgcagcccagaacagctttgaatgcagcccaacacaaatctgtaaactttcttaaaacatgagatttttcttgcaatttttttttttttaagctcatcagctatcgtcagtgttagcatattttatgtgcggcccaagacaattcttcttccaatgtggctcagggaagccaaaagattggacatccctgatctacatatttaacttaaagtatcactcagtgaacctctgtcagtataatattgctttcaaaaagatggttatgtcaaaagaaaaaatatagctaagtatataaaggcataaaaaacttaagacaattacatgaacttattctcaaatattttacattttttgtaaactttcttaaaacatgagatttttcttgcaattttttttttaagctcatcagctatcatcagtgttagcatattttatgtgcggcccaagacaattcttcttccaatgtg

SEQ ID NO: 68798 - DNA, 1024 bp, Homo sapiens
tttttagaacaatgtatttttagcagtttgacacttacttgcatatggagaaatttttacttatgttctgttatctgaattgtttctttttatgtgtgttaagataatttgatgttcatctttgcctcctgaatttttaattagtgatttcaaatctataacttaactggattatagacacattttttaacttagtagagctgattattgatgtctctttagagttttttttaatttgagggtacccattacaaattaacttccacatctctaaaatttctagatgtagtataaaacattgcctgctaattttaccatatgtcatttttgcatattttgaatttgtaaatgtaattctgcaatctcaaggtttctcacaccacaggtcgagatgacatgaaagcagactgtattttgtactacggctttggagatatattcagaataagttcaatggtggtgatggaaaatgtgggacagcagaagctttatgagatggtatcatactgtcaaaacataagcaagtaagccacatacctttttataacttttatcaattaaagcaaatatgaaagtatatgacatcgtttttaagttcttactaaatacattggtggaacaccaaagtgcagatccataaaagcagatgttggagggtaggaaccagcacatcaacctgtatgatctgccttagttcaagaaaagatgccctatctttgagataatcctccaaaactacttttttaattgaaggtttttgagacacattgatagcaacttgaaggctttttttctctggcactgctgtacagttacatgatttaataattttgaaaaggtctatggttaagataggcattttgagagtcaagctcagtaacgtgccaccttgccagctcatgtgtcaatgaaataccaagtttctccttaagaagtaagtttaaatctacttagggtggctttagactagatagcttcctgaaagctttctgtcatagttatctttgtgcttttattgcctatc

SEQ ID NO: 68799 - DNA, 1119 bp, Homo sapiens
atattttaaaggtaaattaggcttctatggaagatatagacctaacctgaatttcattggctgaccattttctatgaactgtggtcttatcttctggctccaaattggcatggtaagcacctgcatgaattcccagattctgcaaactaaccgtaacttgttcagagtctttctgagaaaaacaatatatgattcctgcagtaaaatatgtgcatttgttagatagatatggcatattcctggaagatggttttcaacacacacattcaggacattgattaatacaatgcacagaaggaaaaaaagaattatgaaaaatttcaaggccttgtgcatatattgacattttggtataattccagatttgagcaccagcttcctttaaagcagaaatgagcctgagccatcagtttttgttcctgttatctcttttctctctttaactttatctcccactaaacagtatttctcaaactgatgtctgtaagatgctaacaaatgtgctatgaatgcagtgttctccagattaattttgggttaatttagattaatttgcatgcaaattaatttggagaacattgcattcaacaaagttaaatgggtgtctctctttattttcagggatggtcagagcttctagtttgctgatacaccctgtgaacatccaggcagaataaatacctgcaacctttctcaaattcatttgaccctagaactccttttacccaggactacctcctgaaaatctatagaacagtttaaaatgctactttcacacaaattctttgcttcagtaacatttgcttagtcattaaacccagaaaaccatgtatatatactcacaactcgatctgtgcttaatctattcagtatgtactactggatttatttattgctttaacgtgtcctttactgtaagggagtatattttctatccctttagaatatcagttgcttaatccactattttgtacacagtggatacatactaaatatgtgctgttgataattaacattaagtcatcaggtctattctaaagcaagtgtaaataagcaaaaataaatcaggcaatttgacgactcataatctatggcataagcaaatgtcacacccaattt

SEQ ID NO: 68800 - DNA, 1107 bp, Homo sapiens
accaaatagcaatggtttgaagcaggtaggaattgaggaagtggaactggtgagtatgggattctctttggaaaagaatgactatgaagggaagaagagagtgggccataaatgagatgttatcttagtctattccagctgctgtaacagaatactttatatcagttaattaacaaacaacagaagtttactgcttgcagttctggaggctgggaagtccaagatcaagatgctaatagatttcggtgtctagagagggggtgtttctcatagatggcaccttcttgctacaccctcacatggcggcaaagaaagggcactcccttcaactttttgtaaaatggcattaatcccacttatgaaagcagagccctcattacttaatcacttctgtggggataccaactttcagaccatagtgggtgttttccaagatgagagggacttgaccatgtttaaatgtaatgagtaggtgctagtaaggaaaagtgaaaataataggagagagaataattgactgggaaaaatccctaataaggtcttaatttgattatgttttttaaacatgtctgctctttgccaaaggttgttttaagaaacaaactacagaaacgtaaagccatatataattttaactgtagaatagcttttgtactttaaacagtttcaattataaggaagggggcatattactataacttcattcagacagtaaactgttcactgatttctactcagcataaatgaatctcgtacaaaaagtaaaagaatgcttatgcaactatcatgtttaattatacacactactgtataattaaaaatctggtttttttggaaagctttatagtgatttttccctgatgaaactgtttagtgtttgaactgatatatgttgtcttactgaaattaccaatagtgattatttaaaacgatagcaaattaaacatttgaaatgataaaaatctgtctttatttttataaggatagagttctgtttagttgtatgtttatttggcttctacttaccttgtttggtcatttattcatatctaattaatgagagtaagaagtaagctttactaaagctgcattaaaaattaatctgaa

SEQ ID NO: 68801 - DNA, 1002 bp, Homo sapiens
cagatattgtgcatttaaataataattatagaatgtgaaaggagataagtaattaaggaaacctatacatttatgtctgatgcgagagagcttttcaggaggaaaaaaacaaattacatattaaaaccaaaggtttagaatcccgatttatcttttttattatagctatgtctgagaaatgctatctcccatataaggcttagaaattttcattcatgttttaaattttgaaataatttgctgataattaatttgttataagagctaaataaatgtcattatgaagttaacctgcaatgttgggtacctgttttcttatacctatgaaaggaaaactggaaaattttcttagtttacagggatgttaatgtgactttaatttttctctacccttaaccatataccttatattgcagaaattggaatgggattaacaggatttggagtgtttttcctgttctttggaatgattctcttttttgacaaagcactactggctattggaaatgtgagtttttaaatatatattttaactaaatttataaggaaattttaactacgaatgaattattatctgctattaaatttggggaaaataattcactattactcataagtaattcctgttacattctctatttccatcaggaatgaaacctgtcagctttctgtttaaataaaaggtaaacacttaatgaggttttctaattccataactactctgttaagtgtttgtcatgagatttacaatagattaaatgaaggctgcctctaaataggagttcaaaatagatgacttgatagtttcatgtcttgataaatcactaaagtatttttactttaaacatccaagacttcacatttgattcagctgcataagatagatttttttaacctttttaaaaatatatatttctatgttaatggttgacttgcttagaaagggatctatgttgtttatttggaatgtgtactatgctattcatgtgtggaggttatgat

SEQ ID NO: 68802 - DNA, 1003 bp, Homo sapiens
aacttagccatgtcaatatttctcccatccatagaaactcctgtagcctatgatgaatatttcagaaccaagaggaatacccttgggtgacatatttatgggcagctttcctctttatgccttgccaactcatctgcttgactaagccttcctcatccagctaaaactaggaaaactactgcagacacagatgccccttggtaacgtctaatctttctttgtttctctttttctccatttaatcaagatagaagaggaatgagacaagtggaacaaagctacaactttaaaatgcataacccactccttggttctgctgcttggttgtacattacagttctgtctggccagttgcccacattaaaagccaaacaaatgtgcttctttttttatatttagctttgactttacgtttaaaatttatgcattgtgtttaattaccttttccgtgttgtattttctttctcttttaggttttatttgtagccggcttggcttttgtaattggtttagaaagaacattcagattcttcttccaaaaacataaaatgaaagctacaggtttttttctgggtggtgtatttgtagtccttattggttggcctttgataggcatgatcttcgaaatttatggattttttctcttgttcaggtaaggcatattattgtctctttcagtaaatcagtgtgtcagatagttagtacaaaaactcagatatttgcatcagttggagtaagatgatgatcatttccttaaatggaattttatttaggttgaatcttatagatttagatgaagcaactataaaaatgttttatcacatgtgaatgattgcctaatggtataaattatcttgttttgtcagcacaataaagtttattttattggcattttaaggcaccatctttatgttggatatttgtatcaactaaatagtggtaggtaggtcggtcgatcgatcaatcggtaggtaggtaggtagatagatagatagatagatag

SEQ ID NO: 68803 - DNA, 1780 bp, Homo sapiens
gtcaagaccagcctggccagcatgatgaaaccccgtctctactaaaaattcaaaaattagctggccatgctggcaggcgcctgtaatcctagctactcgggaggctgaggcaggcgaattgtttgaacctgggaggcggaagttgcagtgagccgatcacaccattgcactccagcctaggcaatagagcgagactctgtctcaaaaaaaaaaaaaaaaaaaaaaaaaaaacagaaaagaaaataactttaagtagggttgagcttaattatttattccagaaatgcatatcctttgtcttctgtctgccaggcactgtattacccacaggagacataaaaataaattaagtaccaaatctgctttagaaaatctctcatttctattatggaaagtagactctaaaaataccaataggatatagtcataatgccattataaatgtgtatgcagaatattgtggaagcatgattaaaaaattagtaaattcaaggagaggtgagaaatgttaactgataaactgggctttgaagaatgggtaagaatttatcctataaacgagaaagggaacgacagttaacagaaggaacagacagggccataaaaacacacagcttgttctgaaaagaatgaatactcttatagaacaggagcatgtgatcagttgaaggaaatggttggtaatgaaactgaaaatgaagcctggagccaggttacaaactttctttgatgacttgttgagaaaagtataccttatcctgtaaccaaatttgggctgggggagcagtgtttggagaaggtcgggggagtggggcacagaggtttttaagccagaggtggtacaacagggtagatgttttaggaaggttgttctgatatcaggataaagtaggtattaaagagaaaaactgaagtcaggggagccagtcaagaggcggttaatacagtacagaatatacagtgataagactggaatcttggagtacttttgacattttagggtaggtggagaaaaagaagaaaacactagaagagactaggaaaagaggtgggagaagaactaggagtaaagatcatagtggctaagagagaaaagagtgaagaagagtttgttttggcagatgtatcttgcagcagaaaacttaagcaccttaagaagtaagaaaatcattggctttcccagttatgtgggggttttagtaatgaaggttaaaagccaaagctgatctttgagatgaataaaaaatgggaagtcttagtatcatcgacaagcttggagtaatacacaggtttcgtggtttagagagctttgtggtataaatactagtttttgttgttgggttttgttgtgttctgagatattctgagctggagatttagtgccaagggtctttgatgttgtttttctagatatttataaccctaaataatggcatttgaaatcacacatttttatgttttaaaacaatacttaaaacaaaataaatgatcttttgaattcattactactagaaaatgattgtgattttctttgaaacacgcacatacaccatcaacataaatacttgtctaatttaaaaattctgctttctgtttaattctttattttgacttctgcagatccataacagaatcttattgcttaacttctgaattgtattcattgtagtattttcatccctatctaactctgtgaagaaaacagctttttttctgtactcgtcttaccacaatcaacacagaagactgctgtgaccaaatgggtggggggttttcccga

SEQ ID NO: 68804 - DNA, 1298 bp, Homo sapiens
catagggcaaggaaaggggggagggtcgcagatccccccccaccctccccaacccaccatcctccaagaacatccttgtgttcagctatccggaagctccctgaacactgtccttttgggtttttatggaggcttcattactaggcatgattgattaaattattggccatgagtgaccagcttcacagcccccctccccttcgtggaggttaggaggtagggctcagatttccagccctctaatcttgccttggtctttctggtgaccagcccccatcctgaagctgcctaggggctgccaaccattgatgataactcattagtatacaaaaagacatcaccttgtagagactcttaagtattttaggagttgtaagccagaaaatgaggtcaaagaccaaatatatatttcacagtatcactacatattttaagacccaggaaaagtttagtttctttgcatttttaaaataaactatttcattctcttcctatactgaggtagcttaactgatctactgtcaattttaaactggttagaagctgtttaacttctgtagacttgtatttctaccaagaaagaatgagacatactgtgaggatcagtatctggcaggtagtctcttagtgttaactaaatgttttgacccttagtacttacttagtaaatgatagctattattattttcatggttctacacatatggtctcaacagcccctttctttttatcagtttcaccccacacaactcatagttggagaaatcttcagcagttgagctaactcataatctgagttatatatagctaggcctcatgtacttgtcacatttttaccaacaatcacaaaatttttaattaagtttgtagttatttctaagtttgaagaccctcaattattcagaattttaacaggatactttctttttccttggttagcaattattttgaaaatagaaaatgtgtaaatattaagaaccttttttttccctctcccaggggcttctttcctgtcgttgttggctttattagaagagtgccagtccttggatccctcctaaatttacctggaattagatcagtaagtaatcatgtatattttaggccaacaaaatacgtattttgatgctttttacttctagaaatttgagtaattgatacttggttaattgctgagttttgtattatgatatagttacttcacatagatcatgagtaccatgaagaccaaaaaataattattgctaaacctataaaatgtgaaattttgttttaccgtatccatttctggatccata

SEQ ID NO: 68805 - DNA, 3036 bp, Homo sapiens
agcgatgctcacaccgccacactatagcctgggcaatagggcaaaaccttgtctcaaacaaaaaagaaaaaagagaaaggaaaggagaaagggaggcacttccatgtaaaactacagtccttgagggcagagacaggttgtattttagtcattgttctatccccagtgacccagcataatatctgccgtataatggaaactcaaaatattttctgctaagcaagtgagtgaaggatggcattttgttgacctcagggaacttgctcaatttcaagacaagaccagatgactgtctcttagcctacctcctcagtttcaaaactaaacaaaatccttaatttctaaaagaatctaggtgatctagaattcagctgagttggctacaatccttttggctctaggtcagacccatatcagaagtattcatatccttctttggattggtttcatagatccaactctgtcctaaataactaggataaactagctttataggaaaacttaaaagactacaagttccagttaggttcagggaagttaatcaactttctaaagttgttcacagatttttatagatgtttctagagagaaagttcatagcattttattgaatgctcaaagagctaaagaatggcttacctatggaagaataagtaccactataagcctaatcccatttccatccccagggtaattttagggtcagaaccttacagccaagacaatctaaatatttcaagttacctttggagagagaatattgtgctttctctccacttaaatttaccttaaaattctaataaatccatgaattctttgagagcaacttttagtttcagtggccagccacctgtttgtgataatataacaaaatgttggaatgtaggcttataggggtatactctgatttcatttgcattaatctgcaaattcatacagtggtcagtgttatttatacctagaatggcttttgaatgtactgaaacttctagttacagagttgtaatcattatttgtgcccttaatttaaggattctcaagaatttgcataaatggacacccaatacaatagaatatgtttcttatcgttattcatcatgataagtgcttatgtaaacatgtgaatcgtgaaacaaaataaatgatcagatgattactagaatttgatagtataaccacctgggttatataacttttaatgtctctaccaattatatacaatatcagtctttacatcaccatctggaatgttaaaaaaaaaaaaaaagcccaactgctttatgtttggggtggagtaaccaaagtaaataaccacttacagtaatgtgtgttaaaatttatattcaataattataaatttatgcttacatcattaaatctatctttaatgtcattaccactttcaatccaaagtccagaatacacatttaaagtatttttagtcaataactgttgttaactattgaacttaatggagttaaatctgtttgtccaaagactacataggcccagaagagatccacagtaatggtcagttgaaatatcttattgggttcattaatgcatgaatggctgacatttcagttttttttatgtttttattttttattttttgttaagctagcagtgttatcttcatcttatacaatttctttattcattgtgttgcatttttcatgttgcacccttaaattcatatgtataacatgtcatgcaaaaaacaacttttagaaaaaaaaattttatacacgtttatgtatcagaagatgatggtgagtagtactggattagtcattgtcagtcataccttaaatttccacaactcttcttgtaaggctgggtttttaaaatcaacattttaaatattgatataatgttttataatgttccgggctttctttaattctctgtttttcttctccttacagtttgtagataaagttggagaaagcaacaatatggtataacaacaagtgaatttgaagactcatttaaaatattgtgttatttataaagtcatttgaagaatattcagcacaaaattaaattacatgaaatagcttgtaatgttctttacaggagtttaaaacgtatagcctacaaagtaccagcagcaaattagcaaagaagcagtgaaaacaggcttctactcaagtgaactaagaagaagtcagcaagcaaactgagagaggtgaaatccatgttaatgatgcttaagaaactcttgaaggctatttgtgttgtttttccacaatgtgcgaaactcagccatccttagagaactgtggtgcctgtttcttttctttttattttgaaggctcaggagcatccataggcatttgctttttagaaatgtccactgcaatggcaaaaatatttccagttgcactgtatctctggaagtgatgcatgaattcgattggattgtgtcattttaaagtattaaaaccaaggaaaccccaattttgatgtatggattacttttttttgtaaacatggttaaaataaaacttttgtggttcttctgaatcttaatatttcaaagccaggtgaaaatctgaactagatattctttgttggaatatgcaaaggtcattctttactaacttttagttactaaattatagctaagttttgtcagcagcatactccggaaagtctcatacttcttgggagtctgccctcctaagtatctgtctatatcattcattacgtgtaagtatttaacaaaaaagcattcttgaccatgaatgaagtagtttgtttcatagcttgtctcattgaatagtattattgaagatactaaatgatgcaaaccaaatggattttttccatgtcatgatgtaatttttctttcttctttcttttttttaaattttagcagtggcttattatttgtttttcataaattaaaataacttttgataatgtttactttaagacatgtaacatgttaaaaggttaaacttatggctatttttaaagggctattcatttaatctgagttttcccttattttcagctttttcctagcat

SEQ ID NO: 68806 - DNA, 1700 bp, Homo sapiens
taaactgactgtggtttcttaagaacatgacactaaaaaaaaagtgttttttttccaccgttgctgattattagacagtaggaaatagctgttttctttagttttacaagatgtgacagctttagtggtagatgtagggaaacatttcaacagccatagtactatttgttttaccactgattgcactgttttgtttttttaacagttgcaaagctttttaatgcataaaagtataattgaaatctgtggtatttatttacaaacatgtctacaaaaatagattacagcttattttatttttagttaaatctcttaatacacagagaactcccaatcttgctcatctaaataaggaaagacttggtgtatagtgtgatggtttagtcttaaggattaagacatttttggtacttgcatttgacttacgatgtatctgtgaaaatgggatgatattgacaaatggagactcctacctcaatagttaatggaataataagaggctactgttgtgtctaatgttcttcaaaaaagtaatatcctcacttggagagtgtcaaatacatactttgaggattgactttatataaggtgccctgtagaactctgttacacatatttttgacccatattatttacaatgtcttgataattctacctttttagagcaagaatagtatctgctaatgtaagggacatctgtatttaactcctttgtagacatgaatttctatcaaaatgttctttgcactgtaacagagattccttttttcaataatcttaattcaaaagcattattagacttgaaagggtttgataatctcccagtccttagtaaagattgagagaggctggagcagttttcagttttaaatgagtctgcagttaatatcaaatgtgagtttgggactgcctggcaacatttatatttcttattcagaacccttgatgagactatttttaaacatactagtctgctgatagaaagcactatacatcctattgtttctttctttccaaaatcagccttctgtctgtaacaaaaatgtactttatagagatggaggaaaaggtctaatactacatagccttaagtgtttctgtcattgttcaagtgtattttctgtaacagaaacatatttggaatgtttttcttttccccttataaattgtaattcctgaaatactgctgctttaaaaagtcccactgtcagattatattatctaacaattgaatattgtaaatatacttgtcttacctctcaataaaagggtacttttctattaattggtggtcaagtatatctgtgttatgaagttctaaaagctaatttagcattgcaaaataacctcatttttaaaaaattagccttatatgcagtgttctatttatcaaatgatcttcacatctttcatttccaaattgttgaaatgtactaatgaatacaaatagacttcaagtaagcaaaaatgttcttaattttgaaaactgtaaaataaagtcacttaccttgggcaatatgctattttttaaaaatcagactcccagtttgtatattatgttattcaatagacattttctgagtaccccttgaatactaaaagtcctgtgttgaatgtgggagacccaggagaacaagatatgtgccatctgctcattaagtgcttagaatgttaacattgcttttaaattcttagccgta

SEQ ID NO: 68807 - DNA, 1170 bp, Homo sapiens
tcatatatcaaaatttattaaagtgtatttaaatagagcagtgttcaataaaatacgtatataataaaattaaataagtacttgttacttacaaatatctaattttctcatagtgtatgtttgcatattctatgtataaaacctaattcaaaacataagtattggggaaatgtggacctgtaagtgatgaaaattagattagggaatgagttcaggcctatcaagttttctacaattctttctgttggaacatcggacctttgattattctcttttttcccccctttagagattagttcttgctctgtcacccaggctggagagtagtaccgctgtcatagctcactgaagcttcaaactcctgggctcaaacagtcctcccacctcagcctcctgtctttgatcatttttacttacagtttcatgtcttaatctcgatgctttgttgttctggcaggggatgtatggcattgagaatgaagtcttcctgagccttccatgtatcctcaatgcccggggattaaccagcgttatcaaccagaagctaaaggatgatgaggttgctcagctcaagaaaagtgcagataccctgtgggacatccagaaggacctaaaagacctgtgactagtgagctctaggctgtagaaatttaaaaactacaatgtgattaactcgagcctttagttttcatccatgtacatggatcacagtttgctttgatcttcttcaatatgtgaatttgggctcacagaatcaaagcctatgcttggtttaatgcttgcaatctgagctcttgaacaaataaaattaactattgtagtgtgcttctgtttctgggattccttccttaatgattcctgaaagatttcagtcagtctgccaagtcattcttaccacacgtcataaatgtccctaaattccaacatcatctacactcctccctctggatgagacaaaaattcttttttgcaacaggtgccacggtttgttgttgttgtcctgagaatatgattatctttttaaggttataactgaagaagttgtaacggatgtcaatgtatatgacatttacaaaggaagcccgttttaaaaggaagaacccctaaaatggaaactttgttagaattctatttaataatgaaggaaaatgaaagtttggtctggattat

SEQ ID NO: 68808 - DNA, 2581 bp, Homo sapiens
tctgatactcttctcctttaaattaagtagacccttatttataatttttaccccactttcataattatgctttatttgggtcttattctaggattttttttctttactgtagaataaaggagcatatattagaaaaatatggaggagaaaagttaaacattcctcaaaccaaaagtttagcatagtccccaactagaatccctgtgatttcacacacctagagagaagcaaagaattttattttctctgtaactatgacacagcaattctgctttgcactaaaattcttgaaagttaaaaggtcagacatgttgctatttgaaggcaaacgtcagcctttttggggaactatactggaatctactggagagtcacttattggagcagttccagttggtattcagtaatttgcatcataggtgaaattgcactaaaagaagaaaatattttttaaaataatgtaagaaataactgcaatgtctttttttttttttttaaacagtggctgtgtggagtggtgtgaatgtggcaggtgtttctctccaggaattgaatccagaaatgggaactgacaatgatagtgaaaattggaaggaagtgcataagatggtggttgaaaggtaagtgaaagggaacttgattttagatgattaatttcaactctacttaaataaaattataaacattttccatggctgtctgctcagataaactcttaatgtagtaattatgcagctgttatcttttgaaactgataagacttttacactggtcaaacttgctatgccagtctccctagggaaagtaaatattttctctagagaaactctattgtagaggtaacaggagcaaaatgtggaattaacaagtgagaagagtcttcaaattgccacctctcaacaaataaggttgatttatttagaaaagtaaacttagaaactattggtttcataattgccccaaataaataaacttgcttgctgattgctaacagtgtttaagttttaataacaggactaactgatgtctcaaatatagaatcattttgttcaattttagtaatttttttttcaggaatttgaactatatgtggagaaaaggaaccttaaaaaagttgaaagagtctttataatttcaattaacatatacctttattttacaagtgagaaaactatggctcacccagatagtgtaactggtccaaggtcttctaatgattgggtgtcaattgcattaaatcctaattttccaatactcagctagagttattcctgctgcttctcaagtgccagggcctttatgggttttaagagctacaatttgtgctgaaaaaactgtcaggcaagatactcttatcccttttattagttagttgattatgttaggtgacagtggcaagtgggacctcacaattgagatatattttgttctttcacttttattgtttcctgattttatgtgtttggaaatatgtttacagatttgttacaatgattggaaaatgtatatttttgccacagtgactttataaatcttaacttatacaataaactaaagttatcaagcatttatatagtgtttactgtgtagtgcttacagttttaagcattttacatatatattaattcatttaacactcaaaaagggaacactaaggcaataaagggtaaataatttgcccaagattatagttagagacagagcagtagtcaaagtcaggtctggtttcaataatgattgagtcttatttcagtgatgtcttttataatttttttaagtgcctatgaagtcatcaagctaaaaggatataccaactgggctattggattaagtgtggctgatcttattgaatccatgttgaaaaatctatccaggattcatcccgtgtcaacaatggtaaaggtaagacaaactaccacaaaatgtaatatgatttctcgcattgtattctacaaaaagattcatttaaagaggctcagaccagataaaatcatagttcaaggttatttctgtctctcaaagttttatgtaaactattctcattttccaacagaagtcttggacagcaagggcagaaaacttagagaatctaagacattcaatagattgttgtcattctttatataattttgcaaattaaatattaactctgaatcttagcacattcttaaagtattgatcatttgaataagtgtaatagagtttcatttaaagttgatgtactaaactctagattgcctttcatatagcacttgataccttagcaaatacagtttaattcaaaagctatggagcaaatgcacaaaacaggtagaaattaatgattttttaaacaaaactaaaattatattaaaatattttgtaagacaactgactcattttccacaagtcagtgtaaatcaagtgtgtcaataattgggtaattactgagtctttgggtacatacataggaatttgtttattctatctacttttgtgtatgtacaaaatttttgaaattaaaagtttaaaaactgacattaaggtatgtttaatataattagttatatagttaaattgaccctgtgaataaattacccac

SEQ ID NO: 68809 - DNA, 1156 bp, Homo sapiens
tttaatactacgtattatcacagttgtttactgaagaatacctcatgcccagaaaaatttgtggtagcaagatttggtagtttagtaatcaaaggcttcttggtttatgatgacaatcattataattatggaatgttacaactgggggaaacttaactgacaacctggttcaacctgttttgtttttttcaactttaagttaattaatctgcaaggttcttaaatattcttgtttcacataataatgcaaatgtaaaagcacagtattgcatttttcatgtcttgcaatcttcatataaggcttaaaagtttgtttttgtcactgtcattcctggtatctctaacaatgaaaagttaaagtatttactttaatctttctggccacatctcatttggggagtggggaagtgggaaaagggaagccagggcaccccaagctgcctaacagttgaagttggttttggtttacttacatatattatttccaaaatttttagtggacattcttacgtatgttacctggaaactaagtggattacccaaacaccgcgtgattggaagtggatgtaatctggattctgctagatttcgctaccttatggctgaaaaacttggcattcatcccagcagctgccatggatggattttgggggaacatggcgactcaagtggtaaagaaaaaaaaaagaaataattacttgtgatgttggttttgccattttgaatttttcattttatttcaaattttatttttatagactttgatgtacttaagaacagttgcaaaaatagtagttacttttctattctattccattttgctttatcatttactctctcatctctctatctacctatcatctatctttaccttgatcaattaagcataaatcaattccctcacctttttctccttaagttctttactgtgtatttcctcaaaacaaagattttctttttcataaccacagtacacttcccaaaatcaggaaatgtaaccctgaaacaatattatctaatccagagtccattattcacaagttatcaactgtctcaatagtgtcctctaaagcttttttcctaattcagaatccattctaggctcacacattacatctactatatatccttagcctccttcattctggaacagttt

SEQ ID NO: 68810 - DNA, 1301 bp, Homo sapiens
atgtagggactataattactgccattttatgggagaggaaccttacaaagtattaccaatcatcaaaagccgcactgtaacccagtttaattatgtgaatcatccatagctgttgagtcaaatgatcacatcaaatcgcaatatccatatatttcgaaaaaggacacacttccttaagaaaaaaatcaaatctccagggaaacttgcagcgctaaaaagcaaataagcttcctaaaaatattgagtattagaaatccaagttttagtttccagacaaaaccaaacacttcactgccttccttcccttcctaaattttaactttttaagataaaagtaacttaaaattggtttttgtttttgtttttttttttttttttttttgatgtctacctattggagtcactgtttacacttcattttattcctgacaattcattgaattcatagccaaaaacatactttcgggtcatctttattttctgaggcagtttgatgtttggattattgcagtgtagctcaagggagaaaaaagaagccacaggaacattaaacttcaagcccttacaatacagaaaacttaattcacatatatgttctagaagcttatgtatggttaggcttttagagcatgtcatataggttatgttataatgaagagttgcatttaaagtacctgtttttgcttttctttttaaagattattctgtgactgccaattctaagattgtagtggtaactgcaggagtccgtcagcaagaaggggagagtcggctcaatctggtgcagagaaatgttaatgtcttcaaattcattattcctcagatcgtcaagtacagtcctgattgcatcataattgtggtttccaacccaggtattattgtatactttaagtctctgttctgttaagttcagtgttttggtgtttctgttgttattgttttggactaaaatcagtcccagtattcatttacagaagcagtttacatgtcttctttcattggccctaaatagtggtgtttgcaaaacaaatgcctctgtcccaggccagatgttcaaaaaatgtgacaagagttttagctaaagcaatttcatgtttttgcttcatctggcttggttatagattctgaaggcttttaaaacttttttataaagattatcctgggatggagaatgaagcattcgaacatagtttcaatttgtaagaaacattttgacatatttgaccttttattttctggaaaatcccattatacagaattgaaacagatcaactttgaaaagaagcatataagaaagccat

SEQ ID NO: 68811 - DNA, 1173 bp, Homo sapiens
caattggaatagaaaacaaaagaaatctgagactgggcaagtctcaggcacagatttggagtgatcacatgaaaaaacctcccaatcctagattcctctgtccataaaactcatcttcctttccccaccaagacatttgagtggatcagagccaccctgaagattccaagcttcaacctgggtttcaaatcctactctaaagtaaactcacactcctggtgatttaagccaaatctaccatctcagaaagcctccaaattggggtgacctcaaggatggacacattgcccaaggttgtttctgggcctgagtgtatttttgttttcaccattccctctccattaatatagacttgtattcactaggcctactcttgaactaagctggtttcctaatgaatctttaagtctacatgttcttaaagtatagtttgtatcatgtgaactgaatcctcattgagtatctaactccatggtaaaattctcaagatgtttagatctttggtgcttagccatgttaaagatctttctttgggttagattgtgagctgacgcatcctagagtggcttagggttctaatgcctgtttttgcgtttacagtctctggctgatgaacttgctcttgtggatgttttggaagataagcttaaaggagaaatgatggatctgcagcatgggagcttatttcttcagacacctaaaattgtggcagataaaggtaatttcacttaatgcccaaagtgatctaatatttttttcatggccccaaaacacatttggaatgcatcttacagcataatagatttatttgtaagtaggaaaggttgaagttttggaacagttatttcaataactgttaataagatatttataatgtagtttagcaaattcagattattgcaaaattgttatataattataaaatgtttccctctttttcctcattttataaaaagctcttacttctctactgtattctactttttatttctcaaatattttatattcacttattaatggacagctacctaaaatgagtttgctagccgtaagtgatcactgatatgtcactaacaggaaataacaaattggatttatcgcattgtttggcttattttaccacgtttcttctataggccaattttctttcatccgtttctagaaactcattgc

SEQ ID NO: 68812 - DNA, 1046 bp, Homo sapiens
aatttttgtatttttagtagagacagggtttcactatgttggccaggctgttctcaaactcctgacctcaggtgatctgcctgcctcagccccccaaaatgctgggattacacgcatgagccaccacccctggccaacacttggatataaaaatgaaaccatcaaatattaaggcactggtggtagtaatttattacttaggaggaggaagaggcagaatatatggctgtgtctggtccacacaggactttagattaaaagcctttttttaagtctgtcacaggagtagagtaaaaataaataggtttttttaaagccattttagtgatacattaagcaagctttcaacagtggtattcttggtatctaagtgaccttgatccataataagaatactgcttttgcagttaatctaaaccttgctgtttcaaacattttaaacatgcttacagcttaagtgaaatatatatatggaaaattcattgtataaaatatgtgaatacagagggagatttatttaagccaaacaatagcaccagtacttagtcacacatcacgcctctccatttgggggatattcagtgctgcggatgcagctaaattcagtgttacaattattattatttaagtgttggatctcttccttccttttcagccgaatatgcacttctcaggcaattctctacacccactgaaacagagacaggatctgacatcctgtgacatccttttctacttaagcactaaattgttttgccctgtggatttcagcagcacacatgtgatgttactaaaataagagtgatattcccagtgctcagtaccttaatagaaccattatagctattattaagttatgttgcattaatttaggacttaaaaaatacaaatgagaattttgtgtgttcttgtcagagattgcaaagaacaaaagcagccttaaaggtgtcaaaacgtgtttaaggaaaaatggataaaaattaacgccagtatttgatacacatggaaatgaggaaatgttttgtacgtgatccccaactcacaga

SEQ ID NO: 68813 - DNA, 2586 bp, Homo sapiens
ttctttttttccttttgagacggaatcgctctgttgccaggctggggtgcagtggtgagatctaagctcactgcaacctccacttcctgggttcaagtgattctccttccttagcctcctgagtagttaggactacaggcttgcaccaccatgcccagctaattttcttttttttagtagagacggggtttcaccatgttggccaggatggtctcaatctcttgacctcgtgatccaccagcctctgcctcccaaagtgttgggattacaggcatgagccaccatgcccagccgggtctcatggttctttaaaatatattctgctttctagaatatcattaggctcattttaagttgtacttcagttcgaaattgcaacagtaacattttaaggatgatttctatttggatttcatatgcagatatacgtgtaatgttttgattctttccttgcagtgcaaaatggcaactcttaaggaaaaactcattgcaccagttgcggaagaagaggcaacagttccaaacaataagatcactgtagtgggtgttggacaagttggtatggcgtgtgctatcagcattctgggaaaggtacatttcaagaacaccatagatgatagagaagttcagcatgtatacacagtttctttgggcaccttggaattttattatatctttaaaagatttctttttttcctgagcaatttgaagttgtagatgtaatcccacttcactttcaaatatttaagcatgtatctcctaaaagaattatattctccctatgtgaccataaatagttactacacttagagaatttaacactgatgcaatactatcatccagtatacactattaacatttaaaattctccatgttgtcaaaatcatgccgtttatagctattttcacctcagtccaagatcatgtgtctcatatacttacgtctcttcattctttaagctggaactgttactcaacctttctttgtttcttgtgtcattgacatttttctagcatccaggtgagttctgcagaatgtccctcaatttgtctgtctgatgttttcttgtaattcagctcgggttgaattttttgggtgggattggaactaggtgatgtcatgtccttctttgtgcagaccatcaggagacacatgatgttcaacttgtctcattactgctgaacttaatcccctggttcaagtggtcacagcaagccttctccactgcaaagatccctttccctcttttaattaataagtaatctgtgccatgcatggctttgtgaggttgtgggaatattctgttatgcccctgaaacttttacctaatggttttattttgaaatgatttcagatttacagaaaatttttaagaatggcaagaaaataaaactttcataaataattcacctacatttaccaattcttaacatgttgttatttatactctctcaccatatatacatacatatatgtgtatatatatatatgtgtatgttcataggtagatttatagatacagagatctatagaaatacatagatgtccatgacgtatttgtctatatctatctatagatggctggaaccatttgagaataaattgcagatattatgccctttacttacatgtcctttagagcagcagtccccaacctttctggcactagggaaccagttttgtgggagacaatttttccacagatgtgtgaggggatagttttgggatgaaattgttccagttcagatcatcaggcattggctagattctctagattcagtactggctcgtgacctgggtgttggggacccctgttttagagtacgtttcctaagaataggacatattctgagatcatcagtgcaattatcaacatcaggagatttaacactaataccattctattatcaccttccacttcaatttttcttacatacctccataggctttttgccttacctcatatgtatcctttgtagttcaaaccacagttaagctttctttagttctcgaagacttgaggaaagaagcccttttcttatttatttcactgaatggattccttatttcttctgatggctgccttaaatgtagaaacaacaacaaaaatgctgccttgccttcaggagaacacactgtccctttgtatcatatgtaaaggctgcctgaataacccctaaccaagccatgtcttttttcaaaatttaaattctaaagcagcaaactgagtctttactaagaaacagttatcaaaaaaataaactaaaaaacgtagtgcacacccatgaacattttatccttttgcatttgcttctagctagtttcaattgactaggtaactgtcatttaggatagcagctccctatccttttgcatttccttctagctagtttcaattgactaggtcactgtcatttaggatagcagctccctatccttttgcatttctttctagctagtttcaattgactaggtaactatcatttaggatagcagctccctatccttttgcatttccttctagctagtttcaatagactaggtaactaccatttaagatggcagctccctagattacagggaatt

SEQ ID NO: 68814 - DNA, 1037 bp, Homo sapiens
gcatttattatcttctaagcttgaaactgtttcacctttagggtttggctaagccaagtccatttttttttttttagcaagcatattaaaatattttatacaatattttggatttggatggagaataagcaagatctttaattttctttagatttgacttctagtgcctttttaaaaacgtttattttaggttcaggggtacatcaggcttgttacagaggtaagttgcatgttgcaggggttcggtgtacagattatttcgtcattcaggtagtaagcatagtacctgataggtagttttttgatcctcaccctcctcccaccctctaccctcaagtaggccccagtgtctgttgttcctttctttatataaagcatatctaggactgcatttttattcattaatatatttatatacaaaatactttataatttcttacattttatactcctttggatctgtaacattattatcattgtgcaaaaaatattctcacattatataagctgtattttatggttacagagctccattttattgttaatgatttcttttgatttggctgttaatttcttttgatatctgaacagtgtatgggtttcgacagaccatgatgaaattgagaatgtggccaaacaatttggtgcacaagttcatcgaagaagttctgaagtttcaaaagacagctctacctcactagatgccatcatagaatttcttaattatcataatggtatgaatttgattaatagtttattcaaacctttatgtacttttctacttcctttattatcttataagacttgttttaacatttgaattccaaaccttaatattacttgcttgcaaggaactttttttttaaatatccttttcatttctcttgtctttttaagaggttgacattgtaggaaatattcaagctacttctccatgtttacatcctactgatcttcaaaaagttgcagaaatgattcgagaagaaggatatgattctgttttctctgttgtgagacgccatcagtttcgatggagt

SEQ ID NO: 68815 - DNA, 1046 bp, Homo sapiens
gttagtttgataataggtatcaaatgtagaatgattattagcacaagctgtgaagtcagactgtaccactgattagccagttgtgataagatgaatgttgtttcctcatctgtaaactggagatatcgagagtacctattaccgtagggctctggaagggattaataaaataatatgagtaaagcacttagcagaatttctagtacatatgaattacactctgaatagtttttgctgctaattgaatgtacatactttttcctccaaattccaattccaggaaagaaatgagacaaatgggccaatagtgaagttaaaagaacccacttaaatgtcctgtgaaaaatagaatatccctaaaaaggattactatgcaaccattacaaacagtgctgtgacctgtatttatttgcatgatcaaatataacaatgtttttcacttggatattaagcaatacacttacttaccaggtacctatgatgatacgcagcatggaactggttgtgggaactgtaggctttctgcttgcagagcttacagtctgatgatgtcaacattttaaaattgataagttattaagatgcataataactataaatcatgtatgaaagcagtatttacaagggtaatatgagcctcaaaataagaagcacaggaaaaactttgggagcatgtgatctagagacttcaggaataacccttaaaccacacatgaagatttaatggacataaatgctgcagaatgtttgttaaagacagatccaatttttattagaagaaaattttagtggaatgtataacaaattccaactatacttattatctttctttgggatgttaagcaagcttctgtataccttagttttctacttagaatataaacacaaaccaaattttataaagccattagaaagaaaaacaaagataatataaaatgcttaacatagtgcctacagatagtaataagtgtatcatttatataggtaaaactctagaattatatgtgtcaaaatgtagtgattatctacaaatagtgataattagg

SEQ ID NO: 68816 - DNA, 2565 bp, Homo sapiens
ttttttaaaaaaatatttctaccacgaatacgtattacttatatgacattaaaaaaaaaacacacacacacacactttaaaaggagaggtaagaaaatggagaagagcatttacatttttatttaaaactcacagcaggccaggcatgatggctcatgcctacaatcccaccactttgggaagcggaggcaggcagatccctggagctcaggagttttagaccagcctgtgaaacatagtgaggccccatgtctacaaaaaaaaaaaataataactcactcaccaatgttttatatgggtgacataagtgtataaaaatatatttcttaaaaaaatcaatacttttataagtaaaatttagtaaatagagcttaaaggctggattatgcaaatactaactttttttattttagtgaaaacgattcaaatttcaacacatttaataataaatgagaaaatttcagtagataagcatagaacaaatgtaaaagaaactctcttcaaccaagattgtactattgtatgtggtctaaagtatagtaatagttttactcagaatggtgaattaaagatactgggagcttctgaaatgcatcctattccaaaaaaggggttaacagagagggaggaaaaggatatcgttatgtcagtatgatttagtatctatttttattctttaaaaatggtaatttttcagcaactattaataaatggcataccaatcagaaccattacagattaaaagagatttaagagattatatatatataaacaaaagaccatatgttaaccttatttcattcctgattcaaataagtcagctataaaaggacaattttgagacagctgggggtatctcaacatatactaggttattagaggatattaaggaactattactgattttgtgggtttaatgatattctgtcagataaaaaattatatttatcagagataaatattgaagagtttttggataaaatattatgtctgggaattccttcttctccctttccccaaataaactagggggcagtgcatagaaaacaatattactaagtgattttaaattctgataatttttcaatataaaattggggttctcgcatatgtttgaaattttgcttaatgaaaaatttaaataacttacttagaattcatatataaaatttctaacatttgtaatatgcatggcaggtagcaattatgctccattcttcttctctagctcataagagtttatttttgattgcttagggaaaaccctggacctcaattatactgtaaaatatttttgttccatctaatctttagtattcttatatgcagtgcccctaggtcttactgaagttgccagagttacctgttggttgctgtctgcattatttagctagaatattctttgtctctttaaatgtttgctcagtatttattttacttgataggaaatgaagtgtctgatgaagagtgcttgaagagagtgggcctaagtggcgctcctgctgatgcctgttctactgcccagaaggctgttggatacatttgcaaatgtaatggtggccgtggtgccatccgagaatttgcagagcacatttgcctactaatggaaaaggttaataattcatgccaaaaatagaaattagcgtaatattgagaaaaaaatgatacagccttcttcagccagtttgcttttatttttgattaagtaaattccatgttgtaatgttacagagagtgtgatttggtttgtgatatatatatattgtgctctacttttctctttacgcaagataattatttagagactgattacagtctttctcagatttttagtaaatgcaagtaagaacatcatcaaagttcactttgtattgtaccctgtaaaactgtgtgtttgtgtgctttcaaagatgttgggattttatttatctggggacagtgtgtatggtaagacatgcccttctattaataaaactacatttctcaaacttgatgaaaactgccttgttgctctagaagaaatttaccatgcattttctttctttcctttaaacattaaccaatcttagtgagaaacaagccactcgatgccggggtagagcatctgattgtacttcacatatgtatacgtaacagcatatggtctatgtgggggttggttccaggaccacccacatataccaaaatctgtgcatactcaagtaccacagtcaacactgttgaacccacatatacaaaaagtgggccctccatatactgcatgattcacatgtatttttgatctgcacatggttaaaaaaattcacataaaagtggaccacacaattcaaacccatgttgttcaaggatcagcagtatacacaaatacaaatatccaaataaatttatatattatgaagattatgtatttatttggaggaagcaaattatttgcagttacccctgagagataatggtaattttgcatacaggaatatcttagagatattacgggtttggttccagaccgttgcaataaagcgagtcataggaattttttggatgccaggtacataaaatgttatg

SEQ ID NO: 68817 - DNA, 1055 bp, Homo sapiens
acacatgacacttttgacacatttataaagtgtctgttttgcactgaaaaaaaatctgctttctataatggtgaaaaatatttatgttttcccaaagcactgcattgcataaaataaaaattggtttcatttcccatttgtactgagtgatcttcaaagtgtcttaccagttcactgtgtttcatcttctctgtgaatagttcattaaatactcttctgctctgaagtagtttatccaatcatccaccgctcctggatagattggaaatgtattagacaagaaccaatttaaatgtattgtattcacaaaagaaatctgccagttttaaaataaaatgtgaacatcttgtatctcttggtgccaagatgataggggattattctttatttacttatctgttgtttctaatttcttctgtaatggttgtatattatgcagtttaaaaagttatttctggaaaaaaaggcagattaaaaatacatgaatgtcataggttttactctaacaggcaaagtttctcacctaaacttaataaaatcataaagcgggcaatatggacataatgatgtttcgtttatttcccaacttgcacatctccacagcagaagctgtgctgatgactggagggtggcggtaattagtctaattttaaagacatttattttacaacatgatattgaaaacataagtgccaagttatataaacacaaacaaaatttacttgtgtgatatcctcactttcaatataaagtgttgggtgattgagataagatatacacttcacatagtccatcagcctctcttgatcatacaaatcatctctctcagccttggccacagggtcaaccacacaggactgccttttttgcccccactatgcacacaatgccaaaccccaaccctggatcttgcctacaatggtcttttgccacttctagcctcaaacttcatctctggggtctacctgtactggagccagtgatacgttttatccatccattacagaacatcttctgttgttctctatcatcttttctttccaaatagcttatat

SEQ ID NO: 68818 - DNA, 1170 bp, Homo sapiens
ttgctatagttttgttataacttgaatgcgagtgaggtcgtgcttattttaatatgcatattggccctttgaatttcctcatctcggatttggcagttctacatcgttgttcatttacccattgtgatatttgcatgtttgttattaatttttattgtttgtgttctggatactactgttttgttatgttgtgctatttgctgtatttgttattgatttttatcatttgtatccttgatactaatcccttgtcatgtatgttgtaaatattttcatcccaatctgctgcttgtctctttaaaaatatgtttgtagaagactttcattttaaagcagtcatgtttaacaattttttatggattttgctaaggaattgcctcatgtttacattgtcttttgtgtcctaaaggtcttaaagatattttctcctattttcttttaattttatggtatatgattattccatctggagcttaatttttgggacaatgtgaggtaggaatttatcttattttctattactggctagccagtagacccagtacaatgtatggaatagtagatttttatgaattggtttgaaatattacttttggcataaaggaaatctccaaaaatgcttaggtacatttttagactcattctcctgtttcatcatacatggtttattcttgtgtgagttccatagtgtttttattactatagttttataatcagttttgacattggtaagttaagttttctctgttattcttttgtccaaaattactgtcagtatacatactaatttatacctctcatatgatgtttagaattaccttatcaaattttactttaaaataatgttgggatttttgttgagattgcatttgaacctacaaatttatctggggaggcatctttcaatattccttattgtccacataaaaatgttgtatttatttttaggcttatttcaaagtgtttgggggctttgttgctattaacaatgaaatttttgttttattgtattattttaatatatgattcctgctgtatagggaagctaagactctattggttccaataaatatttttttcagttgattattttgtatattctagataggtaattataacatcttcaaatattgacagatttccacttatatacataattgaaatatgttt

SEQ ID NO: 68819 - DNA, 1019 bp, Homo sapiens
agtaaaaatcatggtggagttaaacttttaaaatttgtaaatgcataacttttaattcaataaggggacttgatatgagacctcaatatttattttgaggtataacctgagaaatatcttcccatacaagtagaagagattttatccaatggttagtgcctctaagtttaataaagggaattgagaatgtagagataatcgcagggggaacaattgtttatgttattagtgtgctttttaaataataacttgagctttgaggaaaataacttgggtccaagattacagcaatttatctttaaaattgtgtacaactcaatgtacacaaactatacatgcatgtttcaaactgtgttcctaaaacttccatatctcttttgctgtctgacttctttttttttttcctccaaactcagagcagcttatcattgtttgtatcaaggcttcaaagtcattgatagctatttattctaacatctgttctgaaataagggaattagaaggcagataataaaactgaaactagagatagcaagtaggagatagaaaagaaaagcccctaaaaatatggatacatggagttggtatctgagaggcaatattatatagcagtgaagaacacaagttttgattagaacggatttgttttcaaattatagtgctagtgctagtaagtgtttctgcctactagctatgtaaccttagttacttaatgtaccatatgtcaattgagtataaatattatttaccttggggactgttgagagatataaatgagataatgtaactgcatctagtagaagctattctgactgatatccaaattagctactcaagaggactctccagttgcaatacattttgttcttggataaaacatattatttaatacattattgtactcatcagatttagagaaatttccaagaatatctgcatgcccaccttccccacaaaaaaaacaaaaacagaaaatgagggaacaaaaaccagaccaaatggtgtgaattataaaagtc

SEQ ID NO: 68820 - DNA, 1044 bp, Homo sapiens
tggttgccttcagtatggtttcttaaatttcttgctgtcatagaaaagggataattgagtttgccttactcatcagattgactttttgttttctttcttctctctttaaatgtttttctttatatctgtcatctgtgtgtgtgaataaatcacagtgttttgatgcaagggtggaagcaggatgttacagagttacagttttcctagcctttctgatttgagtcctatgagactgaaggaagcaagaaatgaatgatcagggacttgtggaattctagtgttctgaggttggctgtggaatgaccatgaggatttgtgtgatactggaatgttttcttaggactgatgttgctcagggagtggggaccatatggtgagaagtttgcttcttagagctcttgaatgttaaccctgtggttagattaccactgtgaaatggaggagtggtggatatggagaggaataattcaacttgaccacttttgaagtggtctaaatcaagctttgcttacttaatatttattcttggttttctgggcattgaaataaaatgtttttctaatatacatgtaggcagcaagaggggggaaaagggaaattttattttagggaaccctagttttggggaggggagatcttaggcaaaattgcaattagggaaaaattcagaaatgaatcatggcctccccaagacatcttttagccacccttggtttgctcagatgattgtacagaaagagaatttttaagccttagaaagtgggactgaatctttcatgtgtctctgttaatagcccatgagactttaaaggaggaatcccacaaagctgaggcacaggttctaccagatccaaagtcacactctctataaaacagccatgctgactagctcatccttagatattttagtctagtttaatggtcttaaaatgcagtgataaggtttttcttttaatttttgaaataagaagtagaagctttagtttattgccagcatctacatgttttctctcttcatctgcccttgggaggcttccaggtgtc

SEQ ID NO: 68821 - DNA, 1034 bp, Homo sapiens
aagacattatatgtaagttgggaccaaggagtgaatgagttgttctctgaaaaaaaaaaaaaaaatgaaaagtctgcaggagcaacatgtgccagtgagcctgaggtaggaagagtgcttgtgcatttgagaaactgaaaaaaaggcaagtttgattggaacatggttcaggttcagaatgagagatatagataacaggtaagttttatcgtttaggcttatcatcaatttgtttaaatgatgatgagcatgatatgatggagatgttgaaggtggaggcacaatttgaattcttgccttgccatttacttactagctaatttgatcatagctagtcatgggcaaattacaaattctccgggcttcagttttatcatctgtaaagtaaaggtagtaaatccttgcctggacatgtgttcagtcaatgtttgttcattcatgcagtaaatccccattgtgagggaagtttaagttatttggtatattaagataatttaggatgttttaatatatattctttgacattttgtgtgcattcctatatccatacacatgtatatatagtatgattttcctgtgcactattatttaggaaggaggagtcagtggttttctccatgcttttattgctgaagtgtttgcaatggtgagagctcatgttgctgcattaggagggaatgctgttgtctcctacataatgaagcagtgtgtcttcatggagaatccaaataaaaaccaggtaagatgcagttaaaaattcctgattggcgggaacctgagaatttcttccatggcttcctacccctaaccccctccaaaagagaattgctctttagagccctttgagtctagatgcgtaagatattttaatgagtttattcataaccatggtcatacatagtcacaagtcaatacatgctatttcgacatctcaggtaactagggtattattcttaatcacatctggaatttgtgctcctgagttactgtttccaccctcttgttggtaggtgtttagaatacagtgatagcta

SEQ ID NO: 68822 - DNA, 1037 bp, Homo sapiens
gtttttgtgcaaataaatgaatagcttctgacagattatttaattaattagatggatgttttctttaaggtaaattaggccaggcacagtggctcacgcctatattctcaccactttgggaggctgaggcgggtagattgcttgaggccagcagtttgagaccagcctgaccaacatgacgaaaccccttctctactataaatacaaaaattagccgggcatggtggcacatgcctgtaatcctagctactcaggaggctgaggcacgagaattgcttgaacctgagaggtggaggttgcagtgagccgagattgcgccattgcactccagcctgggtgacagagtgagactctatccttccccccaaaaaagataaattagtttttatatcactcttaattacgttaagatgaaaaataaactatgaagatattctcaaaagcctttggatagagaattaaaatagatgatacttctacatccatttaaatttgacaaagatttggtgcgaaaagctggcatatattatgaattaaccttttctacttgctcttggtagcacatggatattacactattttgaatccataaaattgtatttcctaagccttcttgactacttaagctcccatacctcaaaatgttgcttcttagtaggttttccttcaacagaaacttataataataattgtgtagcaccatatcccaaatgtgttaattgcctgagtcgttttcttacagttaattaatatttttaaaattaatcctctgtagctactgtgtcatcagaattttttgatttaataaacaggaaattgataaaactcaaaaaatatactgaactatgattgagttggaggcaggctgaagcaactcccttaattccctaactacaaaaagagatatctttatacaactatatgtaggatcctcaggcttttcagaaggatgtgacccaataaaatggttttctaatactgcagtcatttttccccttcacttccagtttaaagttggaaatttcctcctagactgt

SEQ ID NO: 68823 - DNA, 1012 bp, Homo sapiens
tcaggctctccctaggagaccacacaactatgacatcaccagaaatgctcagcctgctaactgagaacttggttttggacaaatcagtgtctaaagcttgactctttactatctctcttatctgacttgaaaaggaccattctttttctgagttacagttaaattacatcatcgaaaggagtgttaagacgagtaagagacatcatccatatttttttctttgtttttttcttttgttttctgtctgtgttttcagcaacgtcagttgattacagttcctttgcagacagatgcagcagctggatagagctcattaaactgaaagctcagaccataaggcgtggatcaattaagacaagtaggcggatgtttctaccacattatgataatctgagaaacatatccctgatttcccagtggtgaaagctagaccttactacccagtaataacattgccaatccatcatgtattagagtgtgaaagctgcagactgtaacggtcatttaggaaaagcttttgaaaggcctttagatttattagttttacctatagaattgtgtttttaaaattttcctttttgtgcaggtattcttaaaagtatataaatagatattatatcattctaattggaagtaaattgccaactctcttattgaaaagacattcttccaggacccaaggtactatttagtatgtggcatctgtcggtttattaagtgtgatatgcagagggctaaactaataaagaatttatggtgagaaagtagttattaccttactgctagaatcagaatcattacttatatgttatcttatgccatgtgttttggtaaattttgaggtaaatatatttgagtgaaagagcttaccgtacattaaaagggggaaaaaactacatttcacaggaaataatataggatgtgaaaccagccagatctggttctgaatcctagaagtgccattttaatagctatgagaccttgggcaagttacttaacttctctaaccttc

SEQ ID NO: 68824 - DNA, 1029 bp, Homo sapiens
aaatacctgtaataaaaaatatcagggaaaattctggatgctactgtcaggttactggaaagggagtgatactggcttgggattcctggttacctctgtgatcactcattttttagtttcacaaagtcttgataccaccagagggagctgttgatatcgaagtcttcgaatgaagaagttggtggtgagagttaagactagggagcagcttatgctgatctgtgaagcataatcattatcttgtctgtaatttgtaatcttatagactcttccccacagcaaacattttccttccatgtttcatttcagatattcttcccaacacattgacccttttctctgcctagtctcacatcctgctttcatcatactcacattcgttactatgtttatattttcttgtgactataaagtttctgaaactctttttgtgttacagtaagcaagtagtctcctttggcatggtatttatgaactgagctagttttcatttatcaatagaaactgcattttaaacctagatgcttttatttggtttgcttttgcaatgaagccataaagatttcctcctattcttctggcttatagaggtattaacaaataacaaagaagaggtactggcttgtacttagcatctgagctaatgttgttcatattgtcttattagaacacctggagagtgcaagttctaactcaggtataccagctgcacagagaggtgagtttgtctaattaagcaaatagtcaccaaaggtgtaaaattctagtttggtggtgcataaaattatagacattgaagaaaatgcactggacaatatggaatagacaccaaaatctggcttttttttttttgtaggtagaatatgttcttttaaaagcatcaattaaactaatatttaaattttttagtatgttaatggtttcccagtttctaagcataaaattttagctccttaaaattttttttccagcttagcagtagtaaaagttattgtttttaaaagggggaacttgtgaggctcacacctg

SEQ ID NO: 68825 - DNA, 1015 bp, Homo sapiens
agttttggaggggacctacattcaaataatcgctgcagctaacgaatacctttgccattggttacgacaagttatttagaagaatggaaaagtctcagactttagacgtactggagaatgtctgtttgagggaggaagaatcctttttgtcgttaatatgctcatttccactgagctgattttaacctgggttagtttccctcccacaccactacacacagggcttgttaaatattgctagagtgcactaggggaattataaaaccatagccctgtattgctttgctaagtttctagggtcatttatttggggcttgcagggttatcacttaatggtgacttttaaaaaaatgcaaaataatcttcttcttgcattaagtgggaaaccaaattataatagaagcagactgttgtgtggcttaattgagactgtttgcagctagaagggggatcttgacatgaaaagcatttgtttcagactcttccatatagatctacaaatggcacacaagtgagcacaactcagcaaagcctgaaagacttttaaggagatttctacccttgaataatgaactatgttgtttttaatttagtattagtctagagactgcatgttgttttatttcttttaaactggaactcccagttggtcagtgagccagactgcatgtatctgcagtaccttctcttttgaaaagcttatcacctgggaagccaaactctgatcaggaggagcagagggcctgggagtctgaggtcatcagacatttgaggtattcaaaccagtccaggtgctgatgtctatctgctgctgggaccagctggccttgggcctcttgggccttttttttctaggagaaaaattaagatagcaagcatgttaaaagatgaacctgctctccctaagtgaaatcaaaaatctcccttaaaaacttgggtttttcagatttttttcagatgcattcgtatttgagggcagggaataaacattttccctcccttttttccctcttca

SEQ ID NO: 68826 - DNA, 1056 bp, Homo sapiens
cagtaagctgtgatcatgccactgcactccagcctgggcgacagagtgacgctgtctcaaaaaaaacagaataaaaaatgatttcaaataacttttaatcaattaaaccaataattttaattttaaattctgctcctctgaaccatagaggtttgtcagaggtacctcttggcctgccaggaggcaaagtgaaagggagcagagaaggatgggattgagggtaggtctctggatcccctacttttctgaaacagcagctttgattccatgtttttatatatccatcttctgtatgtgatttcacttgaagaaagggtctcaaagagtttgaaaaccattgattgattatgccaccctttattgtcatcatcatcatcagaccatcacatctaatacgaatatatgtaaaactttctatactaagtgcttaactgtgaaacctatgtgcttttccttgaatactgcatttaaaataatcagtaaacacttaaaagtgtatctgtacctttctgccaatatttctgtagttttgtaaattgtggtttgtgttgcgtgcttatttattgtcttgtgcttcaagtcttttcaggaggacatgggctaaatacaatttttaaagctatctcaaaatgttttggaaaatttgagggtaagataggttttgaaaaggtctgaaaaatataatagagtcttaaaaatggagtaattgcgtgttgtaacatgaaagaaggcaatgtctggaaaaattcaaaaatagcaatttagcggaaataggaagagaggaaggtaagagtgttagggataaatgctcaaaagatttctctgtttttttaaaatatgcaaccataagaggcttaaaagtcagttactaatactgataaataaaagtatagttttttaatcattttgttaagttaaataaggtgatagcttttttttttttactttcagtaactttgaattccagtgtatatttcatgtttttaatcacaaataggatgattgttaaaattttttatttccttttatattgactaggggattagtttcaagagc

SEQ ID NO: 68827 - DNA, 2740 bp, Homo sapiens
taggatattaattattgtctagcatttattatttgcaaagcactgtgctaagtgagttacagatattaatctcttaaagcttcacaagagtcataccagggaagatagcaccagtctcagcatcatgcagatgaatggtttccatgggagaaatcaaggagaaaatgaccagaataaattggggtggggagatggagctgagaatatgtatatgtatgttgtcacagattcttaattttaaaaaattaataatagatcattactaaataactgatattttcttgcctttctagcctcaacagataatgaagaacttttacaatttccactggaactgtgttcagattcacttccttctcatccttttccaccagctaaaggttggttaagtgagggaaaaagcaaacacaaatcctggtttctagttcctttcactgcttcttcattataggaaatcttactaaccttgaggtgaaaatttatccttcattccctcattatatgtttcttcatattcataaaggggagaaattaatgttccttttattttaatttctgaagtaatttcattctaagttattaaggtaatttttcctatgatattctattctcataccttaatgtattaaagctttattttcaaaggtttggatttcccactgtaactattcacacatagaatacttgatattttatattatatttggtaagttttttccagcaacaattaaaccttcacaaaaagttttggattttcatgcacaacagaatgcttttttttttccagaagatacatgaagaggttttgagtgggagtagtacaagtgagaaagcgatgagcttcctgtctttgctgtggcaataattgaagaacattgttatgtacttatataagacactgccatgttttttttccagtgcaaattgatagctccttaatttaatagcaataaatctattttgatctgcataatctttggggaaaagtgggaggtattgttttccatttctcatctgattttagtatgatttttattacaaaaaaatttaaaattactatgccttattttgtagcattatgtattagataaatgtagtatgtgtttttcactaaatttattttgagaaatgatagttatttgaaatgagctattcaacttttatgtcttataatacaatggatattattttatgattcctacttgttatttgataccaaattatgtataatacagaatagttttatattcactttacatatatgtcaatagaatctttattaaatcagtacaaagtctgtttatatagataaatagatcttgtctcatatttcaaagacgaaaaataagctgcttccagattctgaactttgtaacgtagtaactgtggtcctttttcctttttgtgatcacccaaaattctgatttagaactccatagagaattgtagcatatctcaatgtccttgaaagaatagagaggaaaaatcaaattcaaaggtaatgtgagttcagatttatgaattaaatacagcttccaggcagaaagcagaactgtcaagagtcttctttgggccgggcctgttggctcatacctgtaatcccagcactttgagaggctgaggcgagaagatcgcttgaatccaggagcttaagaccagcctgggcaacacagtgagaccccagctctacaaaaaataaataatgagctgcatgtggtggtgtgcacctgtgatcctagctccgtgggaggctgaggtgggaggattgcttgatcccaggaggttaaggctacagtgagctgtgattgtgccactgcactccagcccaggcgatagggggagaccctctctcaaaaagaagaaaagtctttcttgaattcactatacagcaagtttttttttctttaacatctactttatacagaaatttgtatttattcagggttagttccaaatcacttctaggtataatttcatttatccttatcctgcaataggggccaaaaaaaaaaaaaaaagccctaaaacctaatcgacaaaggtttgattgattgttattctgtaggaaaaggtatttgtggacttggggtccctgttagctctgttttactatgttgttaatacctactgaattctgcagaagattagatttcagctctctaagtttgccttgtctataaggacaactttccacttctgcaatagctttcaaaatgttttcaaaggaattataactggtgcttatgtgatcgttactatacggtatccaaatgatattttgtggactaaaaaacaagaaaataagaatttgagtagagtaagtcctatttgaacagtacctaaaatatttgcagctcattttagggagaattgagagggaccgtgaggtaggttggaaaagcaactgacctgttttctcagttctgctatggattaggcatgagaacttggaccaattgcttaacctctttgagcctcagttcgtcctttgtaaaatgtgaaaagattctctctaacctttaaaattcgttgggtttctatagtttatggttcttcaattattaacatattcccattttgaaaagtaaatcaaaagctaaattagaccccaaggtcacactgagcgtctgtatttaatttaagtgtgttcagctgggcgcggtgactcatatctgtaatcgtagcactttgggaggccgaagcaggcggattgcttgagcctaggagtctcttctctaca

SEQ ID NO: 68828 - DNA, 1039 bp, Homo sapiens
cctccttgatgacttctcatttcttgatccttgagagccatgggtttggaccctctgcccaaagctctctccttagttgaactcatcaacttatatagatctatgtgtctgtgactcccagatttgtaactctagtccggaactttcttttgagctttagacttatacctgtctacttcataccccattttgataagccataggcatctcatacgcgttccacattgaactgctgattttcttcacttttcttattagccttttctgttttaatgaatggtacctttctctatccagttcttcatgccaaatttggtattctttggcactgtcctctttctcaacctccccacatcaaatttattacaaagtccgttgatttttcttctaaaatgtatttctaatccatttatttttttccctcttgaatcttagaccttccatttgggattgttttccttttgccttaaatgtacgctttagtatttcttttgatggtctgctggtggtgagctattttttttgtctgtctgaaaaatgtgtttattttacttttatcttaaaaaatattttgggctggcagctatttctttacagcacattgaagtactctttcaccactgtcttctggctttcattgctactgttgagaaataatctattagtctaattactgtccctttgaatgtagcctatgtggcacgaagtagatgctcaagtgacttttgtattttttttaatgactaacattttcttctgctttccatttatattgaacacatgcagttataaaacctaagattttaaatgatattctctagtgattttggtcattatttcatttttagagattttaagattttttatttttctttattgaaatatgattctttaaaatatttaatttttgtgggtaaacaggtgtatgtatttatagggtacatgagctactttgatacaggcatgtaatacataataatcacatcatggaagatggggtatccatcccctcacgcatttatcctttgtgttagaaaca

SEQ ID NO: 68829 - DNA, 1107 bp, Homo sapiens
aaaatgtcaatgaagtaactgatgcttgagttggattttgggggatgaatatgaattatataaataaaaagaagaggcataaggagaggtttcaaagcttacaagatgcattcaacacttaaaagagtagcaaaaaaaagaaggccacaggatgtagactcaggatggctgatgataggtcacagatggaggagtctgcaaatgagttcagttaatttacctagaagtttgagttcatctgacagatgtcatctgacagaggtcctttctagacctcaaaaacatctgtgtatttaaattttaactaatcttttctgttccagcccatgctactttctgttactggattaaactctctgaaatgcacttctgctcttataacttcttgattcgaagacatcagtggtttcatgttattccttctgacatccttaattcctacctacactttaagcctggtcttcctttattttatttacagttcaagtgactgttcctcccttgttctcttaggcttctgttttattttatttctgggttttatttatacctggttttcagcagttcatccctaggttgctacttttctcatttgtttaggtgatctcattcaataattatgttgattgtttaattttttagctttcaaattgggtgacatataataatttaaaaattattttgaatatcagttttctgttatatgatgatgtagtttaagcttcatttagtatattttgtatattgtttcagaaacctttataatgatttaaatttagattaagctatataaatcacctatatagagatatttacatagttgtgcttttagaataattttaataaaacttcatatacatttaaagagtattttaatatagtttcattgattaatgctagattcagcaatacaatttattactgcttatattttgaaacatttcattctttcagccttgccatattttaaatgaagttattgtctttaatattaatacttttatcttttttcagtttttaatttatgaagaattctttccctccattcaaataaagttacttctgttttctaggctaggtttaggaggtaaacctcgtaaatattat

SEQ ID NO: 68830 - DNA, 1534 bp, Homo sapiens
acatgttggcgttttaaaaataaatatatgtagaacttaagtagcttcctccattttttattaatttctaaaacactgtttatggattactttctgtaaaattcatttttaaaacagtaaagccaccatgtattacttgtggtacagatgaagaaggcaaacccaatgtgagaaaaatcttataaaaacatagtacataattatttgctttagaaaataatattttaaacttctagaatggtttaaaaagtaaacagtaggttttattagtgagtttaagaaaagttagaattttatttcatgcaattttttgggaaaataggtattttctaaactgaaatacatttctatggttgtgacaattattttctcagaatcatagtcatttaatagattagagcaaccacttgaataatagttcatcttatgatagaaaaattctcttttaggaaaggatgatgttaaatggatgttcagattggtccgtaagtgtgtatgtcttagaaaaaagagagtatggatttgaaagtgtatttttgctgttactatatacatttcatttgggaatatgaagaaattctttaacacaagtagtatttgtgtaaaataggttcacttaattgttcacacatttcttaatttataacattgattgctaataccatattgtagtcttttctatttctcttccttattttatcttctactttgatgtctttctcagtttcctgaattctgcatttctttcttctgaaagaaagttttaaggtagctttgtcttggaaccaaaactttaattcaagaactggctggcatcatttgtagttctggcttttatctccttatttctcccttttgctgatcctcctccctgtggaggagacaaaaatttcatcataggaatgtgagctataacacgcctcttaacctttctttactttgctgtcttcactattttactagtgagtataattctacttattctactaattttgaaaaacatattttgaaaattggatatatactgcaattcaaaaatagaaactttggattttttggtttttagatttaatagtggcttttatatggaaaaattacaatgagagcttagcattctatctagagttgatttttttttctatctcaagttattcccaaatgagaattggccacaaaaagaaataaattatgatatgctaattatagactttctgtttttaacacattgtacataaaatgttactataatttgcagctgctgtcaccagtagtttgcagctaaatgcaagtgattaggaaatatgtatgacagatgcttcatttatagtgctccattacaagcaatattggacttctctggtaataaaatagaattctgtgactctaaatcattttttaaaattacagaccaatacatggagtgttatatctgaaatttttccttatatacattaccaaattatttgtgttaatattttaagtgtgcttgctttctttctttttttttttaaattagtctctaatttcttgtatt

SEQ ID NO: 68831 - DNA, 1683 bp, Homo sapiens
tcattttccctgagagatacttatgagcagatgtgcaaactatacctaaagtacttatacagcttttggttttcagtattttaataaggttttcaggaagtagataaataagagttcaagatgcaagatggcataaatacagcatgcgtgatatgtgagcttttctatattaccagtaattttagagtaatgaaaatccagttacattgtgtgtgtgtgtgtgtgtgtgtgtgtgtgtgtgtatgtgtgtgcatgcgtgtatgtagtgaaatttcacaattatggagtagattgcacatttgactttctaaatttacagatagtaaagactccagtttggtcaaacatggattatatcttagtttcatcctaacatcacaaatgactaggtcttgacgtttgctctgtatttgcacatgacttcctctataatgagaatcttcttcctagtctactgatccccacccagtttgagattatatactcctttgaacctgaactctctaatttctttttcattaggggaaatttatcttcttcaagaggttagcagttggaatgttactttcaggtatttgggaatatagctttttatactgtccgttaacatgatagattatcattgtattaacctttatttgatccaacctaacattttatctccttttgttgatttataaattagattgaataactgtccattttaaaaataatttttatttttaaacaatatttgtttgtatttatggggtacatgttttattttgttacatgcatagaataatgatcaaatcagggtatttggagtatccatcaccttgagtatttatgatttctaagtgttgggaacatttcaagttctctcgggtagctgttttgacatatacagtacagtgttggtaactatagtcactctgctttaaaacattagaataatttcttttttcttctaaccgtattaaaagaatctgcaaggcagagttattctctcccagagctatataaaaatgaactgaacttaacatttcaggtagttggtatttcttaattgccaagtgtatgatagcctaaaatctcaaagaggttgagtttaataagagcatattatgttgagttgttcacattgttattttctgatatataaactgccgttttagaattttaccagtttcacctgcacttcagaaacaaaatgttaaaaagatggcaagatatcgagctgtggccatgctctaggaatgtaacgtagtaaaaattaatgaattctgatgtcaacctaagtgtgctgacattacccctaaaagagacatcagtgaggattgatttagtgctcagttcatgcctgcaattaaaaggatatattaaaagatttgcgatattatctacaaagagttttgacccacagaagaaaaacataaaatagtataaaatataacttgtatattaaacttatatataaaatatataatttgtatataaaaatatattaatttgtatataattaaattttaaattttcctaaaataataacttttataattgtaaataattctgtagattatcagaagaaatgtgtttaaggtgaagaggtttgtttcttaacatctttgaaatgtttatttaatgtttattaaatgacctcacatctcagctgtatatccttcagataactaaattgtatca

SEQ ID NO: 68832 - DNA, 2485 bp, Homo sapiens
tatacgtttctcatttaaaactcacatttacaaagttcaaatgtacttgctcagtgattaccgaactgttttcccaacttctttcttaatacttatattgtgtaattaccccgtgtgtgctgtgcctaacaataaatccattcgaatatttttatgactcaaaacttcatttacattcaaatttcctaataataaatatgaattcattatgaggtaatcctctagtttgtacaatttttattagatttccaggaacaaaacttagaggacagaaaaagaagtttaaatggaaataaggatgcattttgactaaacatattataatacatttattataagtgacgtactctccttccatcctcttccttattttccctctacctttctgctgggctatacctaaccacttccatagaccagttttttactcttttcttacatagcatagatttttctttctcttgtttaaagattacttctaaatttgaactgaatttatttctaaataaattttagaaacttttttatactcaaccttcatgggttactgaggtgcacaggactgatagcttttgtgcaaaatgattccaagttgccgtgctttgtgatcatgcttttgtgagtttgtattctccatgcttgaagcagccagtgaataattcttgctgcttttaataagcctgcttctggtggtattctgtatctctttaccagcttttatttgttgcatttaatctgaggtggtcttgaaaatgagatcatgataaattttagagttgtttctttttaagataaaaatttataactactataatatagtatgaatatgatctgtgggagtctcctatgaataaagtatatgagctttagagcttgagaccgtaacagttcttttgaccgttgagagccctgttttgcttatttttctcaattatgctcaattatgttctaaatagctgaggctactggtaagtgattccagttaagtgagctacattaatcttgcagccagacaggtcaaacatcaagttttccttacttgcatccaatttgtgtaatgtgaggggcctccatgttttcacaggagctccgttttcttattgggtcctatttcaatgaatttcctttcttggctttttcatttgtcttttttgtgtttctctttgtctctaagttgatgaattttattctttaagagagaaggatagaataaagcttgcaagaacttgtggaattttattgccttcctagctgttatctatgtacctttcaactttccttaatgtacctttatgcacttgtatttgttcctgccacattggtgttgatagagtaacctcacacaatgattctctacccatctcaacttgatatttgccactatcctctttctcttaacccacactgcttatcctctcacttatcctcctttggtcccactttcatttagatcccttggccccaggtttttagagtctttaccagtgtcttatactgggtgttcatgtgaagggggtgtctaaaccactgatagataaaggggaagagggatagggcagttccctcatctcattgagaagttccatcagagttggagattcagaggaaggaagagtgtgtttcaaatatcttaaattgaaggaacactttttttttcttcattgagaactgatgaaatgggtctttggattctgtataacattgtatatatggggaaatggatttgaaactctaaacatttaattaaacttttaattacaaagcatgtgtgatgtgtaatgggtggccttttatttcaagggatgtaatacagttgctatggcaagctttttaataagcaaattttttacactctacacacgataagttgtatttttcccttattctttccactaggaatttccattttttaccttgacggcatttcctcctggattccttgtacacgttgggggtgtagttagtgcacgttctgtgaagcttttggatcgtatccacaatcctggtatgttcttaaaaagtttcaatgtttcctttatttaaattgtggttattaaaattgatttttatgatttttttaaagccaaatctaactgaaaagagaaatgaaaagaaagtataaactagcacgttactttaatatatttgtagtcatcttaattataaataaactaagtgtattttagttacttttctgtaaaaaaccaattgatttatttttggtcacaatatcactttaaggaaatccttaaataacttttctttgacccaggggagataaacatttttataaattgaccattatggccattagtttaagatgttagttcttttcattagcagtagctttttatagattacttattttccttgttcttaaaacaggtatttttaaaaatgtaattgtaaagctgggcacagtagcatgtgcctgttgtcccagctactcaggaggccggggcaaggaggatcgcttgagcccagg

SEQ ID NO: 68833 - DNA, 4258 bp, Homo sapiens
aaataatttttttcctaaaattatttattacttcaatagtttatttatataatattagcagttttcagccccttggccttatattatgagtccctaaatatctctaaattgtcctgaggagcactcctatttctcatggagacttcaaatggcaaaattgtgattgttataaaaattctaaaactataatttcagcctgtatttcatgattttctgccttctgatttacctatatcagaatcagtgtcttgagaaataatggacagagataagctgattataatttatttgggaatccaaaagtagaataaagttaataacatttagactgagaaagttgtttttttttttttctgtttgtagttaaagctacattatctgtatttctggtaggtctcttttaaaaaattttatatttctgtagatactaatttttgacatttacaaggttttatttttatattttttcccaagtatttaactaatagtggaattttagatttactagtgttagaatattgatttgacacctgattttagctaattttttttagccagtcttttaactatgtatagtttttatagagggtatttgacccttagggtactcacgtctctgtaaatgcaaataatactatgatcagagtaaagtattaaacattttagaggaaaaagaaaagtattaatatatatctcaaaactggacagaagttaatattaaaattaatactgacaactgtttacctaatccagtactgagtattttttatggatattcaattaaagtgcccattgatgctatcttttagttagtaacatttgaagtactgcacctttataactttaaataagtgtttatattttaggcagcaagtctggctctaaaaatttgaaaatggggtacatttgaatcttacaaattcttaagccaaaaagggcaggcaagttaagtattttgaagacattaattaaaagttattagaatcacataaaatcctaagttagtgatttaaaaaattttaatgaatgtgaagtttgtaaaggttttgttaagttttagactatgcctgttattttcattacgtgggatagatggtcttgctagtgacttctcatttgcttagtgtaatttgtctgtacattttaaagttcatttttattgttatattttgcctcatcattgctttccttagcctgcattttctgatcatcttctgaatctgcatcttttctctgctactttcctccacagcaccttacccacagggacctaggatttacctgtgtcccagctccccctctctctcttgtggttcccttcatcttaaaaagtcctgtctcctcctctcggaatctagccttacccctcatcattctagccttgtcagcccagttctgaggaaaagtgtttctttcagtgaagagctgttcctggctgcttctggtaggatcacattatgtcagctttttaatccctttatttttcatgctgtaaaaaattattgggtattttatacaagatgcctttctattatttttcttactggtagtcagagttaaataattggaattataaggatataattgaggattacttgatggctaatcatgaatattctgccaaattattttatatattaaaaaattatataaggacatagatctgggtatttctaatattattagattcttattactacagtttctgttttagatgctttactttctttcccttcataccaactccattcacattggacctgtgtcatcatgttgctaaaccatatgattacattagtaaattattctgtttgaatcagtttaagtctcattttggtgatattcttttattatctttttttctgtctgttgcattaattattaaatttttctgctctattttctgatatttcaattatcactacaaatttacattttattttctggcttttaatatgcttcgtataaagatcttagtttcatttctatgtttagtattgtatagtctctaaaaataatgttcagattactataagaaaaaccatttttttgtttttaggaacagaatgggactatacatatgctaacctttgtttccttatccaagaacagctaaaaatgtaaaagttaattagttcctttttaagtcgttgtggtaaatttggctgtatgcatcttacgttttgaaagggatgggattaactctagtctgtagagcactggcttcttacctgtcccctgctttctatgattgtttgaccatagttgatctactggcatggtcagaacaataaaataaggtagggaaagaaatttaaaattaagccgtaaaaaatacatgtaagagcttgggaaagataattctttcattcataactatgtacatttgtgatgtgtctattacatgtctgtggttttttgtttacttaaaaaaagtttatgttgatttttgtgaatgagcgttgacatgtatgaaattaatactgttttgtcatgatatgtttagaaatgggaagttataagaaaatagatttgactatatttcagactcacctgaattttatgttttctagagaattttggaatattttcagtgagcacaagtagtgcttttgtctctatatttacatttaatcagacattttatatttctcatttgttagtattcttaaattgttagcatagtaattgttattatcttgattattttaattaaaagactcagcttttaaaatggaatattatgcaaagattcatcacctttacatactttttcttataattttctgaaaaaattaagtccaaaactagctggggtcagtagggctctgacatgttgcatctaaagaaaactgtgaataaaagtagagtaaaatatgtgctttatttgtcatccccagtgctttaaatgtttcgatcattttatcacatttcaactcatgatgtttatgaagatgaatgcaattaaactttgtttctatagttgcttttttggttgttatttatgtactgatgttctgtaggaatgggaagtggtagtgctggaaaagaaggggggccctttaaagctcttttaagacaacagactcaatcagcgttggaacagagggtaagattcacttgatattctttgttcttacactgttaatatgactttgttatcttatgcttccatgtacttgcatgttttcatgaactgttttggttacatatctataatattgcagttttgaagtccaaaatggatttaaggtgtcaaagtaatttgtttatggataattactgttgatttggaataattacgtaataataatttttgtcttgtttaatcttttatcagaaatactatttttgataatacctattgaatgctgaagtaattttccattacgtttatcattggaaaggagatggtaaacattttgcagaaaaaaaattccagtagcattttattatattaaaaataattccttagaatataaatatatttatttgctgagattacttttatcattgaccaatctcttaggaataagaaatgtacagattctatatttctaaagattaatataaataatgtggttattcagtataatgcatctatttcagttattgtaagtttgagatttagctatatttgttcattgggaaaataagcagttacagtttttggatgatttctctctctctcttttttttttttaaataaacttcattgctaagggaggatcgcctcataggttctgtagaaggcgggtatgtttctgaaaaatgtgtgagagcctatttcttgtattgatagctttctagttttaatcttggtcatttaaattttatttaatcttagcaaatgttgacagcgtttttcttttcgtaatgcaaagttttttttttatttaatagcactgtgagactcatgttcttttttctactaactaatatggtgcatgttatatatgtcatgtcagtaattttaagacatagttctatagctttcattatgtctgatttggaagctataagcatttacagaattttcttttacatgttctatattacactagcatttgggggaaaaaaggtgaaagagtaaatacctgtaaaaaggatacatttcataaaactaaagtatttctcctctagaggttggtacgatttattttctagacttttccctccttatgctgacagtatctgtgtatgcactgtttacctagagaaggctgaagagagcagagctgaactaagcaatgatgag

SEQ ID NO: 68834 - DNA, 1378 bp, Homo sapiens
gtgtgtgtgcaaatataaaaacaattatgaatatttacacacaccatttgtagttaccatttttcttttgtaacttacagcattgtttatttgaaaatattttgtcatatattctttttatttctccttttgatattttttatccccttagtctgtcatttcatgcttttttgctttttcacttggcttattaactgtttcaatgcagataatatttatctggagagtgatgaatggttaaacagcaattggttgtctttggcctcattcccagctccacacgtaagaaatgactgctggccctgccccaattctttcctggtgtttggatcatgctgccacctgtcaagtcctttggcacatgattacttaatatttctccaccttcttctggcaggattcccttcaatgaagatcccaatcccaatactcactcatcaggaccctcaacccctctgaaaaaccaaacttattccttttcaccttccaagtcctacagtcgacagtcctcttcttctgacacagatttgagtttgacacccaaaactggtaaggcgcttccacccaccttttattttttcttttttaaaaatttgtttctatttcttattagctttccatccaaatctttcctcttgtttttggcacttaagttaaaaagaaaatgtgaatactgaccattttcagttactgcaattaaaatatgaaaattttgtataattcagaaattatcttgtttacatttcattgatttaatcatagtgtagatatcaaagtccacgatttattttggcatgtagacatttttcattttatgctcgaattaaaaggaataacatcttaaaacattttgactaaaaagtaacactagtggcttgcaatcaattgcatacaagcatttttgaatttattatttctgcctattagtgaatataattctaagattttattatgaaaaaactttaaaccactgaaatggttatattagagtacatctatctatttattaactgggtatttaaaatgtttggttttactagtctttctaggttagaaaatagcatttttacttattcttaaatttttctgttcattaaatttgtattttctattgtattttgatgaatgatttctgggtttttatgaatatgttttatgataaaaagttgatgaaaaatcagattagttctttataccttagaatagaattaacttatttaaatcattaaattattattgtttagaaaaatttaaaataaatttaaaaacttaatagtgatgaaatttttataaatagtatttttgtctgacagttttcccatcagatgattaaaacatagttcttatttgttatttttagttaatatttttagtagcc

SEQ ID NO: 68835 - DNA, 1654 bp, Homo sapiens
gatcaggtaaagttgggctctttgcctgcctttaatttgcgttctaaaaaatggggatgatagtttttcagagtgtactcacatatgattcatatgattctgtttccctcattgtgtgtaagcaaaggcattgcacagtgaaataattgctgatattaaattcaggattcttatttatgtagtatacctttttacaacattcaatgtaatccttttagccaaattttttcttaaaaatttcaaatcttatatatcaatatatacttgtataactgctctaagtatacacacacatagatatggtttattataggatatatgttgatatcttataaaattttgatttggaatatagtttatatgatatattctgtatgagagccaaagttattgacattgttttatgaagatgtctttaaaagcaaggtccccttgttttgtttccagtgtaacctgattttaagctatatatttggtgtattgaaatactggaatatgtttatctgcgtatatccaatcagttcactcatttctctttgtgccatcatctctcatattcttaaatacccctatcttagtagcctagacagttatttaactttctttatagaaaatataattaattatatcagcaattcatatctcagtttcaaaggtaatataagaactttatatttgactttttacttttatgggcgtccctccccataaatagtgcatagtaagttctattgtgatgaaaataatgacaaatatgttaaggaaacttaaaatacagatcttagtcttgttctcatttaatttcattgactattctgcttgctattttcttattcacaattaataaattaatcacaattaatttattaatcggatactttaaaactatgtatcctaacaaattaatatttagctatttttcaatttcaacttgttttttgcatgctagggattaaaaaaataagttctcttccctgactaaagctcctttgaaattattttaacataactctgcaatctgttgtatgtattgttttcttttcttccactttgaccacaaattccctcaggtctccgctggttcatcctccaagccatggatgccgctcgactcacaacagcccaattcacactgctactggctcacgacttactcagaacttctctgtgtctgttcccactctcatctatactggtacgagactgctcagactccagagctggggagatgcaggccacgggcagagtggctgcagaggcaggcaggcaggtagtgtaggcaggtaccataaatctttgcttcatccttttcttactcgaagtccagctgcagtgaggaacttctgtatttagctgccacagagtctctaactatatggaagtgaaggtattcttccagcttccaaagtctcttccacagatcctcaaataatgctattttgtatgtgtgtactgtgaattttgtggcgaatcctcccatatatatttttataattatttctgcatttgtttaaaaataaaattgatgattagattctaaatgaaatagctgccaaagcttccaatttgcttattttctttatatacaaaacctattacagtaggtcctatttcattctgtggaagagagctattggagaacaggtaagcaact

SEQ ID NO: 68836 - DNA, 1123 bp, Homo sapiens
agcaaatttaagtaagttacctagtggaaggagaatgacaaagctatattacctgttggttccttagaatgaaatacagagagcaaggggatatgttttgcatgcattcaggaagagttctattagtgtaaatcttctgggattgtatacgttttctccttttctaatcttgttgtagcctcatgatggacgtaagttccttccttaggattttctaaaaggcatcttactaattaagtcaagttattttttaaaaaccctcaatactcaggctgttttatttcaactggcttcattgtattttttgagaatgaagcaatttgggttctatttcaaagcctattttatgattcagctgattataactattctggtatttaattatgtaatattgttgattctagacaggaatttgataaaaggtggtttagattatgttattgactgactggaaaggaatattaatattataaataccacaggttattatgaggcatcctttcatgcagagagactgatcgaatcagaaaactccaagagtacattatggtgatgttccagtgtatttgaattttaatttgatgccatagtttgaacattttacactgttcattttagttttttcattttattttacctacattaatggtgtgttctacttcctaagtttttttctttttgatgtttagtgtcatgcacactataaatccctttggtgttttccagcttaactctcttgacaatagaaagtgcttttaagtatgagttattgcttctttacttaaaaaaagtactacgagacaaattctcctgtgtatactactgattataataaatatagcattgtttatttttaagtcttggattttttaattctttttgagaattcttatactttttctcacttcagtggagaaataaaaacaaaaacaaaaccttactcattttttggtgtaaaagtagatcaccaatgaattgtttgatttttatccattatagtaaataccttttaatttctattagcaacaaacgtagaaacagttctcctattgcaaaatcagtaatattttcataaagtagtctgtagaccttaggaaggactattatgatcagttagtgatag

SEQ ID NO: 68837 - DNA, 1046 bp, Homo sapiens
cccagcccctcagcctattcccccctcgactgccctcccttcggccgtggttgtccagctctcccacgagggatgaccgccgagacctcagtgtgtgcgatgggtgcacggcttgcaggcgtccgcggcacagtccgctgcgcggggaggcttgtactgttgtgcatgcgggggtgaccctgatgtcaggactcattaacaggccacctgccactcaggagatcccaaggcgtggccgcgcagccaccgacacactcacacacatacacacacacacacacaaatgccggaatgactctgatgtcaggactcattaacaggccacctgccactcaggagatcccaaggtgtggccccgcagccactgaaacacacacacacacaggcacacacacacccttggaaggggtggccagagtgctggacatcatgtttaagaaggtgcatgaagccctttatgggcacttggagtcccacagtgcgaggaaatccactctcatgcctaacattttgtgaatctgccatgcacgttctaaaacacaactgcaacacttcctgctcttgtataggctggtaggtctgatgaggtgtttcagggtaatttagcgccttgaggtaggaagtcatttaattgccatggacttaaattgcaaaattgctttttaagtctaatgattagtttaaaagtcatgcaaattagtaaaggcctacggccggaaggtaataacccagagtctgaaagaagccaagtaaagattgtaataaaaattggcgtgatgagccagagcattagagcagcaatcatttgggctattagtgcttagaattgatggatagatatatcataatatatagctcgatttcatctcaatattcctgatgtttcctaaatgttctctaaccgaataattacagttcactgcctcccctgcccattgtcatggtgattcttaatcacttcatttgagaaagttcttgagtgctcttgtgccagatgttaggtgataggaatccacaaataactaaaacatagtgtttgctttccg

SEQ ID NO: 68838 - DNA, 1462 bp, Homo sapiens
ttcagaatttctttagtaaatctcaaaggaaatattttcttttgagattttactgtatttcccttgaaatagataagaatcatacctcacatttcagaggaagtatgtattatatagtcgacagagtataatgtaattttagagcagtcgagtatcagtaatgtagcctgtttttttctcagtttttttctaacatttttgtatgtttaagatatactttaaatgtactttagaaacttactgtagtaatacttatctggtgattgattattcctgcaagctgaactatccagagcatatcagaaaataaaaagaaaaaaacaagctaaaaaagacttactagagtcaaaatgatagaaggcccagtctttgctcagaatttgtgggtacatggagtaaatatatctcattttagacagaattcctgttcttactagattaaaagaataaattataaaggagatggtgaggttttcggagtatagtagcagaataggcagagtaaatctaaaacaacaatacagccacagtgctttgtatttaataatcctttactgtttataaagcactttcacatgcattctcccaactatcctgtgaggtagatgtagacggtactgttaatatgtatcatatagttaatgaaactgaatttgccgtttacaaatggcagatctgagatgataaaccatcttatgaattattgttctatgaccaagagttttgtttgtatattatgatttaggcagggaaggtgcttctgtataaaattaatttcttaaaagctttggctcataaaaagattctgctttaaagttcccttgaacataaatttgcattacttttttcatatgtgacaccattttaggaaaaagggattacttaagctttccttcacgagttacttttgttgtgtaacaactgtttaacttatttgaagattttgatttttaatttttatacttttctttggagagtcatcgtataaaggaataaagaatcaagtcagatctcaggtccataataattctcaacggactcttaaaattgtttttcattttctgaagagctgatgaattagtgtttggaatattccagttatgttgtctcagggtctttctgtttgcagtattaagcaacgttgtttttctcactaacttgtcactatgaatttttccattacttgggacttatagtagataatggcaaaggcttcataggtaggaattaataccgtaattattatttaacattacaaaactaatatatttattcctttgttgggtctaaatgagattgcttgctatatggtaccttatagcaacttagcttttcaataacagtgtgttacagtgctcaagagcatggggtttgaacacagtgctagttttgagtccagattctatactttactagctttgttactctggtcaaatcattaaacttcctgtctcagtatcct

SEQ ID NO: 68839 - DNA, 1246 bp, Homo sapiens
tgtaaattatggtagattatatttgtatatttattaacaaatctatgaatgttgttaaggacttctataagtaatgaaccatactaggaatagggcagtgttcccattctcagagactttccaatctgttggacataggagagattccctgtatgtgtacattccctgtatgtgtacacacacacatacacacaaatgtgcaaagattgtgatacaaggcagactgtgagaaatggcaggtatcaagaaagttatatagaaatattgaagacagaatgtataattaacactttggatcaaggaaggcatgttatatgaattaagggcaacatgttaacattagtggttctctttgtttaaatatagaattaaaattatagatgttagataaaattgtattcaaagatggttcttttatgtgaagaagttggtgttttctttaattagtatttaactcatgattttcaatttatctcctgttctctaaagatagataattgctttttttcccatttttaaaaaaaatttttggcagctcttcacagatggaatcacaaataaacttattggctgttacgtgggaaacaccatggaggatgtagtcctggtgagaatttatggcaataagactgagttattagtcgatcgagatgaggaagtaaagagttttcgagtgttgcaggctcatgggtgtgcaccacaactctactgtaccttcaataatggactatgctatgaatttatacaaggagaagcactggatccaaagcatgtctgcaacccagccattttcaggtacattttcttttctgaatttttccttttgaaaaatagggcatttaagtgcattaaggaaatattttttaaaattgtctttgtttgagcaactatttggttaacttagaaactttctttagctagggtttttgtttttgttcttgttttccctaaaaagatagaagtaaatttctttatatttgcagtttatcatcgttgactctttgcaaaggaaaaactacaagatgttttggattaaccggctgcagagggtcaaggcttctgcttagttttttctagttagtgtttgagttgaagtgttatacatttcttactgccgattgcttattacttaattgttcatgttttcagagttcttgcctattaaaattttattaatttggttaacaattctttgttctttacgttgttcattatttaatttaatatattatgttttctataaaga

SEQ ID NO: 68840 - DNA, 1075 bp, Homo sapiens
tctgggtaaaacaacctaatgattcttgctgaagatggccagagtaatcagagtaattaatttggggaatggtgaaggataaggaacctgatcagatatcaagggtggggatactcttgctaaactgactcagtagggttcttgctaaaactggtttttacaagagagagcacaggtaggtctacaagaagattcgggagactgactaaagtttcatcaagaatctttgtcaggagacatgacctttatgatacttaagtttttctttttatgcggttttgttttaaacaggctaatagctcgtcagcttgctaaaatccatgctattcatgcacacaatggctggatccccaaatctaatctttggctaaagatgggaaagtatttctctctcattcccacaggatttgcagatgaagacattaataaaaggtaaaattatttttacatttgaaattatgttttacattgctttgctctatgatagggtttcaaaggtaattgtaaagtttcattgtataaaatctggttttctttctttgcattgaagtaaagtaagcattgattctttggctgtcagatagcactacagaaataactgcctctccatccccctcagtgtcccctcccaaaaaatatgccctacaacagcaaggggcagaggtggaagtaggggaacaccacttaaaaataaagagttaggtggtaatggtgaagcaagatttttcttgactttttaagatactgcagggttgagaggcaagtctagtattatatagaataagagcacaagagcctggagccaaactgagattaaatcttagtcctgctagttaacatttctgttgtgtaactcattcaactagggaacttaacctaactgtttccttatctataaaatggaaattacagtagtagtatattaaccatatagagtttttgtgaggattgagatagtatatgtaaagttctttaaaacagtgcctggtcatcacttaagtgttgaggtagctgctgttttaaaaattactattgttattcaaagaaggttatttgagttatattttttccctag

SEQ ID NO: 68841 - DNA, 1660 bp, Homo sapiens
atttattaaatgctttgtgtcttagttttgtcatctataaaattgacataaatgtaaattacttagaatagtacttagtaattgttaactattacctatatatattacttagaaacccaagtttttagtgagttttttaacttttgtcctacattttaattgctgctcagtttcttctattcatgtctaaacttactatataggttttctttattctaacttttgaaatagaataattggtctgttgtttgaattcagcagtatgtgcgattaaattgaagggatttattcaaaatagattttaatccttaatcaaacttgaaaaaaatgtcacacaagatataactcttcttttaaaactaaaaggttcctaagtgatatcccaagctctcagattctccaggaagagatgacttggatgaaggagattctttccaacctgggctcacctgttgtgctttgccataatgacctattgtgtaagaatataatctacaatgagaaacaaggtaggtatttgaccttagcagtaagtaaaattgatttcttttatgttcttaatggtcattttatctctatatcaacaaaataaattcaaatgcaaggagtaagagcgtgcatgaaacctttaaagattttcttttagtttatcaagttatggtaactgtgaaatttaggatatatattctttttatatttgtataaaatatgttttttagaattggttagaaacagtttgtgatttccatgggatttttaggtataaaatgatgaaatgatttgtttataaatttaattgcaaaacttatttggttattcatgagttgaacatgtacctgcttgtaatgggggatgtggaaaatcaacatattgacattaaactgctttataaatagaaaaattttctcacagtgttgggaaggacaacagtattaaaaacaaatgtgtctccaggtttctcattatctagttattgttgatttgttagatattttgatactaaggagagagctacagatggaggagatattatttgtagttgctcaaatttatatctactaaagtaatcaagaaaccttggtagataatttcaacattttttgaggtagactgatactttttggtgaaatgtttttgtgtttatatttgtacactgtattcaatttctgttttcatatttaagaaccactcggttgtattatattactgggtgaagtggtttgaggtttggttgctaaatgatagatgcccttcaatgctaaattgaaatttaaaaataaaattttggttgaaggagtcttactaacttaaaaaatgtttttgaaactgttttcattttataggaaactagttccccgcaccccccccccctttttttttccttttttgagatggagtttcactcttgtcacccaggctggagtgcaatggcataatctcagctcactgtaacttccgcctcccaagttcaagtgattctcctgcctcagcctcctgaatagttgggattacaggtgcacatcaccatgcccggctaatttttgtatttttttttttttttttttttttttagaagagatagagtttcaccatgttggccaggctggtctcgaactcctgaccccaggtgatccgcccacctcggcctcccaaagcgctg

SEQ ID NO: 68842 - DNA, 2617 bp, Homo sapiens
gaattcacattagcatggtcataattatattaaattactgtttatgacccttcttagagtgtaaagcgggactattcaaatacaaaggttgatagatatagctgactttcactttaagaaaaccaaaggtacactgtcaagagtggtaggcttaagcacatattgccaaaaatatatttgagaattttttgtttgatatttcaatgttgattagagattctatttttcaaaaacatactgagctaacatttttgttttgaatcatcttgaaatgcttgtgtggaatcatttttaaaatttcgagcataccctaaaacattaagtacttgacagtgtcctttaatgtcttattgtctgttatatataattatcatagtacgtatgcactacattatatactggtaaccaaatctcaatgccatttgtgagactagagcattagttacgcattaaagcagtgtatgagcttgtaaattcagtgcaggacctaataacacattttatataatggaatttcaagtgagggacttcatcttacatttgaagtggacactcagctttatttttaactgcaagttgatcaaagagaatctgttatttcctttagaatataattttaaactttcatatttttatttttgtaagtttcttttgcatattcatttcacagaacaaaacttgtttataaaaccaaaaaataagggaccaaaaaaatcagattactttgtcttgggtgttaaaaaatacattttcacttttttatttaagtggtcacttatctctaaactattgatcagttatgtgaaaagttcccatgttttcacataaaatctttattcagtttggctttaagaatgcaaggttgtcatttgtttttgtgccaagttacttgaattatacttttgtgtctaattttcctttcacagaaaaattttacagctgtacagatgaactattttgatacattttttagaatttgccttttttattgaagtctagtttgtatcatttgttttttctttgtctttgtggttatgtatgtgtcttagttacagaaatgttctgttttttttttctctctccttacgtggttttataatgttcattaggaaggctggttttgatcccatagtatccgtttaaaagagtaatttctatgtgattacttcaaacataagcattaagaaatatggttagaatgttcaaataaaaatctaaaactaaagtatgacaagaagcttacttaacctagtctttagtgttacgtttcaaattgggagctaatggttttaaggtaatttaactatatgacatgtttgagtgtttactataagtagaagatgccatgccttatacttaaaaagtatgaattatattatttaataaatttaatagtcaaaaatagtcaatattgagtaaatgtaatatgcaaactagttatatgtttgcatttaatatgcaaataatataatatgcatataatataactagtaggtatgtttgcatattaaatgcaagcatctaactagtagatataggacttaattaacagatatgacatgacgattcagttcactaaaagtggaacttttagtttctatcttaactataacttgagagattaatttagattaatttagaattaaaatgtgtatgtatatgggtatatgtataagtaacatatttatacacaaggcacacatactatgagcaccctgcaatttgtaggcatttttacatgtgaatgttattggaactggtagacatcacaggaagaaattttatatatttgagattgtagcatagcattaacacttatggcagcaattttgaaaaggttaattaaagatacagactgcagttatttaccttctttagttgccttattatagcatataaatgccatgttgagtcttttgagattaagataatttccatatagaataaatgattaagctgcatattcacaaacatgtttgattttttattacttcttaagtcattcatatgacttgagctccaggtttcattattgtgtacccaactttgagataccaatagataaaacgtaataagatgaaagccaggggactggccttggaatcatcaagctcagtatttgtctgcagtatgtttcagacccttaatttctcagaagtacaaattttaggcaaacttcttaaatttatactggattatcttgatgtctctacatatatgtttaaaccatagtaacttagattttgtactagaaaatctctaactcttaaaagcagatatatttatagcttagttactatcaagagaagtcagaaagagtatagattttggaactaaacacattcgagtttagatccctacccagttacttacagaaataagtagtattagacatatcgttttatctctttatgtctttatgtaaacacagactgttcttgacagtttacatcagaatcacctatggtacttgggaaaaaatttggatttcttggccccacccatgaccaattacaaaataatttttatagataggcttagaaattttatgtttaacagattctgaggcagtttttgtactattgatagtctagaactttagtttgctttatttgta

SEQ ID NO: 68843 - DNA, 2993 bp, Homo sapiens
taaaaaatttaaataaatacaaattgatttttgtgtttggtaaactatgttttctagggtggtgtttttaaatgtagtttaatttttaactctgttttaatttgtattctcaaccactagttagcagaaaataaaatatctgtaagtcagataataaaaaacttaaatgaactgtaaaaacctgaagttatgaagaaagagtgacctaatataggtactagtttgtttgttttttcattcattcattctggcccactgtgttcagtcttgtacttgaataaaaatgtcagaaacaccacacttttttctttagtttttcatgcttttttgtcttttcccctcccccagcaaacgtgttattgtgtgtcagcattttctgcaaacttcattttttctactagcatttaaatatttcctgtgtcctagggattgctctgtggattgcaggataaaagagggaagggaccctagtgcccctccaggaggctgtgtatcttgtagtggaggagtccaatcactgaacagatacttacatttagaatgatgagtgctctggtgaaggggtacagagtactacaggacaccagcgtgaagattaaagggaaagtgtttcagactagaatactccctgtctttttctgtataaaatagaaaacattttgctaacattagtaggattatagttacttttcgtatcgttctcttcgaacctgcctaacattgcagagcaagtagggtgagttggaaagatttttcaggttctcatattgactattttgcttttcatttttattcctttctcctaacaacaaaataaaggaattcagacaaacatgtcatgtgataattatatagccttgggtaatacattattattttttagttttaaagtactttaaaaattggcagagtatttttagtatactaagatttgaacagtttaaccagtagtgtcgggatttgattacgctgataaagatatgcaagaaataaagtaataaaagacaaaatgtaggtttggaaaattcaaattgtagttttatccattaatcatatactttactttgtgcttgtcattgtgataattacataaagataaataaaataacacacctagcccttaaagtagtagttctttactttttaaaggtcaggggtcccttgagaatctgaaaaattgagaatctcttcctaagaaagtgcacatacacataaaattttagggaatattctagttgtcttttcatccttgaaaccccaattaaaaattcatgtcttaaagaactgagatgatgatcatgctatatgagctagttaattattaatgctgatgtggatattcgtttaaataaagcgaaattttagaaatcagaagttaaatttatagaaggaaaaagtatattttctgttgttaggaaagcattttccagtaatttgatttttctggcaccctaactaagggaagttggctttttaaattttactttgttgcagaagattaaatttaaggttgagttccactttgtttgcaatagtttgaaaaagaatagttaatgcagattttttttttaaatttttttccttttaagctttgtgtcttgtacaatgtgagtttgccaaattttcttcatctgctacagattaggtatgccattgttgctgccatgtggcggcgcaccccgtgcttcttaaacgcactgactggaggtttatcgcatcacttgttcacatgcacggagcctggtaacagcctcatctgtatcttgttagcttcattttcttatttttaaaatttcattatttataaactcaacatagcatttaaaaataaaggctagttttaattaattaatgttactacaaaaagtcattgctaaaattttcatagtgaaacagattttaacttttgttaaaatgtgctatgctttaattaaattgtatttactctacaagcagggatgttttacctgccattttaactgtatttgccaaattctaaatataattttgaaaattgaaattgaagcttatgtttatgtggcaaaagtaagcttcaggactgggctgtgtatttttattggcatgtaacagttaatatgagctctacaagaatttgtttttaaggagctaaagctatcaacagctgcagatttaaaaaattatatattaaaactgttaggttagctcagttgtacaacttagtgaatcttgtatcctgagtttctgaaggctggtggataggtatctctgaaatcattgtgttttagtctttttactgatagttttgtatagggaattcatcttctcttttaaaataacttttttcctttaatttatttctattacttattgtacataaattttaaaataaaaaaataaaagaaaaaagtcacttgtctatcacctgttaatagtttaaacattttggtttatttccattcatccttcccccccatgcattatttacatatttttttttctctgtaggcatattttaatttggatcacagtttactacttagtatctccttttcatgacatttgtaatttccctggtcattatttttgaaaatgagatttcttcatggttttatttcattttattttcatgcctgtgagtattttatcatgatggttgtcttcactctcctactcccaatgattcctagaaaagaaactttaaaacatgtttctacttcccattctgcagtttagtaaaatgatttggttaactcttaaaactttttgtggaataatgttctgtgaattcaagtatacaaggcaggaggatcacttcaggccaggagttccataccagcttgggcaacatagcaagaccccgtctctacaaaaaacaaaaagagaaaaaaaatatataatacttgaggtagttgaattgccgtgatttattgtcaccaatatttttaaatcttatatttattataataatacacattacatttttataactgggttataacattgattattct

SEQ ID NO: 68844 - DNA, 1081 bp, Homo sapiens
atagcattattgcaagatttacagaattcaggtctttaaaagtttatattttatttccatatgtagataagcttgtcagtttactgttggagtatcataaagtttttgttaaaattacacagattattagtaatttccaaagataaaaattatgtttctaattaaacttgaatttttaagtaactgatgcccccatgtggcaaaggatttattttgcttttgcttaaacttggagaatgactgtcttttcatttttctttaaaaaagtggacattagtgtttataaagaagctgttgaccaagagacataatttgaattttgtaaagctcattgccataaaattcacagccccttaccctgtattgtctcacaagtgcatgtaatcaagcacgtacaatgagacaaaatattggaagctatttaattacaaatagcatagggattttctgatcttatatgtgatttcttaatgtctttgtttttgtgtctcacataggtgatgtacagttcattgattatgaatattctggatacaactacctggcatatgatattggaaatcatttcaatgaatttgcaggtataactaatggagtaacttatttagctttgaaacgatattttcagaatatttcattctttttttaaagtagataaaccgtgagcagggggaacattttcccacgtgttgttgaccgtttttctttgcttttgtttatcactggaagaaagcagagatgaccaaaatttcttccttaattgctatcagaaagtaataggtggccgggcgcggtggctcacgcctgtaatcccagcactttgggaggccgaggtgggcggatcacgaggtcaggagattgagaccatcctggctaacacggtgaaaccccgtttctactaaaaatacaaaaaatttagccgggcgtggtggtgggcgcctgtagtcccagctacttgggaggctgaggcaggagaatggcgtgaacccgggaggcagagtttgcagtgagccgagatcgcgctactgcactccagcctgggcgatagagcaagactccatctcattaaaaaaaaaaaaaa

SEQ ID NO: 68845 - DNA, 1076 bp, Homo sapiens
tctctacagatagaccctagtggtatatgggtatgccatttttatagtcttaaaagtaccatatgcccagagttactcagaatacatcccaagtaagaaggtgtcctgaaatgttcctttacctgctgttcttctatctattttcagtacagttactggttcaattaatgacatgctctacagctggtcctaggatgcctgcttttctatttattgtatttaagcatgatcttagagaatgtagggttttctttctcattaggtgatttaatgaatttcagattcagcctaatattccatttatgcattgaattagttaatttccaggtaaagtacacatagctcatcaattcttaaccatcaatcccactgtttgctattagaaagctgatttggatttccttgcaaacttttgatgacatttaagatttttgggggatactgtgactgtatctgtacatggcattgaaaaatacctttgcttctgatttgatcaattgtttataaatattcatcaatcagatactaagtacttactgttattctaggtcagtagattggaagaataaaaaaaatgcactctttcaaaatgcttataatttagaaggccaaataagatgtacagaataactcttttggtggtaaaagttaacactcatttcttttgaaattgattttattttaatatttacttttatttttattttgagacagtctttgctttgtcatccaggcctggagtatagtgatgtgatcacagctcattgcagcctcaacctcccgggcttaagcagtcctcccacttgagccttctgagtagcaagcgccaccatgcctggctaatttttttaatttttctgtggagatgaggtctctctatattgcccaggctggtcttgaactcctgggcctaagtgattcttcccggctcagcctcccaaagtgctgggaatttataggtatgagccatcatgccagacctatttttttattagatacaaggtcttgctctgtcacgcaggctggaatgcagtggtacgatcatagctcactgcagcctcaaactcctgagcaca

SEQ ID NO: 68846 - DNA, 5549 bp, Homo sapiens
tatgtagtctggcagtataaatataaatatttaccatataatcttggaataagtattagttaatgttaccaaaatctgtattaaataatgttttcaaatgctaaatatggtcgttactattttcagttttaaaaattttatagtatcaaattgtttctaaccaaaaatttccttttacttctagagatgctttatgtttttgattattaaatagtcactagtattgctaatttttgaaacaaatacacaaaatttatcatatgtagaaataagaaaatattgtttaggttaattattttttacctatccagagtcattccttacatttcagtttcatgtttcattcctcacattttagtttcatgttttagtttgattctatgtttttagactgatagcaaatgattacttgatacatgtaagttcagcgttatatgttgaggcagttatataattaaataaggaacacttagggcattgatcttgtacacttaaaatctgacaaatgacaaaatgtgaattaagcataaatagtcatggcaggagggcttttgtttatttctcttgtttttgtttaactgtatttttaattttgtctggtggtaagagggaggtaattattgtatggaaagaagttagatctttcagatagataaataggcttcaggttttgaagtctgctctgtgtagttgagcagtcatggttaactttacttagaaaattagtctgacaagctttgcacttcggtcacataagtgcccatgtacaaagttggcttactggatctgcatattcaaaatatgcaactacaaatttatcctctgagaaatcttctgaggagtctaatgtattccaaatgacttaatattctcagacaaatgctttaaaatacttggattatctcaagatttttgaagctaataaagtaaatagaaacacaggccattttaaatggtaaattctagttacataaatataatcttaaagtatgtttgtatctgtaacagtgttagaccagatttggtttctacctccccaatgttataaatgttcacttttgtttttataaaccatattactgtaagatcaatagaactttgcctagttaagtgaatggaaccaattaaacaactagtagctttttataatgttagtgtgaacttgaaaaattgtttttggtggaatttttgtctgtggttagaacattttcataaaacagataaagaatgtgtaatactcttaattttttttttttttttttttttttttttgctttctgccttctaaagtgcaacagtatatatcttgtagaactgtgggaggagagaagataatttttctaccttactccatattcttacttcaaactattttgaatagaggttcactgagccattgctgatagactgtgcatagctactagctgtcacactattgtaggttttttggagagattcatagggaagtgaatgtaaccaggaataaaggctctcactttagctctgggactatgcagtggatcttgggaacaaaataagatatctaatctattttccccattctggctagattttggttgttgtgatgctcctacttcctgtataggtttttgggatcatggtgcaggctagtaataggattcagaattgcttcccttttatatcgaccatgtaagggattctaaaggagggtaaatctcaaagtgctctgaaatcatccctctaaaatctgtcctgtggtgtgctaagatgtctgttgcctttttatgttaagctaaggaacttgaatgccttacctaataactcaactagtagtaagctcattttgtaaatatgaaaatggctgtaagaagtggcattcatgtatattcaatgttagtcaatagaccatagtggcctggatgctttaacaagccaaattccgcaattttttttccttttttccccttcatacttgtatgatctcacctgaccagtgatttcttttcctcctaaccccatgctaccaccattttctggaaatcaaagagatgtggtagtaaatcatacagtacacacgatcatctgagatcaatatgagcacaaaactcatcaagtaggtctgcctggaatgtatataaaaaatgtaaataaaaatttgtaaattagtgtgaactgtatcttgcatatgagactgtgtattgttttgcattctcttcccttttgtagaaatttttctgtaaggaaatgattcagcttgttggttttagagtaaaaatagccaacagttgtggctacacagtgagatcacaggaactggaaatagggtttgtcggctttggttaatgtcagtactcatttatttagcctctcagtgcttaataagacttttctttattttttagttagccgttaggttttgtgaggttagattcctggaagcagtgaatttatacactgttatattaatagagctccgttctttgagtcatgattccaagctaaaggaaattaaaaatgtaatttaataatttcctatttttagggttgttaatttttttctacaaaaaaaccttgaaattttagatatcccaatgtgaatctaatttccatatatacagaaattagacaaataataagtctttagttcaacttaagcatatctcaaatgacttctctaaatttaaagttgatcatgataggatcataaaagacagaaaagacttaagtaatcttgtaatgacaattatttccatttttgctgaactaaaaatatttaacttcataaatatgttactacagcttccagatttaaagaaaaaaagtttcccccactctcaattaaaagttagaaccctccacttttaaaattatacaaatatttcttttttacattacacagaagccttctgtaccattttacgaatttctgtcttcataatataagtgaaaatactgtcatttcaattttctgctttaaattgtttttaataagcattccaaagtgatacagacttaagcttttaatcaatcagtcattcagttgatagacaaagttagcgatgctttatgctaggaaacttgttgacagtaacctgtgcgactttatgcagaagacaaatgctagtaattattatgcacagaggaaaaatcattttaagtatgtggtaaagcagcttcatctttcaaaattgatttgctctggtttttctttagtccattagattccagaatgtccttttactgggaatttagttatgtattaagataacctgttttcagttctttttgaaaagaagacattatttatattgaaccaccttattttaaaatttttaacttttatataccacttgtgtgattccagtgtcatgtcttgggtttgatgtcgttggacagaaaagtgtatcaattattttaaatgaatttttccccatgtttgaggcttagtctgtaaatgtgttgctgtaacagaaaatacttgggtatgcattacttgaatacttgaaaactgaaattaataagatgtattacataatgaattagatttctctgaacagtttttacactgaaaatcttcatttctggattgcagtttgaaatggaatgaagacctgaattatttgggtagaaaaaattatgatagtgcttataagaactgtaaactgttttaaactattttgtgtttgacgcatcaaacttcaagttttttgtaagtttctctcctgaaattttctttctcttctatactttatgcacttactatactactgatgtaataaaagagcagggttaaaaatattgtatctgtattcattgtgaatcctgtagcttttctagttaacaaaaaatcgctttctaaaatactcttaatcccattgttttggttaacatcttacccatttgttgtatttcaaatgccattaatcattttagtacaacacctatgtttataaaaatttgaaaacattacatattgtatttaaaactaattagtgaagagtaagaaaaaaactagccaacagaattgtaggtgatgcattagttaaatttcaaaactcataataaaggaactttcagagattggttgaaacccagtggtatccctgtaaattagctcctgtgactggaaaagaccccaaaaaggcagtagaggagattagtgtttacttgctgtggttgtggtgtgctgctacttaattataggtagtgacacactgaaattcttatttgtccaataatctgaagtagtttcctatatttatctgtactaaattgactataaattgagtctgcaaagaggaaactttttgactgtactgtatttaggagcctttgtacagcttggtcaaatttccatgatatgaagtatttgagttttaaaatatactgttattaaaaggaaaaagacatggccattattccatgtgcttaaatgataatttccttattcagtttcagaagaaaaagaatgaaattgggtaactgtcattgcgttagctttatgttgaattgggaaattgtggcataaagcttaaattcgtgtttatcaaatgtgaaccatagtagtataatgctgctttgtatataatgtaagtgctacaaatagtctcagcactgaaaatgtattgatacctcttaaatgaatgcaacttttgatgtaggtgttttgctatgcctcagaaaatatctgtctgagaatttgttaatctgtttgataatgaagatacttcctgttttcttgtttcatattttcatgttcaaaatttaagttttacatttttactactgttaatttaaataaaatttgttctgtggataaaatgaggttggcagtgaagaaaattaaaaacagcctcattcatgtaactggttaagtaaaaatacattttcactatgtgttcataaacttttaatgaagctgtttgtctttcagttcaaatataagtgatgtttaggctttatttctgttaataaggctttttaccattgattaaatgaaggaatgtatctttttgaagagatttatattctgtaaataaaaattcgttgtaacaataaagttgagttctaactacagtgtattcataaattttattgttacttcaacttatttttgaggttttccttgtgaatatctgcaaacacaagactttccaaagttagtgtataaatgtatatgtggagtgattctttgaattctagttttttgttttctgtttttttagttttatatacattaaaaagttttgaaaaaatgtttacttttggaaaaatttggttgagatgagactatggaatattacataacttataaacatttctgtttacctagtttaaaaattcattattcttctaactattatgctttgtgtcttcactattctttggaaccagagttgggaaacatagaggaataaagacactgtctgagacttagcatcttatggtctaggcagggattatccatttaaacaacaaactcttaaaattatcagatagtgtgatagatgatctctgccttcaggaaatgtttatttgccatgaagatcagttgtccataacaaaaa

SEQ ID NO: 68847 - DNA, 1075 bp, Homo sapiens
gcttccaacatattgtcagttggctcacaaaattcctgaagatttaggttggctctcaaaagctggtgaaagctggctccagagcaatactggatccaacaaaccagcgggcgaggcccacccattaagtaaaggatagagccattctctatatcttgctcccagctctaccctggacactcagggcatgaagaaatgcctgttacggttcatgaattgcctaaggtaacacaagctctcagagatagaaatgaaactttaaaaatgaaagcatggatgtgatactgtctttttccttctcatcctttttgattggccatcagtgtgtcttgtacagtttgagtcataccaaagaagatttctcaactagcaggatcaaagttctttttaaagagttgattttttttttttttccggagctaaaatggtctccccagctgctaagaaaagaggaaactgtggtgttttctctggaactttccccaagcactctagttttcagtggggtcagtgtgataccattccctaagaatgttttggaaattcactgggaagatgtttaatcatcccagtgattttaggtttcacaatggcttggctattaacaatagcatgcgagaaggcaggaatgctaaggatcttgtggagcataggacagtctcacacaaagaaatgtcctgtgttctgtacaacttcaaatgttccccccagccattcttgcaggtgaaaaaagccacttacaattttctaagcttgcaatataacttcattttacctatggacatgataggcccttgtaccgcctaaacatacatgaaattttttaagaatgcagctgccgtgtaaactgaagggaaactacctgacactttgttgagaacattattgagcatgacatcatgtttaagggttatcccccagtttggaaaagcatatcattgccaataagatgacccagcattggtagctgttacacattcaaggtgattttaagtaataggaatatagttattaattaccctttgtttaaaaatgtcaaatataaattgtctcttaaatgcaaagatttattaca

SEQ ID NO: 68848 - DNA, 1050 bp, Homo sapiens
ttgccactgctggtgttgtgtaccctggagccatcgccatggctgggatgccctcccctcacctgccctcggagcactcaagcgtgtctagcagcccagagcctgggatgcctgttatccagagcacttacggtgtgaaaggagaggagccacatatcaaagaagagatacaggccgaggacatcaatggagaaatttatgatgagtacgacgaggaagaggatgatccagatgtagattatgggagtgacagtgaaaaccatattgcaggacaagccaactgataagggtcaaaagattgttgtgaccttaggacttaaagaagccctaactggttcatccttaccagtggccaagcacattaactttctcatacactgactgttactttaactgttagtcttaaatagttgggacatcagctgactaatagacctcagcctcaaaaggcttggaaagaaaaaacaaatacaacaagcaaacaacaatatcaacaacaagagattgaaataagctatgggtaaaataatgccagtaattcagctgctacatccaagcactgaagtcttacccgtcaacttttttttttttttaaataaactttatggctgtttgttctacaatgttctagaaattctcactcaggtacacagtgccaacaagtggcttgtgaatgtgttttgttgttttgtgctacaatttttaaaaagaaaaaagttttgttttgttttttggggtttctgggttttttccttttctttttctttcctttcattttttttctttgtaatgcacctgacagaaaaaaaagaaaaatgaatttctctttacttctctccaccttctccatctctctactttaaagatggaagtctgtgcatgaggggaaagagggaaaaagagcctgtttttaacttccttgctatccaccacaaaataagcaattattttctttagaggactttatctattgcacaccacactacatctttgagcaagtgccaaatttgtactgaagtgttgaccaagttcattttttctctttacttt

SEQ ID NO: 68849 - DNA, 1055 bp, Homo sapiens
cttatccgaaaagtgctttttaaaaaacgcaatgctgttgtttcttttctttatttagtataatatcgtgcgtgtgtatcatactatatgacaccgtatacacatatatttatatatatgctttcatgcctgtatatatacacaaacttccaaaggttggacatcagcgtgcatttcaggagctccagtaattttaatcataaattattttgctttatgttcacaaaattctgccttgaaaatacaagttttgctccttagtgacgacacatgtaggcccattcaatttttttgatgttaagtggtattactgtgactagtgcatatttataatacgtaggaagccatttagatggcatagtgctgtatcattgaatctcagtacaaaatatacagaatctcttaacataaaccctatgccaaatagtaaaataaatctttagtagcaaactgagtttacaataatccatgtataacttgacactacaccacaccagaggctgtttttcttaaataaagactgcctgtcaacagaaaccttttttaaattatccctggaatttgttctattggaaacgtacctggacgtagtgaaccatgttttatttactgttgttgtctcctccagttttcaatggaaaatatatctattttcacatattttacatcctatatcaataataactttcaagaggcatagtcttgatgattgctatcagaatttccaaaaaaggaaaaagaatttccttttttgctatggccctgttcataaacaactgaacaggtaattactgcaatgtaataggatatagaaaggatatgtcatatgcttttcttaaaagagaatttgtatttctgtgaaagcaattgatatttgaaccatttcctagttttcttttgaataattaaaatcagtttgagagcccagtatttgtgaagtttgaatggcattagagagtcgccaattggcattgcttggtagttctactatttgtttcagtttttagttggggaatatttttgtattctgggagaagctgttctaaaatatgtca

SEQ ID NO: 68850 - DNA, 1043 bp, Homo sapiens
ccattctgtctcttgggaaagttagtgtaaattgctagtacctaggtgacaaaatttaagaaggaatgcattctcagtgtcttgaaaatacagaagagttgacagtgtgctacctcaagagtgaatgcctgcttaaattttgcaccttggtgcttttcttacttcaccattgtctggtccagctctgaagacagagatccggtttatgttgcttctggctgtaccctgtagttatgatatatggacatttaatttttgtgttaagttcggaacctggcttcttagagcttccccactattttgcttaatcttcacacaacatgatcttgcttaccctaaatttgcgtcaagcaattcagcaaattctgcagaaaggcactttttagaattccccacctataccccataaaatacagaatagttttatttgtttttccttcagtccagtatagttcttcttaaatattcatgtgctgaaaagttactctttagggttgggtactacaaaatacatattgtaccttctgggtaaataaagctattttcaagggttattttctttataagctacttttggctaatgtactgattttagtgtctgcccctcaccctaaaggcctagcagagtgtatgtcaccgagtaggcacttaataaatgcatgttaaataaatggcttacactgtaactaccaatttttttactttaaaatttgtagtcattcatgattcgcatatattttatcaagaattcttgcagtgatgaaaaatatacaaatgtatatctacttattttcatatgaggagaatttatagttacaggaagattactgtaatttcagaggaagttcgaaaatccttaggtgaaagtcttacatgaaaaacgttttaggtctctcctctattttccaggttttatccttgaaattttttgtcttgactatcaagtccaaatttcgaaaaccttaattaaggtctcagtagatttctttataatattagccagttttacctttaagactacttagtgacagagaacagaagga

SEQ ID NO: 68851 - DNA, 1015 bp, Homo sapiens
agtttgcattaatgcttacatccattagtggccccactgggacactggagtgtacttctaccactctgtgtatggctggctcctccttgctagtcagatcccagcctaaatgccatcattttagagaggccatctctgaccgcacaatctagatacccagtcactgttgatgacatcattcattttaattctcagcatagcagttgtcaccatgtgatcatttattctggcttatttatgtagttttgtctctccttgtctgtcttattttctgttatagtcacatcttctagagtagtgcctaacacttagtaggcatttaataaatatgttaaatcagcagttgaaatcagtcttttaaatgtatagcaagtaaaacctgttaatgaactgaactctactacattctgtacttgagagaagaaagtaaatattctttttttctaacagagtgaaagtgatttttaaaatgagtctttagcacaaaaagaggagcaatttgaagtagaattttaagctttttctttcccagaaaagaattacgtattaaaaaaaattggctaatttgataaaatctataaaacaaacctctaaaggatcataaatggggattatgattccctaacttattttttccaccctagaacattgaaaggaagcatccttagaactttgaaaatctggtacaacccctacttgacattaccattgtctgtcacttcaaggaaaacaaaatcattcacgtccatgataaaatggatcattcaaatctgttatttagtaccatgtggtcaactggttgattgactgcattttaaaacttctctatggactgataaattacccaactgatgaaagaaagacattgtatttctcttaacagtacattatgactcatgtaatgaatctaattgttattattgctacattatcaccttaacttgatattgataataacagtgatttgtacttaatgagcacctaaagtgataataagtccttttctgacaagata

SEQ ID NO: 68852 - DNA, 1148 bp, Homo sapiens
tgttttgttagtttgttttgtttgcatttggctttttctgtgtctgtctttgcagcctgattcatggcaaggctgttttctttcagtccaggacagattttaacttttacaaataagtgaatgtatttttaaaaatacagaggaaaggtactttttttaatccctggattattacttaaaaactagatagtggaaactaatcattatgaacggttgggagaatactgttctccttatgttcagtgtttaaaagtgaatctcaaataaattgtcaacacttatttttacttttcctttgggcagctttctttgccttgcgtcactgggtaattctgtgtttttgttcaattctcccatctctggcccattgttcattcttaatacagatagagagctatagagatgtgctgagaacattttcaccatttcttcattttcttgttcacctccctctctcaaatgtctttggtttaatggatcagaagcctggttttgtgtatgtgtgtttatgtgtgtgtgtgcatgtgttataaataaacacatttataacacactgacacagacacacaaagttggttttagactgtttttattaaagttttctctagagcagaaacaagtataatcaatgctagaaattgttaagccactttcttctgaacctgcaatctttaaaattaagtgaaaattcctgatggcaggctttttcatggtatcctcacacacagtgttctctgttgcagaatttctcacagcagtggtttttaaaaggtggcagattccatccattccagcagatacttttcttcattccttctgaatgaacccactaacacaacccttaaaaatttattatttttgtctttaaatggataccacagctgaaatcatatattgtttgtctcaatttaaacattaatgtttcttcacctgcatttatcaacctgtctgcaaccagaatgtttagaagcaacaatttaaaaaaaaaaattacctcatcattttagaattcacaagaagaggtgttccattagcaaactgctcaatttctgattcagtagaacaagctaatttgccctaaagtagaagcctcccttcctgattttgtcaaatgttacctgggcagctctggtcacgtggcaaagaga

SEQ ID NO: 68853 - DNA, 1086 bp, Homo sapiens
ttattgaaattcagagtacattgacccataggataactgtaatgagctggatcttcaatctatccaaccaaatcccatttaggtatctatttaaaacagttgcgttgccccattgaacaagtaagcatttagagattagtaaattatacctgttgacattgaaaggtgagaaacaagttgtgactatataagttgtatttgtttctctgcatttgtttaattattgttttaattaagcttatagattctgcagagtggaatgttaaaggtatttcacctaccttgaactttgaactaacttagtgcagtatttaagtgtgttataataattgtatgcaattctgggcattaatttagctcaatgaaggattttaatgttttggatttatatttacttaatcaaatatttatacattttaagaagtttaaaatgcttaactatgtataggaatgccacgataccatagaaatgctaatgaaacaaaaatggagatcaaatagattatgaagtcaaaatgaaactctactacaatgaaaatggaaagaaaacactgaagataaacacttggaaatgagaaagtaaaatatcattagactaatcaaagagaagtactaaatgctaagcagaaataagttgtaatcatcatggacaaacataaaacagaatatgtcctataacttggaacactgcagataatttggatattgttttcatagcatgcacccttctcaattcatgtgataaaacaccattatttaccaaaagacattttctcacaagttttaccttctcaattaactattccatgcatagatttttaatgctgtagaaagaatatggtaatacctttaaaattcctatatttcttttattatggacaacttatgctcttcttttgagaagtaagccattgaactcattaattgttgtatctgagaaaataagatgtatatttatctttgcaatgaaatatatgagtacataaattaattgtattatagtttcttaagcattaagttctgctagaattatgctgggtacagctgttttaatacatacagcagataaacattaggaataattat

SEQ ID NO: 68854 - DNA, 1583 bp, Homo sapiens
acgctaatagtaaccagagaatattgactaccatgtatgaaatgagagttaattaaatcaatttctatgtaaataaaagatctcaatagtcaaagagtctcctgggagcattcagcagtcattgtgcaaggttagttttagtcacgtttctcagtaagctagagccacactggcctttgaagtccccattgccatgattgtggctaatggctgtgtgttcattcctgggtccagggaagtgtcttggttgtttcaacaatgctcacaactctcactattattgcttagttatgagtgaagacttggtggtcccctccttccttgtaatccttccttccttgtaacccctcccgtgttactgcttccacagctcccctggagtgtgtcttagctcctacacatccaggtcttctgtagaacaactaccagtggctttttcagttttcattatacagagagataaatgtctttgtccttcagtgtgatcagatctcttcaattaaaatgacttactcctaaaggaactaagcttaaagttattctatctggatgcctcagagattttgttatgttttagcatgaacattaggacattagggattggacacatttttattggcatgtaccttgagagaacactccttacccgcttaaagggaagataaatttcgactatatcttcatgcaatgcatatgcttaactctctgcttttagctaaatggtaagagtcctgcaaaaagctgtatttaaaatgatacgccaaagtaagtgtgtctgcactgattcttgcagagttaagaaccactcttcaatgatactttgataaagagtattctgataataaacattcccaaatttttagtttgcaaatattatggaaataaacattaaaaccaaataagttgaagctaaacgttgtggatgttcttgtcatccaacaattatataaatattggccttaaattgaatacacttgttgtttggctttcacatgtttggaagcaaaataaagaaggaagggacaaacatctcatagatccctgtagtcttatgagacagaaagaaacttggtccaatcaacttatttcacaagtctaaataactctcctctgtcacatggaacattagtaacagaactaaatctatgtttcttggcatgatgcaggtctactacattatgctacctcacaggttatggaacacaaatcattctgtatactacattgtgcacacacataaaaataccatcatatttgccattttgccaacttatcatttgataaagaatgctattggtactaacacttcactttggattatactaatattcaaagaaatcaagaacttaaaaatgtttttgatagagtcatttccctggagaagttttctgtttagctagatgaaataaaaagatgattatccattcattaattcatttattcatacaaggaaaattcctactctcccagagctttcattcctatggaagaaaacataaagtgaagattttgatgtgtatgtcagtggggataagtactaagaagaaaaataaagcagagatactagagaacactgaaatacc

SEQ ID NO: 68855 - DNA, 1518 bp, Homo sapiens
aatgcagatttgattctctcttctacagaactcttcgatggctcccagtgcactgagaataagtcccccaatctctaacaaggcttacagtttcctacctggcttcctctgtgacctcatatcatgccatttatattttttgctttttctactgtaaccatcatgcccctctcacctgcaggcctttgcacacacatgttgtaccctctgcttagaatgtgccactctttctgctgctgctccttatcccatcatactcatgcccatcagctgtgatgaagggccctgccatgaatcttttcttgattctccagaggaggtcaaattcatgccacacatactccatatgtctactgggctgcatcctgcactttttctcagtaactctgtgtgtgtgtgtgtgtgtgtgtgtgtgtgtgtgtgtgtggcagagagagagagagagagagaaacagagacagacaggcagggattatttgtataatgtctgttttaccattagactgtaagctccaaaagagggaagctggcttctttgttcagccttatactgtgcccctagaatactacctggcatatagtattgacaaatcaatatttgtgaaataaataagaatgaataatcaacctgtgttagtccattttcatactactgtgaagaaatacctgagactgggtaatttataaagaaaaagaggtttaatggactcacagttccacatccacatgactggggaggcctcacaatcatgatggaaggcgaaggaggagcaaagccacatcttacgtggtggtaggcaagagagcgtgtacaggggaactgccctttataaaaccatcagatcccatgagatttattcactatcaggagaacagcacagggaaaaaactgccctcacgattcaattacctcccaccaggtccctcacacaacacatggggattatgggagctacagttcaatgtaaggcttgggcggggacatagccaaaccatatcacaacctgaatacaaaatccagaaatgactcaggtcaaccaaaaaaatacaacctgatgtacaaacaccattacaagcattaaatatcaactttatttcctaattacaggtccaaaaagtataatatattcatttcacttttctacatttcactttatttttcgcccctattctctttagagaataacatggaatgagttttacatgaagaacagagcacatgcttatctactcttgtctcattttacaggtatctcagccttttagcatttttaacacatcgtattgtgtatgtccactaatgatttcaaataacttgtattataaaatgtaggaaataattaaaatatctaagcaaatgaccaatacagtaatatttatgatagctataaaataaattttttataaatgcaggccttattaataaaaattattggaaattagtcaatgatactggggtttacaggatttatattcaactagataaataaatttttccattacttatatttgtgtttc

SEQ ID NO: 68856 - DNA, 1035 bp, Homo sapiens
cctcagcctctcaaggtgttaggattacaggtataagccaccatgcctggcctgaattgttactattaatcagatgcatttactcccacttaccttatcaaactgaaaaactatcacgagtagattaaccatcttatgaaattacctcacaacccaaggacttttgtactatgacatttttataagactgtggcttttttctgtgttagtaggccctaagaaccaaaaaatgcaagaaattggtatgtggttgcccagatggctgttagagctagacgcacagagtacattaaatttatacattggatcagtgggcttgttgagtcctttcctcagattctaaccacctcagtggcgatgtgcacttcgtcaaaatgaactaacaacaacaacaaaaaatccttcagacaattaggcttcccttgctgggcttaaaataagtgagtgtgtagctctgtattaaaaggtgtgctcttgatagagtcttttttgaggtttcaatcaaaggactctgcttttcagtgagacctttaaacaacattggtctttccctcaaaagagaagggctaaaaagagtgctggactcaattgaatttaatagaaaattcattggtgaccaatgaagcagaaaggatgtgctcaaatcactgggctgaacgctctgttgtagagatcagacaagcccatttagtgtctgctggttcacaccagcttcagaaacttgctcaacagctttagctcccagatatttaaatggcaatgtttacttgttttagtgggaaaccaacaaatgaagaatctgtaggtggattcgttgtgtcaagctggtctctgtctcgaattttagttccctggatagcaagttgggtgccaatgctttgacatactattgtcatgttgagttatgtttaacttaacttgattcagcctaatactaggtttgggataatcttaaaatatcctttctgtaaatacactacctttcaaagcagattattcagtaatgagtgtgatataacttgcgtggtttaaaaa

SEQ ID NO: 68857 - DNA, 1168 bp, Homo sapiens
tctttaagttgctcacttacttcaagtttattctttcagaagttgagcatctctgtcgtttagtagtggtcagattaagtgtgctgttctgcttacttgctggctgaagtcctttttgttacttctagtgtaagcttttagaaagctacaaaatacagtgacagacactatcatattcaattggacatgctttctgcagatttgttaaggatttactctacacatttgtagcatttagttgccatggagatgacctcagtggtaagagagacagcctttaggttggacctcagattttcctttcatttccatttaatttgatttgactgcaaaatgtcactcccattgcattgattaagcttcgttgctgccaccagcactgttaggaaggtgaaagggcaggctagctgctgtcattttgcacccctacccttttctgatatcaatacagataggctttggagatgagaaactccttcactacattgatgcagacacaattttttcttgctcacttcgtgaactataataaaactgaaaatatgctcagaaatctttattcatcagattcactctatacatactcaatttttctctgcttcagctccacagtattgtaaggtatgatataaaatgtacgataactaaaaattaatatgtcttaatgtttccctgaaatatatttttttaaactcagcagctggccactctctactaaaatagttcttttatagttcaaataaatttgaaaaaatacaagataattatacaagtatgaagcattattcttgttcatatggattggaagtgtcatctttaggtattaatacaggtcatttgaaagtaaaatgatacagtagacagttttcctttggtaccctgtatactcctgtcggtttctttctttattcccttccctgattcttaatgtctccaggaacccagaactcatctctccttttagattgaaaaaatcgataaattaattcaacaataagatttaagaaaataaatgtgataacttcttaggattatcgtacttatatttaactggagaagcaggggacattatttagcacaagaaattgattgcaaataaaactccagttatatgtggaaagacaagttgacaggaaggcttccagatactctacacatcatagcacct

SEQ ID NO: 68858 - DNA, 1053 bp, Homo sapiens
ccctgtcatccccgggggcggctggccgggggaccctggagcgccggcttggaccccgacccggagacgggataactttctatttttgttgggaagcctgcgtactgttgctggtattgttttgtaagtggtggcggtggaggtggttgatgcgagaggagagtgcggggagaaccctgggctgtgctgggcatcgcggccaatgtccaaggccagaccctaaaagttggacaaagccccttaacccttctaggatatcagagcgacccctggcccaccccctaaccttagtcacccccacctcccgactctttcgtctttttgtttcgctttctgcaatccttctccctaccactccccctccctcccgcccggaatttctgaaacaagtctcatccttcaggattctagggatttcagagaccggaagctttaattctaattgcaactactttttccccccacctcactcagtgtaccaagtgaagaccactcacgtgttgtgtcactttaagcgcgggtttgggaaatctcgcttgcactttggggctacagcaataagaagcaatgaaaagaggttatacgagttgaaatcaaattggatttggaaatgtttgcgttggagagcagcagtttgttgagtattgatcggatgcacacgaagcactgtttacatattttattagtcattttccctacactttgcaaagcgactatattaataaatagattgaccctggtgaatatctgaagacgctggtttctgtgactaaattcagaatgtgatgatgaatgtgaattcattttaatgtgttcccttctcagctaaagcaggtcaagacgaggaatcctgtgaatatgcagagccctacactcggtgccaggcagtccaggcactctgggtggcagtcaactgtactttcttacaaaagtttagggatttgctggaacccacttgagatcctcacatacccagatagccaaaggactttgtcaaggaaggcataaggaggtgtccccagggactgccttctggctcagcagagttcttta

SEQ ID NO: 68859 - DNA, 1029 bp, Homo sapiens
cttctgaactttgttttctttcttcctgaactttcttgcttcctaaaacaaaactgacctcagacactgggaaaaatctaaaatgcatagctccaagctcatcatctgaggatgtaataatgagtgtgttgttgtaaattacttttcatcatggtccgtgctgccttcaaaggtcaggccttcatcccttgtgtgttctgtgggagtacacggtgcatgtgaccaaaagcagagctgtttccaacaaaattcagtaaggtttttgcccttctcacaaaagttgtgcttttttaaggtaaaagaatctacatttgattctctgaatctagctcattttaatatgagccatttttgtatgcaaaggagtgctgacaccagcaagttttatagtactgattactatggaaacatttatctataaatataaaatcctttaaagcttagccttttatctttatagaaaaaggcctgtttatgtcatttctaagattccagctttaatgtagacatgagctattctaatgccaaacaagataaccttagtgttggagccgtgtgagttttgaaaagtggaatttgtgctaaaactattattttttgataaaatattaataatgaaacgaattttattttattttattttattttgagacagagttttgctcttcttgcccaggttggagtgcaatggcacgatctcggctcaccgcaacctctgtctcccgggttcaagagattctcctgaaacaaaaatatttttaaaagcacacttaagccaaaagctctggtttgttgaattccttttgtagaatttatattgtgaatatgtctcacatttttttcctttctaactcattgttccctccattctttgtgcatgtgtatgtgggtttgtgtgtgtgtttgtaagctgtgatgatggccaaaatggagatgattggtttgttaacattttctgttggcacatttatggatttttcttctttaaagttcatgtaaaatcagaaatgatgatgtaatatgtatgtt

SEQ ID NO: 68860 - DNA, 1033 bp, Homo sapiens
ggggtgacttaacaaggaataatcccacaatatacctagctacctaatacatggagctggggctcaacccactgtttttaaggatttgcgcttacttgtggctgaggaaaaataagtagttcgaggaagtagtttttaaatgtgagcttatagatagaaacagaatatcaacttaattatgaaattgttagaacctgttctcttgtatctgaatctgattgcaattactattgtactgatagactccagccattgcaagtctcagatatcttagctgtgtagtgattcttgaaattctttttaagaaaaattgagtagaaagaaataaaccctttgtaaatgaggcttggcttttgtgaaagatcatccgcaggctatgttaaaaggattttagctcactaaaagtgtaataatggaaatgtggaaaatatcgtaggtaaaggaaactacctcatgctctgaaggttttgtagaagcacaattaaacatctaaaatggctttgttacaccagagccatctggtgtgaagaactctatatttgtatgttgagagggcatggaataattgtattttgctggcaatagacacattctttattatttgcagattcctcatcaaatctgtaattatgcacagtttctgttatcaataaaacaaaagaatcctgtttgtgtggtttcatgaaatcagcattgttgaatgcatgaagtaataatgctaaattaacatttttatgatgtctcaaggtttctggtcaagggaagtaaatgtaggatagtatttttacaccaaaatgacacagagagaattgagcacaccagaaagaccagaaaccacaccactggatagagattcaatatgtttctttttcaaacatttggacaagaaaaaaatgggcatttaaaaattcttccttcccctggttatggatttatctgtagtaaaacttagctttgtcgtttgagatttgcacagaatggggggagtagattacctcttcccattcattgtcataatggatctacatcactg

SEQ ID NO: 68861 - DNA, 1407 bp, Homo sapiens
agagcgtaacatcagctagatggtaacatgcaatgtcagctctcttgaagacatgggaaacctaagttacaccttgggttaaaattcttcaccatattagttttgttgcttcataaaatttacctaagcaagtggtcttgcttgcctcaaatccaagcagtcttgaacacttggaggcaattaatgagtatatcttagtcaaaagaattgttggagctttttattaaagctacagtttcagttctgcttttggggaattgtgctatgaaagcagctgccaaaataagctcatttattttcttcaatcccactcagtgctcagtcactatattctgtttcctttttttttttcaagttgcatatttggtttccccttatgattgggaaagatgaattttcagcagaaaacattgtttgttcactttcaaagagtgatagtttctaaaacatttagagcaataaatattcatcagaggtaccaagtaagccggcagaagagttaagggttagagaaatcccttatttcatgtcttgactctaaaattatcaaagtacttttccttgtaatgtggatttcttcttatgcggatatgcaaaaacttcagttatacgtagtaatgctagcaggtaattttagtagacattttataacaactgtcactttgtttcgccacatgtagagtttgttcagctattttccagatatctccccacaaaaggaggcaaagggtaccagcttttcaatgagcattacctattacttggcaaagatgatgaagactctattaatagttcatttgataaatgttgacataaccaacaatagagattaggaagttagttttaagaaatcaatggcatatagacattaccctcatggagtttgtattctactacttgaactgattgtagctataaaagcatagttagatagctgaatagttagatcataagcaaagaaggccagaacacatctcttatcaagaaatcaatgaatagtttatctcatttttaaagcaactttatccttctttaattccttcctttcttctagtgcaaaactacttaataaggttggtgtttaggttagtgttcacaccattcctcatctggtgtgaattaccttctctttctttactatttactaccaacctagtacatgtgttgactgaattcttttcaaacaatgttgagttatcatggtgcacctaataaattaacaccacagattacagcatccttgctgattttctcagcaaagccagattagatggaaataaacaaagaaaatgatcctagagtgaatttttctagaaaatatctattatgaaccatgctgtttaaagtattagcttgaaggtgatggatccagctattcagaaaataactttcatataaccatgattt

SEQ ID NO: 68862 - DNA, 1032 bp, Homo sapiens
gtctaggaaaaagttgcaggtaatttaaactgtctagtggtacatagtaactaaatttctattcctatgagaaatgagaattatttatttgccatcaacacattttatactttgcatctccaaatttattgtggcgagacttgtccattgtgaaagttagagaacattatgtttgtatcatttctttcataaaacctcaagagcatttttaagcccttttcatcagacccagtgaaaactaaggatagatgtttaaaaactggaggtctcctgataaggagaacacaatccaccattgtcatttaagtaataagacaggaaattgaccttgacgctttcttgttaaatagatttaacaggaacatctgcacatcttttttccttgtgcactatttgtttaattgcagtggattaatacagcaagagtgccacattataactaggcaattatccattcttcaagacttagttattgtcacactaattgatcgtttaaggcataagatggtctagcattaggaacatgtgaagctaatctgctcaaaaagatcaacaaattaatattgttgctgatatttgcataattggctgcaattatttaatgtttaattgggttgatcaaatgagattcagcaattcacaagtgcattaatataaacagaactggtggcacttaaaatgataatgattaacttatattgcatgttctcttcctttcacttttttcagtttctacatttcagaccgagcttgtcagcttttttgaaaacacatcagtagaaaccaagattttaaaatgaagtgtcaagacaaaggcaaaacctgagcagttcctaaaaagatttgctgttagaaattttctttgtggcagtcatttattaaggattcaactcgtgatacaccaaaagaagagttgacttcagagatgtgttccatgctctctagcacaggaatgaataaatttataacacctgctttagcctttgttttcaaaagcacaaaggaaaagtgaaagggaaagagaaacaagtg

SEQ ID NO: 68863 - DNA, 1854 bp, Homo sapiens
ccccagattctgattcagtctgagatgaggtctgggaatttgcatttttaacttgttgtctggtgatgctgatgctagtggtctgagaatacactttgaggatcactttttcacagtaaaagtcacagtcattaagcaagttaactcaatgagaaatgataatgaaaaggcatgtacctaaatagataaaggacctataccagctatgaatttgagttcagcaataattgtaaaatttgtaattcttttcaggtatttggtttttaaaaaactccctatgtatgcttttatcttatgttttatatggtgtccctcttttcctctctttctctctaatccagtttttaatgtgaacatgtttaatgtgaaaatgttgttcaaagcagaagcgaaccttttgtgtaaccttggcggtattaagtttgtttgtaagctatttctgccctgttagcttctgtactgaaacacgttttcttgcttttgttgcagtatggaagagaagagagcgactggacaattgtgctatcctgaatggaaaatagaggatacaatggaaaatagaggataccaactgtatgctactgggacagactgttgcatttgaattgtgatagatttctttggctacctgtgcataatgtagtttgtagtatcaatgtgttacaagagtgattgtttcttcatgccagagaaaatgaattgcaatcatcaaatggtgtttcataacttggtagtagtaacttaccttaccttacctagaaaaacattaatgtaagccatataacatgggattttcctcaatgattttagtgcctccttttgtacttcactcagatactaaatagtagtttattctttaatataagttacattctgctcctcaaacaaatgcaattttttgtgtgtgtttgaaagctaatttgagaaaatttcataggttacatttcctgcagcctatctttatccacagaaagtgttttcttttttttaaatcaagacttttaaaactggatttcctcccatcactgttttttgaaggtcctccaagtccgtgttaaggtaaatatctgttttcttcctgatgtcacagcctgagcatactctgtgcattaggaagacctgagtgcatttcccaccattgtcctttccacattatgttgtagctggctggctgtcaggcgactacaagactgagggtcttgtgccttatagatctttgtatcccccatggctgacatatagtaggtactcagtaaatggttttataatgaatcagtgaacattttgcttctatagaagtgtaccttctttgtttctatattatgaaacctctttattagaatttgtgattgattctgacagtgtatagatttaccttatattgtctttattttccatgagctactaagtcattagagatactctgaagcatagttagtttaggaaatcacttcatattgattgtattagaattatcttggaattgaagatatatccctagagcaggggaccccaacccccaggccatgggccacacagcaggaagaggtgagtggtgggccattgaggagcttcatctgtatttatggctacttcccatcactcgaattaccacctgaactccacctcttgtcagctcagtggcagcattagattctcataggagcacaaatcctattgtgaactctgcatgcaagggatctaggctatgcgctccttatgagaatctaatgcttgatgacctgaggtgtaacagtttcatcctgaaaccacccttcaccctgcagtctgtggaaaaattgtcttccacaaaactggtccctggtgccaaaaatgttggggaccactgctcta

SEQ ID NO: 68864 - DNA, 1050 bp, Homo sapiens
aatatatagtttaagcagaggatgggagacggggaaaaaaccttttctccctaactttatatactccctctataaattagtgcttatggccaataagaaatgaataatttcttttttcaccgttggtagtaaagtataatggtagttaacacaaaaaactaaatgatatattcagaacctcatactaaacaaagaaacaaaggcatgcaatcacaggacaggtggaaacagtggttctgaactaaccacaaaccagaactaccaaatgtgctacaaattgtttagtaacaaaggaccatcccttcagaattgaagagcacgtctcagttatctcatgcctatgtgcatggaacttaaagtctcaaaattactcttacaagatggcaaattgaggctgtcagctaagctcctagattgtctgtttctccaagaaaaataaatttcagtaattattaaggaaaaagcatagaattgcatcatgttttacatttcattacttttggcatgacatgggagcatggatgttttctacaaagtgctctgataaattgaagaagaggccaacaacagccaccgaaaaaaccttcaagattcttgccagtatggctcaggggaaaaattccctcataaccacagatttgacttttcaacttctgtacttctgcatatgagtaataatctctgaggttaagtattcatcccatttagctaattgtccacataactccctgggtcttagattgctctataaatacctcctaagagaagaatttttcaaatgacagtttcgtttttcctttttcttcttttaaagcaacaaagaaaagcacgtctgtgtttatatttaaccaaacttaaacttggagagcattggccgtgttgtcgacgtgtttcttttctctactgttaaattccttactgttccagttactcaccatcatactcacctttgcctctgccacttggggtcctctgttctgcagttgtgttctgctctctgatgcctccaggttttgctgcaccttctagaaattgctcacctggataagg

SEQ ID NO: 68865 - DNA, 1034 bp, Homo sapiens
taaatggtagctataattattaatattatataatacattgttctcctttatggtaaagtaggttttaagacactgatttttttgttttgttttgtttttggagacagagtctcactccgtcacccaggctggactgcagtgacgtgatcttggttcactgcaacctctgcctcctgagttcaagcgattctcctgcctcagcctcctgagtagctgggattacaggcacccgccaccatgcctggctaatttttgtatttttagtagagacagggttttaccaggttggccaggctggtctcaaactcctgacctcaagtaatctgcctgcctcagcctccccaaatgcagagattacaggcatgagccaccgtgcccggcctaagacactgttaacacggagcatgcatcaagcagcatttgggatgcatcaattttgtgagactttatacaagttaacaaataagaaggcaaaaaagaaggcatatgttaaagtataccatgtgtcttgtggtgataatcttatattttatattctgataatctcatatataaatctgtgaccttgaagtaggttacttaacacctcgatgtgttcaccagtaagatggtgtgccacttccagctttcccttaaaggatgattgtgaccttgtctaagtgcaatcagaatgttaagcagaacagtaagtattgcaattgttttgcatgccttttcctttaaaatatacttgttattttttatattccatgcagggtgaatttaaggtgtcagagagatacctcaccatggatgacttgacaacagccctggaggggaacagagtgagagagatgtttggctctggtacagcctgtgttgtttgcccagtttctgatatactgtacaaaggcgaggtacgacaagtatttcctcatttcctatcatttccaatcacattaaattacatttaatttaagtgtatgaataaaattgtatctggacccagacccaagatgcaaaagttttgtcgttgttgttgtttttctttattt

SEQ ID NO: 68866 - DNA, 1054 bp, Homo sapiens
caattgtagactgagagaaattgaaactttcaaagagccatatttctattgcagatatattttcctgctcttccaaatctacttacagcatgagttcttcttttaaatattcaaatattttgaatattgccaagagctttgatttccatttttatctcttgtgggtttataaattaagaaaaaatactcatcttatttttttaaacctctctatttttattgccctttattcaaataacttgttgacaaactttgaacttgaaccactgaggtaaaagaacaagaattaaacagatagtttaaacacatagcttaaaaggatctttttcccatttcctatccttgagcaaagaatatattcaaacactttggcagaagtcaatgaggttataccactaattccatgatgaaaatcaactgaatgtgatactgaaagagaaggaagagaattgtcactgtaaagtcaactgttagtcatattaggaaaaaaaatacatacaatacaatttctcaaataaagtccaaatatacattcaacgtttaaaaataatgagtatttcagatatttgaactcagtctgttctttattccataaaagatataggtaagccgtgcacagtggctcacaactataatcccagcactttggcactttgggaggctgaggtgggaggatcacatgagcccagcctgggcaacatagggagacccctatctttacaaaataaaatataaaatataaaacctagttgggcatggcagcatacacctgtagtcccaggtgctcaggagactgagacaggaggatcacttgggcctgggaggtcgaggctgcaatgagccaagattatgccactgcattccagcctgggtgacagggcaagaccctgtcttaaaaaaaaaaaaaaaagaaagagacaaacgtagaaagagtaccaaatttggagccaatcagatcagacctgggttcaaattgagtttctgtcacttacttcctttgtggccctggagatgcccttcaacctccttgaaccttagtttcctcatctgtaaa

SEQ ID NO: 68867 - DNA, 1051 bp, Homo sapiens
ctttctttctttcttttttctttcttccttccttcgttccttcctccctccctccctctctctctttctttctttctcttttctttctttctttctttctttctttctttctttctttctttctttctctctttcttttctttctttctttctttctctttctctttccttccttccttcctttctttctctctctctccttccttccttccttctttccttccttccttctttccttccttccttctttcttctttttttaaataagggtctacctgaagtgtgaactgatttgggaaatttgatcatgcagaacagtaaaattttctttatgtttgttgctagcaaaattgtgatggttttttaaaaaaatggctattgataataaggcatgcctaatgtagtgaaagtttgaaaatgtcccaatttctgattgacagaagaagaactggcaactcctccactagatggcatcattcttccaggagtgacaaggcggtgcattctggacctggcacatcagtgggtgggtgcctttgatatgaacaacttttgtaagcctgaaataaaaaataatcaaaataagcccagcctagtgttgaaataatatcctgtggttccaaccaatgttatctaatctttaaattctaacgtgaatgaaaagtattcttctagaagggctttcttggcaagactattaaaataagtattgttgatagcaagggcagagagaaaccagtttagcaagatgtcatagtggagaagtattctagtagtagtctcagtctaccaggtatctcccaccaacttttgtctggttcatacctgatgtgcttccatccagacattccttaacttcccaagtctgtgttgcttccaaatggcaatgatacttcttcctttcctttatttataccagtgtaaccatgcttgccgtagaaatgaaataatttcactgacatataaatgtttactaatataacattattggtttgactgccttctttttctctctgtcctacccccatcctccaaaattcatatacatgcc

SEQ ID NO: 68868 - DNA, 1061 bp, Homo sapiens
ccttgcattgagacacaggtctcagatcaggtcaatggtcattcaccatataccgtatataaaatgctagagtaataaatgcagtgtactgattctactggaaggattttgtgtactctctggctgtaattgttttaacaattgttgccttttctacatattttgaaaatgtatcacaatctctccaaatttactctagaactcaatctgattaaagagcaccattttaaaagataaatcaatgtatcttgggattgtaactagatcctggttcattcaagacaatttcatatatccactatagatatcaatatttctctattatctttaatatcctgagtactcattacttttctttgctgtttttttttattagttggcagagaccataggggttcagtgaagtgttggcaacgtgtatgatattgaattaaatggccaacggtgggagaaaaacaggcatttatttctattagaattttgataatcataccaaatttagaagcgtatttttagacttgtttacattcttaggttgttcatttcacagtagtaattatagagactagaaatataaatgatgtttccaaatacttatgaagtctcagtgttagtagtttcaattaaattttttaaaatgcagtttatatttgaaagtagctacagtagcctctcttgctctaatgttatttggctacaaaaagaggaaaatggtaatttagatgtggctgaattcagagctaagtactaattttagtgttagttgcagagactaacaagatgagtcttatactgcagtcagaggtagaataaacagaagatatggtgagtaagccttgtcctgggcttggccattggtagtccttggcatatgaaaaaccagatacagatcattctcatccttccattcctgctgtttgtacttggcactgtttgaaaataaaatttatacaggaatatttatgatttataaatttgagttactgtatgtgacatataacaaaagctacacttggaagattgtagccagtgttgacctctgcacttagaagataataggc

SEQ ID NO: 68869 - DNA, 1165 bp, Homo sapiens
agacattgggcattatgtattccttggatacattaaaaggtgttagataagagcgctcacacttgctgctcttctattgcaacttgacagaagttacttctctaaaccttagtttctcatctgaacaatggaaataatgatagtgtctatctcatagtattggtgtgagatttaaatgaaataattcatgtaaaattgcttggtgtgtggaaacatagtaacttttaactgttctcattaacttggctatttacctgtgttcttctatcattacatttcaagttaaaatttcaaggtttcacgttgttctctctccaatgaatgcagttaaatcacttagattttctaatgagttttcctttaatgttatgcagttgactagagagtgtatatatattaagaacataataccttcactatgtccacatgtgaattaagagcttgaggctatcagagggtagaagatgagggagtggggatgaagtatgtttgtaacctgtgtattttctctttcttaaaggaattacggctcatctctttttgcccaatgtgaagcagtagataatgggtgtcagcaggtcctgtggctctatggagaggaccatcagatcactgaagtgggaactatgaatctttttctttactggataaatgaagatggaggtaatccactcagatttcactgtgtgcatttctcagtcattttcaacaggaccagaaagacaagagctagaaacttagtacaagggagtaagtagcacagttccaaaggctaagtaaggactactgtgcttttgctgcccaaatagacacaagtttcttttttttctttctttcttttttaaagaggtggagtctcactatgtcacccaggctgcagtgcaatggtgtgatctcagctcactgcaccctggttcaagcaattctcctgcctcagcctcccgagtagctgggattgcaggagcctgccaccatgcccagctaatttttgtatttttttttttagtagagatagggtttcaccatgttggtcaggctggtcttgaactcctgacctcaggtgatccaccggccttggcctcccaaagtgctgggattacaggtgtgagccactgcacccggccgagtttcgatttaaagaagctctagaggttttttgtttttc

SEQ ID NO: 68870 - DNA, 1179 bp, Homo sapiens
aagcctaaaaccatgtctaggttctcccctttctcaattcccaatcatgcaaccttgaaaggtgttatatagatagttgttagaaatatgtctgtcctccaaaaccctactaacacgcaaaaatggacaaatctagcttttttgctaaaatcctaacaactcagaaagcaaagcaaaatgaaatgtatgtactccattctcaggatttccttcttaaaaaccactaggctttgtgtaactcaattttaaaagtatggtaatagctcctgtaattcgatggcttcttctgggagacagatataaatctattctagactttaagactggtgtccacattttaagttacagttgtatgtacttctactttgttgcagccttctcttggagtcaagaagcctaccaaagccctgctctttgtactcttgagcccagtgggaccttatttttcaagtggaacctttaatccagtgtccctgtgggccaatcccaagtatgtaagagcctggaaaggtggaactggggactgcaagatgggagggtaagtaaatctgtgtctctgtctaaaggaaagacaccttcatgaccatttagttagtgccatttcacttcagtatgaacacatataatacttttcaaactttaatgctcattgtgtttcatggttaattttcagtttaatctttcagcaagccagctgtagtagcttttcctatataaacgcagtatgaattcagtgccctcgcttttagatgtgctagtttaaaggatagcccatggccctttgtaagggagaaacactggatatgatatctagggaagaactgaagtaagaaactacaacaagcatcacatcggtgctttggataaacttcccctgggcgctggtctctggctgcaggctgacggctggcattaaaaagcatctggtcctgggacccaggctctcagttggctccagggagtcatgtctggggaaggtgcccgcttcactgaagtgctgtcttcattgccacagattgtggccacacctgctgccaactggctgcgggacagccctgctttggctctgtcaggccagtctcataggccatatgtagctggcaggaaataaaagagcatttgaaaagtgttggacgatttcaggggtggacttggccatgagttgggaatgcccctatg

SEQ ID NO: 68871 - DNA, 1024 bp, Homo sapiens
ctcctacttaagaatcctttcctaccttaaggtcacagagatattttgtactttttaaataaagtcttagtattttgtcacatttaagtatatcatctaattagaattgattggggggtatggtaagatgtagggatctaatcttatctttcacatgtggatagctcgtcatcccatcacaatttttggggggaaaatcagaaaaaattgtttggttttattattactttaaaattttttttattggtaccataaattatacatatttatgaggtacactgatgttttcatgcatgcatataatgtgtaatgattaggacaaataagaaagaaataaataaaaattaggataattaggatatccatcacctcaaacatttcttatttttttgtgttgggattattaattttttaacagtttaaatgcttcagtgaggatcatttattattgccacattgtgagaaaattctgtcatttattatgtttttcattctttcaggtatttgacaaagaagagctcttagagtgtattcaacagcttgtgaaattggatcaagaatgggtcccatattcaacatctgctagtctgtatattcgtcctacattcattggaactgaggtgcaaactgactctttattttggggtactttgctgggcaagttattattgtttattgttgtttgaaacttctagcatatagtttgcagtagccccccagtagcatcattaatgacttcttccttctgattgtcaagattagaggtagcaaacattttctgtgaagcgccaatcagtaaatattttttggctttgtggccatatagtttctaataagaaattagatccctacctcttaccataccccaaaatcaattataattcgattatatacttaaatgtgacaaaatactaagacgtttattaagaaatacaaaatatctctgtgaccttaggtaggaaatgattttttttttttgaggtctctctctggttttttttttttgcccacgttgtcgcttagg

SEQ ID NO: 68872 - DNA, 1078 bp, Homo sapiens
aaccagctctggtcacatctggattatctactatccagcattcaaatgaaccagattacatgaaaggatatgggggtactctttgggggccacggtgccacaaggcctttggtttcgatctccattgcctagggaattaacctgtgctgtgtgattctagatgttttcttcctgctcccttaaataacacctaaatgtgttattcagcagtgtggctcctgctaagcagaggagaactcggaattcctaccaaattctgataataaaataactttcctccacctcaaccattgtttttaccagtcctgtcaactgttagctttcctggatttaatgatctcaagttgaggtcaatgtcaacagctttatgggatgaataagatgaacgcccataggaaagtcagtctcttgaacacgggttgttttcttttggttaccctctaagattttttctctttgatctccagttatttgaaggattgaaggcatttcgaggagtagataataaaattcgactgtttcagccaaacctcaacatggatagaatgtatcgctctgctgtgagggcaactctgccggtatgtaagtgtaggagtttcttttgtgtttcttttaatgtaacgggtcacggtgttgaccaccaaataaataatttctgaatagttagataaatattcagtacaaaccatatgaacattaacattatttctgatctactttagttaggtaaaaatacaagaaaatggccgggcacggtggttcactcctataatcccagcactctgggagactgaggtgggtggatcacttgaaaccaggaattggagacaagcctggccaacatggtgaaacaccatctctgcaaaaaatacaaaaattagccgggtttggtggcacatgcctgtggtcccatcggtgtggctgaggcatgagaattgcttgaacctggcaggtggaggctgcagtgagccaagataatcacatcactgccctccagcctaagccgcaaagtgagactctgtaaaaaaaaaaaacaaaaaacaaaaaacccaagaaaataatatcatttggcaattcc

SEQ ID NO: 68873 - DNA, 1048 bp, Homo sapiens
taatagtcacaccagctaccattttaaaggaaaaaccagaccccaataatctggtttttggaactgtgttcacggatcatatgctgacggtggagtggtcctcagagtttggatgggagaaacctcatatcaagcctcttcagaacctgtcattgcaccctggctcatcagctttgcactatgcagtggaagtaagtacatgggaattaaagagagtgacatgcttgcacttcactgtgggtactaagtagcttctcctgctaaaatagctcttgggcagtatgggctttatcatatttaccagaggaagccgaaaatgtctttaaaagttttcctatagacagttggattgaagataaatcttagcagctaatttttcagataatcttgcattttctgtgacgtcaataaaaaaattatttaaagcaaatagaaaggacagctggtgggaaaattggcaattaaaaagccagcactgttgataatttaataagtcacctttcttcttagatcttctaataattgagaaagggtcattgagaacaatattatgatttgattttaatgctaactccacatttttatgaccagtaataatgtctagttatgcatgttaagggacatgtaattaaatgtcctccttcagccatgagttgaaataattttaagcataaaatgtttaaagaattctttctctggtccttttcagggtgcacaattaaccagatgcacagtatacttcccattgtcttgattctcattgtattttacttttgaatgatttggacatctttcccagaataataggggtgctggaaataataatagtcttcctattaagtgctaaaatatggtaatagtaaaatattaatagattaatgataaaataacaacttttgtttactgaattcctgcaatacgttctgtattatgttccatatatgaatcatctcatttaattaccttaagtgagaaggcatgtgattaagcattcaggctttgaagtcagacatcctgggctcaaattcggtctcatttgctccatagg

SEQ ID NO: 68874 - DNA, 1002 bp, Homo sapiens
tttttttttttctgagacagagtcttgctctgtctcccaggctggagtgcagtggtgcgatcttgactctctgcaacctccgcctcccgggttcaagtgattttcctgcctcagcctcctgagtagctgcgactacaggtgcatgccaccacgcctggctaatttttagtatttttagtagagacggggtttcaccatgttagctaggatggtctcaatctccaaaccttgtgatctgcatgcctcggcttcccaaagtgctggtctcctgtgtttttgtcagcattccacagatgctataaagttagtggtggtatcgcatgcaatttgtacgcttaatgtttggccatttgcagtgggcaaactggctatgtcgggagctggtgagatgctgcttgtggggagttgtttcctattactctgatttatctttgtttaaataagagttcctttgttcactgtttcctccacacagaacagaggatttatatcttagtgttcattctcaactttcctgttttcaaagaggaaaacatttgcttcactttgctcatttcttctccagtgcacccagaggattttgaaggcttatgccaacaattctttggggcagttggagtgtaaccattgctaaatagcagttcagtacttaatgacattcattttagtttaacaaatcattgtgagtgttgccattttttattagggaaaacatctctttcatctttcccaaatactcaacatgagtcctatggtgagagtgaaaaagggttgtattctttttttgcatcatcttaccccatctgctattttgtccctcttctatatatcactgaaatttggttctgatattctattaggcagtgtacattgcagagattatgaataactggccgaattctgaatgcaggcatgatttgttcagctcagagtgttaaatttctgtgttagctgctaacctttaaaagtcaattgatttcctttttttttttcccctctgta

SEQ ID NO: 68875 - DNA, 1088 bp, Homo sapiens
cctccttggatctcttccttccccacccccacccccgtagttatttagcagattacgcattaaaacaaatgtctgcaggttttcccaattagtcccgcttccctgtgtctttatcttttaaattgcccactaataccatgaggtttaaggtgtggggtggatgctgcggcatcggaggaccctgctggtggaggaaatggttcacgcccgtccccgttccctttgcaggcttgctattgtgcgtctgtgattgacaagaccacgaggctgagcgcgccctggagatttttctataaatggcttaacaccccagtctagactatttgctcggatataagggagacaattgtttttttgttctttgccggcgaaccctggctctgtagggctgacctggaatttaaccagtcttccctgagccggcggaggaggacaaaaaccgccgcgaccccggcagggtgggaagtgcagggcagcgctcccaagacacgcttgttggaggttcgggcctgggtgcttggttgtctgagcctccttttttgtgtttgcctgggtcctggagaggagcgcacggtatcatggtgagcgtcacgtaggttaccccgggtcccgcttacccacctgcatttacttaatggtggtttaattcttctttaaggattgcagtaacggatgctccgcagagtgtaccggagaaggaggatcaaaagaggtggtggggacttttaaggtaagttgcttgccagaggcttagtgtctaaagcaacgttcaactgaataaatccatttcttgttgagattcggggaaattttcactgtgtgggttacccagttcctaggttgtgttgccagacttttaaaattccactcttagaggaaaaaaagccatttagagagtgacagtacattcatcacaacaaaaattatctagcagctaattgctgattttattttgagtcatatatttttcttgaaaaatagtcaatgcgtaaatattaaactagttgtttatcagattccataatacgtacaaaccttcagtctacttgtagaaaaagttaaactgtgatttttctctttcagtagca

SEQ ID NO: 68876 - DNA, 1052 bp, Homo sapiens
agcagcccttctccatcaattttttccccctgggtatttctttacctatttttatgttaaaattagagccataaccgtttatatcatcagcatgtaaatgtcatctattgataatgagttttccttaagacagaataaatgttcaattggagccatcccagagagaaaatatcaacagcttttttaggatgtaggagaatttcacaagactattgagaaccaaatgacaaggacaatgacattaactcatgagcatcatttttgttaagtgaaagtaatgaatgttctttattcagatgtcaattgtgggcatttcgatccttgtttcagaacactgaaacagaaaggcagcacaatgtaatcaacttgtcatctctggacgccatgatggatcaggaaatgctgctattactaagagagcccgcacagaaggcagtggaattcacagccacgcttcagaagctggtatcgtataacatacctttatcatggtgttccgttttggctggcaatatctgcagataactgacctgcaacctgtttgctgagtccaaatgtatctgtgtgctgctgagacccaaattaatacactctgaaaagcgaaggtttttctcaaacctttctgaagctggccttttagttctgggtcaatcagggctaacagattgaccattagatacggattgcttgaggttattttttcctgtgagctaatctttagtatcaaagggctgaagacatggtatctattgaacagtttccttctttaaattttcttctggttaatggctggtattcctttctccattttgacttttcactggaaactctggatgattggagaaatcagagaacaatattttcatactggtattgccagtccctttcatagtgcctagcatatagtaggtagcatttagtttggtacattttggtacattttacattttgtacattttggtacattttagaacggtaaaaataagtgaaaatggttgttttcttctatttaaaaagatggggtttgttctggaaaatgattctctctgtat

SEQ ID NO: 68877 - DNA, 1028 bp, Homo sapiens
aaaccatgtggaagattaagctaggcagagtgcctgaaaagccctctgcaataagttgagctggaaaaacctccatatctaaagatgctttaatcatctcaagaacaccaacaacattttctattataatataactatgatagatgtgaatctacctcttggattaaggcaataattttatagctatcaaattttcacagacaccattttcactactctgagttgcatctctaacaagcttctttagcctctgcctacagatttcagtgacaaagccattcagtttcttgttcccgatcttcagatttcattcctagatcaagtaatggggcaaatacaatgggaggtttaaaattacaaatgtgttcccttggagtagaatacaaaaagaacttgtcaatttcacccactttgggtagtgtcatatcttctattaagtctaatgtgtttgggatctttgactctttcatcattctgtctttgaatacactctaccattttctcttgacagagctttttagatgaggaatttcctcactatgattccctgtcctgcgcagatgcaattcaacaacctcttcaagaaaaattggtaattgcgagctttttgaaattatttaggtagtaattgtgaatcaacaactatcctgtaatagaaagctaaatccagtatgtatcagtagtcttagaactgcatatattgcttttatcaagagattatcaagtgaggcaacagatacgtgtttttgtaaatgtacacatacacacacacaaacctagttggtcctttgtcgcccaggctggagtgcagtggtgcaatctcagctcactgcaacctccgcctcctgggttcaagagattctcctgcctcagcctccggagtagctgggattacagtcatacaccaccacgcccggctaatttttgtatttttagtagagatggggtttccccatgttggccaggctggtgacctgaagtgatccacctaccttggcctcccaaagtgctgggattacaggcatgaa

SEQ ID NO: 68878 - DNA, 1073 bp, Homo sapiens
tagagaagtagaattccaaaatttctttgtgggcaaacctggggagatatgaattttttaaatctatacctaagcagacttgttaaaatatattttcttaaggagaaatttaattgtggtagtaattttagtttgatcatttgttatatactttcacaccttagttcctttttaacccctcactagagaatactgttattctttgtttcatttttactaaagttatatatgcacatagttttttaaaaggtcaatcagctctataagccttactaatttcccgtgatccagagaaacaactttcaactttttgtcttatttgttttgtatttgcattcacatttttcaataacatgctcatgctgccatttagtgatttattttcagttttaggtattatctgttgctcttccactacgaagacaaatatttagttcttttatcaatctctggcccatcacaccttttcactgtccctcaagctactgttggccatcctgctttcctggccaagcttatactccacagttaaacatagttttcactaccttgcatgtcccctcatcacttacccctttcttgctttgtcttactcatttggcgaatctacaagtaaatccgcttctccacctctcatgcctgcatagctggaaaatgtcacattcccatgctgacctgtttctctttgaattcattatcacaaacctcaagcgggtccttggggcttcccctcaatcaccctccttctcttttaaatatcaatttcccaccctttcctttctcctcaaaccactgtcatgtctttccccatattctctctcaaacacaggtaatgactgcttccaacctcactgaggaaactgggacaatcaaaggaaactgccacaaagcctcccagcgtgtgaatccttacacactcccttgctcttgttcctaaagatgcgttgtctctaaccctatccaaggccagccttccccactgtagatgggagccttcccgactaatttactcagagtcatgggaccaaattctcctgacttttctccatttacattttctccactctactgaa

SEQ ID NO: 68879 - DNA, 1045 bp, Homo sapiens
cagacggtcagtttagtgcaaaggtagtttaagcaattctcattttatatactttctttttgcattactggatattatatgagatttcctaaaagagtaaataactgcactttcccaaacatggtaagttaggcagaattaaaaatacaaggaccaccaatgtacaaaacccacttcctttagtttcttggcaaagcctccatgtctgtgtactgtttcatgttcgtcataaggctttagttcagtaagatccttccaggttaaactgtgagcttcttgaggatgggggtcatttcttaatgaacattgattcttctagcatctagcatagtcctagaatatagtagatgcttagtaaacatttgtgatatatgaagacacaaagtaacttctaatcatgaaaagtgaatttgtaggcagaagagttctgtactcaagaatatttatgaatgtatcagaaaatgacaatataagtagatatttatataatatttagaaataagtgtatgtacatatatgcataggaaaaaaacccttggttttagtaactcaaattgcctgttactctacattgttgaatgtagtgttctgctcatgctttcagaatattctactccaggaaatatttttttctgaacactgtgtgctaggcactattttagatgattaggatatagcaatgaatgaaacaaaggtccttacctttgttttctttcacagtcgaaggaaaacatttaaaaaaataaatgattagtatgttaaaaaggtgaaaagtgctatggaaaaaaagaaaaggtagatccggaatagtgaggctgaggccatatgacacccatattaaatagggtgtcagggagggcagcttaatgagagataacacttgagtgaaactcaaaggtggggactttagccatgtgcacatctggggaagcagcttcctggtaaacaactggagcaagagccccgagggagtggcttggtgtgctggaggattggagggacaccatggaaaccatggggcctggaactgagagagcaaagggag

SEQ ID NO: 68880 - DNA, 1044 bp, Homo sapiens
aatggttcagtaggtgaacttagtttttctatacttatttgtagttttgtctgaactctttttaaaaaagcattttattttgggataattttagatttgcaaggaaagttacaaagatggtacagagagttcccttatgccctttaccaagcttcttctaattttaacatcttacataatcatgatacttttgtatcagaattgtctttaaaattgatcaattcttttgttttccaacttttagggtcccaaagcaaaaaaggtatgtagaatttttttcaaaatagatagttgtataatcacttacagtgtatgaacagaatatttacagaattataaaatatttttatagttttagtttgtagagtttactaagcttactttttagacattaatgcagtttaaatcatggaataatcctttacaacagtaggacgcatttcaaatttgacataagagagttctaatttcacaaatactcttaaaaatagcttttaatttttacttatgtctagatttggggctttttgttaattctgctctagaaaatgttggattaggaacccctttttcttcactctagatacatatataaaattttaattataaaatgtgctatggctttaaagtgaaatctgaggtaatacaactttaaatgggttgcatggtaacacatacttggtgggtttttttgtactgtttagaaatttgagttcaataaacaatgtaccattctatatgcctttttccagaatgcctttttctctctttactttgtagatttatactttaaattagagtttataatccattggctggcagtccaaatttaccctacagacatattttgtttgaccttagaagtgctttttttttttttttttttaaatcagttgccaacctatttttatgcaacaatctgatttccatctattcttaagaaattggaaacctgataacattgggcctaaatagtcctgtaaggcaacaattggctgggctgaataacagctaccccttttaggaatgcataaaatctttgat

SEQ ID NO: 68881 - DNA, 1033 bp, Homo sapiens
ggctcactgcaacctccctctcccgggttcaagcgattcccgtctcagcctccagagcagctgggattacaggtgctgatcaccacgcccggctaattttttgtattattttagtagagacggggtttcactgtgttatccaggatggtctccatctccagacctcgtgatccacccactttggcctctcaaaatgctgggattacaggcgtgagccaccacaccaggcaatgcagtttatctttatgcagttgaccttgaagcatttaggtttactttagccactaagagaaataggtctccttgggttcacaatgtagtgaataaacaattttgagttcagcagggccctgaggctgctcctgaactctgcatgaagtcatggaggttactgttttaagtaaagagccaagagttaaggactaagagaagccccctattattctgaaaacttggatgtgtgcgctggatgagacagcggttgcagtccccattgatagttttttccccctgtcattctaggctaaggagttaggacttaaccagttccagttccaggctaatggaaaattgtcattttactgggggttatgtggtggccaaagttgttaatcattgttccccatggggtagatacagtgagagcttcagtaaagcctttcctctaaaagcccactattttaaggtaacttgggattactgaactatctccttaccccgatgaatcctaacttgagttgactgaggtgttttatcattaaacattagttttactgaaactaatttaaaaggaagccttaactttcatatcaaacagctatggtaaactgagtaagaactctgtacgaagtcgctattaaaatgtttttatcttgctaccaggatatggatgtaaaatgctaataactattacacaacctataatagttacaggttacaatagggataataacactttaacccacaaagactagcttagtcctactacttatctatgaataatgcatgtagtcaataacactggaagggatag

SEQ ID NO: 68882 - DNA, 1033 bp, Homo sapiens
tttgatcaggcttctgctcaatgtccttcaagtggctctggccttgccttgagagcagggtaaagataatctcttgtttgttgataaggaaaactcaggctcagcaaggttaattaatctgtacattatgcaactggaatttaaatctagtttaactcattccactgtggcataaaaggaggtacacgtacctatctgtgatgacaatccactttctcatttccttcatgtgacttctcacaatcacaattgtctttgcttatgtctcccataggaaaacgtcaattatgacagcaggtaattttatcggaagtgtttataactatatcccagtacgtggaacgaaaaagttatcaagaaatatttattgaatgtaaaaaaggttaccattttctcaatgtgtataacctttttttatttttttaagactacaatgcagctaattgcaaaaaaattttcctttctttaggtatgttatgcataaaagtggataatttacatgataaatgaaaatggccaattctttaagaggagaagtactaaaactttataaaaatgtaagtaattatgttgccaattttataaaaatgttattatatgacatggattgtttagaaatatataatctttctttttgaagctgctgtatcttggacgagactatccaaaaggagcagactattttaaaaagcgtttgaagaacattttccttaaaaacaaagatgtgaagaatccagagaagatcaaagaacttattgcacagggcgaatttgtaatgaaagagctagaagctttgtacttccttaggaaatacagagctatgaaacaacgctattattcagataccaacaaaactaattgatcattactactttaatttagctatcagtgccagctgtttatgtataccagatgttgtaaaataattctaacttaaaatgggaagatatacatgttgtgtaaaaaatccctgagctgccctactgaactaaataggtttcaacttctgttcatacggagaaagtatcagcaa

SEQ ID NO: 68883 - DNA, 3074 bp, Homo sapiens
taatattccagttttctctgcataagtaattaaaatatacttaaaaattaatagttttatctgggtacaaataaacaggtgcctgaactagttcacagacaaggaaacttctatgtaaaaatcactatgatttctgaattgctatgtgaaactacagatctttggaacactgtttaggtagggtgttaagacttacacagtacctcgtttctacacagagaaagaaatggccatacttcaggaactgcagtgcttatgaggggatatttaggcctcttgaatttttgatgtagatgggcatttttttaaggtagtggttaattacctttatgtgaactttgaatggtttaacaaaagatttgtttttgtagagattttaaagggggagaattctagaaataaatgttacctaattattacagccttaaagacaaaaatccttgttgaagtttttttaaaaaaagctaaattacatagacttaggcattaacatgtttgtggaagaatatagcagacgtatattgtatcatttgagtgaatgttcccaagtaggcattctaggctctatttaactgagtcacactgcataggaatttagaacctaacttttataggttatcaaaactgttgtcaccattgcacaattttgtcctaatatatacatagaaactttgtggggcatgttaagttacagtttgcacaagttcatctcatttgtattccattgattttttttttcttctaaacattttttcttcaaacagtatataactttttttaggggatttttttttagacagcaaaaactatctgaagatttccatttgtcaaaaagtaatgatttcttgataattgtgtagtaatgttttttagaacccagcagttaccttaaagctgaatttatatttagtaacttctgtgttaatactggatagcatgaattctgcattgagaaactgaatagctgtcataaaatgaaactttctttctaaagaaagatactcacatgagttcttgaagaatagtcataactagattaagatctgtgttttagtttaatagtttgaagtgcctgtttgggataatgataggtaatttagatgaatttaggggaaaaaaaagttatctgcagatatgttgagggcccatctctccccccacacccccacagagctaactgggttacagtgttttatccgaaagtttccaattccactgtcttgtgttttcatgttgaaaatacttttgcatttttcctttgagtgccaatttcttactagtactatttcttaatgtaacatgtttacctggaatgtattttaactatttttgtatagtgtaaactgaaacatgcacattttgtacattgtgctttcttttgtgggacatatgcagtgtgatccagttgttttccatcatttggttgcgctgacctaggaatgttggtcatatcaaacattaaaaatgaccactcttttaattgaaattaacttttaaatgtttataggagtatgtgctgtgaagtgatctaaaatttgtaatatttttgtcatgaactgtactactcctaattattgtaatgtaataaaaatagttacagtgactatgagtgtgtatttattcatgaaatttgaactgtttgccccgaaatggatatggaatactttataagccatagacactatagtataccagtgaatcttttatgcagcttgttagaagtatcctttatttctaaaaggtgctgtggatattatgtaaaggcgtgtttgcttaaacttaaaaccatatttagaagtagatgcaaaacaaatctgcctttatgacaaaaaaataggataacattatttatttatttccttttatcaaagaaggtaattgatacacaacaggtgacttggttttaggcccaaaggtagcagcagcaacattaataatggaaataattgaatagttagttatgtatgttaatgccagtcaccagcaggctatttcaaggtcagaagtaatgactccatacatattatttatttctataactacatttaaatcattaccaggaactgtttgttttgtagtgaaccttgagtatgtgctgttaatataccaaattgggtgaaaaaataagggattcctttcaaaagttaagagaagtaagtgtgtaagaaattattttgcttattaaatgttcggtaaatggcattctcttgtcagtaaaatggagaaataagctaaaaataattggctaagtcctattaagttagaggattaagtgtattatattttcattcaaaattgggtgctcattaatttatgatcggtagtatagctaaattgctatgtttgtatcaaaattgagcataaagttgctgatactttctccgtatgaacagaagttgaaacctatttagttcagtagggcagctcagggattttttacacaacatgtatatcttcccattttaagttagaattattttacaacatctggtatacataaacagctggcactgatagctaaattaaagtagtaatgatcaattagttttgttggtatctgaataatagcgttgtttcatagctctgtatttcctaaggaagtacaaagcttctagctctttcattacaaattcgccctgtgcaataagttctttgatcttctctggattcttcacatctttgtttttaaggaaaatgttcttcaaacgctttttaaaatagtctgctccttttggatagtctcgtccaagatacagcagcttcaaaaagaaagattatatatttctaaacaatccatgtcatataataacatttttataaaattggcaacataattacttacatttttataaagttttagtacttctcctcttaaagaattggccattttcatttatcatgtaaattatccacttttatgcataacatacctaaagaaaggaaaatttttttgcaattagctgcattgtagtcttaaaaaaataaaaaaaggttatacacattgagaaaatggtaaccttttttacattcaataaatatttcttgataactttttcgttccacgtactgggata

SEQ ID NO: 68884 - DNA, 3106 bp, Homo sapiens
gtatagaactggagctcaaatactgttactgtgtgtgaagatatatgaacatagtttacagttgcatggcttatatctaaagtccagaaacataaggacaattaagtgtacacacacacacatgcatttggattttgatgacttaggtttgccaatgtggaaaaaatagtagcaaattaagttctcctgtgaaaaagtcgttaccttatttaaaattctgtgccattggttatccttgtcttttgtgaaaattagtgttcctgtttataatattgacaaaacacctatgcggatgacatttaagaattctaaaagtcctaatatatgtaatatatattcagttgcctgaagagaaacataaagaatcctttcttaatattttttccattaatgaaatttgttacctgtacacatgaagccatcgtatatattcacattttaatactttttatgtatttcagggtgttgatgatgccttctatacattagttcgagaaattcgaaaacataaagaaaagatgagcaaagatggtaaaaagaagaaaaagaagtcaaagacaaagtgtgtaattatgtaaatacaatttgtacttttttcttaaggcatactagtacaagtggtaatttttgtacattacactaaattattagcatttgttttagcattacctaatttttttcctgctccatgcagactgttagcttttaccttaaatgcttattttaaaatgacagtggaagtttttttttcctctaagtgccagtattcccagagttttggtttttgaactagcaatgcctgtgaaaaagaaactgaatacctaagatttctgtcttggggcttttggtgcatgcagttgattacttcttatttttcttaccaattgtgaatgttggtgtgaaacaaattaatgaagcttttgaatcatccctattctgtgttttatctagtcacataaatggattaattactaatttcagttgagaccttctaattggtttttactgaaacattgagggaacacaaatttatgggcttcctgatgatgattcttctaggcatcatgtcctatagtttgtcatccctgatgaatgtaaagttacactgttcacaaaggttttgtctcctttccactgctattagtcatggtcactctccccaaaatattatattttttctataaaaagaaaaaaatggaaaaaaattacaaggcaatggaaactattataaggccatttccttttcacattagataaattactataaagactcctaatagcttttcctgttaaggcagacccagtatgaaatggggattattatagcaaccattttggggctatatttacatgctactaaatttttataataattgaaaagattttaacaagtataaaaaattctcataggaattaaatgtagtctccctgtgtcagactgctctttcatagtataactttaaatcttttcttcaacttgagtctttgaagatagttttaattctgcttgtgacattaaaagattatttgggccagttatagcttattaggtgttgaagagaccaaggttgcaaggccaggccctgtgtgaacctttgagctttcatagagagtttcacagcatggactgtgtccccacggtcatccagtgttgtcatgcattggttagtcaaaatggggagggactagggcagtttggatagctcaacaagatacaatctcactctgtggtggtcctgctgacaaatcaagagcattgcttttgtttcttaagaaaacaaactcttttttaaaaattacttttaaatattaactcaaaagttgagattttggggtggtggtgtgccaagacattaattttttttttaaacaatgaagtgaaaaagttttacaatctctaggtttggctagttctcttaacactggttaaattaacattgcataaacacttttcaagtctgatccatatttaataatgctttaaaataaaaataaaaacaatccttttgataaatttaaaatgttacttattttaaaataaatgaagtgagatggcatggtgaggtgaaagtatcactggactaggaagaaggtgacttaggttctagataggtgtcttttaggactctgattttgaggacatcacttactatccatttcttcatgttaaaagaagtcatctcaaactcttagttttttttttttacaactatgtaatttatattccatttacataaggatacacttatttgtcaagctcagcacaatctgtaaatttttaacctatgttacaccatcttcagtgccagtcttgggcaaaattgtgcaagaggtgaagtttatatttgaatatccattctcgttttaggactcttcttccatattagtgtcatcttgcctccctaccttccacatgccccatgacttgatgcagttttaatacttgtaattcccctaaccataagatttactgctgctgtggatatctccatgaagttttcccactgagtcacatcagaaatgccctacatcttatttcctcagggctcaagagaatctgacagataccataaagggatttgacctaatcactaattttcaggtggtggctgatgctttgaacatctctttgctgcccaatccattagcgacagtaggatttttcaaacctggtatgaatagacagaaccctatccagtggaaggagaatttaataaagatagtgctgaaagaattccttaggtaatctataactaggactactcctggtaacagtaatacattccattgttttagtaaccagaaatcttcatgcaatgaaaaatactttaattcatgaagcttactttttttttttggtgtcagagtctcgctcttgtcacccaggctggaatgcagtggcgccatctcagctcactgcaacctccatctcccaggttcaagcgattctcgtgcctcggcctcctgagtagctgggattacaggcgtgtgccactacactcaactaatttttgtatttttaggagagacggggtttcaccctgttggccaggctggtctcgaactcctgacctcaagtgattcacccaccttggcctcataaacc

SEQ ID NO: 68885 - DNA, 1062 bp, Homo sapiens
accaggattctagcccatattttaaaactgcatcctcagttttattcaaacagtctgatgtctgtttaaaaaaaaaaaaatctcaagctcataatctcaaacttcttgcacatggctttcccagtaaattactcttaccaatgcaacagactttaaagaagttgtgttttacaatgcagagagtggaggatgctttttatacattggtgagggagatccgacaatacagattgaaaaaaatcagcaaagaagaaaagactcctggctgtgtgaaaattaaaaaatgcattataatgtaatctggtaagtttaagttcagcacattaattttggcagaaagcagatgtcttttaaaggtaacaaggtggcaaccactttagaactacttaggtgtagtattctaacttgaagtattaaaagataagaaacttgtttccataattagtacatttatttttaatctagtgggaattaattataattgagacaattttgatggctgtagtagactaatctatatttggcataaagtctaatgatttaatgagtcttaagtaaactaaatatttggaaactgatatttacctttatttttaagggaaaagttttgagataatcagcagcttttttttttttttttttttttttagtagggagaaaaagatatgagctatagtagacagcagtaatattgaatggcccagaaggtgggaaaaagccactcttaaatgtattttttcttttggatattttacaagcaaataataacttctgcctaagttcgccatctcagtggcatcagcagcacagcactttcttatcccagtgagaaacctgggaattttaggatgactcctaccgccctcttttccccctggtttggaagtatccacaaattcctgtgacgttacattctgtgtcttttatgtcatcattagttcaggcccctatcatttcttgttggactgttagaacctcctatttggtttaccagttgctgccatcattcattgtgaaaccggagagatacactttaaagaaatgtcatttttggccgggcgc

SEQ ID NO: 68886 - DNA, 1058 bp, Homo sapiens
gtatttttcttggtacttggaccatactttgagtagaaaagcagtagaggacataaaaagagtcttgttagtcccactttgttgctgtccacttctcatttgataatatcctaaaatagctgtgtctcctttttggtggttgtatgattactacctcagaagtactaattgattcttgctatttgaccttaatactttaatataacacagcattcatatttgatcagaaaactatctggcttccttttataagagatttttaggttttatacagttttgtggccttgggtttttttgtttgatttgtttttttgaaggtatataatatgtaagtagataaacaaatttgatttgtagacatttttatgtggatcatctaattaaaaatggagggatacagtatgaaagaatacttgtacttcttaacagagcactcaacctttcttttacatcctgtttcactgatgttattatgtaatttatgttgctaaactataaattagatatttaatttctgttctttgatttccttttattattaaatggacttgttgatttgcctagaaattaatttgcctttcaaaagtcttattaatcttcctccgttgaaattaatttgatatttgcatgcttctggaagactttaaagagctattccgagtaactgtagagattataaaatgaaatatgggaattttaataaattttacatctccagttactggtgaaaatgtcaagtcctcctttctgcagagtattttgttactcatctgttattcagcttatttatttatttatttatttatttatttttctttctttcttgttttttttttttgagacggagtcttgctttgtcgcccaggctggagtacagtggtgggatcttggctcactgcaggctccgcctcccgggttcacaccattcttctgcctcagcctcccaagtagctgggactacaggcacccgccaccatgccttgctaaatttttgtatttttagtagagacgggtttcactgtgttagccaggatggtctcgatctcttgacctcgtga

SEQ ID NO: 68887 - DNA, 1016 bp, Homo sapiens
gcaatgtgtcgtactacagtgttaggatggctataacatcactaagcaataggaacttttaaactccattataatcttatgggaccactatcacatatgcaatctcctgtggaccaaaatgtcattatgtggtacatgactgtactaagaaattgatccatctatattccatcaatttgtttagggctttttctggttacatttacctgtgagcccagaaaaccagttttgtagaaattaacttctgtaatgctaggagttaaaaaaaattgctgaacaacttttacattgttaaacatttaaaaacaagcgttctagaagtttatcaaatttcataaaggtgcaaaaatgtaaatgtaaatcattatccagctaatatatatgttgtatttccctagtaggagagcatatgtacctcttcctagttatacaaatttgatatatagtaaagaaacagtaaattctacttcaagtcattttgggaggattaaaaactgaatttctctagtttgaccattgtacagatttatctggcaattttactaaaacctgatttataggttaaacttggtgtatatcatatatcactttactttagaggaattaagatttcacataaatccatttccaggttccaaagaccaggaagaggcttggtttttgtttttctttttactgtctttacagtctccttgacttttcttaggagagaaggtactgagaaaacatgattctaatatttattattttttcttccaacattttcttatgaaacattttcaaatacaaaattgagttttatttaaaacatttgcaaatatactacctagattctaccattgttgttttatatttgctttacttacaacttttaaaagatgctttttataccactgaacattttagcttacatttcacaaagaaaagaaaaaatttaagagactttgcataatgttttaaggggttgcagtaaagaagtgcttcttatattttcttatgcatacaaatcagctggg

SEQ ID NO: 68888 - DNA, 2877 bp, Homo sapiens
gctcaacctatatgaaattttattcctttttatggctgaataatgttccactgtatgtatatactacattttgtttatccattcatctgttaacagacacttaagttatttccacattttgggtattataaatagtgctgctgcgaacattggtgtacatgtatctgtttgagtccctgtttttagttattttggttatatacctaggaatggaattgctgatcatatggtaattctgtgtttaactttttgaggaactaccactgttttccacaatggcatcaccattttacattcccaccagcaatgcacaaagatttcagtgtctgtatccttgctaacacttattttccattttttgagtttttttgttttgtttttttaataatagccaatcctaatgggtatgtggtagcatctcatggttttgattttattttcctgactattgatgatgttgagcatcttttcaggtgcttagtggccatttgtccgtcatctttggagcaggaacaatgtcttttcaagtcctttgcccatttttaaattgaattttttgttgttgagttgtatataacaccttttttgaagtaaaaggtgcactgtaataatccagactgtgtttctcccttctcaggattcctacaggaagcaagtagtaattgatggagaaacctgtctcttggatattctcgacacagcaggtcaagaggagtacagtgcaatgagggaccagtacatgaggactggggagggctttctttgtgtatttgccataaataatactaaatcatttgaagatattcaccattataggtgggtttaaattgaatataataagctgacattaaggagtaattatagtttttattttttgagtctttgctaatgccatgcatataatatttaataaaaatttttaaataatgtttatgaggtaggtaatatccctgttttataaatgaagttcttgggggattagagcagtggagtaacttgctccagactgcatcggtagtggtggtgctgggattgaaacctaggcctgtttgactccacagccttctgtactcttgactattctacaaaagcaagactttaaactttttagatacatcattaaaaaagaaaaccataaaaaagaatatgaaaagatgatttgagatggtgtcactttaacagtcttaaaagcaatcgtgtgtatagcatagaattgcttggattggataaacagtggcattatatattttaaaaaataaaagttttgaaagattgaagaatttgggcattacagttctcttaaatctgacaaagctgcataaaactattaaaataatcattattatactattttatattctatttctttgagggtttagttttccaaaaactacatattaagcaaatgaatcactcagtggctatgtcatataataacgagttagcctagttataagaagtttaacattttatttaagaacattgttacagcatgtttactgtatagtctagtaatagaggaaaagacatttgggtgggtggtagtggtagtatttttatagaggagttaccaaatttcagctctattatccaagtttacccagctaatggtgttcggaaccgggaatttgagccaattctgactctgttgtctgctctgctccttcttttgtgctgtgtctttgaaagtcacctaaaattgtgagggaatgtaatttcaccccaaatttagagtttatgcacttgttatattgaaaatgattaacatgtagaagggcttttaatggaataagtggtgtagtaacttcagtgttgcctacctagaaatcaaaatctttctagttgtccactttgttttttgaaaaagtaatatgaaaattatgttaatgctttaattcaggtttttgtaaaatattttttatctttacacatttaacatacgtttctaaaattatagtctgttatatagcactttgggtctagaatttttcagtagtttctgttttactattatgatctacctgcatattaacctattaggttatagttttactatacttctaggtatttgatcttttgagagagatacaaggtttctgtttaaaaaggtaaagaaacaaaataactagtagaagaaggaaggaaaatttggtgtagtggaaactaggaattacattgttttctttcagccaaattttatgacaaaagttgtggacaggttttgaaagatatttgtgttactaatgactgtgctataacttttttttctttcccagagaacaaattaaaagagttaaggactctgaagatgtacctatggtcctagtaggaaataaatgtgatttgccttctagaacagtagacacaaaacaggctcaggacttagcaagaagttatggaattccttttattgaaacatcagcaaagacaagacaggtaagtaacactgaaataaatacagatctgttttctgcaaaatcataactgttatgtcatttaatatatcagtttttctctcaattatgctatactaggaaataaaacaatatttagtaaatgtttttgtctcttgagagggcattgcttcttaatccagtgtccatggtactgcttttggctttggtttctttctacattgaaaatttctcttcaattctgagcacatgttaacatttagaattcaagaggtggggatttttttttcccatggttacatatatatatatatatatatatatatatatatatatatatatatatataaagaacagggcaacaaatttttgcgttttctatttcggtagtacttttaaaccattatgtcatgtttctaggttaaacgttgttgtatttgaagaattttactttggcagaatt

SEQ ID NO: 68889 - DNA, 2448 bp, Homo sapiens
aaggtaaaatttattaaattattcttaatatatattgtaatttaaaaattaacagcttcattgtcttgataaaatttatggtatcttaaacatgtgcttgtttttctaagagaacattgaaacatagattttaaaacaaattgttgaaagattaaaaaatctgcctttgcacactgttacattgaaagtggggcatttgtcgtgaacattcatttcaaatatgtagtatcttcagaatatttgagaaggatttgtattatataattgaaaaatctgttaaattgtatttatgttaactgcttaattctaataaaatttccattcattttttagtatctgcatatatttacatcaaatggattcattcacttatttaagaggcagtactaattacctatagcgttcaagactgttaggtagagggtgtgtagtggtgagtacaacaggcgtgagccctaccaacacggagtttaaagcctagtagaggatatagacttaaacaatttcacaagtaaatacataattacaaattataatacatgctatgaaggaaacataggaggtaccagagaaggaagagtgctttgcatttttatttttaagaccgaagagtgctattggaggactttgagcaagtgaatgacatgatctaacctaccttcgttcattcattcattcattcattttcttccttcctggctcaagcagtcctcccacctgagctccccaaatagctgggactacaggtacacactaccacacctaatttttttttgtattttttgtatttttgatgggattttaccatgttggccaggctggtcttgaactcttgacctcaggtgatccacctgtctcggcctcccaaggtgttgggattataggtgcctagcccatggtgcctagccctaacctacatttataaactatcacttgctgctgtgtggagactatattgtgagattaacagcagggatacctgctaggaagcaattgctgcagattgcctgagacaaaatagttatcatggactagggggatggtggtggtggtggtggtaggtggttggatgtaggatatattttgaagataggtaaatggtgcaagattatgggtcagttttaaatgcttaagtaaattttctttgtaagacattttaggatgccatgttaagaatctctttataactgtcatttaaaaaaaaaccacatattttcttagcataatttcccatagtaacattactatgtcaaaggctatgaacatttgaatgactttagataaatactgtaattgctttccaaaaatattgtgcttattatgtcaccagaaatgtttgaattctgtctacaattcagtcttgccagtatagtacatttcatttagaaaaattttttactatgtagatggaaaaaataatattttagctgggagtggggggactatggggaataactttccttcatttaatattttattgtgagttagtttaagttactttattttatcgtagtttcctaaggctacaaattagtaaccttggtaacttatgtacctaatttaaaagtttacttttttgaaaggctggaaatactaattaaaaacgtaacaccttcatccttgtctttgctccattattaactagtttcattacagaatctctgtgttttaaaatcagatgggttttcataaccagtactttctcagagtggtaaatttaaaaaaatatataaagagaataaataatatttgttgagaatacttcaaataatgtgaagagttattaacttacagcaggagttggcaaacttttctataaagggccatatgggtctttgtcacaaagtcttgggtttttgtttttgtttttttaaacagctatttaactattcctagctaatgggcaatacaaaaacagtgggcaagatttggcctgtgggcagtagcttgctgaaaccttatttagactctaaattttttgaaagagtctacattgatgcatatttttttttcttcctccaaatacagttgacccttgaacaacatgcgtttgagtgaccatgggtccacttgtgatacacgtttttttcccaaccaaatgcagatatggagggctgacttttcatatacctggatgttcctgggccaactgtaggactagaggctgggggggtcttggaaccaatgccgtgtgtataccagggatgactgtttcttatggcctgacctgaagttggaacagaatctttattaatatataatttttgttgcgtttgttttctctttatatttatccattctttttagatcgtatttcatttaacactttttcttctttagtttttaccaagttgcactgaaaatagctcagtgactaattgcacttctaagagtgaggaccctagttaaaattaactctaaaaatactgaatttttaacctaaacctt

SEQ ID NO: 68890 - DNA, 2392 bp, Homo sapiens
ccagacatgtatgtatatcaagatgcctgcaggtcatatccaccaggacaacccatgagtacagggaattcaacatgcccaatatcactcatcttttccttcgccctcccctttgtactcatcccctgtcggtaagctctgttattttaaaaaattgaaatgtattcacatagcatacaatttacacttttcaagtgtacatggtttttagtatattcacaagggttgtgcagtcattactactaattccagaatgttattatcaccccaaaagtcccacatccattagcagccactccccaatcccttctcccaccagcctctaaaaactgctaatttttccatctctgtggatttgtccactctgattatttcatataaagagaatcgtacagacgtggccttttgtgtctggcatcctccacacaggatgatattttcagagttcgtctatgtttttgcttgttgatcattccttcattcctttttctggctgaataatactctgttatatggatataccttattttgtttatctgttcatttgatgggcatttgagtgatttcctctttttggcaattttgaataatgccactataaacatttatgtacacgtttttgtgtgaccatatgttttcacttctctcgggtgtatatctaaggtacagttgctgggttatatggtagctctgtctttgactttttgaggaactgccaagtggttttggtagtgattgtactgtttacattcctaccaacaattttacctaagtatttctcaaatctatttaatcttttcggtccatactgctgttgctgccttagttcagattttgtcatttcttgtaataattcgtagctcatctcccagtctctgctcccctctctccctccctcccccttcttctctctcttatttccacccatttttaacatttatagaagtcaaaagtctagttcagaaagcagaaaccatactagatatttcagcacagagaactaattaggtgttggaagactgaaaggcaaaaaaacactgaagtaacacagtaacatcaagaatgggcactactcctaagattcagggaatgctgggaagatttggggtttatcagaactggaagctcagaggaggggccccttgtcgctgaggcttaatccctgcagaggtgcctttggctgctactggtgaatctgagtgggtatgatgagtcagtgtctgggaagggccaaaacattttgtccctttctataatttgtcatgataatgctagtaatgaatctgatctcccttcctattttaaaaaccttttagtgattttgtataggatgaagtttaaaactccttacttaatatacacatgaccctccgtaagctggcccctgcttgattgtccagtttcacttcttggtgcttattctaaggcctctaagccttagagatcctctaagcctttgagatccccaaaccctggactgcggactggtacccacctgtgtggcctgtgaggaactgggctgcacagccggaaggaggtgagcattacttgccttagctcctgtcagatcggcagcattagattctaataggagcgtgaaccgtgttgtgaactgcccatgcaaggatctaggttgcatactccttaggagaatctaactaatgcttgatggtctgaggtgaaacagtttcatcctgaaatcacccccaactcggtccttggaaaaattgtcttccacgaaactggtccctgatgccggaaaagttggggaccgctgttctaagctaaagttatatggagctccttggttctgtgtcctcaacatgctgttctatgttttttacattctgtttgctccttcctgcttggaatgtccttcccctccccgtctttcttaatgcatacaaagttgatctctcctgtgtgccaccattgtacttcgtcttgcatatggtgttacattcattttattttaattatttatttacgttcatgtctcttccactcaccttagttgcttgaggtcagaaactatataatgtgtgacacggaatgtgacacctagattttcaataagtgtttctatgatacaagggagactgatgtgggtagatgggaatgaactcatcaacctctgtttacataccctaaattccctgtttcttccctattataattctgacagtctacaaccgtctttgatggcttataaacggaaagtgcggaacacatcattctacagtgaatttaaataacctttcggaagagtaacgtaaagtacttgagcattaattgagtaaaagtttctcatcttttcctacaggtgttattaagcagtatgtaaaaagtccttacaatacttaatacattaagaaaacatacaatttcaaga

SEQ ID NO: 68891 - DNA, 3577 bp, Homo sapiens
gcatattgacttctaacacttagaggtgggggtccactaggaaaactgtaacaataagagtggagatagctgtcagcaacttttgtgagggtgtgctacagggtgtagagcactgtgaagtctctacatgagtgaagtcatgatatgatcctttgagagcctttagccgccgcagaacagcagtctggctatttagatagaacaacttgattttaagataaaagaactgtctatgtagcatttatgcatttttcttaagcgtcgatggaggagtttgtaaatgaagtacagttcattacgatacacgtctgcagtcaactggaattttcatgattgaattttgtaaggtattttgaaataatttttcatataaaggtgagtttgtattaaaaggtactggtggagtatttgatagtgtattaaccttatgtgtgacatgttctaatatagtcacattttcattatttttattataaggcctgctgaaaatgactgaatataaacttgtggtagttggagctggtggcgtaggcaagagtgccttgacgatacagctaattcagaatcattttgtggacgaatatgatccaacaatagaggtaaatcttgttttaatatgcatattactggtgcaggaccattctttgatacagataaaggtttctctgaccattttcatgagtacttattacaagataattatgctgaaagttaagttatctgaaatgtaccttgggtttcaagttatatgtaaccattaatatgggaactttactttccttgggagtatgtcagggtccatgatgttcactctctgtgcattttgattggaagtgtatttcagagtttcgtgagagggtagaaatttgtatcctatctggacctaaaagacaatctttttattgtaacttttatttttatgggtttcttggtattgtgacatcatatgtaaaggttagatttaattgtactagtgaaatataattgtttgatggttgatttttttaaacttcatcagcagtattttcctatcttcttctcaacattagagaacctacaactaccggataaattttacaaaatgaattatttgcctaaggtgtggtttatataaaggtactattaccaactttacctttgctttgttgtcatttttaaatttactcaaggaaatactaggatttaaaaaaaaattccttgagtaaatttaaattgttatcatgtttttgaggattattttcagatttttttagtttaatgaaaatttaccaaagtaaagaccagcagcagaatgataagtaaagacctgtaagacaccttgaaggtcatggagtagaacttccatcccaagcagatgaggatttatttaatctcaaagacctccaggaggggacattccccaactgtccttgttaactcattttcagaacatatttattagcatattttacatgtaatttggatcttcatgttaaatttaacatcagtggagatggaaaataagcatatcgccttgtctttgaaatagccctatattgttagattgtttcttaggcttctttaccctgggttaagcagtcctaatactttagcatttattctacatctagtgtactaatttaaaaaaatcagttctgaaaaatttctaagaactttcttcaagttccaagctgtgaaatctagaacaggtcaaagtgccttattaacgtactgtactgtgtagtgtcttgaagagacactttgcgctgaggcaagttctgagggcattgggtggccttgggaagatatttatgcagtttagaacctggagaattgattagataactaatcataaggaaacgtcacatatttttggtactataaaaaagtggagaaataatgcctatttgcaaagatttgatttaaacatagaaacaactttatttggcttccaattttaagaatttacagcagtaaaggggaacagtctaattgaagtagactgcctatgcaatagtctctgtatatttacttttgacaagttaattcaatgtgtactatagttttgtttctttgaagaggtttgaatagtgcacccattttaatctgtattgcaaattcagggttacttggcagactctactatttaaatcagatgtaaaaggaagttttaatataattcactttatgcctgaaagttttcctgggattttggaaggtgattttactggaaatgctgtctgtcttccctgaaaatctgagaaattccattacactttgtttccaatcagaggtcatgagtgctatatgagtatatacagcatgacgtcatgaatgtgataaagtgggttaggaaaccttttgctaatgattgttaaaatgcaatataaatgttgaagaaataaagctaacagttaagcctttatttgggcggaaggctgaaaaagtttataaacttaaacctataactctgcttatgatttctgccaaaccagaagacttgactctgggaagcattggttacctgtgaactttgaaactgacggtccctgacgtagtttagtcacctgggaaaaggtatctgagattatctcttatctcccaagttacagtgagtctctgagggaactgacacattacattaagttcttggtgtagttaaactgtaagaaaggcaggagaacttagtagttaaatagttggttaaatggaaatgctgactccatgttattgtaaaaagttaaaaatttaggaggatatggggatttcactgccattgcaggttttgattggtatttaccaatccgtgtgggtcagagagaaaattagaaaggatatgactgcacattttggaattattagcagtttttctacatttaaaatggaaataaattttttaaaaatttaaatcaagtaatactgtattttttggtgatttagatttttcaaaatttacactaagagatagtaaggagggtggctattgtttctttcaataatgtctctgagaggttgtaactcatctaaggatacgtagctaataagtggtaggatttcaatttaaattctctgagaccaagttaagtagaatttgcactgtactcttgtataactttttaaaactgaaaattagctatctttcaaattaagaaaatatttactaatggagactaattcagatttgtaagtataccaaaatttgaacttagcctgctatctaatggcaacttagtggcagaggtatgatgtaaaatcattcaggtatgacacatagatggagtatgtttgtattcgaggctgtgcacataatcacctttacttgtattgtgaagtatatattgttatcttttatgaagcccactaaagagataatgaaatacctcgttattagggcaagattattgaaaactcaaaatagcccccaaacacaatacttggctagaaatatatacctttatagttcagagatcatttattatcaaaaccctgaagttttttttctaaggtaaaatttggtggaagaggaaaagtctcgttttaaaaaaatgtaggtagttacagagatcagaatgattagttgatcacttaccaaatatat

SEQ ID NO: 68892 - DNA, 1547 bp, Homo sapiens
tctaccctctttgtttttttgagagagagagtctcactctgtcacccaggccggaatgcagtggcgcgatctcggcccgctactacctccgactctcaggctcaagcgattctcccgcctcagcttcccgagtagccgggattacaggctcccgccaccgggctaattgtatttttagatacgggatttcaccatgttggccaggctggtctcgacctcctgacctcaggtgatccgcccgcctaagcctcccaaagtgctgggattacaggccaccacacccggcctacactcttaaaaattatcgaaggggccgggcacattggctcttatctgtaatcccagcactttgggagactgaggcgggaggatcgcttgaggccaggagttggagaccagcgtactcaacatagtgagaccttgttataaagaaaaaaaaaatccaggattaaaaaaaatctttgatttgtttgggatttattaatatttaccgtattggaaattaaaacaattttttaaaatgtattcatttaaaaataataagcccattacttggtaacatgaataaaatattttatgaaaaataactattttccaaaacaaaaccaaaacttagaaaagtggtattgtttcacacttcagtaaatctctttaatgatgtggcttaatagaagatatggattcttatatctgcatctgcattcaatctattatgatcacacatctggaaaacttgtgaaagaatgggagttaaaagggtaaaggacatcttaatgttattatgaaaacagttttgacctcttgcacaccagaaaagtcttagtaacctgaggggttcctagaccacattttgagaactgttttaggctatgcaaactggttggggggaggttggggtaggcagagagctagaagatacattttagtgtaattctcctcatctattcctaattgctttggcctacatttgaaataaagcgtggaggcaaacgggataagatacatgtttgtagtggttgttaacttcaccctagacaagcagccaataagtctaggtagagcagagtaaggcggggaactatgccgtgaccgtgtgtgatacaatttttctagcctgtggtgctttttgcggcagggcttaggagtaaggttagtatgttatcatttgggaaaccaaattattattttgggtcttcagtcaattatgatgctgtgtatatttagtgtttatctacaatatatgcacattcattaatttggagctactcatcctataataaatagttgtgcatttactcccatttttttctgcatttctctccttatttataattatgtgttacatgagggaaaggaggtgaaattaaacattcatattatttcaaaaaatttgaaacaactaactaaaaaatatgttttattttctgtatggtgtttgttatacaatctgtcaatattcatgcacctcttgggagacagtgtatgaaaagcaaagagtaacagtcacatggattactgattactgagatatattcacttgcatcttt

SEQ ID NO: 68893 - DNA, 1027 bp, Homo sapiens
tgcggtggaggttactcccgcggcgccccggcctcccctccccctctccccgctcccgcacctcttgcctccctttccagcactcggctgcctcggtccagccttccctgctgcatttggcatctctaggacgaaggtataaacttctccctcgagcgcaggctggacggatagtggtccttttccgtgtgtaggggatgtgtgagtaagaggggaggtcacgttttggaagagcataggaaagtgcttagagaccactgtttgaggttattgtgtttggaaaaaaatgcatctgcctccgagttcctgaatgctcccctcccccatgtatgggctgtgacattgctgtggccacaaaggaggaggtggaggtagagatggtggaagaacaggtggccaacaccctacacgtagagcctgtgacctacagtgaaaaggaaaaagttaatcccagatggtctgttttgcttggtcaagttaaacccgaagaaaacccgcagagcagaagcaaggctttttccttgctagttgagtgtagacagcaatagcaaaaatagtacttgaagtttaatttacctgttcttgtcctttcccctatttcttatgtattaccctcatcccctcgtctcttttatactaccctcattttgcagatgtgttctacatctcaagagttattacagtactccaaaacagcacttacatgattttttaaacttacagaggaattgtagcaatccaccagctaaccgcctgaaatagacttaaacatgtgcatctcctttttttttttttttttgagacacagtctcgctctgttgcccaggctggagtgcaatggcgcggtatcggctcactgaaacctccgcctcctgggttcaagcaattctcctgcctcagcctcccgagtagctgggactagtaggtgcacgccaccatgcccagctaatttttgtatttttagtagagacagagtttcatcatgttggtcaggatggtctccatctgctctgttgcccaggctgga

SEQ ID NO: 68894 - DNA, 1034 bp, Homo sapiens
attacaggcatgcgccagcacgcctagctaattttgtatttttagtagagacggggtttctccatgttggtcaggctggactcgaactcctgacctcaggtgacctcaggcccgccttggcctcccaaagtgctgggattacaggcgtgaactaccacgcccggtcattatatccttcttaataaacctgcattaattgagccaagtggtcatttctctgttctttgcactctgaaagaatcaaattaacacaatattgaaagaagcttgcacggcacctggaacataatgggagctccacagagtgtgcttatcaggattttaaaagagcttctatgagcaaaagcagaaattgcagactaactctcaaatccaagagtcacagttggtttggattttcagtttggtagctttttcccctcttgctttaaaggttttttaattctaagagaaagcccaaattggataaatttaggtgtggaaataaaacacatgttctcataatttgggagagatggatgaatctcttgggatatggggcttcacaaaatatttcaaattattttttaaatattacgggcttggcaaaaacaaaatgattttctaaaagaacttgtcttcttaacattcaaaaggtctcaagggaaatgtaatgtacatatttctgactcattttacataactcaatattgtttaataggaattgattgatgtttaaaaattcaataaatgtttgaactaagaagtattgttggatggtaaaactgtcttctgagaaaaaggttgaattagatgttttcttaaaagggtctcagtgcttggcctcaaactttaccaagtattttttcttcctttgtataagagaaaaaagtaattctgaataatctcccttttttcccagttacaaacaaaaagacagaaatttgaattccagaatattaatatattattgagcaacagggaagaaaccaaacatataattaattggggcataaaaagagaagagaaaaggagaaacagagagagagggaaga

SEQ ID NO: 68895 - DNA, 1071 bp, Homo sapiens
gaaaccccgtctctactaaaaatacaaaattagctaggcgtgctggcgcatgcctgtaatcccagctacttgggaggctaaggcaggagaattgtttgaacccaggaggcggaggttgcagtgagccgagatcacaccattgcgctccagcctgggcaacaagagcgaaactccatctcaaaaaaataaaataaaataaaataaagaatataatgtggagaagtaaaaaaatatataaaggtctcattaacaggactagaattgcgctatagtcactaagccacaactgagtaatagctctgatctagtagtataacttatcccctggtgacctcacacaaactcttggctccttgccatgcacatgactcagctcttctgtctccatttctctgtacctgcttatttttccaaccattgctactgactgtactcactcactttctctctgcctcatggctttgctacatggctgtcttccctctctccacttctgcatttacccaatgctgacccctccttggatgtttcctactcagaccctataagacagaagaaagggctctcctcttgcgccaggcttcatcataggccattggtcatcaggtcatgtttaattagtagggtgacagggcaaacaacaacaacaacaacaacaacggggaacctctctcaaaaaaccactctgatgcttttcagtttcagaagagagcaatgaagctggctaggagccataaaggcctgcacatagtttgttatttaactttgaaactaaacaaatgtgcagtgtttacatagagtaaactgtaccatcattatcattgtcatcaccacagccatatctaccttatataatatctacagcctcacaaacgttatcttacaaaaatgtgtcactctggtttgtcaagtattcttgtttatagagaatggtttggtacactaaatgaggattgttgattttagaaaaactaggacaagacggcatgaaggcaaaacgcagtcattttcaaatgggggggtattgcagggcagagggaggcagagacagagagggaagtgaagcagcaa

SEQ ID NO: 68896 - DNA, 1028 bp, Homo sapiens
tattgagaaagacaagtaaaagcaaaacaaaacaaaacaactctctatttcacacaaaaacttcatggaatattcaatatttaaaattttatgttaattttgatctttatatattattaaaatgttataaattacaattattcctctccttagctgagacctcggcaagtagcctaaaacccaacagtaaagagtggttcccaagtctcattcaaaatatgaatggagaacacaaaggtgtcacatggcctcccatgatttattctcctgtgtctcaattctgaacaaccatgagactaaataaatgtattttttgatgcttttctgattattttaagatttccaatacaaattcaagaaaaatgtcttagaaacttaattctgttgtgaaatatataatctctaaaatgaatcctgtatttgggtttccccagaagcctttgaaagaaaatttgtatatgtgtccagtaagatctcataaagcgatatgtttaaccaatctataaaatgctaattaattgcataagctgtagagtcagacatacctaagtggttccaaaccaccttactaactcctctaactcaaattctctgtgcttaaatgttctcacctgataaattgctaattctagtccctccctcaagagttctggggtgaattaaataagataaaatgaagtgtttggcacagtaccataaatacagttagctttgaataacaataattgttattatacttggctatatggcaatacataaaaaggaaaaggaataaatgattgtccctaccttcaggaatgttatcctctcactgaggttttgacatatgcacacgaaaaattaaatatactgaaaatcagaatatgattcaatgagtcttgtaaaagattagacttccagggacaggaagttgctgtggaatgcagtggcctaatatgactttaagggagagaaaggatttgagctggagcataaatgaaatgtagtattcagatattgagaaaggtgtggttcattccaaacatgag

SEQ ID NO: 68897 - DNA, 1019 bp, Homo sapiens
tataggcctgactgcagactaaggtcatagggattctgggaaggatcagagaaaccttcagagcacagctgaatgtgtggctgcaaatttttatggtgcaatttatcacaatggctaacatgatagtattaagaagtggggccgttagggggtgattaaatcatggaggtagatccctcacaaccaggattagcaatctcatagaaggggtggaggtgactagctaggtcctttgccttactggccctcttccatgtgagggcacagtgtccatctcctctcaaggatgcaacgctcaagatgttatatgtgaagcagagaccaggacctctccagacattgaacatgccagctccttgatcttggacttcccagccccttcaatggtgagaaataaacttctgttgtttacaaattacctagtctcagatattttgttatagcagcacaaatggactaagacaacagtcttttgaactctcttaggtcacatttgtccacctcttgtgttctgcttattttacgtaacttgtttatacccatttttgtatacaaataagctgtgttgttaatcacagtaagatgcctcatatggggaaccatgatttcatgtcttcttgaagaagtcttacactcttctctagttataacaaagaatttggaaataaagaatcatagagatactcttttttccctatgttctgagagcacatttacacagacactttacagatacattaatgccaagtatccctgccaggtacgtatttattatactagttgggataaggaattcatgctgctctaataaacagacccctaactcctactgatttagcaaatgaacatttactattggtttatgcagcacaaggtggatgatcctacttggtgggaccacgcagtcattcagagattcagattctttccagtctgtggctctgctttcccctggggccttggagtcctctgctagatcctcagtaggcagccagcagacagggaagagagagtgtgga

SEQ ID NO: 68898 - DNA, 1008 bp, Homo sapiens
attaagtcagcaagtacttattgagtgccctttatgcgccagaccttgctttaggtcctagggatacagcaatgaacaaaatagccactgtccttaagaagcttccatgctagcaggagcagacagatggtagacatggcaaataacaattgcataagcttaggtgctggcaaataccagaagggagatatctgggtgtggtgcctcctataagcttttctttatcccaccttaactaagttagatgctttggacatatgctcttctgtaagcacttgtgtcatcacactttagcacctctgtgttatttcttgtttaattgcctatctttcatgctggatcactataggtttggtaagggcaatgattcattctagataccatcatttcctaatgactagtttttgcctagcacatgtcagaggcttagtaaatatttgtcgaaggaatgttacttcttaagtatgaattaattggtaggctgttatctgattgggtaaatgaaaatatatatagttaaattaaaaagttgggtgaaattaaaatttatcattcttctgaagtttacacctgttcagatatctacagacctatgtgcaatatattgaactatcaaacacacaagttgatcaaacttatttacttcaaatcacccaattcttacagattatgaattttatatattactgattttttagtttttcttctcatttgctaagaaagccagattaagaaagaactttgtggccgggcacagtggctcacgcctgtaatcccagcactttgggaggccgaggtgggcggatcatgaggtcaggagatcgagaccatcctggctaacacggtgaaaccccgtctctactaaaaaatacaaaaaaaaattagccgggcgtggtggcgggcgcctgtagtaccagctactccggaggccgaggcaggaaaatggcaagaacccgggaggcggagcttgcagtgggccgagatggcgccactacactcctgcctggg

SEQ ID NO: 68899 - DNA, 1260 bp, Homo sapiens
gaaagttagagaaattttaaaaatgttcttaagatcatgcaaataatgaatgatggagcttgtattcaaactgtagcctgtacttcccacaaacaggcttttatctaagctgtataactcttcatcacttgatatacaatgagtaattgccttttaaggtaacaggggaaggcaggtacttccaggggactccggcagtacccctcatccctgaactacagatccactgaaggccctggcactgctggctaatagaaaaagtccgaatgaagtccaagatgtagtgattccaggtctccaaaggtcctgcttgcattgcccaaagggagcttgtactcaggtggcaatttgtttttattgctacagttactttttatcagtgctgctgttattctatttccttcaggatttttctctatcattggtctctctcacgtttatattcctcccctctatcagtccccttctcttgttatgggcatactcaagtctcctcattctaaaaaagcaatcaaccactagcaacaagaaatatttcttgactctgattctccttcccacggttgctccactcttacaccctcttctgcctcttgacagagtggctgcctcacttaatatctacaaatcattatttttcatttacttttgaatcaattgccgcctggttttctcttcctccactcactgaaactaattgaactatttccagcaagtttcatgatgctgatacccaatagccttcttgctggaggaaaatggaaatataaatgacattttatattggaggaaaagggaatataaatgacatttgcggaacacatcctgtgagtcatctttctgcaatgttctttgtctatattttcttatctaaccctcatagtaaccctgtgatattttaaatcatcaatattattattatttaaaactcaggaataggttcagcctattccagtaaaataaggtagagacctgactcaaacctagttctgtctgactcgaaattccaggttattttattatacaaggtgtaaacaaacaaaccaacaaaaaagtctaagcccccacactgcccgcccagccaactgaatagaccctttctcttggccaagggctttccaaagttaacctgaaaaacttgttcaggccatgatgggacgggggagccagacatgcctcattataccttcctcccttttggaattactgatagagtagactctttaagtctgataggaaatattcaccatctattctcac

SEQ ID NO: 68900 - DNA, 1650 bp, Homo sapiens
ccgatattttgaccttcaatctggacattgtcattattggcataaacccgggtctaatggctgcttacaaagggcatcattaccctggacctggaaaccatttttggaagtgtttgtttatgtcagggctcagtgaggtccaggtgaaccatatggatgatcacactctaccagggaagtatggtattggatttaccaacatggtggaaaggaccacgcctggcagcaaagatctctccagtaaagaatttcgtgaaggaggacgtattctagtacagaaattatagaaatatcagccacgaatagcagtgtttaatggaaaatgtatttatgaaatttttagtaaagaagtttttggtgtaaaggttaagaacttggaatttgggcttcagccccataagattccaggcacagaaactctctgctatgttatgccgtcatccagtgcaagaagtgctcagtttcctcgggcccaagacaaagttcattactacataaaactgaaagacttaagagatcagttgagaggcattgaacgaaatacggacgttcaagaggtgcaatatacatttgacctacagcttgcccaagaagatgcaaagaagatggctgttaaggaagaaaaatatgatctgggttatgaggcagcatatggtggtgcttacggagaaaatccatgcgacagtgaaccttgcagcttctcttcaaatgggctaattgagagcctggagttaagaggagaatcaactttcagtggcattcctaatgagcagtggatgacccagtcatttacagaccaaattccttcctttaataatcactgtggaacacaagaacaggaagaagaaagccatgcttaagaacggtgcttctcagctctgcttaaatgctgcagttttaatgcagttgtcaacaagtagaacctcagcttgctaactgaagtgttttattagtattttactctagtggtgtaattgtaatgtagaacagttgtgtggtagtgtgaaccgtatgaacctaagtagtttggaagaaaaagtagggttgttgtatactagcttttgtatttgaattaatcatcattccagctttttatatactatgtttcatttatgaagaaattgattttcttttgggagtcacttttgatctgtaattttaaaatacaagtctgaatatttgtagttgattcttaactgtgcataaacctagatataccattatcccttttatacctaagaagggcatgctaataattaccactgtcaaagaggcaaaggtgttgatttttgtatatgaagttaagcctcagcagagtctcatttgttagtttttagtggtaactaagggtaaactcagggtttcctgagctatatgcacactcagacctctttgctttaccagtggtgtttgtgggttgctcagtagtaaaaactggcccttacctgacagagccctggctttgacctgctcagccctgtgtgttaatcctctagtagctagtaactactctggggtggcaggttccagagaatgcagtagaccttttgccactcatctatgttttacttgagacacgtaaatatgatagggaaggaactgaatttctccattcatatttataaccattctagttttatcttccttggc

SEQ ID NO: 68901 - DNA, 1019 bp, Homo sapiens
aaatccagtaagccaataattttaaagattctttatctgcatcactgctgttttttactataattaaatgaacctcatggaaaggttgaggtatatacctttgtgattttctaatgagttttccatggtgctacaaataatccagactaccaggcctggtagatattaaagctgggtactaagaaatgtcatttgcatcctctcagttactcctgaatattctgatttcatacatacccagggagcatgctgttttgtcaatcaatataaaatatttatgaggtctcccccacccccaggaggttttatgattgctcttctctttataataagagaaacaaattcttgttgtgaatcttaacatgctttttagctgtggctatgatggattttattttttcctaggtcaagctgtgtaaaagtcatttatgttatttaaatgatgcactgtactgctgtttacatggacgttttgtgcgggtgctttgaagtgccttgcatcagggattaggagcaattaaattattttttcacgggaccgtgtaaagcatgtaactaggtattgctttggtatataactgttgtagctttacaagagattgttttatttgaatggggaaaataccgtttaaattatgacagacatccactagagatgggtttgaggattttccaagcgtgtaataatgatgtttttcctaacatgacagatgagtagtaaatgttgatatatcctgtacatgacagtgtgagactttttcattaaataatattgaaagattttaaaattcaaaaaaaaaaaaacaaaaaagtcaaaaggtatccacatgatacttacactcaaaaaaggtggcaaaggaagtaagcagaccacaagatgtctttaaggaaatgactaagaaaccagaaagtagagatcaggaacatttagtgatttttggccatcccctgaccttcctaaacatcataacgtcactgcatgctgggggactgacctgcaaagggagcttgtcaacttt

SEQ ID NO: 68902 - DNA, 1121 bp, Homo sapiens
aattaaatgtcctttattttctccctcatagcgtaatcacttttgcttctgaatatttaccacaatttatatattatttaatcacttagggtccttttcttgccctttaggttaatatgaagttgataatacctggtttaatcaccagtgcccagtatatgtagtaggtgctcaataaatatgttgatataatgagtaagatcgtaatatcagtttgtatctttatcttttttttttgaaatggagtcttactatgttgcccagttggtcttaaactcctggcctcaagtgatcctcctgcctcagcctcctgagtagctgggactacaggtgtgtgccaccatgcctggcttctgtatttgtatcttgattgccttctttatcactgttaaatttgcttttcatgatagaaaagccagacccacacttttctatattccttctttgctggttatatgtataatatgaaacggcctttgcaaatatcaggtaaaaatgcatgtaggttctgtgaaatattcgtagtaataaattgagacaccttttaattagtgttacccttgtgactttctgttgtacataatcctttttctaaatacatcattaaaataattatttttttatcagcataagcttactgaaaggaaaaaaaatcttactgtgccttactattttacagagcgtcacatgataacacgttagtcagctgctgtcggctggtggtgccagacatcaaaggaagattgggaaaactttagtagaaaaacaagacctagagttctaaggatgctcagtgctgtccagctgttgatgtgacttgcatggtaaccagacatcactggaccatacacttaagagagaggaggagttttttttaaaaaaagtgggagccacctagaagtctggaagttcttttcttctctctcactaaagcattccttgttttagccaaaaaaaaaaaaaaaaaaaaaagtctcatgaccttccaaggccaaggaaggcttacagctttgagtatttttgtcatgtggttgctctttacgaaatattagcttgatgtcctctaactctgaagtacttatgtctgttattgatgtttgtaatctctacttcttacataa

SEQ ID NO: 68903 - DNA, 2056 bp, Homo sapiens
attacaggcatgagccaccgtgcccagccttaaacagctttattgagatatcattgacacacaataaactgcacatacctaactgtacaattttacaagatttgatctatgtatacacatgaaatcattcccacatcactttcccaaatttcttttttttttttttttttttgagacagggtcttgctctgttgcccaggctggagtacagtggcatgatcttggctcactcaaccactgcctcctaggttcagtcaattctgcctcagcttcccgagtagctgggactacaggcttgtgccaccatggctggctaagttatgtatttttagtagagactgggttttgccatgttggccaggcttatctctccacctcaaatgatccgcccaccttagcctcccaaagtactgggattacaggcgagagccaccatgcccaccccaaattttctcattctcctttgtaatttatcttcctttcattctcccgtttcctctaaaccactggtctgctgtcactatagagtagttcaaattttctggaattttagattaatggaattatgcagtaatatacttttttttgttgttgaggcttcttaaactcagaataatggtttggagattcattcatgttgatttatgtagtagtagtttattcctcttcattgctgagtagtatttcattgtgtgagtacacagcaattcatttatctacctattgatgaacattagatttgttgctaatttttggctattacaaataaagctgttatgaatacttgcatacaagtattgtatagacatatactttcatttatcttgggtaagtacccaggagtggaatggctggatcttatggtaggtgtatgcttagctttttaagaaactgccaaactgttttcccaagtgattgtaccattttacattcttaaccaccagcaggtaaacatgctgtttcctttgcatccttgtcaacacttggcatagttggtcttttttagacatttgtggtattttattgtgggtttttaaaatttttatttttttaattttaaagacagggtcttgctctgttgccgaggctggagtacagtagtacagtcatagttcccaagtagctaggaccacacacatgtgccaccatgcccggctgttttttaaaatattttattttgtagagatgaggtcttgctatgttgcccaggctggtcttgaactcctggcctcaagcagtcctcccaccttggcctcccggtgttgagatcacaggcatgagccatgtgtccagccatcattgtggttttaatttgcatttccctaacaactagtgatgtaaagaatcttttcatgtgttttttatgctatctttgtatcttctttggtgaagtgtcctagtcttttgctgatgtttttattgggttgttttcttattattaaattttgagaattcttatatattttgaatacaagtgtttcatcaaatatatgctttgcaaagaatttctcccagtttgtgtctcatcgttttcttaacagtgacttttgaaaagcagaaggttttaattttgatgaggttcaacttataaatttgttttttatagattgggcttttggtgtggtatttaagaaatctttgcctagcctaaggtcataaagattttctcctatgttttcttctagaagttttatgttttagatttagatctgtgatgcattttgtatttcttacatggtgtgagttatggatggaagttaattttctgcatatggaaattcagttgttccaacactgttgaaacgactattctttctccattgaattgcctttgcacccttgtcaaaaatcagttgtctgttatatccttttttattgtatcagttgatatacacatggtattacacagtattgttaattatcacagctggatgaccaactaaatgaaaagcagctatctccaagccagtacttgataatgtgtttttgtcacgtttaatcacatttctagtttccttacaatagcctttgtggaaggctttcctactcagacatt

SEQ ID NO: 68904 - DNA, 1063 bp, Homo sapiens
ttccaaactggtttaaacaaaaatgattacttagctatttaaaaaacaattgatcatatctctttcttgtcttatcccttctcctctgccactcttctgatttcttgcataacatttaataacaaatcataagactaacaaggatgcatttcaattccttatggtttatggatcagtttattaggtcaagggtgtggtggggcatgggggtggaggaattatggtagagagtatgaacatttgctaagagcagcatgggataggtgaatttacccagtatgggagtctggcagaagttttaaaatcaagtacatctgagttcaaatcagggctccaccgtttactagtcacctgaacccgggaaggtactaaatctgaaatcttagtttcttcatgtgcaaaatggagactgtaggattgaccttgacaaggttgtgaacagtgtctgaactgggcagagtggtgcctgggacttatttgttgagtgcctattattactttttaaagcaaggaaatgcatcctgatcaagtcacctaatcttaacctcaactttgtataacctgtataatgggaatattgataaattaatgtgaaaaaagtaaaaaaaattacagccatatataagcataaggggcttatttcatgaaggcttcctggatatccaccagccattagtgatttctcttgtatgaactctgctgtagcttttttccaaatctctttggtgtttatcaaacatttatttgatactattgttactaggcattagttacatttcacaagtactgtagttagtggaatgaaacccatatcttcatcattgtaatccctgtggtattttaaatatgataagagcttggtaaaggtttattatataaataattaattttggtattaccatttttctctgctttgcaaactaatatagcttaatagcatcataatggatttatttccatagaatatctaccttattgtttctgtgatcatcttattaacatttcatatggactatgtaaaacctaagataccttccttactaacattgtgtattgcgtttag

SEQ ID NO: 68905 - DNA, 1056 bp, Homo sapiens
tagtcccagctacttgggaagcagaggtgggaggatcataagcctgggaagtcgaggcttcagtgagctgagatcgtgccatcgtactccagcctgggtgacagaatgagatcccgtctcaaaaaaaaaaaaaaatccatatatggtcaaaaggtattttaggctctctactgatcccttggtaaaagatgctgcacctactgcaagattattgaggagcactttgtcatggagatcagggttggaatgtttgagccaaagaccacaaaaaactgacagtaatcaattatcgttcctgcctgctgcttagcgtttacgtttctagaaaatgctctcttcagttttctcctctgaaatctgagacacagagccgagaaatagaaaatagtttatgtcaaaatatttttccgttgataggccacctgacaagcaaagagattgaggtgaaatctcatccaaattaatgtgtgaggccgtggaaaactgcttatgttttgtgtacgtctttaaagttaagtaagattatacttgaagttacttatctcagtttgcaaagaaacagaaattatacctacttattttttagtgatgttgttagaataagaaaacaatacctaaagttagcggacctattgtgttgtaagaaatgctgatttggatgtgctttggaaaaataaacgaaattaaagaaaataactcattagcaatgttttttttcaggtttgctttgcctgttcagtggtacaatttctcttttttctttattgataagaataaagctgtgcatactttaagaacacaaggcggcacttctctataactctgtgatcacatgatcacagaccccactaactaactaatggttactttcaagtgcttgtggccagttggagtttataatttgttaccaaatcactaattatctttatttttaacctgtattttgcctgtcgagcagtcataatctctaaaattggagactcagaaccttcaactataaagagtttgtttaactagaggcaggaagagctgattttcccttgaaatgcatggaaa

SEQ ID NO: 68906 - DNA, 1067 bp, Homo sapiens
taggtttgacatgcaaaactaattgaaaaaagccgtataaaattttactgcagtgttagttgaagaatgtccaggagtggttgtgtttatgataacagtaagaattctggaaacctcttccagttttctccattatccctcattagcatggtgctattccacaagtctctcttctaccagggaactgcatcctgtccctcgcccctcagtgatttttctcatgtctatcatgtagatcactttagcctctcaggctgtttgcagctctcctcttctccattaccagcatgtctgcattagggagaggtgtggggcaggtctagcctcacatatgttttagctggggaaagaagaacattgacaacccatgttattttttattgtattcctttaacaaatacacagtaagtgacagtgcttcagaagccctgctttttaatctgtctggggaagggtgacctctggtggctaaaaccataagccccaatttcaagaaacaaaaagatttctttttactgttgtttacattatattcatatgtttatgttttgtcactttttataatgtactatatattcattagaagtaaatcagtgtcttctgccaccgtgtttaaatgcggcatcttctgttaatcatcagctgtgctctgtactcatgattggccttaatttgagatccaaaatatttccttaacagattattttttgttctgaggaacaagatcatttccttggcactcttttgttattaaaacttaaaacttctctgttggtttaaatgttgaccattattattataacagaaaaacagttttacccactggttaaaggaaaaaaaaatcaatctcaaactatgacgtccgagttatactcctggctactatttatctttgaatcagccatctaaccaacatttaattggcttgcttcctcagagatatttattcttaacttgtttagtctgccagtaaatgaccaccaaatcgtcagttttgtttttattacagtctttgctggtttgcttatttgtgcatcactttatttaaaaagagtttagggcaacta

SEQ ID NO: 68907 - DNA, 1080 bp, Homo sapiens
aaaatatcctgtttctcatcatcatgttagttactttgatgaaatacatgttttggtttacatttatgtgcatgatgtcagcagcttacagtacatgaaggaaacttcccatatcccagaagtagtgacttaggagaactatggtcttgagatgcttggaaattttgtatctggaaaatttaccaatcagggaattttccattgagcttgcttttttgaaaaggtccttcagtttgtagcagtttgttagcccagtttatcctttcttgtgatgagctagtcattttgcattttcacatataaaactttgaaatgtcttttaaaaagtttatgggaatattgtgtatgttattgcttcattttccccgaaaggaagtgggagaaatttgagtcattaatatacattaaaattctgtgtatgtttttcgtactcatagcaggttgttccaaatcatctaggtaacaaactttggaatgttgatagaaaacaaacttctagcactgtttgtatggagaagtatttcccaaagtcaagttctaggactcttgggactgtttcatggctgagtcaaaggttcccttgtgacatgtgaatttttaggaaggagaacaatgacaaatttttttgaaattgctacattagcatgcaacaaaaaattctgagggaaatgtttcctggcagtttttttattatatttacctgcaatttatagcttaagggagttttaacccatgaaacctccaaatctattaaaagtgaaaagagctagatagatttcattagcatgcgtaatgcccagtttccatacccatctataatcatttaaagcaggaatcataatgggaatatgagctgagaaattctgttgatgtttgaaatgtctggagtgtcaacataattaaacagcgtatgtacacaattggccctgctccaaaaccagtgattatgtgtctaacatcaatccccatgtgtctacaaagctgttagagtaaacatctggaatcttttactaccaaagctaaaatattacataatcagttaaaagaaagagcttcctacccacagaggtcctgcagaga

SEQ ID NO: 68908 - DNA, 1046 bp, Homo sapiens
ttaaatcaatactgcagggcttttctgcagtactgcttaaaatactcgaatgccaattttattgcctctgggatcacactgacattttctcattagtattgtgcccattccccccctagttaagcataaactctgtttgtttccgtcctgtacaattagtgcctatattattcgacaaacacacatggttcacccattctgtgccagccactatgctgaggggttccagaggtaataggacaatcagaggagtagccagataaccactttgatatgaaacaaaactacctaatgctttgaaagcacagggagagtggccacctccacaccaaaaaactggggaaagctgcctgttgaaggatgtgcaaaaattagcagagaagaatgcaaagcatttaccaaggaaggagagcagcatatgcagctcagagatgcttgggagagtgatagattgagagaacagaaatgtcttggcataagggtagaggggaactgggagagttgcaagatgattaaggggtagcacatcagtaacctgcgcagagtttggattttatcctgaaggcagtggagagccgttggaggattctgaccaggggaatggaatccagttttatttgaaaaacatttacctctagcagtaatctgcaaagtggatgtgcaaggagggagacaggatgggaaggcagggagatcagttagcaggcaattgcagcatgcagcagttttgttcctaagtacaagtgctcaaagcagcgttatttgtaatagacaaaaaactggaaatccaattgcctatcagcagtagaatagatgaataaattgtggtttgtttattcaatggaaatctctactgcagagagaaagaatggacgattgctatgcacggcaacgcagatgaaactcagcaaacataatgtaacgccaaagaaaccagacaacattacatatgatgcagtccgtttatagagtccaaaaacaggcaaaactagtctgtgatgataaagatcataataatagttgcctttgagggagggtgttgggac

SEQ ID NO: 68909 - DNA, 1029 bp, Homo sapiens
tcaaagtcatagagctttaacattgtatatggtcgaaaaaatataattgtcagtaagctatctggagctgggcttttaataagaaactcaactgagtgcccttgtagcactcagtgtaaatttgatgctcaatgaaaaactaaagttactagttatattcatttgaaaagtttatcctaaggaaaagacggaattcttttttttgttttttgagacggagtctcgctctgtcacccaggctggagtgcaatagtgtgatatctgctcactgcaagctccgcctcccaggttcacaccattctcctggcctcagcctcccaagtagctgggactacaggtgcccgccaccacgcccggctaattttttgtatttttagtagagacagggtttcgtgtgttagtcaggatggtcttgatctccagacctcgtgatctgcccgcctcggcctcccaaagtgctggaattacaggcgtgagccaccacgcccagccaaagacataattcttaatagaaggatcagtattctcataccaataactttaacttgattcatagcatgttttatactagatgtgactgaaattttaaaatatgaattacaatttctaatatctgcttacaatttttgaatgtgctgctgctctaggtatgtggattagtaacctaaaatgtctttattttcagatgctcttattagtataaatgtttctgaaaatttgcattgctattgatttgtccttccataaaaaagaagtttatactttttaagttagaactttcacttctgtcccagacctaactcttgaattcaaactgtgtgccgagccctgtactagataaggtacaatttgaaaagacattatttcatgccatttcttacaaatgctgcttggaaaaatatgcgtcttgactcaaatcacacaagaggtagtagactcgggatttgaaccttggtgcatcttgtttccactaatcaacattgtctcaaacaaaatgacttattccagaaagtatattttaatagtgtg

SEQ ID NO: 68910 - DNA, 1003 bp, Homo sapiens
cgaactggaaggtacacccttatagagaaatggagagatactgaaagacacttagcacctcatgaaaatcctatcatatccttaaacaaatgggggcagtatgctagtgatgtgcagctcattctacgacgaactgggccgtctctcagtgagcgacccacttcagacagtgtggctcgaattcctgaaagaactttatacaggcagagtctgccccccttagctaaactgaggcctcagattgacaaatcaatcaaaaggagggaaccgaaaaggaaatcactgacatttacaggaggtgccaaaggattaatggacatttttggaaaaggtaaagaaactgagtttaagcaaaaggtgctgaataactgcaaaacaacagcagatgagttgaagaagctaatccgtctgcagacagagaagcttcaatccattgagaaacagctggaatctaatgaaatagaaataagattttgggagcaaaagtataattccaaccttgaagaggaaattgtccgtctagagcaaaagatcaaaagaaacgatgtagaaattgaggaggaagaattctgggaaaatgaattacagattgaacaggaaaatgaaaaacagctgaaggatcaacttcaagaaataagacagaaaataacagaatgtgaaaacaaattaaaggactatttggcacagatccggactatggaaagtggtcttgaagcagaaaaattgcaacgggaagttcaagaggcacaggtcaatgaggaagaggttaaaggaaagatcggtaaggtcaaaggggagattgacattcaaggccagcagagtctgaggttggaaaatggcatcaaagctgtggaaagatctcttggacaagccaccaaacgcttacaggtagggacactttgataaatagaatgtttggcccatgtaaaatagtatcttcttggaatctccttttcatcattgtcaatttttccttatattcaaagaattagaaacccagcct

SEQ ID NO: 68911 - DNA, 1016 bp, Homo sapiens
atttctgtaaacatcttccaagatagaactgtaatggattgaggaaataacacagaaaagacaaaaacttttgatttcaggcatgcaaagtgcttgggcagatggacagttcccattgtgcattgcctttgataaatttggccttaatttatataacgatgctgtgttcacatccctctcctacctaaagttgtctttattggtttatattgtgttaaaattagcttataattattacttttgtattgtgttcagttttttaagttgcatgtttatactatttgctacagtatttttaagtttggggtgaaggccatcagctgtatcaaaaagacaaaacaatcactatttattcagtattgctgctttacatctccagaataagctttcgatgccaggacagtgactgcctgaaagctgcaggagctcttttcaatgcattttatatatttttagaaaccaaataaatgcagaaaactatttcgtatactaattatattaaaccagcagaaatataaaggcaataaagtatatacatatatatggggggaggggaaagattaaaaaatagatttacagccagacatggtgatagccctaaatgtatttctcaatatgtttttctttattgaccctaggaggatttgagttgctgcagctttaaacagaaaattgccatgttcactaattgtgagcacataaatatgcttttagtactgctttgcttatgtacaaataaatctgtaatatgtattatatgtaattatccttttctttgactttcattttaaatgtatattttctgatcattatgagctgtaaaacaaagaatcaatattggatattctcccaaataataaattttcaggattcattggggcattacagttgtcagtttgtttcttacatcctttatatttttaaatacaattttacttcctttaaaagataccaaagagaatagtggcacatatcactacacataattacatttttcatatatacttaaagaatca

SEQ ID NO: 68912 - DNA, 1050 bp, Homo sapiens
tctctgatggagtatctgggactagtcctcttgccttaactgtaaaactggatgaaatatcaaaggcaagtgttttcagacattggcgaacaagcaatacgaggcagagtaggcaatgcaagactgcaatcaatccctgaaggcagggaaacctaagaggtgaacgtcatgatgagcctggctccctgcctggggaaattttcctaactgcagagtagtgatccagaatgcacgcagagcacagcagtccctctgaactgaggaggaagagatcagaggttggggcagctgaagtgccagaatctgcaaggcaaggtcccagggagatgggagctgtgcaggttacagaaataaaattatgagttcatactaatacctctacttccaatataattgcactaggctttccctagccttcccccagcccatatttctggctccctttcagaagcccggtttgagagcagacaggcaaagtcaccatttccactgtccagtttcctagccaagggaaaacctgccagtgataaggtgcgtaaaatgagggatgtggcccaagagtcattggtttgaaacccagagaactgatgacgtaaaactcagagaataacagatttagtaagggtgcaccaaacataaatagaaatgtagggggtagagaacagcatatttgccatctaaagccccagttgtgatattctttaacaaaaattcccagttatttagttgtagtttttttaaattgactcacttattactgcttaccacagctccttcctttctgagtactgtattttgattcctttctttattgtctggtgtccatctttcagtaacttttttcaagaaagcttcgtggatttggtctcccttggttccatgattatcaccttggccacatatcgtaatgaacttgaaaacttttgaaaaactactgacttttgggcatcatcccagaccaattcagtcaggttctctgagggtaagatccatgcaacagtattttaaaaaaaaattcctctagtgagtctaatatgcaaatgaatatct

SEQ ID NO: 68913 - DNA, 1247 bp, Homo sapiens
tgcttcctctcgccttctgcagctgccgcctacgtgcagcccttcctggacaagagcggcctggagaagtatctgtacccggcggcggctgccgccccgttcccgctgctataccccggcatccccgccccggcggcagccgcggcagccgccgccgccgctgccgccgccgccgccgcgttcccctgcctgtcctcggtgttgtcgccccctcccgagaaggcgggcgccgccgccgcgaccctcctgccgcacgaggtggcgccccttggggcgccgcacccccagcacccgcacggccgcacccacctgcccttcgccgggccccgcgagccggggaacccggagagctctgctcaggaagatccctcgcagccaggaaaggaagctccctgaatccttgcgtcccgaaggacggaggttcaagcagagtgagaagttaaaatacccttaaggaggttcaagcagagtgagaagttaaaatacccttaaggtctttaagggaggaagtgtaatagatgcacgacaggcataaacaagaacaacaaaacaggtgttatgtgtacattcggagttcctgttttgctcatcccgcaccaccccaccctccacacactaacatccctttcttccccccaccagctgtaaaagatcctatgcgaaagacactggctcttttttttaatcccccaaataaattttgcccccttttaggccatgttccattatctcttaaaattggaacctaattcgagaggaagtaagaagggtctgttctgtggctgagctaggtgaaccccggggtaggggaaagatgttaacacctttgacgtctttggagttgacatggaacagcaggtagttgttatgtagagctagttctcaaagctgccctgcctgttttaggaggcgttccacaaacagattgaggctcttttagaattgaatttactcttcagtattttctaatgttcagctttctaaaaggcatatatttttcaaagaagtgaggatgcagtttctcacgttgcaacctattctgaagtggtttaaatggtatctcttagtaacttgcactcgttaaagaaacacggagctgggccatcgtcagaactaagtcagggaaggagatggatgagaaggccagaatcattcctagtacatttgctaacactttattgagaaattgaccatgaattaatggactcatcttaatttcttctaagtccatatatagatagatatct

SEQ ID NO: 68914 - DNA, 1742 bp, Homo sapiens
ctgccccgcacccctgcacccccactcccccctcctcctgccgactgcatcgcctttgggaagatgaatagcttggccgaagttgtttttcctttccggtggccctgatcaggtgtccccgccccctcctgccgttcgccttctctcgccgccttctcccgacgcccccgcccggcccggcccctcctcccccgcccccctccgggctggaccgcggatggtacgttccgcacgtgagctgggtgctggtctggccggcgacgcgcgtgccctgtggccaaacactgcctggagtgagagcaaactaccagcgcagtggggccggcgcgagtgtgcgtgtgtgtgcgtgtgtgtgtgcgagcgcggtggaggggggggaccaactgcttcacactttcaacactgcactgaagagggagagcgagagagagactggagacgcacagatccccccaaggtctcccaagcctaccgtcccacagattattgtacagagccccaaaaatcgaaacagaggaaacgaacagcagttgaacatggacgaaggaattcctcatttgcaagagagacagttactggaacatagagattttatagggtaaggtgcacgcacccttgcgaatatctgtctaggctttggtttgatttttttcttctccagaaagtggtatggagctggcgagggcagagcccctccccgaatgggtgcctgatgctgatttctgttttgcagactggactattcctctttgtatatgtgtaaacccaaaaggagcatgaaacgagacgacaccaaggtaagtgtaagttcccgatattcctcataacctgcatgggtagttaattagagccattgatttcacagtgaagctctgcccgcaaatatattccagcccctgagcttccccaactgtgaattttaagtggcttgctgggtactctcagggggatattaaacatcatacctgaatttaaattgcattgcagaacagtccagaggaaagaggtttcttgggtgtagtttatcacatagtatgttttatggtgggggggcggggggggcagacgagggtaatatccaataagtgaatgtttcgcttactgttttctcttttccatgactctcatatattaaggatacctacaaattaccgcacagattaatagaaaagaaaagaagagaccgaattaatgaatgcattgctcagctgaaagatttactgcctgaacatctgaaattgacagtaagatgcacattttcattctttgctgctctccaagggcgtgttaatagtctggtgcgactcccagaaaatataagaataaatgtaaatataagttcctgacttaaaacttgtgctataccgtacagagtttcccgcaaactggagtaggtgctcccagctgaaggcaagaaatcatttataacctgtcttgtggaaagctcaagaagtaaaagaacagtacttctttcaaagtgtttgcttaaattgctgtgctgaatggacagccaattaagccaaatgtgtgtttttaagtaaccaagtgcccgtttcttttttgcaccactgcagactctgggacatctggagaaagctgtagtcttggaattaactttgaaacacttaaaagctttaaccgccttaaccgagcaacagcatcagaagataattgctttacagaatggtaagtcagttcagggaggccagcctaccctgatgaagcggggcagcccacagggg

SEQ ID NO: 68915 - DNA, 1009 bp, Homo sapiens
acaacataacaggatgtgattgccttctctgggattcagacaggctctgtcaatgtggagcacaaaaggagattttcatataacttgttaaaaacatgttctaagtcatgtataggctaagattttaagaagatctgggggaataaaaagccaacagtaagccccaggaaagggttttttgagaccatatgtatgctattaaaatatattgagattaatacatgaaaatgcttaaaagtgataggaattattgagaaacttatgatggtggcattgccttttataaacatggagtgaaagccatttgactcaacgtttgctgtgcttaaagaattgcttcaggacccgagcgtttttatgtatgctgttcctgcagttaggaaaaaaaaatccaagaaatgtattgaatactcaagaaaatgccacatttcaattacatatttaaaactgtatctgtaagggcttttcaaaatgtagcaagataaaaatctcttattcaaattgtttttgtattaaatcatgcactcagaatttgtcgagggagagaataacctggtgtgttcaggttattcttagagactacacatttggaatagcagagcaaaatatggataatgaaagtgttgggaaaaaagtgatgtgacagggagtgaagacacttgataccagactctgggagatactctgcaagttgacctggcctctcccccacaggaacaaaacactgcctccagagtctttaaattctcagttatcaacgccaaggtttaaggtctagatagggtttgctatagggtttgctctgacaatttttaaagcttttggattgttctaacatagcttaagctattggttcctaaaaatcccaaatcaagatctatgtagaatataaaggaagcctgaaccaatccttccacatactgttaagatgtagacttggaacaaagctgttgggacccagagcaatgaatttttgaactgaagctactggtactccccagcaccacct

SEQ ID NO: 68916 - DNA, 1023 bp, Homo sapiens
ggattgcctggtctctaatttgcattttaacactgttcatcaggaagaaataagaaggagctatatatacttgaccctgtatggccaagaataaagcctactccagaaattgacaagtcattaggtcctccttagctccccaatcactgacttttggaattgacatttaactaccttttctgtaatgtctgggataggagaccactgtgccaaaatgcatttagcagaatggcataataaagtcctttctaaagaaagtgaagtcccaccattgtgggaaagacatgtgtcagtcctagagaaatgtaagtggttctggaaataggctaggaagtttttcttacaacacttaaagtagagatggaaagtgagccttatttttccaacttgggatactatttatattcatttcacaaacatttattgaatatactctctatgctagacagtgtgctcaatcactatgcctagtgtgatttttttaaatatttttatttcaggagcccttgtttgctgcccgagtggtttatgaccttcttttttatttcattgttatcattattgttctgaacttgatttttggtgttatcatcgatacttttgctgatctcagaagcgaaaaacagaaaaaagaagaaattctaaagacaacttgtttcatctgtggtaagtgttcggcagatgctaaaataatagatgaatagactgtttgcaggaaagaggggctagagggatttttatttttcatgctttcggaaaaattatttcaaaatgaaggttggataaaattcagattatgtaactgagcattagactggaattctctgcttctataaatagagagaggaattataccccaaagctatcctgtcattatttctgtgatttacatgattctctgactatagaaatgtgatgcaaaatgccaaaaggtttcaccaactggcaaacagatttttaatcacagtaacatatttattatgcaacagaatcacatttaattttgttagaatatgaatccaa

SEQ ID NO: 68917 - DNA, 1080 bp, Homo sapiens
acaacgaatgtgagccttatgttttgtgctttttgtcctgttattttctacctatagaagaaacaaaatatttgaggacattacatatgtggcttcatcattatgtgtcagtcatgtgctgccacatatggaacagatgctgtgtgacttccaaaagttgtgtcacggcacaattagaaatagccctttggaaggaggtaatggtatttttttaaaacgtaagtttgctacactttttaatattatattcatatacatttgtatgtatcttttattttatgtatatttaggtatatttatttattgtatgtatatttacatatgtgtataaatttacatacttatgtatatgtatgtatatttattgtatgtatatttcattttatgtgtattttattttatatatttttacataattttatatcatatatttgtatgtgtttttatagctgatgaagagtatgaagatggaattgaaaggacgtgtgacactctccttatgtgcattgtcaccgtgctgaaccagggcctcaggaatggcggtggtgtgggggatgtgctaagaaggccatcgaaagatgtaagccagagtaaaagtattttttcaaggagcacatcttttttttaaacctttcttcacagcatttataatttagttttggttttcaggaaaatatattgtaccatttgctttaaaagtataaccatggctgttaaagccaattaattgtttgctaggattacatagctaatgtactacaactctttgtgtgttcgtagagtggtgaaatgtttccaagttaatctgtgtattgtattacagcaatgaaatcatgactgcgaactttatataggagttgattgttacacaaataacataaacgaggttgcctcttgcctatcaggtttcttgagcatgaagatttactctttgcttctgcataggaatagcctccatcatttatctatgataaatataacatttgagcaaattctaacaggatttcatatattaaaatggcaaagtggaaacatttctcactagctgcaaaatctcaagtgccaggctgggagcttgaa

SEQ ID NO: 68918 - DNA, 1064 bp, Homo sapiens
ttgaagtggggattgagcttaactgcctgggtcttcttgtttgagatttttgaagtaatctccaaccttcaattgtatatcctaaaacttgggcaagatacttagaggaagcttgctgttgaaacacttgcattagctctggcagtactgtggaaaccttatatcccataggccagtggaattgtacaaggtcaccttgtaaagtgatgacatgcctaggatcttcagccatcactggaagattccacagatgcttgtttatcttgcttctgaatgggctcatcgtcactgaagaaggatctaagtggaaatagtcggccagcgtgtataccaaaaagagacgctcttggacaccaagagcttcagcagctgctttaagagtaatttcagctataatggcagaaaattcctttgaacctccttcggccctaatgctgaagatttaaaacaaaaacacagcatggattactgcttgactagcaatcccttatttttatgtattccttcagagtttatgtggtattctcacatacatcctctcattgctacatccaacaactaggagggaagagagggcaactattatttttcttagtttatagttgaagaagctaagtttcaaagtagctaagtacccaaagacgtagagtaagcacctgatctaaatccagttattctaacttcagatgggaaagtaggggatttcaatggaacagctgtgggttttggagtttaaaagtttaaactccaatttgtcggttagactggctacattattttgaggtatttaactgatctgagtctcggtttcttcaaataaaaaagaggaatagcacttaacttgcagggatgttctgaatcttaattgaggtaagacactttgcgagtgagctggcacactgatgagcctttcactaccctgggcctttactgttcctttctttcccttctctttccctccctctggccttctctatccttcctttcctcatgttcctccctctgtccttcccttcattattccttttgtcctttccttctccatatcccatatccttcccttc

SEQ ID NO: 68919 - DNA, 1007 bp, Homo sapiens
tgaagcagtgagttatttgctttgttatttctggcacatttcaattaaaatcattagtgtaatttcacgtatgtggagaacaaaagcttccaaatggtaattttgttacagaggtgctgctagatgtgagcaaatctaaaaatttccatatcataaagatgggaagcattagacttaggaaattccaggatctgaatttattcttaagaagtttgatttcattgagatctctatttcagtgattaaaatgaacatcttagattgaatcatgaaattaccatttttatatgcaaagtatattgaatatttgcaatttgttatggtacaatatgtatgtttgtctttatatcctgtctgaatattcaatagaaactacatttagcagctggtgtatattgaaacaagttccccctagagaaaggtacaaatttaatttagtgtttagttagaaattttcttatttgtaacattttaaatgaattccacagctgttttgaatcagttgaaagtgaaaaggcccaaaggagaaaaggcgatattaagtgcccctataatttcttagtaagaaataggggagtaaacaataaactctttagaagattaaaaagaaagtagtgtcttattttaaaatagataatcaccttaagtttatgtacttaccaagttcaagaacaggccttgaggatcaagtttaaagggacagaagagaaaaaaaaaggtcaaagaggtaggcataaagtgccacgggagctgcagagatgttcagaagcagaattaaaacaatgcatttggatatgccaaccaagatgctggtaatgacttccaaaaagccatttccatggaatggtgggaatagaaacaactgcagcaattaaaatgttacatgaatgaagttaaaagtagaggatggtgaatgttgtcagctgtttcagaaatatggtaacaaaaaatgctcttgcttatagcttggtagaagagaaatgagagaagttttgttattttttggt

SEQ ID NO: 68920 - DNA, 1045 bp, Homo sapiens
ttgcaagtgtttttgttctctgatgaaactctaaaagtttagagttaagtttctgatttgcagaacataaatacatctacacaatacatagactagagaataaatgggaataaacttattaatcttatttgtaatttgaaattcagtgttattttgttcctatctttaaaaatcagaattgtgcaatttcttctgaagatcacatcatttcctaccttttaaattttaatttaagtatcttctttttttttatattttacagctaattcctgaatcattgcattattattatgaaggaaaagggaaacttgtatttaattcattaatttctgttacctggttttagattgagatttttgattagtccctaggtttattttatgagattagccatcttttataaaggttgatatgcaaagttagtttaattattagaccattagacttctaaaaatttgaactttacatttcattatttgtccctctaaaagattaaaaggaatcttagagcgtggaaaagaagaattggctgaagctgagattataaaagattcgcctgattccccagaacctccaaacaaaaaaccccttgttgaaatggatgaaactccacaagtggaaaaatcaaaaggtaaggtacagctgtggtaactaggtttataaaaagttttccaggccgggtgtggtggcttacccctgtaatcccagcactttgggaggctgaggcaagcagatcacctgaggtcaggaattcaagaccagcctggccagcatggtgaaaccccacctctaataaaaatacaaaattaggcgggcatggtgacacacacctgtaatcccagctacttgggaggctgaggctagagagtcgcttgcacctgggaggcggaggttgcagtgagccaagatcgcaccattgcacttcagcctgggcgacagagcaagactctgtttcagaaaaaaaaaaaattttccaatgaagctctgttttgtacagtgttatttaatattgttgtgtatgtgaggaagagttcttaagtatttg

SEQ ID NO: 68921 - DNA, 1049 bp, Homo sapiens
gtcaggctggtcttgaactcctgacctcgtgatccacctgcctcagcctcccaaagtgctgggattacaggcatgagccactgcacccggccgcttttattattttttaaattaaaacataattgtacatatttatgggatacagtgtgatgttttgatacatgtatacaatgtgtaatgtctctgacatatttttaaaggtgattcgcatctaggtggcggcagtcgagaaggctcgtttaaagaaacaataacattaaagtggtgtacaccaaggacaaataacattggtaggtatttaagaataactgaaaaagacgaaatcaaaaggttcttaaggtattatatgggggtcaatttattctgttttgcattttcgtttttcattgtttcaggactcaatgaactcagtgaagaagtttttttttctttcttttaattgtgggaatatttctttatattctttcaaatcagtgttttcttctatttcagaattacactattgtactggagcttatcggatttcacctgtagatgtaaatagtagaccttcctcctgccttactaattttcttctaaatggtaactttaattatttaatggttttgactgaaattatttatattatttgaattatttattattaaattattatttgagtgaaattattattaagaatatgaactctggaaagctatattcatcactgtagctttgccatttatttgccaaagctgttttaaacttatgtaatttgaaataccctttaacagtttttactaacatttaaaagatgactttaggtttggctttcaggctattgcatctaagcaggttttatttaataaaattgtgagtatttttatttaaaaaatttgaccttcagagtctaaattgatttgttttagaagctataattagaaaatagatttgaagaattaaatagaagctagaataatatagaccatttatcttggcccattgaattttaaatcaaatcaaaggtggacttacttatatttgaacatgatacctttatcataaataaa

SEQ ID NO: 68922 - DNA, 3009 bp, Homo sapiens
ccactacaccccaacctgggcaacagggtgagactccatctcaaaaaatacatatatatcttggggctgcagttgaccacaggtactgaaaccacggaaagcgacacagcaaagtcgggggactactgtaacagctttgagaagttcttcagtacaaaccagactgactagttcatccctgtgcaaacttatctgtcagtatcacctattaatggcaatggaactagtgtcctgtggaatttacttcggaaaagactgggctaatagaacaaatactgagaaagatagccatggctttctcaaactcattacagtttcatttgcaggcaaacaaccttgaggaagggaaaagaataggagcaaactcgaaagagtgatagactttcaacttggcctagaaattaaattttgaaatttaagttagttttttttcctctaaaaattatttcaatccatagatctcatctcccaaactgatttctgcaactgtattggcttggtttaggggagaagactctggagttaggagataagttttagctaaagctttgccaccaactggcaagacccatatgtttctagatgtatgtttgcatgcttatgaatgaaagatgctggattagatgagctgtagtattccattcaattctaaaatacaatgaaaattttaagatgttgaaggtcattttaaaagcctttaagctttgacatttggttaaattctttagaatgttttctagtaaattgatgctgccagagaaacggttgactttgattatgttgtatgcatcttctgaagcataatcatgagccaattgtgacatttgttacatgtctgaggaatcttagaataaacctaatgaactgctaacatgaaagaaactattatgatgcagggatatataaacgtttaccaaaggaatatagagaacttgtttttgaaaatatattacatggaaattgctacgaacctgtgatgtgatatcaatttttaaaatgttattttaaaaacttacaaaaatgggccaggcgcagtggctcacacctgtaatcccagcactttgggaggctaaggcaggtggatgacgaggtcaagagattatcctggccaacatggtgaaaccccgtctctactagaaaatacaaaaaattagccgggcatggtggcgtgcgcctgtagtcccagctactcgggatgctgaggcaggggaatcgcttgaacccgggaggcagaagttgcagtgagctgagatcatgccactgcactccagcctggcgacagagcgagactctgtctcaaaaaaaaaaaaaagtgtcaaaaatatcctttgtaacacaaaatagttctttaaaatagttgttgacttggcctgtagttatatgcattacatgtggacactatgtgtcaaaagttattttaacaataggaacagagtgctgtgggagcacggaggaggctgcctgtggttgtgccagtaagagttaggcaggttttactgaggtggtaacagtgtagctaggtcttggtgagtaggcttatactttagcccagataccttccctaagttccagatctttttttttttttgagacagagtctcgctctgtcgcccaggctggagtgcagtgacgcgatcttggctcactgcaagctctgcctcctgggttcacgccattttcctgcctcagcctcccgagtagttgggactacaggtgtccaccaccatgcctggctaatattttgtgtttttaatagagacggggtttcaccgtgttagccaggatggtcttgatctcctgacctcgtgatccgccccctcagcctcccaaagtgctgggattacaggtgtgagtcaccgtgcccggcccctaaattccagatctttatattctacttcctaattgtatctcttagatgtctctcagtcacctacacttcaacatgcccaaaacaacttaggagctttgccacctgaactagtctgtttcctttttcagtgaatggccctgttgtctgttcatttatgtaaggcagaaaacctcagaatcgtttttgagacatctaatccatcatcacattttcttgattttgtctactaatttttctctcgtacatcaaaatctccatcttagctaccaataacatttccctaatccagccttttatttccttacctagtatctcacagtagcctactaaatggcctgtccctatctactctttaccctctagctacagtaactttcagaatgctaatcctgaccatgttctcatgaccttaaacccgccccgtgcctatgcttttctgttgcccttaggaaacaacagagctgtttaaatgtcttacaaggcccttcattgtctggccccctccccctttttattctcatctcaaagcatactaatcttctctgtttcagccacacagatctaatatttttcatgcttcctcctgccacagtatcttggtatccattgttcttttgcctgaatagtctttcctctatttcttcttctttttttttttctttttttctttttttaatctgagacagagtctcactttgtgactcagactggagtacagtagtgtgatcatagctcactgcagcatcgacccctcgggctacaagcagtccttccacctcagcctccggagtagctgggactgcaggtgcataccacgaagcctggctaatttttgtattttttccatagagacagggtctcactatgttgcccaggctagtttcctgacctcctagcaatcctcccacttaggactcacaaagcactgagattttagatgtgagacactgcatctgttccatttctttacttaatttctactcatacccttataactcagaccagtcttcacttctcaaggaaacttctcctggtgttttggaataggacagatctccctctacaggcactcatagcactgtagattttccttcaaagccttgtcagctttatggttgcacatttgttcattattatta

SEQ ID NO: 68923 - DNA, 1586 bp, Homo sapiens
tttattactctctaactgaaagaccatagatgtgagctctgtgattttactggtggattttttaaggaatctattgctagctgttcattttcattatattaacattatcattaagttgttttagggctagcacagtgcccggcccatagtaagcttcaaatgggtttttactgagtggaatggaatttaattgtattgattatgtttacaaatataaggtagccactatatctcaaaattcaaatttttcttacattccagtttctattttctgccactatattatgaacaataaattgcatgagaattataatcttttcattgttaatttcttaatgccattggccggtttttcactacaaatgttaggcttaccctgtagaaccttttggatgcagaagtaaataacataataggtacactttaatatatataatgtcatgtgttataagaaaaatactctgatagcttgcctgttaattttgatcatatttgtgtgctactggtgtgactcttcaatctttgtgttttttggtaaacagataatgttgaaattcctatttcctattactgaaaacaagttactaaacttgtttattagtttatattttatataattgatatttggtaattcactgtaggtatttaaagatgctatttcctctttttaacaatgatttcgctttaaatttatgtaaattatttcaattacattatatttgtatattaaaaatattggcaagactgcatttggagtaaaaaaaattcaaaatttctgagttagtcatctttgttaattctgacataatgtaaaaaaatcattaaatactttattacctgtatattgccagttgttttttaatggagtttatgttgcatggaacacttgcatctttaaatagattatcccattattttagctaattattattgaatgtatttgccctcattttaaacaaaaagcaaatgaataattaataattttattattttgaaagcaaaaccaagttttttaaaatgtttgaaattttacttcaaggaagaacagcatgctaacacatctgccaattatgatgtggagctacttcatcacaaagatgcacatgtagatttcctgaaaagtggtaagagacatttgaaagtattattttgtatgatctaacatatgaaagcatattacagtagcccccacatcctcagggaagacattccaagacccccagtggatgcctgaaatctcagatggtctcgaaccctatactgtatacactgttttctcctatacgtacatacctatgataaagtttaatatataaattaggcaaagcaggagatcaataacaataagaatgaaattgaacaattataacaatatattataatgaaagttatatgaatgtagtctcttggtctctctccctctttctcaaaatatcttattgtactgtactcatcgtttttgggatgatgtgagatgataaaatacctacatgatgagataaactgagatgaatgatacaggtattgtgacatagcattaggctactatggaccttaaacacaagcactatgatacctcgacagtg

SEQ ID NO: 68924 - DNA, 1066 bp, Homo sapiens
tctctttaagtctcatgcagattcaaaaatgtgagttggtcttgatccacacctacccagttggtgaagacagccttgtatctgatcgttctaaaaaagaggtgagtgttgaaataatgaaagaaaagactattgtggttaataataataaatactgagaagggttatcattaaaatgatccattgccaatattttctgccaagaaaatattttgagttttcaaagtaaacctctatgtcaagacatctaggttggttctttatggtataattgtggattttaaagtgtttcctattctgcctgccttttcatgtttgtttattttatcaaaatgtgttacaaaccatacatagtttgtattgttcctaaaattttattttagtgattatttttattctgtaaaaatctttttccttattagaaaagcaatacactctttaacaaaaaatattccaataaaaaattaattttacacattcagagggaaaaatcttattttccaaccttggttttactttttaaataaatttgaataattttaaaggaatagatgatcctgttgattgtcaaatagatccacatcataatattctctatcagtaatttatgtttagaaatatagatatatgtcctggtttttcattttgcattatttaatataaacatcgctagtattacttttgtccatgaatttttgtagttaagtggtatttttagtcattattgccatcattgtgtttttaagtggtttccagcataagcctcttttttattaacttttttctgcctcttttgataatgtggcaatgttagttttattttatgataatgaaaacttatttgtaattaatattattgccctggaatgagtaagattttgtgttatcttgttgtacactacttctagctgccttatttattggtgacagaatgaaatttttgtggcgatttccacattcattcttttagttttatctgcagggttttgtcctctcaacaaaataaattattttttctgcagtgtacttcaaatcatttttgcatatagataaaaagacgtaaaaa

SEQ ID NO: 68925 - DNA, 1032 bp, Homo sapiens
cacaaatctcgactagtggttccccacactttcgtctgacttggctacaagttaggtgtttccacaaccccctcctcatgttcaatactttgttctgatgggctcacagaactcagggaaacacttcagttttctgatttattatgaaggatacagatgcacagacacatgaagtgggtgaggttggaaggatcccaagtgcatcaggttctgtccctgtggagttggggtgtaccaccctcccagcacatggatgtgtttaccaacctagaagctctctgagccccatactttagggatttttatggaggcttcatgtaggtgtgattgattattaactcagtatctagcttctgtcccctctctggaggatagcagagtggggctgaatgctgctgagcttctaatcattgcttgttctttctggtgaccagaccccattggggagctgtccaggatcccactaaagttgcctcagtagaagaaaagatgctcctgtcatccaggaaattccaatgaacttaagagctatgtgtcaagaactggggtcagaaaccaaatattagagcaaaagatgctcctagcacccctgtcatttaggaagttacaaggattttgggagctctgtgccaggaagcatgagcagagaccaatatgtatatttgtgattgtgtcacagctagtaaagacatgtttggaactattgcaatgtggacttttttagagtgattattagttttcttaggtgcggtcatagtgttattgttatgagtaggattgttctcactaggcgaagcaggctgaagtgttcaggactacacgtcaagccctctgcaacttactctcaaatggtttaattaaaaagtgtacatctacctaagtatagtatatagagaaagcaaatatagctaacagtgactctaggtgaaggacatacgttgttcattgaatagtacttttctttcaactttcctgtgggtctggaaatttcaaaataaaaagttgggggaaatttttagcattaccaatcct

SEQ ID NO: 68926 - DNA, 1039 bp, Homo sapiens
tgagtttgtctcctctcccactgcctgctctgactttcaccctttccagggtatatgcttagatgcctttgcatttgttatttgccgtacccagattgtctatccctgactttacggtggctggttttggattgccttcagttgccacttctatggagagtccttctgtaaccacctaatctaaagtagctaattaacttatttttcatagcgtttatcactctctgaaattatcttgttcatttatttgtttgtattcttcccgcagtgccttctgtcctagtagactcccctcccctgactttccccacattgtgagtgacagaacttttttattcatcactctattcccatgtactcagtgccagcaatagcacctggcatatactacacattctgtaactataaaaagaagaatgaatgaatcagtgaaacagtgttacaaattgcatattacttgaaaatatgttggtgattgagtgaaattagagttgaatactaattgtttctttggaatctattaggtgaattttattgtgagtgactctggagcacatgttttaaattcttggactcaagaagaccaaaatttacaggaggtatggttagattttgagctgtggccatttgtaaattatctaaatgtggtaatactttttaaaaaaatgactaattttttaaatcactctaggatttgcatatagtgttaaaatgccaagtcatatgaaaacagctatccccattctaggctttccctacacccagcacccccaagcaaacttccattttttagtagttgtcatatttacttccagatttctaaataacatgtttttattcctgtttattgagttctctgtttatttatctacttatttatttattttgagacggagtcttgctgtcacccagactggggtgcattgcgccatctcggctcactgcaacctctcccaggttcaatagattcacctgcctaagcctcccgagtagctgagactacaggtgtgtgccaccatgcctggctaatttttgtatt

SEQ ID NO: 68927 - DNA, 1461 bp, Homo sapiens
tcagtataagattttgttagcgaagcaggggagtaccgtatgctctgttttaataagaaaaagttttaaaagttttaaatttccttctacacaccagtgtgatggtaacaactaagtttttctgctctacctggtaaattactgtgatgtttcaaaagctaaggggagagtgtgaagttggggtccttatcctaaggcgaagacctgatgtgcggttatcttaggagatgtttatctttgttttggccttttcttttgctgtcactcctctttcctgttaattccgcacccctacccgccagtcccccttcaaacgtttttcttggagggaagtgcaaaaatgctggcttggggtttatatgtgactaatgtcaattagcaaggatcataaagttgtatttcaagagtctttgtcacttatgtttcgtatatgtaagggaatcaaatacaattaaatgtcaaaatgtttccctctgacaattttaagttcattttaaaagcaaaaccaaaaatgcatgcactggtatttttgtctgggcctggtagagtgacagcctaatatggtgtattgatacccttgctttctggtcatgacctcattaaactgtcctttgtcggacagatttctttgaacatattattcatgttccctaccaagtcttcttgagggaaagacaatcttcttgagaaaattagaaaaaatgtaagatgttatgtacaaatatttggctaatatgtttttccccttacaggttaaaacaaaatgaagattttttctgaatctcataaaacagtgtttgttgtggatcactgcccttatatggcagaatcttgcaggcagcatgtcgagtttgatatgctggtgaagaatagaacccaaggaatcattcctttggcccccatatctaaatcattgtggacttgctcagtagaatcttccatggaatattgtagaataatgtatgatatatttcctttcaaaaagctggtgagtgtgaagtacaaacaaaatcatgattttggggatgtacttaactgcataaatgaatttttatatgaatttgctatagataatgactgtgtgtttattacttaaaaatgtggtacataacgctgccctttgggattaatatataatggatatttaattggggccagtaataataacagctaacaattattgagcactttacatgtgccagacatatttcaaagtgcttcatatttattaatttccgtaattctcataacagtcatgttaggtaggaactgtagttattgaagcaatattcaaagtatgtaacaaccagtatagaacacagactgaccattgagagctgctgtcaaactgtgctggcatgtagcagctgactgtcagtcttgtttgttgcttccctgttgcagatccggaaactgaggtaaagagaagaaacttgtcctgagtcacatagttacgtagag

SEQ ID NO: 68928 - DNA, 5528 bp, Homo sapiens
cgttagcattagtgtattttatgtgcagcgtgataattcttcttccgatgtgcccagggaagccaaaagattggacacccctgaactacatcattttacattccatcaacaatgtatggaaggttgcagtttcttcacatcctctccaacaattgttattgtctttttcattacagtcatcctcgtgggatatattgaattgcattctcctaatgactagttaggttaattaagtatcttttcatgtgcttattggccatttgtatatcttctttagataaatgtttattcaaatcctttgccacttttaaaaatggggttattttcattttattgttgagttgtaagtgttctttatatattctggatactaagctcttatcagattttttatatgtatatttcagatatatttatatttatatatcatatatatatatatatatatatttgcaggtattttcatcccacatgtttttctcccccattagtatcaggaagaaattcaagaacttaatgaagtcgcgagacatcggccacggtccacgttagttatgggaatccagcaagaaaacagacaaatcagagagttgcaacaagaaaacaaaggtaagatacgttactttttgacattaatcccatttctagtctatattcctaaatcgtatttattgctctttatcctgtcccacatatgaacatctgcctggttgacatcctcttagattctcacccttaatatccagttagcactgctgttgttagctatgaaataacccagcttcattctctgcagtcccactgcattggcccccagattagatgctcagtctcttgcctgaaatgtccaaactgatctccctgattccagtctctcttcccccttccaatctgtcttcaacataaccatcagattgatatttcaaaaatcagtctgatcatgtaattcttttgcctaagaactttcattatatacttattaccttttacagggtccctaaaaatcatttcccagccttttttttaaatcttcttcccacagctttcttcactgtgaactctttgctcttgccaacaccaatcacttcctaaacacgtcatctgttttcatgcctacctgcttagaaggtccattccttcacttttcaactgagggaactcacactgtacttctacaaagcttccaccagtttcttcccatagacatctcttaaatctatttgacttaacactccactctgccacctaccacatgcttgttttctctactagactcttgaggtctgtggcccttaatatagagggagccttggccgatattaattgctgtttagtacatctttgttgaaatgattctcaagaaacaagcttaaaatattcaaaaaactaatacgggacttcatttggtgtctcttattgttatatggctagatttttgtgcattgtgttttctttttaaaatgtcccgttcataagttgcttagtggaagagaatattttgtgtacttttaactcaagttggaataaaatacaatattattcttgatagaattacgtacatctctggaagaacatcagtcggccttggaacttataatgagcaagtaccgagaacaaatgtttagattgctaatggctagcaaaaaagatgatccgggtataataatgaagttaaaagagcagcactccaaggtaatccattctataaatgtgacctgaaatggaaaagagagacgattgattattctgtgttcagattttttttgaaaaaaatcacaggtatctagtaatggcattttaacatgatgttgaatgtttcatctttttaattgacattttctcctttttcttatttttccatttcttgttatatatcattttctgtttgatttataaactctcactgtttcttagaaactttaatttgtacgttgaaaaataaattttattttggatataaaggtaagtctggtctcttcaacattatttttgtagggctatatacttttaagaaatatttcttaaagggctgggcatggtggcttacgcctataatcccagcactttgggaggccaaggcaggaggatcacttgaggccagaagttcaagaccagcctgggcaacatagcatgactccatctcttcaaaaagtaaaaaaattagccgggtgtggtagcacatgcctgcagtcctagcttctcaggaggctgaggtggatagaccacttcagctcaggagtttgaggttacattgagctacgatcatgccattgcactcccatctagacaaccgagtgagaccctgtctcttaaaaaacagaaatttttttaagaaacattttttctaataaatttgtgtattgacttctcttgcaaaaacaaaaaataatggaaaccttttttaaaatctgaaagcagtttaatgtagatttttcttaagactgttttctgaataaggctaattcatccagactataaatgatcttgtttattataatggaaaaaacatggggttcaggagaagaaccaacatagtaaaattttgctcccttgccccagtattgtataccagttgacatcattttttagaaacaaagctgaagtagttagaaattagtgttttacctgctgttcatccctttgtcatccctgtgtctattccctttggtatgtccccatattttatggcatattttatggcaactgctatgaagacaagtagaataatcctttctcacatatttattttaaactgagttttagttgctgatatgaaataaaaataataaactagattgtggaaactagactgttacctgtattagataatggtgagctgactattattattaccaatattatttaagaaacagtgattatgagccttcttttccccatttgttacaacagaaataggaaaggacatattttcatatttatctattattgaaacacattttagattctttaaaatacttcttccattttggtgcttgtacgtgtttttaacttattagtaattaattctattagaattaaatacctatcaaatagctctttatatgcctttattatattagaaaacctaatgataggtacctcttgtgtcaaccagtaaaataataaattaaattaaaaatttgtgtttaatgttttctaattatgctattcatctcctaatcaaatggcaatccagggatgtttaagtggtgatcttttgaatacaaaatttaactattgttaatgagaccattctaaaatcatttaaatttaaaggtataataataactatagtaactaagactttttaaaggcactaaaaggagttgacttaatattatttgtaagataaatataatcttgagaatttctaaaaggtttgtatgttttataacctaaaaataaaatgttaaagatctaaagcgaagaataccattacaaaaaaagtgcttagaataggataactatagcttgcaggtcccatctggtagcaactatgacagaagcaaatgtttcctaaaatatattagattttactattcaccagagctggtttattaattagtaaggttaaacatttcctaagatagctgtaagccatccttttttattatgtagattgaattcttcatctaagttcagatgatccttgcctcccataaaatgactattcagttatttgttattaattttcactaatacatattaatgtttgtgattttgatttttcccaaaaaggagacacttcgacttaattaaacaaacattaatactggcactgggttagttatgggaaataataagatgaatgtacaagcttgcagtatagtgggagatacagacacaaacataacaatctactataaggtagggcgtgatgaatcccaaagtagatgaattgttactggaacgctagagggaacaatattaactgtcataaggaaaatctggaaaggtaacaaggaagggaagaaagtctgtctcagtccagccttgaattaattatgggcaggtaggtaaacaagcagaagtgggtgggtgggcagagaaacttgtataataaaagcacaaaaagtatggtattgtagggtgtgtttaggtactagtgctctgatatgcctaaacacaaaagtaattttacaacacatttagagctaagaaacagagttacacataacagcattttggattggagtaagagatccttttgagactgttataatacagaactttgcccttaactagaagtttttgagcacatacttaaaaaatcagtagaaagtttgagagctcatttttacccaaatactaattttcatgttatttttgaacagatgcctttttggaaatcttaaaaaagcaaacatttcaaacagttggctaacacgcatgaactaacactcattcagtttttaaattacggatgatatccgtattaacattataatgactctatactacagattgacatggtacatcgtaacaagtccgaaggattcttccttgatgcatctcgacacatccttgaagcacctcaacatggactggagagaaggcacttggaagcaaatcagaatgtacactaaataaacagtcaacttttggggtgtggatggaaggggggtccattttaaaagtgcttttacattgaatttccctcccagattagatcagcaaataaatgaaatttattaaaagaatgttgtgtctttaatagccatgctgttcagtgtagaaactttaaatctctcattaattttctgtgtattgtatcatgtacagcctgttagatatttgcaggttttataggttattcagtccaacgctttatttatttgctcttgttagttgttgctgtgaaacagtcatttcctttctggacatcaaagatattttcttggcattaattttaaactgatttcataaggtcaaagtattaaatgttttaattcagattgtggatagtttgtagtcctttgattttgcaaatgaaattaaaatgcctttgtttagatgttaggattaagtatagtagtgctctctccattgtgtcttaatttttttttaactcacttgtggcaggtctttattgaataaaggaggaataaacctagacagggagttagaaatgaaagacatttcaagacagttcaagggttatgttggtgacacttcttgtcttccagacagttttgaaagcacagatcttgcctcttgtgcttgttaaaaaatctgtgatacttctctgaagattttataattaaataagtgaaccattaccatgaccttttataaaagtgctgccctatttgaagtattgggttttttctcatgatgagctttgttagacttggtactgaaaaaatcagtagtttttttccttctattttaaaggcaaagaaatgcttgcttcagctaggcatggtggctcatgcctgtaattgggaggctgaggtgggtggatcacctgacgtcaggaattggagaccagcctggccaacatggtgaaaccccatctctactaaaaa

SEQ ID NO: 68929 - DNA, 1006 bp, Homo sapiens
cagactttcttcccttccttgttacctttccagattttccttatgacagttaatattgttccctctagcgttccagtaacaattcatctactttgggattcatcacgccctaccttatagtagattgttatgtttgtgtctgtatctcccactatactgcaagcttgtacattcatcttattatttcccataactaacccagtgccagtattaatgtttgtttaattaagtcgaagtgtctcctttttgggaaaaatcaaaatcacaaacattaatatgtattagtgaaaattaataacaaataactgaatagtcattttatgggaggcaaggatcatctgaacttagatgaagaattcaatctacataataaaaaaggatggcttacagctatcttaggaaatgtttaaccttactaattaataaaccagctctggtgaatagtaaaatctaatatattttaggaaacatttgcttctgtcatagttgctaccagatgggacctgcaagctatagttatcctattctaagcactttttttgtaatggtattcttcgctttagatctttaacattttatttttaggttataaaacatacaaaccttttagaaattctcaagattatatttatcttacaaataatattaagtcaactccttttagtgcctttaaaaagtcttagttactatagttattattatacctttaaatttaaatgattttagaatggtctcattaacaatagttaaattttgtattcaaaagatcaccacttaaacatccctggattgccatttgattaggagatgaatagcataattagaaaacattaaacacaaatttttaatttaatttattattttactggttgacacaagaggtacctatcattaggttttctaatataataaaggcatataaagagctatttgataggtatttaattctaatagaattaattactaataagttaaaaacacgtacaagcaccaaaatggaagaagt

SEQ ID NO: 68930 - DNA, 1325 bp, Homo sapiens
acctcttaaccaacaaaaatgtaggtccttttcatggggaaacctatacactgctagtactcagcaagaaggtactctaaaaggctaatctgtgctgtccaaaacaatgttaaacttaattaaaatcaatacatttttaaaaattaacaattcagtccctcaaacgcattagtgacactgcaagtgctcaacagccacatgtggctactggcttccacactggacagcacagataaaaaacattccaatcatttcagaaagttctactggatagttttgaattagattatggtaggaagaatgatattaagacaagtatctgtcatattctgcaagttaaccattaaaattcctcccattgtcaaggaagcataatatgtaaaagcaggttaagtacagatcattgcagctgcaaactgagtaagggtaatgagtaaaaactttgaataccaacagcatcctcaatttatgatttggtcagtcctatggcactgacctaagttaaaaaactacacagaaagcaagcatttctttttttttagacagagtctcgctcttgttggccaggctggagtgcaatggcacgacctcggctcactgcaacctcccactcccaggttcaaacaattctcttgctttagcctcccgagcagctgggattacaggcacccgctatcacgcctggctaactttttgtatttttagtagagatggggtttcaccatgttggccaggctggtctccaattcctgacgtcaggtgatccacccacctcagcctcccaattacaggcatgagccaccatgcctagctgaagcaagcatttctttgcctttaaaatagaaggaaaaaaactactgattttttcagtaccaagtctaacaaagctcatcatgagaaaaaacccaatacttcaaatagggcagcacttttataaaaggtcatggtaatggttcacttatttaattataaaatcttcagagaagtatcacagattttttaacaagcacaagaggcaagatctgtgctttcaaaactgtctggaagacaagaagtgtcaccaacataacccttgaactgtcttgaaatgtctttcatttctaactccctgtctaggtttattcctcctttattcaataaagacctgccacaagtgagttaaaaaaaaattaagacacaatggagagagcactactatacttaatcctaacatctaaacaaaggcattttaatttcatttgcaaaatcaaaggactacaaactatccacaatctgaattaaaacatttaatactttgaccttatgaaatcagtttaaaattaatg

SEQ ID NO: 68931 - DNA, 1819 bp, Homo sapiens
gggactgaattgttaatttttaaaaatgtattgattttaattaagtttaacattgttttggacagcacagattagccttttagagtaccttcttgctgagtactagcagtgtataggtttccccatgaaaaggacctacatttttgttggttaagaggttattaaatgtgctttgccaaagatactaccttgtcatttcttccagcttattagttccgtgggtttcttggagtactgttaaatcctttttacaaatatatatatacacaactactgaagagactgtttatttggggagttattcacttttatatttaagtcttaggcttaatatgataaaatacctctcagttgctgtgaataatggtctatagaagctgttcattgagaaaatgattattctcgagtttctgttgattttaaaccttttttgtctgtctctttcactagactgtaagcttcttcagatcaggggacatgtcttgacagtctttgtattcctgttgtttagcatagtactggcacatcataggtgtgcaagataagaaaatgagattggaagaatttatgctacttgctgcgcctaacaaatgtggatgtctgtattatactgatactatattttcaatagttagcaaagaaggccatttaatattttaatactgaaaagcagaattgtgctcattttattcaatacttaccatataccatacactagatagtaggtggatgtaaagatgcagttcctgctctcaaagaggattatgacctagaaaaggttacagattggattgagataactttataggcctgaacaatacagaaaagatttctaaatcattgaagacttcagggaggaaaagagattgaatgcgtcggcaatttttatcattcccgttactttgaacaatagtgtatgtaagtgcaaaaaaaaagaaaaagttgctgatcattgtggtgagaggaatgtaaaatatgagtatttttcttgctgctaggtttagttatattgtgctgcttattcttaattctagtcctaacaaatttgatttcaaaagcacatctgtggtcaaccaacttcattgttaatatttgttttattcatattaagtgacaatgtaagaatattcatgttaagtggtactgcagattttataaaaaggagaggatccaaaaataaaaaagtattttgctgatttccaactcccatccctctttttcaggaactgcaagcacatgttgaccagataactgaaatggcagcagtaatgaggaaagccattgaaattgacgagcaacagggttgcaaggaacaagaacgaatatttcaacttgaagtaagttttacattgcaaatgtagatgaaaactgtccatataaagatttatgccagaaaatatatcccatttttaaatatatatttactcttcttgggtactggtaatgttctcctggatgctgtctatgtgggcatattatgcaagaccatttatgtggtgatgcaagaatctaggattattagtaacttacaatataccagtaatgtagaaaattgatgtttcattctatattgcttatcttatgaagtgaatgtacttcttcaattgagtcatttttaaaattttgtttattctattagagatcatagtgatacagggaaattttttttaatccacaaatatttaggggcactcttatttttctggggattctaaaaacctttgtcatctgtcctttattttatgacagtgaaagtaccagtctctgaataactgaaatcagtacaatagacttttatgccttaagagcttcattttga

SEQ ID NO: 68932 - DNA, 1727 bp, Homo sapiens
tcaaatgccaatgagctaaacttgtcctacattccatgctatcatggaaagtaataaaaatactaaaaattactaggagattctagcctattcactggctttacgagtttatataaaaataaatctagatgttattttcttcatctctaatgtgattgtaaaataaggcaatttctgagcttctgtttacaattatagctgcttaagtaagaaggctttgcagtggtggaagatgttgaacacgattcctagctgcataagtgttctttagattcaagttgccaactgcatatatcattgagtagattaatgccaattacagaccttgcttgtttgttataccttcatatgttcagtttttcctaacatatgtttgtgatgttgtagctaccttgtagatagtgactgcatctttgtttttgcttgccttttagcaagaaaacaaaggcttgagagagatccttcaaataactcgagaatcatttttgaacctaaggaaagatgatgcgtcggaaagtacttctttgtcagcattagtgaccaacagtgatttgagtctgaggaagagctgaagagtttctgagtctgtgagcttcttacatggctccaaatggtcaaataagtgaatgaatgaatggacagaaaattcaatcctttatttttttctctgtaaatatgtacagtgcacgggctatgagatagcaacaaaaaatgcatagttaatggtcatagactttattccaaaacataattggaaaatagaaactgagccattgccaaatggtaaagaaatgaaaagttttcacagtgactactgaatataccaagagcttttggcagtactgctggctttctgggtgattaattaggtaaacttgaatattcccagtaaatgtttgagaatgcataaaattataccaatttaaaaatataaatttttgccactgttttgtgaacggaggatttgtacgctaaatttcatccttatttggcgtcaaagttgatgcaaagtttatgtaccatgagacttctagtgattgcctactttcacatttatttaaatttttgtgaaagaaaatacagttttaaaggctataggaatgtgttatatgtaccttaaacagataatttaattttagcaatttatcataactgatacttagctaacaattgtccataacttgtttaagtgtaagaaataccatttcaggaatgaaaaagaaggaatactactttctaagaaagaagatcttataatagacatatttagtaggttaaactactcctttgaaagaataagttttggttcaaagtcaataatgaagacgagatttgtttttctcttctctggctgatttttaaggatattatgtagttcatttagttaacagaattgaaatgtttgatatggcaagataggtatggtaatttcaaagtgaattgggaattcctctggctcatagaacccttttttttttcctttaagtattcttgagatacaaaaaaaaaaagtaaatacaatttcaaaaaaaaagttccggatctgtttttaagctccatctggtcctcataacctgcaagatttttcttaaaacctttcagctgaaagtgggggtaaaggtggagtaatctgtggatttgtttctgttgtcttttaaaatgtcaaatatataatatgtaatttttttaaaaaccaccagatacagaaatgtgctttaacatcagtt

SEQ ID NO: 68933 - DNA, 1038 bp, Homo sapiens
aaggtttaatattctagcaatttctttgttggaatcagttttctatttcacctgctacagaaaactcaactggcctgtggtacaatatacctagtatggtttggcaacctggtagctaacctataacagattaatcagaactttctgaaaacattttaaagaacagttcaacagagtttcctgttaactactacttttctttagtctgacacacctgaagtgctaataacaccaaattagtcttttaacacattgccccagatttcatttcctgttattatctttgtgattttttaaaaatgaagaactatattgtttgcccatattaaataacttttatagctatgaaactcgtcatgtcttgttgctgtggtacaaatataatctgaaaaattttatgaaaatatttaatgaggctttttagcatttttttcaaaatagggatttattataaaaactatacaaactttttatcactcacaaatgatgaaaaattttaaacaattagtatcctccctccaaaatagtgtgttctgtctttacagtcttcactggcagtgcattcagatagtatagaaaataacaaacattccatataactttgtccctacagtaaataattttttaaaacttttcatcaagtttcagtgttactgaagttaattatagacagtaaggattacagaataagcagtaaatggtcacctgcactgtatttttcaaagcaaaaattgttttatattttctatgttgttttatcctgccccaaacacttaaagcaaaagttaaatatttttccagttacctgaaacttcaaaaatctattgtactttgaaaaaactttaaaaagcagcatcatttaaatagtggttaactcataaacgtgtatgcaacaacattccacaaccctaataccactcaggcctgcagagtcaccagctcacaataattcagtgctctgaaagctggggggaaagcccctgagtagtaagtatgcaacccagggtgtcgggtgctttcttgtggtgaaacaagggt

SEQ ID NO: 68934 - DNA, 1546 bp, Homo sapiens
acaaacaactgtgggtacttgttacataatgttggaaggccaaggatccaaacaactgatttttttacaacctgtctggactttcaaatgcctgtaatagaaaattcctagtttcaaaaataagactgtggcttccctactgattccttggtttgtaactgaggaactacatatgtgtttggactaactcaccagaaagtctattagaaaggaatatacagatttagtccatgaagggttgtattattatgttagattttaaaatactagagttcaaactgtactttttctactgttttttagacttcattatcctggcagtatggggcatgctggctgtaagtggaattacgttacagattcgaagagagagaggacgaccgttcttccctccccacccatacaagttatggaagcaagagagagagcgccgagtgacaaacattctggaccctagctaccacattcctccattgagagagaggctctatggccgattaacccagattaaagggctcttccagaaggagcagccagctggagagagaacgcctttgcttctgtagatgcccaggggcttggtcagtgtgcctcagctttggagttcatgcctggagtggttcaacagtctctggtgcaagtctaataagagatcaggcatatatatctgttctttgcataatattatggtgcccttattgatatatggtaagggtgtactaggggattaggatgattgtaagagaatgagaaagatgaccaaaaggttggtggtagggaggctttttcttatttccaaatacttgagaaattaccttttggtttacaaatctatgatcaacttattccattaaatagatacattaaaaaaattaaaaactgattcttctgcagagcactggtgtttctttttataaccccttgaaacaagtctctcacctgagcctgtctaaactttcggagggagtttattattgagtctttatctgtgacagtatttggagatttagggatttgatacttaggcctttgaattttagaatacaaaaagagaagcaagccagacatggtggctcacacctgtaatcccaatactgggaagccaaggtgggagtatcgcttgagcccaggagtttgagaccgacatgggcaacatgacaagaccccatctctacaaaaaaattaaaaaattagccaggcatggtggcacatgcctactcccagctcccaaggagactgagatgggaggatccctggagccctgaagattgaggctacagtgagccttgattgtgtcactgcactccagcttgggtgacagagaccctgtctcgagaaattaaaaaaaaaaaaaacttattttcttactaaaagcagtctgattacttagttgcatgcccttcttagtatcatacattatccaaaagttaccctttgtttttttttcagtattttttaaaatttttaagttgtgataaaatacacatgaaatttaccttcttattcatgtttaagtgtacaattcagtaggttccctttgtttttg

SEQ ID NO: 68935 - DNA, 1064 bp, Homo sapiens
aatagccttgttactgtgaaaacgaagttctatttatgattaccacatggtgtttgtttttttcttttttttccaccaaatggagcatcacagtcaatatgcttttaacagtgggagcagagaaggtagtgcttactctagtacaccaacctgatgggtcattagtttcaactggcttcagaagagtgattcttcctctaattagattttattgttgaagttccttcatatggaagatattttccatagtatttggataagctgaactgtgttttaagaactcatatggatgttgaaggttgttttcagtttatctttccagggaacttctgttcagctctgagtgggtctggtcctttttcatgcctgagggagcagatgtgattgcctgtgattgaagccagtggagagttataaactatttttgttctaacatggatgatgcctaaactcttccactcttccacagctgaacatactgacttgtggagtcattggctcctattcggtggttttagccattgacagttactggtccacaagcctttcctacatcactttgaacgtactcaagagagcgctcaacaaggatttccacagagctttcacaaatgtgccttttcaaactaatggtaagactcttaaatccaaaaaccagtgtgacagcacagtaggagtcttgacccacctatgctaaccagagcacttggaaactaaatttaaagaaagtcaactgggacaaaaggagggaacacagcatacaatgctgtgagaaccctctgttatgataactcaggatcatgggagtaaagcatttaaaattttaagatgaagataaaaatctactaaatgaatttcattaagaaatttccaagattatttaggtttacctggtcattctcagaggggagaaaaatactgacagtaaagatgtttgagacttatgggtggggatggaataagggatgagaatgacaacctgatttaatgttaagttattcccttgtttccctcctttaatgaagcatgcagtttgctagttgaaagagtttttaattagtaag

SEQ ID NO: 68936 - DNA, 1009 bp, Homo sapiens
cttttacaagaaagccacatatgtattttgtgaaggttaatatagttaaactagagaatagaatctataagttcacctcaatggcatattgctgttggcttcagagaatatggagtctcaaggtccagtcctgtagcctagggactcccagtcttccactctgacctggatatgtaggtcttgaggtatggggccatttacagatggactgaatggtggtgccagtgtcagtattaaacagcagtcagcctattcttgctttttaaacttaatttataaagaggagttctcatatatttgttctgggtcggcctaagttgtgcagcattttagagtccagcagcaggagaagggtttgggaagagcagatagttggttggttcctctttcctgatacatgaggaaatcacatgtcacagtgtgcagtggcatgacaggacatgctttgacggtaaaaatctgttaagtggactcactgtttacattgggttcatggcttaactttgaatgccttttacttgtattttttattttgcagtatgaaatcatgaagtcagcaatgtagagctaacaggtgatttagagcttggagatataattcaatgtcattttgagggttaggaaactgaggctcaagttcacagagctagtgaatggaagagcttggactattccagtgtcttctaaatgattttgttaataagtgcagagcgttgacctgcttggttcctcccacccaccttctagaacacatccttcaaagaagattgtattgacagttaaatgaagaaaattagaattcatttctagttgccaacatattccctggttgttactttaaggctttgatgtatatctgtgttcagatgttccaagaaaccaactctaacttggtaaagctgttgtttactcttagtttctttttgctttttcaggaaacctaaagatttttcatgatgatggtgtattctgggtcactttctcttgcatagctatcctcattccagta

SEQ ID NO: 68937 - DNA, 1823 bp, Homo sapiens
tgattgatcattctaaacaggataggatgaattaaaagaagatataaaagttatattttgctttgggacagtttgggtttcttttaccttttacattttatttctgcttacaaaactattaaaatttaatgtgtaatttcgtatcacatacacgtgacaaagtgctattcttattttaagcagaaaacataaatatattaaaatgagctatgaaatgaacaaataacaatttaacaatggaaactgacctatatacaagaaagtgtatcctgtagttggtactttaatattgtatctgtttaataataattactcccatggctgctgaatttcttctgccttttagattttttttttcttctgaatgctgtaacatgtaaattccaggagcttaagcatgtatttgtagattaaatatttaaattgcactgtaaaaagggtgcttaaccatagcttttgttgttttgcttttttcctttcctggtggtttgccacttagaattattcttcataggctttatcatcatgggattcttcttttatatactgattacaagactgacacctatcaagtatgatggtaagtgaaaattatatagtttaactgggtattcaagaaggcaggtgctgtgttttacttcacctttccttctacagtttggcctatattgtgtgtgacagcctattacttatgtaaaataatggtccatctagtctctgaacaccttttctgaactactcattcagaccttctgggtttttaatctgtatggtgaattccttggtacttagggaaaggaggggccatattgattatagacctgtgttctggctatgtgatatgttgaagatatgagatgtacaacaagcaaaatgttgaggttttctttacctgaaaacagatacctccctaccccattatgtttaacagaatgcttgtcaacttttccttctcaatcccaatttattgacaagccaagcctgtcactggccctgtgaggtttagctccctagctaatttccttgtctcagcccagacccctccctagagagggttgctctatgctggcttcatggcaccactgaagagccctcagtgcctgacctacagaaagctgaagctggcactggtaacggtattgtatgtctaaggcacgcggttggaagtactgccggttatccagcagttcatcctctctctttgtacagtgaatctgattctgacagctgtcactggaagcgtcggtggaatgttcttggtagctgtgtggtggcgatttggaatcctctcgatctgcatgctctgtgttggactagtgctggggttcctcatctcgtcagtgactttctttactccactgggtaggcgatatgtaacagatgttttgtgtgttcgagtgactgtttgaatactgcctaattggatttgcatcctggagtggtgttgcatgtcagtgcttctcctgtggagttctggaaatctgcattgatggtgtgacactttcagacagcaccaggactagtaaaagtccctccttcctcaaaggcacagtagatgaaatatagaatgtctttagaggtagctttgtatctatttgttgtgataagtggtatgtgtttattagaaataatggaggtaaaggaaataaggaggtaaaggctctgatggcagctgagtcggggaacctggtactttgtttctggtcttctgttgtaccctcaacctccactcccatccgctgccaaaccccaggtgtccctcaggtacttaatcaccctggggcagtagcacagggctggttctggggtttttttggtgtttt

SEQ ID NO: 68938 - DNA, 1422 bp, Homo sapiens
tttaaattgtgagtttcggtttaaattttttattgtgaaaaacttcagcgagcctccatacaccaattatccagccttaacaattttgatttatggccattatcttgtttcagctgtgctgtacctgcttctctgcctctccacctcatcaccctcctttatcactggattattttaaagcaaatccctggtcatcatgttactcacaaatatttcagtatgtataccttaaagataagcacttaaaaaatagaaccaccgtgtcattaacataattttcattttaaaatattgaaaatatttctttaatagcatcaaattaacagccagagtttgcttctggagtcatctcaattgttttccacagtttgtttgaatcaggttgcagatgagatctatacacagtatttagttgatgtgtcttttaaatctcttttaacctgtattctccctccacccacccccaccacctcccccccactccctgccaccttttgtccatgcagtttatttgttgaagaaacaggattatttgttttaggaacactctctctctgtttctctccactttacccaggaatatgtcataggaagtgttccataccgctatcagcaagcatatattgtctggattctctttttgttatagcagcagttgttgatattgattgtctacataggttcattcattaggggtggcaagagtattttaaagataaatttgtaatatacatgtatgggataaattatgtcagttcacttagcttttttgatgaaggttcgttctataaatattaatacaaagtatcaaattggatgtattatccactaaattttcattattttttaggaagagtgtcttccaaagtgttcttcactctttttgccctgcttggtttcttcatttgtttctttggacacagattctggaaaacaggtattatgtccaatgtagttgctatttccattttgcagtcttttcagtgttgctggggaatgacctgtgaggagagtaagcacttacttatctctactatcttcatagatttgtagctggggtcttgtagtcgtgagtctactgagttgcaatgcatttttatttttttctattctccctacagcggagtataaccttctcttattaacaggggaatacaattatgcagtgaattttatcagctgctagatctgttagttgactaaagataaccgagattagacattggttgtcagggccgggctcagtggctcatgcctgtaatcccagcactttgggaagctgaggtgagaggactgtgtgaggccaggagtttgaaacaagtctaggcaacatagtgagatcccttctctaccaaaaaattaaagacaaattggggctgtgtgtggtggctcacacctgtaatcccagcactttgggaggct

SEQ ID NO: 68939 - DNA, 1148 bp, Homo sapiens
acaagagaaatacagttcccatccttgtttatagtctagcagaggtgaaaaaacttttttcatggtcgtaactagcatttatacattgtttatatcgcattttccttaaactattaaaaaaaacctttggaagcattttgtgtgagagcttgtttacattagcacatacaaaccatgtaagatggccttttgaccatattaaatgggttggtgtatattttaagcaagaattataatttatgaatataccatttaatattacacgtaggtgggattatcacagaatagcttaaaaaaatcccctaaacactaatcatgtgttatttttggcttcaggtggttaccctaacagctaatgataagacaagtgtttccttctcctccctcccgggacaaggtgtcatatacaatgtcattgtttgggacccgtttctaaatacatctgctgcctacattcctgctcacacatacgcttgcagctttgaggcaggagagggtagttgtgcttccctaggtgagtatgtggctttaaacttttacaaattctcctttggccttgcagataatgcttttgtctagttctcattcattcaacacataccttttgagcccctacgttattccactctctgttctaggcactgggacatagcagtaaacaaaacagcaaaaatacttgttctggagcttatattatagtgagggagatgagacagacaagataaatttataaaatatgtaatacgtgagaaaatggtgagtgctaagaagataaataaagtaggaaagggagataacacatgccagtaagaggaaaatttgagatagatagcatggccagggcagtccttgatgcaccacgcacgtacctgggtgtggcatgtaccaggcagagggagcagccaggatgagggcctgcacctgggagcctgtctgagggtgtgaagaactgcagtgatgacaggggttgcaggagaacgaggagggcaaaggaagtagaggtgaggtgagaggtgcaggggcaggcagcctgtgtgtggccttgtagactgtagtatgggattttgcttctattctgaatgaaagggaaaggcattggaaggttttgagcaaatggtgccatgatctaagatattttaatgagatca

SEQ ID NO: 68940 - DNA, 1223 bp, Homo sapiens
ggattacaggcataagccactgcacccagcttttttttaaaaaaaatttttttgcctccccagagctgtagtattttactctaggcctgactgatatcagaatccagttatgtaatcacctttgcctgttggtgtttgtcttagtttgtggtgctgtaacaaagtagcacagactgggtggcttataaacttctttctcatggttctagagggtagaagtccacgatcaggatgccagcacagttgagttctggtgaaggttctcgtccaggttacagactgctgggttgtcattgtgtccacacatgacagaaagaaggctagagggctctctgggatctcctttatgagggcagtaattcgattcattagggcttcaccttcatgacctaattaccttccaaaggtcccacctcctaatatcatcacactgggagtgagggtctcagcatattaattttggggagacacaaacattcagtccataacagtgcattacttttcttcagaataccaattgttgccactgcaaaaggtgaactgttaaattgtaattattgttgcaagtgtttgaaattagggctcttggttcctttttatagatgggacttgcaccacaagagactgatgtttcattttgttggttgactttagaggcgtagatcccccaccatgtgacgctgggacagaccaggactccaggtggaggttgcagtatgatgtctatcagtattttctgcctgagaatgacctcactgaggagatgttgctgaagcatctgcagaggatggtcagtgtgccccaggtgaaggccagtgctctcaaggtaaatctgagtcccatgatttgtgtggctggattgtgacacctttgtcagagttgagaaggggagaagctaccaggatcttatttctttactcttttctcctttttgggggacactcactttattctcttttgttatcatcttgggagtctttgctggtgatatctcaaaatgatgttggcctttgaggagatgcatgtaaattatgttacgttttagttgcagccacatctgtgacttggtaatctgaaatgtgaatggaaggaggtggtaattttctgtgtactcccacgactactgggtaaacatttttggcaagtatgaagattacattgttttgagaaaaaaataatgagaaactgcttaaggatatacacattggcattcatatttgaac

SEQ ID NO: 68941 - DNA, 1060 bp, Homo sapiens
gggagcccttggagaagcagtaatagttaaggcaagacatagtccttaacagtttagttgttctaagcagaagcagtaagctcgacgtcatgaagaaaaatgatttggagaatggcacgttgtgagtgtggctgcagctggagtgtggagggccttgcatacaatttgaggtttgtactttatttcgaggtaggttctaaggaggcatagagtttttaagcagaggaatggtgtagtccatttcatctcttagaaagctaactctagaagtagtgtggggatggattggagagggcgcagcagagtcaggactcagcacaaaatgagaaatgaggatctgaacagaggccatgagaggcgggatggagaagaggagcaggatttgagatatccagaaggtggaattgatacaacacaatgactggtggttatggagtataagagggaagcataggtttcctatttgggcagcagggaaatagtgatacaaaataggtgtaggaacagggttatggtggtgctggatgttttgggaggtgggacggagtaggtgatgacttcagtttgggacacagtctgagatgcttgtaggacatttggatggaaatgcagagtacataatttaaataagggcctggagtggaggggtgagattagattcccaactaaatagctgttaataaaagctgtggcagtgagtgagattatccaggcatgtacttggatatttagggcaaaaaaatcatagcaaatactttactagtgcctactatgtgtcaggcactgtttctggtggataataactcctgaggaataagcacaacactgtggagtagtcaagaaggtaggaagaaagcctggagtttctgcctttaaaagggagcaggccgggcacggtggctcacacctgtaatcccagcactttgggaggccgaagcaggttgcaggtataatttatataatcgggagtttgagactagcctggccaacatggcgaaactctatctctactaaaaatacaaaaattagtcaggtgtggtggcaggtgcctacaatccca

SEQ ID NO: 68942 - DNA, 1032 bp, Homo sapiens
ggccttataaaagggaccccagatatgtttcttgccctttctctgtcatgtgaggatacaacaagaagttgggagtcttcagcctataagacagctttcatcagaacccgactgtgttggcaccgctatcatgaaccaccagactctagaattgcgaaaataaatttctgttgtttataaccaccttacctgtggtactttgttatagcagccttaactaagacaatcgtatatttttcaagaatgctttttccatgtatatgtgtgggcatgtgaacatagagatgaaaagaattccctggttatttaaggaaggttttttttttctatttgttttgggaagatttggaataggacatgcacactggatcagctcagtaatttatgttttggtcgacttcctattcatgacaatgtttcttctggactgcagactctcctttccaattcctcggaaacaggcactgccagtggactggttttcatccttagaccagagcagagtacatgcacttggtacttggggacttcaggcatacagcctgtccagaatatggctatcctactctcctactcagaaagaggtaacccttctgtcttctcctccctcttactctttggaatatggaatgtgttcatgaaactttaaggaaaattatcctattgagattgtttgttgcaagtataatttatataatcggattttttttttttgagatggagtctcgcactgtcacccaggctggagtgtagtggcgcgatctcggctcactgcaacctctgcctcccgggttcaagcgattctcctgcctcagcctcccaagtagctgggattacaggcgcccgccaccaggcccagctaattttttgtatttttagtagagatggcgtttcaccatgttggccaggctggtctcgaactcctgaccttgtgattcgcccgcctcagcctcccaaagtgctgggattgcaggcatgagccactgcgcccagcctataatcagaaatattttatagtaagagaattagcac

SEQ ID NO: 68943 - DNA, 1027 bp, Homo sapiens
cgtgcctaaaatcacacagctggtaaacaccggtattaaattgcagccacctgtgtctcttcgggctacgctgacttcagaattcactagacggttatggttctttaacaccagcacattcatgattgttagtagccccacaggattgtcatctttaaattcagggactctgttccagagatcattgttattgctgctaccagaggggaagtttctctgggttccaggagcctgtcttcagcataccttttgaaatacctcttgcattttagttctgagctctaccattcactggctggatgaccctggatgggctgcatcactttttaagccacattgtctttagcagtgaaataggagcaataaccatatttacctcaaggagtttttctgaggattaaattccacattcatttatgaatatgatttctgcaaattgatatgagagtacaagtgttgtaatgaaaagtttatctcgttgtaggtcttattgaattttctgtggggaaatttagatacttcgagctcaataggccctttccagaggaagctattttgcatgatatttcaagcaatgtgacttttcttattttccaaatacactcacagtatcagaatacaactgtttccttttctccggtaagtgcaaagaattattttagtaaaaatcatttctatattttgggggtctggtatttagtatgagcattagaatttgatatctctatctcttttatgtttatgatcttatgtcttaaattttaaaaaatcaagataggatgttttcaagttagtgactgagagtatctcaggcctttcttgagtgtggcagtctctgacctaaaaaggggtaatggagagctgagctggggagaagggcaccctgtgacaaatgtcaccactatgcaggcaagttttcttcgtgaattcccaccttttcattttcttactttagtggggccttaataacttttacctgagaatatatgtttaatgggttttcattgttgtttagctatagtattga

SEQ ID NO: 68944 - DNA, 1036 bp, Homo sapiens
ttgcttataatagggcactaacattcactctgtatagtgtgtgccaggtgctttccacgtgcagtgttatttaatccccaccaccctacaatgtaatgatcttcctcccttgtcagaggaacaaatgaacagctgctagggttacagataggacttgaacccaggtgagtctccctgcaaatttcatagtccttccacttccgtaaagctgtcttccaataagaatatcttacatggcatggtgctttgtacttaatccttctgtgaatcctcattcttcaaaatagccttatgatggaggtagaagagatgctatctctattttaacaggtgaagaatttgagatattagagtttttagttgatcgaggccagcccctgagtcaggagagcaggcgtccagaactttttctttctacttggtgttagtatttaatacctagaaatttttatacaaaagttaaaaaatatgaataaattgagaaattaatttttttcagacactgctttttgcctctttgctatgattatagcactgatattcctcaatgttattctttttgccttgcattggtattgtcattctgtgcagaagagggacaatgtggggacttaactgctgagtgataataaaagctgatattctccacatctatcagctaaaaatcagtatagaaaggtagaaggacatagttcaggacttgcataatcctcctagaaaatggctggattgatgtttgatgatgataattctgataaccatacaaactgaagaaattgagcatctgctgtaatttaggaggatttacccatctttggcaggatgagctaacttgcatgacttctgtagtggcctgaatgctaaataaatcttggaacgtggcagatggagttcctagaatgtctgaggagggtgctttctgtgaccagtaggcacatgagatggatcatacttttaagcagttttcccttctcttggagtcccagttcactgctgcctttaacatctttcatttgtttagattcatatccagtaa

SEQ ID NO: 68945 - DNA, 1070 bp, Homo sapiens
gcagcaatggggttcctgcagctgctggtcgtagcggtgctggcatccgaacaccgggtggctggtgcagccgaggtcttcgggaattccagcgagggtaaggtcggggcgcctggcttctgcaacccaaagttgcttttgcatttcttgcgaggtcaaaatccgccaggggtctgtcagcctagcagggagatggtgctgggggcgttggtacacgctgggtggtgagtccagaaccggcacgaatggtgtttcctgcagcggaaacactcatggctaaggaggtcttactattaacctcctcatttagcggaggaaatgggaagagataaataattctctttttttaacacagtattatctcccttagggagcagccatgtttgtggctttaattcaacttactaaagcgcctctttgctgcccagtggactgtctgagcttctggacagcaagacttggggtggaactagcggcttaatgactgatggctctcaagctgcatggaatttttacacccccaaatctagaggcttttcaaactggttatgttctacagagtttgagagggaaaatgaacccataatgaggctttatttttaaagagcctttaccatctaatttattaataccatctggagacaggaaaacattccatactcacaatgagaaataaaggactttctgaattacagatacatagacatacagatagaatgtgtataccctcaattctacaagttcagccacaaatgaaaaataaacacagaaacacaaaagcttgccagtccaggtatcagagttgttctccttacttgagggcaagaaatttctaatcgatttgaccttaaaaaagacaaatggacaaaaactgtgttctctgttgtctcatatccaacaggaaatagatctctatgagatattaattcgtttacagagatcacaaaattcccaatcattgcagctaccaacaggaaataacttgtcatccataaatgaactgtaaaaaataacaatttaatagagagtaaaactaaaatgagaaaaacaagaatcaacgaagttctatt

SEQ ID NO: 68946 - DNA, 1051 bp, Homo sapiens
taaaaatattttcctcctgtgaatctttattttggattttaaacgctctcattggttcaaaaagcaactttcattaagttgctgttactgcttcggctcttggctatttttagatagagttttcactcagctgtggtttgtttacttagctgtaagtaaatataaataatacaacgaattaaggtcaattcatttactctaaaaattgtagggttaaatggctaagcaaaaagaatgagacattatagctccttatccattccgttttgagtagaattagcacagcgttggaatgaccatgtataggaaagatagtactgaggtgatctgctgtatggtattatgctgatgaattagctagggtgtgtatattagtgcaaaagtttaagaactttgccatgcgatttaaatattatgctttgttttccttttgatttcccctcaaggaaggactgggaaagtagctcttttccctcctttatatggtcataataaaggattgcaaattaattagctgcattcaaggcatcacacagattgaattccatatttgtcttggagggaagtccagacttctgcctggggtgactgaatctgctttgtgagactgggtgcaacttccgtgtattcaagggtgggatcatcttgtcaacagccaaatatcttacaagatgtaagtcacttagaagaaattatccccccaaatgtggtttgtttttaatgtttctttcaaaacctctttcccccaacacacacagtgcagcagagaaaagttgcacctgcctgctacttgacagtagattctgtgatgattgattgtaggcattgttttctgtgtgggttgggaacagaaaaatgctctttaaccttttgccaggtctctgataagtactgaaaactttggcagttaaatgtggactgtaaaacacatgaagaaatactggaaaaacaaaaatggactcagattaaaaagctgaaatgcattattttctaaactagttcctttggggccttgattgtgtcagaaatacttactgatttttttcttttt

SEQ ID NO: 68947 - DNA, 1026 bp, Homo sapiens
actttgctgcaggggtagtacagtgtcctggagtggtcactgcactgtggactctcagctagaatgggagcttcacctgaaggttaggtgacatggactaatccaaggttttccaccaaatagctaaatgtctttgggcctcacttccataaaatgagggagatggactagataatatagtctctctcacttaatgacagataagatggtctgtatatcacttaatggtgaccaccttctgtaattgaaattgaattcaagttttgtgattttatcagccttgcctcttgatgaactaaatttgcaatcttagacctgtagtagagtctagaaaattgctaaatagaattgaacttataaactgatttatgggagtgtttgccagtgtgcttacttgaattacaggatatccttgatgacaaccaactatacaatttactttttattccattttaggtatttttcccctctcctagatttgttttcctaataatccggaattgtgttctaaagatcacaagtcaataaaatggtgtggtcctgttcattgcttaggtagtaagctgttcaggtattaatgataaaggtcattaccacataaaaatttccttcctgcctcaaagttttttgtattctggtatcttaatgggatggatgccttctgttttctcatggttgcggaagtcaagtggtctgtgtgtttaacacaatatctgagtctgatgagtcacatggtatgtctgcttttagttgggaacagttttttttggtcagttgtgatggtcaaaaaagtctcttgggagagtttaaatgactcaaaataaccaaacatagctcatagctacttaggtcttaaaattgtgagcttcgtgataccatattttaattttagtcttgtctaatttttgtacccccaaaggactgctgcttctggctcttaagttgttaaaacattagtctgatttctttcagggggtggtttttatttgaaaaggaacagcaaacaaaataacacagcaatttaaa

SEQ ID NO: 68948 - DNA, 1054 bp, Homo sapiens
ttaatgttcctcaaaagttttgtccacctctagccccccaatttggcttcattctgggaaggcctagtctgtagcagaccatctcctacagccactttccagtggacataggtgctctaggcaagatagccatcagccttgtgtgttttagattccaccttatcccaatcccattcaacatttaaattgaataacagttctctttgttttgatgccatgctcgccaagcaatcttctgaacctaatttcttgttactcagtgtcttactgtgtaaatcagtaaactgcattctgtcttgtatatttgtcttttgtgaactttgttaggataaagtgacttccagaatttgattgccctgagacactggcagctgagggccagaccttgccgcttggcagaccgagcagggcagcctgctcgacaaggccccttggcagacagtcagctccctccaaggccaaaccccaagttcaacatacatctttctctcccatttctgcaagcataactgtgaacagcataattctgtgagtcatgtgttatttctttgtgcttttttcaagaggcattataaaaggttttttatgtttttcaccattcactttttgaaaggaatatataaggccttggacaactagagttgggtctttaccttttgttaaggcaaacttgtaaagtggcaaaccactttataaatttttattggctacagatcttctggacattttctctgttcattagtatctgcttgctagaacaaatacaaggcaagtcagaaatcattctacaatcgtagggtgttgctctttaatggtacttttaaggttttcccaccccaaatatttgttgaaaaagtaacaggcagttgtttaccaaaaagcatttgaagagaactatctatgaactgcaattttatatgcctagggaaggttcactggaatactactgcaaattgtacacctgtcctccttttgaggattcaggatgcatgttagcatattaaagatgctgggaaggctaggcaaggtggcttgtacctgtaatcccagcact

SEQ ID NO: 68949 - DNA, 1237 bp, Homo sapiens
acaccttgacagaagaggaaacacagttctacatttcagagactgttctggcaatagatgcgatccaccagttgggtttcatccatcgggatattaagccagacaaccttttattggatgccaaggcatgtgaataaactggtgaattactaggctgttgattattttttagagcagtagggctgattttgtgaatggaaatcagcaactgcaatttagaatattgctaaacaacattatatgataaggtactaggagaggacttgggaattaaatgacaacagggaatatggctctctttttatctccctccattttctacttttaaaaatcatcatcagatacttaaaattttacattttacgtgtataaatcccaagctaagaatttttattataattgccatttaatagaggagtttataacaaggctttttgttttcaaagttaatatgatctaattttactggatttttttttagggtcatgtaaaattatctgattttggtttatgtacgggattaaagaaagctcacaggactgaattttatagaaatctcacacacaacccaccaagtgacttctgtaagtttggttgttgtttttcttctttcccctggttaagatactgtagagaacagaaggttctttccctttccccactccttaatccactgtgttttagatgtatatgtattttctttttgtggagagcatttttccctcgtgattacaattccatattgttgaaattagcatttcagaacatgaactcaaagaggaaagcagaaacttggaagaagaacaggagacaactggtgagtcaaccagtttttaagagaattttatgccttggttctaaaatcttacctggttttaacttgattatttttatctttataataattagtatttacttcataacaatggtagcgcttgctctgggatcacacagttttcttagtttctctgttaagtttccttgcctgtaaagcaaagtgttggtttttactttgtaactttagagtagtttactgagcatacctacaagtaagctgtttactagtaattagcactttaaataaaactcactgaggtgaatgcaattgtaatgaatgccttgtgatttccatttttccatttttcataactgtgttacaaatcctgatacaacaaatatcaatcagcaagtaaggtggttgtgagtttctaaaaacttctttatagacaaagtaaac

SEQ ID NO: 68950 - DNA, 1035 bp, Homo sapiens
ttcctaaaggataagcagtaccctggaattacatttataatgaaaatacctcatgcttatttttgtagtttgtagtttacaaaacacatgccgtttattgtttcatcttcatatcaactctattagggcaggtattattattctagttttatgtaagcagaagctgagcctcagagaaattgaataatttgcccaagaacacattagtagtgagtggggaagccaggtcttctaggttcaactttttcattctttttgaaatagactgaaggctatatatataaataacttaactgagcttcttgtgggggcagaaatgatatattcttataaaatgcctggcacatatggacactctataaatatttgttcaactaagtgatgaaaggaaaactaattcagcattccctcaggaaagtaaatagactgaaaaatagtagtctataacatattatctgactcactacctaccactaagccttgcacatgataaacatgcaaaataaatacaagtgaaaatttaactcctctatatattgctttttccagtagtaagccatcctcagatagatattttttaaatgttaagaatgctggtttgacgagttgctcctttgtaggcatattccacagttgggacaccagattacattgctccagaagtattcatgcagactggttacaacaaattgtgtgactggtggtctttgggagtgattatgtatgaaatgctaataggtatgttttatcattcatttatgtacaaaatatatacatttccttgagtgccattgtttgaacatattacagatatcattgactaaaatatttgaagtcttttaagcttaattctgatgttcccccaatgttaaatacatactgatcaataccagtgagctccccacggatcctgtttcaggaaggtgggtatttaacccaaactcccacgtataaaagtggttatctacatagcttttcaggtaaaaggggaggcagtgctttcaatcctttattttattgactttattagcaacg

SEQ ID NO: 68951 - DNA, 1080 bp, Homo sapiens
aaggaacagacatccctttctaactgcactgcctacatgcgtattaaggtccattctgcctgtgtgtgctgtggctttgaactgtaacacctctaatcaattcaggagaaacacatatcatttaaagcaacataggctaacctgtaggtaacactgcagtattgatgttttactgcaaatcttatgggtctagataatcagtaaaagccatcttccatagttggtgttagaacattgccctattggtttggacatctgtagaatatatatgaagacaatttctgtaatggttttaagagatttaaaaagaaattcactggttctttacaaaatagaatttatcatcaagttattacacaaacttcacagtaaggagtgacaagtttataataaggaagacaaagtttaacaccttcactcaagcactccactaatatatttacgttgcattcagaaatactgatgaccttcatatacgtagtctgtatactcatagggagatgtactgtattatataacatgtaaagttgattttcttgtgacaagagaacttctttttttaacaagaggacatggcattattttaatttgattatggtgagttgaatttaagacatgaccatgaaggctgcttgtagaattagtgtatttttattaaactatttttttaaatgtcaaacttctatcatgtaaatggacttatagagaacaaaaagctatttactttggttttctagaaagttgttacatatcatggctggttaacttttatttcttttgatgaaaatttttcctttgatagtacttgtattattgtgccattattttcttatgctccaaatgtaccaaagatcttgaacagagtggatgttcacaactgagtagaattttcctttcctgtgggcatgctgtattcagacctgacagatctttgatagaggtcagcttattaaagggcaatattgttcttgtttagctacatcactgtggtgaatatagatggaattaaggaagtaaatgcaggccagggggttgtgatgagaggataggggagataatatcagcatcaaattctttggg

SEQ ID NO: 68952 - DNA, 1001 bp, Homo sapiens
ggggttcgcgtgggttagtttcgtttctgatctggaatctcagtaactacaacaagaaaagtttaaaactcgacccgccaggttcttccccatcggattatctccgttccttagagatagcaggaagggcagcattttcttccatccacccacttccagccctagtctggctcagcgaggaatgcataaaattagtggactcctctgagtgacgttccccggctccaatcagcgggcgcgcaggcgcccccggccccgccccactgctgactctctttggctgattcctgcagggagggaggagagaagggcggcagtgggagggggaggtacctggaactgggagtgatgtcagctcccagctcggtgcctgcccggattcctgacatggtgtagtgcaggcagggtggggaaaggacggggaaggactcgtgtgctgcgagctggcggccgggccggagtgctggggctttgaactccgagaggaggtggaccagaacttttggaactagtgccggcggctctccaccccccaggtaagggcgttttgctccactcccagacgggagggaagtggcaccgttgtgtggctgcagctggctgttgcagctgctcctcctcttccccgggtcgatttccttgtgcaactcactcctgtttcccaatgggaacgggcactttttgggggtggtgggggtggaggggtagggcttaactcctggggcttggaccgagcttgtacgtgaagaatactccaggattggacgtttaggtcttgtctgtatccttagacccccacaccctaggctcccggtaatacctgagaaccccaaccagaggggcgtgtgtgtctctctgtctgtgtgtattgaggcatttaaaaatgccacaaaaaattatggatcatcgactcaaaaattatgctcgttgaaaagaaaaaaaaagttttgtatttttttgtctccttgtggcctattatatattaaaagaatatcaatgtt

SEQ ID NO: 68953 - DNA, 1056 bp, Homo sapiens
aaaagaatgagttcatgtcctttcagggacatggatgaagctggaaaccatcattctcagcaaactaacacaggaacagaaaaccaaacaccacatgttctcactcataagtggaagttgaacaatgagaacatatgggcacagggaggggaacatcacacattggggcctgttggaggggtggggggcaaagggagggatagcattaggagaaatacctaatgtagatgacgggttgatgggtgcagcaaatcaccatggcacatgtatgcctatgtaacaatcctgcacgttctgcacgtgtatcccagaacttaagtataataagaaaaaaaataagcctagtgatcctgagataacaatccagttgggtagcctcatgctgatcccttcaaatcactttgtcaccagccctttgaaacagagccaggatagtacatatgagaacccagcaagtttcaccagggatttcttgttgctggctggttggctcagggagtaaatagagtaattagtgctcattagcactcccacgagctataatgcatctacctgaggcagagagatgcttgcctgtgttcctgaagcatagaaatctccatgtgatctcttcagtccagacatttttgcactgcagaaacaaatgccaacttggcaagagtaaaatcctccaagtgcctcaaataacagtaggcaaaacccgtggactagggacagaaggctttcctaggaacggttagtgtgtctaagaaattggtgtgctgtttaaagctttctcttctcccccaaccggccgcctctcagtgtatgcgactgaggtgaaccagattagtcagagatgttggacacggtagtcgtataacttgatcccctcagcctcttgtcagctgtacttcagaagctatagtctccattaatggagggtctggattgtagagtcattgagaaagaagagagagcaacctttgacggtgatctgcggccctgtccaggaccttgtgccattgatagttcttgttcctgtgaaatattaatctgtggtatgaaggtgggagt

SEQ ID NO: 68954 - DNA, 1661 bp, Homo sapiens
aagcaagtgagtgaggcacacaaactcagacttagaaccttccagggggccctggggatggaaggcaaatataggaggttatagctttggttcctgaatcaccttatgtgatattttagtcatagtcgaggataatgatttaggagttaaattgccaaaggataagtcaatatgctttggcgggggtagggaagaatcaattttctggcatttccgaaagccagttgcactgaacaaatgtctaaaactggcatggtttgttgtataagtgggatgagtagacaaagccaaagttatacctaatctctttcccaactgcagattaagtcatatctgtaaaaggcaacatggtttttcttctgcattttctgccttctagtaagtgaaggaggcaatgggttgtgctcctccatcatctgagtagtttgagtgtattttggggactggaggtggggaagcctgatgacttcgtcgtggcatagagcaaaggtgatcgggggtgtgtgttcagaccatggacttcgcttcccagtgagccccctggactctgtgtattctttgcctttatctgcattgccacctggaagctccgtaatgtcaagtcctggaagatattactaacctgtttccattatgggtgtagtagaaatataagtaggtcactgttcctaattcagaaactgaagagagtcaagctgccatggtgacaggttctgtataaaaacacccacctctgaacctcttggagagatgtgatgatttggtcattggatgtgaaggggataatctgccagctggtttattgcattggctagaaataggagatgcagaaactaaaaagctctcaagaagtcatcagatgagaaggaaattaatgtagcatagtgattctgctgtagaggaaaggctaaaggtgagactcttgaatatgtgcaccatttcttctgcagctcttgacttggatgatccttctcagtgtgatcccacgagtgtttggtgatgatctgatagtagaaagggcagagcgatttaactttgtgcacatcttcctctgacttctccatctttctaacatgcctgtacgtgtgcctttatcattggcattctggagttagggacatgaccttttctacagtccggatgaggaatctccaactatgacttttcattgtgactcacgtctgcaaagaatgaataaagaagaatttgttggccaggaagtgtgtactatgcagagagaaataattgttgttgggaaagaaacttttgaagaaccagaattaaaaaaaaaaaaaaaagaagaatgaaggaagtctatcaagaaaaggaagaaccagaagtgatctgcagggtgttgcctggagatatgggaaataaatcaagaacagagaaatgggaaaagataaaataaaaaacattgccggttaggaccagctggggtcctaggaaagtggcagttccagcggggcttggaaagctactgaaccactcacttatgcacacacaactgccccgccctctccccttctttggcccccattcacctggtgtaggagggtctgacaccctcaccagggagagtgctatttggctgttttgaaggcgagaccttgaagcgtgggagagcttcgcctctttcgtaagctgatgttgcgtaacct

SEQ ID NO: 68955 - DNA, 1009 bp, Homo sapiens
aaaacctaattatagttatacctcttggcataattataagctcctctccttccagacacaaaaattaaatggtgaaatttttatgtacatacatagcaccaatgtggaataaaccctgctatttctctacatgaaaaataaatgtaattggggtaagttgacattttctagagaggacatataggctaggagatgctgaagctgtttctttctcccctcagaaacaaaacactgtaattgtgatttgaattagaatgtaccatgccagggactgaggctttctttaatgataaaatacaatctacgtaatgttcttctgtggagagaatttgtgttgacaggtaagtattacacatggacaactttactcaaatgtttttaaaatgtacacccagaagttttgtctttgtgtaaaatatattactgctttttcgtctttgaaatgccaaggttttcccctgtgttcccagatagcagtcagtaatcctgcactttaaattcaaattattggctggcttagatcctgactaaaaatttgggaggaataaaggatcatggatttgcctgaggaaagatgagttcacaaaacctcaggaatgaattaaatgcaaaatgagtctgtttctttcggtggtttggatttggggttctttgtagcaaaacctcaaggattctatcagtttggattttggaaattaaattagatgggactagtattgtctttgagagagacttgttgaggacagactgaagaggaaaagctcaggtgaacacatgatttgcatccagtacatgttgtaaattattggcatattttggctgttcctcaaagcaggactggctgcatctgtgcttagaggtaaaactaatagaggaccacattttggttcttcctgtgagctcagtactgtgtgagtgagttacttacatcaacacagccatacgagttgagtattattattacttctgttttaagatgagtagatagaggttgagagggcttgggtaa

SEQ ID NO: 68956 - DNA, 1405 bp, Homo sapiens
aagggatttagaaaataagcaatagtaacaaatgtgttttttatctcaaagagatccatagaaatcacttatttaacagttggagaattatcttggaatttgagacctgaggttgtgggcaggatgttaagagtttgtttgattaaatggacccaaatatagactggtttcttttttgcttctctatgtatgggataggtttgtgagtcaaataacaagctatttgtatttatgcttgtcatttcactaagggtttttcttctagaaatgctgtttgcatgggtttggatttttttatggcttacttttcagttcgataatgtgttcttgttttcaaattaaacttgtcattgagattttttgcgagtggctatgttggttagttagtatttatagcttaagtctgtttctgaggaaatgactaaagtctcttcatttgatcaaaactgtagaacaaagaacatctttgacttacttaaacaagtcctatgatgaaaactcaaaaaatataatggttcatgtttataaatgtttttgtgtattcagtcctggttaggccaaataatcagagctctgtgctgagggagggattgaatatactcagtgcctgttagttaatgtgaatttctctggagcacattcaggcaatacttattttctcataatcctcctcccatctctgccccatcccccaccgctttttttttcatttaacatattgttttgaattggattttatagaacataggtttttgtcttcttcttctttttaaactattctactaattttctcctttcttattcctagccaagagccctgatccaggtgaagcgtgtaaaccttgcacatggaattcccagcaaagaggctggtggggatcgggacagggcctgggaagtgactgacttgcagaaacccgccatgtcttgttctctgctggagacctttgcttatccatcttgtgaacatctgcagcctccccctgcagcctaatcttgccctcttactgttgactcagtcctcatggaagtgtaggtgcccttccttctgctcattacgttccagagcaggagatgagggggctaagtagggaagaagagaaggcccagctcctgtctgctcagacccggactgacctctgccctggggctcaggctgggacttgtattttaccataaaggccctatgacaggtggcggttggattttggtgttagatcagctgtgttgtggactgactgggattttctgcactagattttaatctaattattctttggtaacattgattgtttcagctctttcataaacagctcaaggcaccacttctccaactaaatcttgtgtctaagtctgaaacagatgaaagtgaaatcgctgtgcccatggctgcacatccactcac

SEQ ID NO: 68957 - DNA, 1020 bp, Homo sapiens
gtatgtatttctacatattttatacaacttgttcctgttggacaacaaaataataaattgtggacatttcccatttttttttaccttaacgacaaaatattgcaaaaccgtggttcattcatttactcaacaaacattcatagagtacctaccatgtgctactactactttgtgctataaaaattaatgatggtggcttcagcagaaaaattagtcatcagggaatatttgaggttgtccagtaactgaggaaggaagggagagaagggtggagtgctggacggggaagaaggaagaaggaggataggagagaaaggatgaatggaaggaagtccttaacacgttttgttgtttttaattacactcatgttatctagtttaatattctttatataatcagccatttgccacttttattttttctgatgtgctataattttaacttgtcgtttttgtatttgtttcttttcagtataaaagaacgtgtggatcactttgctgagtacatccaagatttgaagaactgaaataaatcagctttaaacctgctttttaaaaatgtaagtgaactcacttctggccatggttcatttcagactctctaaaacctgcaatttcctctcagtgtgtgtgaatttttttccaggagtaaagttacttgactctagtgagtctactcattaagtctaggagtgtttgtatctgctcgcccttttaaaacctgtaaattctaagagtagtatgaataacataggtggctgtaggatttagacgcggtgtggcaggcagtgagcaaatcttcatttggcactgagaaggaagacacagacttggtagaacataaaataaaaagcacagccctcttctcgagtccttcatcactcttcacctcacagaccatttcactaccttatctacaccagcgagaattgctagttgacccattaatgacccagtaggcttagaatatgaggtattggtttctcacaggcatatttacccactttctccctatttctc

SEQ ID NO: 68958 - DNA, 1054 bp, Homo sapiens
ttccatcaaaaatcacaaatagcaattggttgtcatgtttctttcatctcttttatgaactctcttgtctccctgtcttttttgtgtttccttattttgtgtttcatgatgttaacatgttttaaaagtcaaagacagttgtgtggtaaaatatcgtatagtctagattcatctaactgttggtgtcctcataattagattcaaattaaacattgctagcaagtgtacattgcttctcttcagaaggtgcatgatattagctaggctgagtttaatcacttggctaagttggtgttgaccagacctttccattgtaaaggtgcctaatcctcttgataactaagaatgcacctgtggggtaatcttagagagcatgtgcatgtttttttccctgacagtgattcacccaatggttttagcatctattttatgattcatctattatgaatcaattattaagttgctggttgcaatatggtactaacttgatctctaaagtcattttactgaagaaaaattctcctttccatcccatgtcctgcttggggaaaatcttggcccaaaagacgcatgacagaaggatcgatgaaagtgaaacttgaaaacaactatccaaacacacattaactatgaagatgtttgaagggttttcttttcctttctgagtgggtatgcaggaaacctgtaccctagggtgagagctctttattttaaagatttgtacttaaaataatctttattgctgcaggtgaggaaaaactaaataaattgctatttattttcttttggactgagagaattcagtagcaatgagatgaattttctttcagtgccacaatctgaaaagctgtgatgtttaccataccatttgaaaatgtcttagaagtagttccttataaagcatattatattgaaatcaaatgggcattaaagccatggaattcctttgaaaggtggaataaagcggaaattgttttgtcttggtacttcttgatctagactaataatcctttgggggaatttatcctgaggctttttaccaattgtgctcatg

SEQ ID NO: 68959 - DNA, 1125 bp, Homo sapiens
tgcctatatagcgctgtagctgggtttttcaggccagctgcactttgaaaagttctggatgctgaaagtattggaaaggttgggtccttctgagggccaggagggaaggatctgttccaggcttctccccttggcttgtacatggctgtcttcttttgcattcacatcatcttgaattttgggcacatatttctgtgtccaaatttcccctttttataaggattccagtcatactggaattagggcccatccgaataatcttgtttaaattgattataaagaccctatatccaaataaggtcacatgctgaggtcctggggcttaggatttcaacatataaattttgaaaggacataattaaacacatcacatcatccgtagttgaaccgcaacacaaattagcctcagaaatcaagctgtatttattttgtgttttgtttttatttgctttttagctatacttattttgtaattgtctataaactgaaccagtttccataaagtagttgaattttatttctttttcccagatccgacccaccagagggccatggtattggttctgcagtcaacactgtgctctctctctctctctctctctctctctctctcatttgtttcatgagtcattaggccaaaaaatgttaggtaaatgaaagcaaatatgacagcagtaccttgaacaaggggaccacgtctttccccctcaagtccatgacgtgtaacatgtctaatattctagttctgaggattttaaatgtaattcgttgatctgtagtgtgctttcactggacaccttgctttagttaaaccattcttgcatatccttcattttccacattagccttgtttagttgtgcagttttgacattcatagctctccagtgctttggactgaatgtttattgcaagaacttgcagctgactttctatcaggtcattctgatgttgtccagggatgccgtcagaggtacaggttcttgaagcaccttttatgctatcttccttttctactctgggcctttcccagtttctgggaggtcaaggtatctgccaagcctctctctctgcagcacactggcatcagtcatacttgtatgctccatctgtactttattggtgtt

SEQ ID NO: 68960 - DNA, 1053 bp, Homo sapiens
cattattccctcttcctttttggaattactgatagaataatcttttaaagtctgataagaaacattgacaatctattctctgaagcttcctacctggaggctttatctgcatgataaaaccttggtctccacaacccctcatcttaacccagacatccctttctattgatagtaagtctttagataataacaactttttcaaccaattgccaatcagaaattcattgaatctacctataatctggaactaaccaacctccctcccccaaattgtgctccctttctggactgaaccaatgtagatcttacatgtatcaattgatgcctcacgtctccctaaaatgtataaaagcaagttgtagcctgaccaccttgggcacatgttctcaggatctcctgagggctgtgtcacaggctgttggtcactcatgtttggctcagaataaatctcttcaaaatattttacagaatctgcctcttttcattgccatagacttgatagagaaattttaagagtgggtctttagtccttaaaaagctcgatctagtagagacaacattccaaggacctggttaagtgaggctgcttgccagagatacactttttccttagccaagtataacatctattagagataaccagtggttccatatggtacttggtaacagaggctgagagagaatgggtgtggggagagacaagtgctataggagtacttgatgatgcggtaatcttccttgagtattctgccatgacattcagtttttatatacgagatccaggcacagccgtcactgggtatccacggggagttggtcccacgacctcccacagatatcaaaatccagagatgctcaagtccctgatataaaatggcatcgaatttgcctataacgtaagaatatcctcctgtatactttaaatcatcactagattacttataacacccaatacaatataaatgctaggtaaatctttgttgtgttgtttagggaataatgacaagaaaaagtctgtaaatgtttagtcacagacacatttttttttcaaat

SEQ ID NO: 68961 - DNA, 1080 bp, Homo sapiens
tggcctcccaaagtagtgggattacaggtgtgagtcactgtgcttggccttggatggtgaagttgtaattttctaaggggttttgtccacccaaagaactcaactataactagcagatttctgggtaagcaaagaatgggaagaaatggagctggatattctgagccttttattttggaccataggttcatataattggattattcatgatccttgattcatgacatattatcatcatagtcttagatgcagaggtccatgcatgtccaacttcattcattatttagttcttttttaaagtggaatttttatttctaatttctaacaaccaacttctctttcctaatttttcaaataccaaagttttatttggaaagtgatcctaggaaagacttagagaaataaagaagagaactgataaatcatgcattatcaaacaagttaccactctgagtagatcttaattgtctggataattctgggaaccaatgtagattacatgaatcagaatttgctctttctagggggaaagtgtgctggagtatttaaagctgataactttaaatattaaagggacattaattctctagcattttcagaccaccacatccaatggcagagggctccctgaaatcttggacagttaaaagttgggctggcatgcatggaattacagagggcaccaattacatctgcctcagttagaagctaaacggtattattaattcatctgtttcaaaggcattcccaattaaattagttctaaatgaattttatgctttcaacatttagccaacaatgagtggttccttcccagttaaaataaagaacttaaatgggattgacattgggattctttatgcctgacaagctttaaagaccattgcatagtttgatgagttttggcaaatgtataaacttgtgtaacctatatctcaatcaagatactgaccagaaattccactggtgtctcctttcagtcactcaccattttctgtaagtaattattgctctaccttctatcgtaggttacctgttcttgaatttcatataaaagtatcatacagtacatggtccttt

SEQ ID NO: 68962 - DNA, 1073 bp, Homo sapiens
agagttgaaggactagcccaacagctcctcaggcacctttgggtatattgagttgccccccctgactttgaacacatctatgatctgtgtcatcttcaaagagctcatggaatttgaattccctgggttttgtttttgtttttgttttggacggagtctcgctctgttgccgagacgggagtgcagtggcacaatcttggctcactgcaacctccacctcccggatccaagcgattctcctgcctcagcctcctgagtaactgggattacaggcacatgcccccacagccagctaattttgtatttttagtagagatggggtttcaccgtgttggccaggctggtcttgaactcctgacttcaagtgatctgcccgcctcagcctcccaaagtgctgggattacaggcgtgagccaccgtgcatgctacctctcccccctacccctggccaggttctttttcttattctccttgaagtatcaaatttttgataatttctatttcaaacattaactttgtttcctctcttatactatctccacgctgccccctaaaaagataacttctgtacatgctgtctttcataaatggttgaagtagctttaaccaaaaagtattgtacattcctaatctacacgaattttctccaaattgtataggcctccttaaatcaaatagcaacatataaataggaatgtgagggaccactgtcttcttggtacttctcagatttttttttctttataaccgtatgaatggtaggatcattcctttttttgttccatttagagaaataacgtatgcagtgggacccaaattctttttcactcattgcattattttgctctaaatacaggtaagtgtgttaacagaccaggtggaggctcagggagagaagattcgagatttggagttttgtcttgaagagcacagagagaaggtgaatgccacagaagaaatgctgcagcaggtatgtgcagaggccagaaccaagatgggatttccctgctgaactatgtgagatgctgcatttctatgttgtgtttgctctgatgcagcagtaagtttcttga

SEQ ID NO: 68963 - DNA, 1057 bp, Homo sapiens
agatggaatctctgtctgttgcccaggctggagtgcaatggtgcgatctccgctccctgtaacctccgcctcctgggttcaagtaattctcctgcctcagcctctcaagtagctggggttacaggcacccgccactatgcccggcaaatttttgtatttttagtagagacagggtttcaccatactgtccaggctggttctcaaattcctgacctcaagcgatctgcctgcctcggcctcccaaagtgctgggattacaggcatgagccactgtgcccagcctcaagtgaataattttttaaaagtgtgtagattcagtaattatacttcactatatcctctacttgataggtgctgctttgtgcgatcataaatgaggtaaattcacgtgcctgtttataataaaagacttcttgaatgtatctgttaaattataataggagcttctaagtaggacatccttagaaactcagaagttggatctgatggctgaaatatctaacttgaagttgaaactgacagctgtagagaaggacagattggattatgaagataagttcagagacacagaggtgagtgatacagtctctcctccctctctctctctctctgtcactctgtctttgtctctgacacacatacattcctagggcaaagttgaaattccctggaggtgtgcaaggaaggcagttaattactacgtaccatcatcctacttcattttaagaataatctttcattgcattgactttttatcactagatgctaatggcaatttttatttttagacttttgatatgaagtattaatctttttattaacctttagaaatacttttgactttacgatatttggagcatccgtccatccatactgtttttcttaattttgtaaataatgggcttaaatacatggtttcactagtagttattatttaggcacactgattatttactatgtaattggattttgaaaatctgtatagaaaacatgctaacattctatactcacaaaatcacagacagagcttttttgaggtcttttaatttggcattct

SEQ ID NO: 68964 - DNA, 1071 bp, Homo sapiens
aaattacaaattttttaaaatagccatgtatcattgagaaggttcaaaaggtaaatggctttactaaagaatgtggtatatttaaaatatgaaatagcattctatgaaatagaatagaaatagcactctgtgaaatagcatagagtcatttttaggatagaaatatctgacaaataatagatattacactacctttcttaatcaaaattatactcaccttttattttcataagcccatcactttagggcagacgcattggggatttaaaggaatgttttaaatggaaagatgccttcgttcttaaggaggtacatttatttccatttgtctcatctgattcatacaactttaaccctaggagctggtgacttcttaagatttccaagctgctattttataggtataggtaactgtgttaccactttcctaatgtactttcttgtttcttcttggacaggggctgattcaggagatcaatgatttgaggttaaaagttagtgaaatggacagtgagagacttcagtatgaaaaaaagcttaaatcaaccaaagtaagtttttctcacaggttaacattttcaaacaaatggcatcactattcatctatgcccaataatataaataagatgttttctacttaatgtatgataaagaaggtattttaaaagtaaatgaagatttccccccaagctggaaaccttgaatttaagcaccactgatctgaatttaaaaacaaggcttaactcatccgacagaacataacctgccctttctctgagttgtatctaacctcctttataaactgatactgttttctcggttatttagcttgtctttttctatctgtagttttctttcactcctctgtctctctaccagtctttaatggccaaactttctagcatgaaaatcaaggtgggtcagatgcagtatgaaaagcagcggatggaacaaaaatgggagtcactgaaggtgtagtagacgttgggtgatggggtccatggcctgttgctttctggcttgtgttgttttgctgtgatgatgtttttagtggcatgtgcattcattctg

SEQ ID NO: 68965 - DNA, 1057 bp, Homo sapiens
tatttgagacagggtcttgctatgttgcccaggctggtctcaaactcctgagctcaagcagtcctcccaccttggcctcccaaagtgctgggattacaggcatgagccaccacaccaggccctggagtgacttttcatctttaaaatatataagttttttattattcaagtaacatgcttttgtatttgaatatcaaattttaaggagaatcacattcagcttactttggcctttatgtcttgaaatctatcttaaggtagtattggaaatgaagtttatagatgaagcaaagtacttattatccttacgtatggaactacaaccagcttcttagcatgactactcatgtaaatactacaagccatcaggcacttaccgttcattcatgcctctatcttggttataactatcattttctctgcttttgtcattatatataccattcatggctttcacgcactgctttatagattcctgttttagaaacgttatgtttttattactatagcactgaaatttcatcttcagtgttctcatgaagattctcttgttgctttaagagaggatagctagttctcacacacccttgttttctttctagagtggcaactgttcaggtgaggtagaagatgtccatcttttcagatttttccaaaagagaatatgggtgttaaatgtgccctttttaaagaataaatgaaagaaatcattaacatctttaccttaaaatatttcagtctggagagtaaataacttcttatcactgtcacacatgtgaactgaactgacttctgatttgatgttattttcagacatcgaagtacaaaaaatgaaaaaagctgtggagtccttgatggcagcaaatgaagaaaaggtatccagatgaaatttaaatatacgtgtggatgttttttaacaccattttgaccattccatgcaatttcatgagctatgccattttaaaagaacatgcccagaacactgctaggagtgaggggcaggtgtgcacactcccaggtgggctgtatgcacaggaatagggaggagctgcactgg

SEQ ID NO: 68966 - DNA, 1050 bp, Homo sapiens
aacatttcatccagggcttaaggttgttaggatttattattactagctgggtacagtggcacacgtctataaccttagctactcaggaggctacggcaggagactgcttgagccgaggagttcaagaccattctgggcaacatagcaagacgccgtctcaaaaaaaagaaaaaaaaattactattaacttacttaatggtataccgtcttattcacaatattcagtgtcttattcagaaccaagttaaaaagtttccttcctccagaatgatttccttgattagtactccttctatatagatgtttatattctgaaatcattttatacagttctgaacactgattatgagattttgtcaatagaccgtttaattttcttatgtttatttaaattactctgtggcttgtgttttgttttgattgattgattgattttttgtaattacattacagttccatactaccatcttgcaagtttccatcccttcattattgccagcaactgtaagcatggaaacttctgaaaaatcaaagttgactcctaagccagagacttcatttgaagaaaagtatgtcatttattaacagtgcaatataaatgttcaaaaaagtagatcagccaaagacaaggatgtattgcatttatttacagacacaatttttacctagagaagcaagaaactgcaagatgtccactgggggatctgtaatcagttctgtattatggaaataaaaggtgtgaagcaggaaataataagagatcaggctggggaggtagggttgtcaggttagaaagagattttaaggaacttggccaagtgtggtggctcacgcctgtaatctcagcactttggaaggccaaggtgggcagatcacttgaggccaggagtttgagaccagcctggccaacatggcgaaatcccgtctttactgaaaatacaaaaattagctgagtatggtggcacacgcctgtaatcccagctactcagaggctgaggcacaggaatcacataagcccaggaagcggaggctgaagtgagccgagatcac

SEQ ID NO: 68967 - DNA, 1002 bp, Homo sapiens
aaattactgaataaatcaatgtagctataataattgggtgggggtgaaggtggggagctgtaagtttacaaagaaataatttctgatttgctattatctcatgccagggttttgcagatctcatgccggggttttgcaggtctctagccttgcttcatcagttttcatttgaagttcaatgcttttaattcatttttgcactgacatattttgagtccagtgggaaggcatcacagggaatgatgtgatgcttggaaagctgagatgggtttttttgcactttcagttttatgaactgacctaatatctgtgtttatccaagttaaagtctggattaaattaggaaagtctattttcagagcagtactcaaaaatgagatcttttctttctcactattatcttttactttatttggtagttgatacttctggcaatacacctaaatacagaagaaatgccttttgaaagtttgtaaatgtgcatatttatattattctgtttcgtagaggcaaatacattacttctctgtcactctctctaaactggtcacatatctctaccttcaagtttttagtaacaccagctctatataattgaatattaattatgtgaaagagaaagtctctggatgtttatagtgtctctttgccttcactaggatagcaaatgaattattatgggcagcattagggattcctctactatgctttaattagaactataaaatgaattgctttgccagactcagaaatgtgattcccttgtgaattgaaaagtgaaacttccattctttattttaattagaaggattagatataaatagtacgtgagtatttttaaagttcctagtacatgcagaggatgcagcactagtccatggaaaacactgctttattttcgaatattgacatcacaaggctagtcctaagtgcttttccagctcttctaacatgtgcagaacagttagaattattggcaggacagttaatcacccctgcttt

SEQ ID NO: 68968 - DNA, 1133 bp, Homo sapiens
tccatggatgacaaccccttcggcactcgaaaagtcagatcttcctttggccggggcttttttaaaatcaaaagtaacaagagaacagcaagtgcaccaaacttaggtacgtatgaccaaaatgcctttgccctaattcttccacaaggaggaaaagagcagtgtcttcccttcccttactctttcattcattgattcatttctctttctcagaaacgaaggtgaatgacttaggggaatttagcaaaaaatgcctccgtggatttaatttagtgttgtgaagatatatagactctcaccctgctctctcctgtggtataaacttagcggaaagacctaaaatcatgattccctttgacttcatcatggagtttcccatctgttgtgatagtggataaattaacattgacgttgagcctgtgtgtaacatcagaagcactgtgtgccgcatgcctctcctccacggtgtgtatttggcgaggaggagtctgatctgcatttcattttgtcatctctgtgttctctccattgggctgcgtgtgattgtgtgcgttgttgggatatctgaagatcgtaaacgaagtgccagtgcacccaccctaggtattgtacccctgcatgccagccttcaccagcactgtgctccaaaccaatctaatccctgctcttggcatctgtgatctctagaaagcgatctgacagcaatcagaaaatgtagttctctattccggagtgttctttccaccttctgctaaaaaggactctgtagaggctttgcttccaagcctaaatgctgttttaaccaatactagtaacactcactgtgtgaatagctttgagaggacctagacgtgtgcagcatccctcagagtgcagggcaggaatgtcctggcattgtacattgcagctctttcagccttgaagtgcatattaccacacactaactcccaggtccttgcagtccgttctccatgcttacatttcccccagcctccaaaaagaaatttttttggccatatagggaggtttatagaagacattgaatattatagttttaggcttacttctcttaggggaacattcttctgacgttttattactttgaagatggagataatatttagtgatgacag

SEQ ID NO: 68969 - DNA, 1031 bp, Homo sapiens
gggaaaaaagttctcaaaataaaaaagagaaatatggtagttttaagatgaggataagctaggcagcattttcaggggcacctgtagccatcgtggttgaaggatttgaattgggaaagttcctttgggtttttccaaaaggtgctgttaccttgtatagatatccacctatctattcacatggaccagcaaacgggacttctctctctatcgatataaatgtctagaatgaacactggatgcataaaataaactgatctgttcagacaactattttcaaatagtttttttttgcatctttcttagaagaactgttttgttaatgctaagaggtaaatgctgcttattataacctataatcacagctctgctttgtagaaaaatcaactttctgcaactcatagatcttgctgaaacactgttcttgtgattttagtacaacttttactttcttttataaagtataaaatctcacactgaagacaacagtagcccttgtgtttgctagtatgggattgtccactaagggacagctaaaagaactgaaatagttaatgcttggagatctgagagtggcaactgtggatgtgattcttttaaggtaaaatcaacaggcacttactttatgtcaaaagaaaaattaggcatatccagttcattcttctctcagtgcctaggatttaatagattggaatacatttcaaaaataaagaattgcttgaactgggtaactgatttgatgtaaatgccaaaggagaaggagtaaaaggaaaatgacatagagtctgagctagagtaacagggacagtattaattaatattaaccaaatatcaaataagaacatttaagagacgaggccaggcgtggtggctcacgcctgtaatctcagcactttgggaggccgaggtgggtggatcacgaggtcaggagttcaagaccagcctggccaagatggtgaaaccctgtctctactaaaaatacaaaaattagccaggtgtggtggcgggtgcctgtaatcccagctacctgg

SEQ ID NO: 68970 - DNA, 2694 bp, Homo sapiens
ctctaaaaataatagtaatgatgtaatcaaattattcttgccatattttgtttatcacggtgactattcagctatttggcgtgaataagaagaataaggttaatttcctgagattcataacaagggtcatttatcattgcatcatttatatgcctaggatgcccttttgtttttatccatatttaaacatccagctacttttctctctaccatggggtaaataattaaattatacatataggagggagggggcaacgcaaaaaaaaatcacatgttatcaggccttgattatatgaattttatcaaatcctttggatgtttttgtttgcttttcttttaaagccaaagaaacttgcctttagcaattttgggaatttgagaaagaagaaacaggaagatggtgaagaatatgtttgtccaatggaattgggacaggcatcaggaagtgcatctaagaaaggatttaaacctggtttggatatgcgcctgtatgaggaagatgatttggaccggttagagcaggtaaatccaacactgtataactttttgcgagttcttccatcattcagacactaaatgggaactttgtatactgtgtctgatcaaggacattttcttcaaataactaaaaatacagataataatagtgaacacttagagatcacttatatcttccaggtaccatcctaagcacttaatgcatactatgtttatggtaaccttaagacatggagagcattgttattctcattttggagataaggaaactgaggcacagagagctaagtaacttgcccaaggtccccaacctgtctctttggctccaaagcctgtcatatttaccaatattttgccatctctgtattaaaacatgttaggaatggacaggttattctacctagccttttcagattaaagtcgtgggaccgcatatttcccctctaatcaacaatgctttgctactattagcaaaggcattagactagctgtgtcagtaaagtgtctcttctaatttttcacttccagttgcagtggtgaaaggagattatcaccagaagtgttctgttgctcttaccccattcagtgctatttgcattatttcttcttagacttttgttcctcctgctgcactttccctgaaattgtgaaaacacttatgtcatgttatggtttgttatttgcagatggaagattcagaagggacagtgagacagataggtgcattctctgaaggcatcaacaatctgacggtgagtttgtgaaatgaattgaaaatgttattctataaatgtcttttataacaaccccaaaggaccacatgtctcttggagaatgtgtagctctgagctcttggctctcagtgtgactccctgtctccttgttttccagcacatgttaaaagaagatgacatgtttaaagattttgctgcccgttcccccagtgccagcattacagatgaagactcaaacgtttgaccgtagcacctggatgaacattaggagtgcttagtcttttttctacttgcttttccaaacactcacagtatatacaacaggcagcggattgtctattgtttgttgttccaacttctgctgtcgagaagtttaaacagaaagcaggagtaatgtgccgattctgaagttgccacaaaaaataagacactggtgaatgagagtataattgtttttcttctatttaatgtaaaaatctgtgatatattatatttaaagtgttgcatttaagatgagtattttaccagagtgtttccattcatatccgcggtatggaggatttgaggaacagtaaccaggatgtgaatgattttgttacatcagtgttcactgtagccacctaagtaggacattatatgatttcagaatcaatatgtggaacttctttaagcattcagtgtgcccactaaatgccagccacacctccacttgcctcttattgtcttatttttatatatttttctaaatatatgtatatatacagtacatagaaaatagaacttttattttgtgacctaaggacgatggtgaaaagatcacgttttcaaaacaatctggtgatcagaatgttcatataccagctggtttctgaagaggtcagaatgatctttctccatactgacttttaacaatgttgatcattgaggctaaattaatatatatgaaatattcctttttgatgacaccacaaaattgttgaacagtttaagaatttcaaccttaatcttggatccctttacctcatatggaagaacttgagggacattagtatacttttttttaagatggagtcttgctctgtcacccaggttggagtgccatggcatgatcttggctcactgcaacctccacctcctgggtcaagccattctgcttcagccccaagtaggtgggactccaggcatgcaccaccatgcctggctaatttttgcatttttagtagagacagggtttcaccatattggccaggctgggactcgaactcctgaccttgtgatctgcccgcctcagcctcccaaagtactgggattataggcatgagccaccacgcccagcctgttatttttttattattattgtttttttttagtgacagagtctcattctgttgcccatgctggagtgcagtggcgtgatcatagctcactgcagccttgaattcctaggctccagtgatcctct

SEQ ID NO: 68971 - DNA, 3044 bp, Homo sapiens
cagctacttgggaggctgaggcaggagaatcacttgaactccggaggtagaggttgcagtgagccgagatcacaccactgcaatccaatctgggtgatacgccgagactccctctgtttccagtttttagtcttcattaagatgattttggtccctgagcttaccaaaaaaaaaaaaaaaaagattgtttcattgttatgttactaaataccttaaattgtgttagaataatgggatcatgattgatgttgaacaactaacttgacatgataaaattctctttaactactgtgttatcttttacgtacagcggaaagaacacccggaaatgaaaggccaccaagaagaaaggtaaaaagttcgtatactctactatcttaatggtttctggagttctaaaatgaggcagatattcattataaggcagaagggtgttaccagagaagacttcacaaggtcatgtttactgggtgattgccatagccctggcagaggttagtctttgttttttgtcagtacccagagaatagatgatctttgagaggttgacttactgaggaactcccaggaaacaggtgtataaaccagaatatggaacaatttctaatgctatcttaagtcctgcagcctgggacttatgcattaatataactagtttgtttatttatttattattatttatttgagatagagtttcccacttgttgcccagctggagtgcagtggtgcagtcttggctcactggtacctctgcctcccgggttcaagtggttctcctgcctcagcctcccaagtagctgggactacaggcacacacctccatgcctggctaattttttgtgtttttagtagagagaggttttcaccatgttggtcaggctggtcttgaattcctgacctcaggtgatccacccgcctcagtgctgggattacaggcgtgagctactgcacctggcctcccaaagtgctgggattacaggcatgagccacggcacctggccgtattctaactagttgagtctcaccctgtggacatttggattccttacttctatggaggaatctaaacgataaggtcagttggtgagcaatagtgtcagaacaaagacacattagttggaagttaaatggtatcaaattacaatcattaagagcagtcatttcctcaggactattacctgcttctaggatattgactacactggttttgatattgcgtaggcggggcatggctgaattttgccactataaaccctacttttgtatgtgggccatcccctcgtatttgatgccattaaaaataaatgttaatgtgattgactaagctatcaagtactagtttttctctgggcctaggagacatataatttttcattatatatttattcaatcagtttaaccctaattattttttccttttctttttacttccaagtacttaacgccccctcatgtactactgacttccatcaaagaagttcgaaaaattatttcaaaatgtattgttaattcaccctttcataagcaaaatgtaaaaattttgctaaaagtccagttaaagaaatttttagtgaagaaaatgtgatattaaaggggatccttgccagagggtttgaagaaacagtgcagagatatttaggtagatttagtgttgtttttaaaatttggacagcagcagcattgtgggaggtcagattttacatatgttgcaattttgcttctatttcttgtaattgtagctttttgctttaaaattaaaattctttaagaattaaagaatgtgtttatatttaaaatactaaacgattttatatttcttaggcactacctcctaggacagagaaaatggctgttgaccaggactggcctagtgtttacccagttgcagcaccatttaaaccctctgcagtacctcttcctgttcgaatgggttatccagtaaaaaagggcgtgcccatggcaaaggagggaaatctagaacttttaaaggtaagacaaattgctgattcattggctcagacttacatagaaataaatgctgatcttcccccctatttctgctctcttatgcttcaccgttcagtgtatagcagcttagtgtattttaatttaaatgttaaaaataatataataggtttattattatacaacaccagataataataggtgttgtattttgattatcaatggtaaagaatactcaaagaatcctaggcatttaataatgtaattagttggctgggcgcagtggctcacgcctgtaatcctggcactttgggaggccgaggtgggcagatcacttgaggtcaggagttcaagaccaatctggccaacatggtgaaaccccatctctactaaaaacacacaaaaaattagccagacgtggtggtgggcacctgtaatcccagctacttgggaggctgagaaaggagaattgcttgaacccaggaggcggaggttgcagtgagccgagatggcgccactgcactccagcctgggcgatagagtgagactctgtctcaggaaaaaaaaaaagagtaattagtcaatcttgtggcttcccttgtgacctttttctgttgtatctcttctttttggagatgggggtcagtatgttgcccaagctggtcttgaactcctgggctcaagagacatgcctgcctcagcatcccaaagtgctgggattacaggtgtgagccaccacacccagcctatcatatcttttctatattgcatctttccagtggaattaagaaaaatgaaataacctaatttgagattaagaattgggaggtgaaacttccagtttaaaaagaggaatttaaattttttctgtccataaaggtagaatattatttagtattattattatagtctaccaaatttaactttattgcttgaagcaaaataggttaaggcaaatgctttgtttgatagcatgtataattatttatcatgggtgttttaaagaaaatataaatgcttagtctgggaatgcatatcttagatggtttcttaaatacaatgaaagttatacaaaggac

SEQ ID NO: 68972 - DNA, 1011 bp, Homo sapiens
agagtggcattatattttatagtatttaaatgagtgtcttaatctttccttaattatccctttacacttgctgctggcctccggattcagattgcgtcttccgtataactcaaaggcttttcaagtacttcttctcagttttctttcaaagtaggtcagttcagattttatatctaacttgcaaatggaaaatctgaagcatgggaaagttaggtaatttaccaaaactttaataatcagtggcagaagttaaatacaaactaaggtcttccaaagtctcatctattgctctacctatcagatgagtaaaggctaataggagtctattatgtgttttccatttggctgtctttttttagacatataatttaggtaatttaattttaaaactgtaattatcatttgatgattgaaatgacttattcacatttttttttttaagtaaaagaaaaaagagtcagtgcaaacccaagagctcacaaaattccccaaactagtctctcttataaagtgcttggaagtgatgcatcttatagtgcaggatattggagtaagttcatgatgggaatgaaattcagcctcaacaatcttgctctgttcatattttttcaatgttacaatgatgttaattgcaaagatacttctttcccctcaaaacgaccgggtattgattttttaaacagtgttcaaggaatggagtgaactatgtttaatttgttaacatgtttagtcccagatatcagagagtctttgtaatccagagtgacattttgcagactctgattttaaagcctaaatgagagcaaaatattgttcctattataagaaaatcgttagcccaaggaaatgttattggcaaaatagttctcactgccccttagactgtcacctagaagagctcccacatctgcctgtgattatgaccagccttttctgcagttgtgcttttttggaggaagcatggatctgtgcagtctaatatgtttgacccaagaaaccagttacttttag

SEQ ID NO: 68973 - DNA, 1108 bp, Homo sapiens
acaaaaagtagccaggcatggtggtgggcgcctgtagtcccagctactcaggagcctgaggtgggagaatcacctgagactgcaaggtcgaggctgctgtgagctgtgattgtgccactgcactccagcctgggtgacagagtgagacccatctcaaaaaaaaaaaaaaaaaaaaagtgaaatcttgatgtattagggtttagagaatagctgcaaaaagttattttctgtatctgctggaaaacagcatatctttgtaagtacagattgtaaggcagacagattgtaattatgtggatagagtagcgagtggtaacagagcttgacagaccagtgttcacgtgacagagtgtgcagccctcaagcgcaggtgcaggtggctaacagtacagggttaaggggccaaagtgcacagacaaggtgttggccagggcctctccacattttgcaaacttctcttcccttaaaaaggaaggaaaaaaaaaaagaagaaagaaaggaagaaacaaacaaacatttgatatttctcagaattcagaactcatttttttttgttttgttttgtttcagaatactgaagaatgggaaaaaagtaagactgaagcagacatggaagagtatatatgggaaaatagctcatcagaaagaaatatcctggaaacgcttctccagatgaaagctgctgagaaaaatatggaaataaataaagaagagctccttggtactaaagaaattgaagagtacaaaaagtctgttgttagtcttaaaaatgaggaggaaaatgaaaattccatttctcagtacaaagaatccgtgaagagactattaaatgtgacatgaattatggagtagaaaaatctgcttgatttattaattttatgatatatgtgatcagtatctaatttgatataaaattgaaaatgttaaaaaatcattttttttcctcagagttaaaattatttccctcatactaatgcttaatggcaatgattactccagagttttttaatttttacactggggcaatagactaggaggtctctgatttcttcttggtctaaagtgttttgattttatttctacataatagctttggtattcatgtata

SEQ ID NO: 68974 - DNA, 1048 bp, Homo sapiens
tatgatctggtgtgattgaggccaggagtctgtaggttatgaaggacaatatggccttgagtacaaaaaggagagaaagaggcatgtcgtgccctgctggggcacccttatactacttatcattttaatcctagggctgacttatgaatgaactcaaaaggggctagactgagctgaattggtaagtagtagatgaaaagcagtacagataaaaaccaaaattttagatcatgtttagagcatatttcaagaaacataccagtacatttagagactcattcggagttaagaaaaactcagattcctaacaggattgaagaaggaaacattttgaaaacagtagaagctgagaagagatgatcatttgggaacatgtaaaggagcggtagcttagggtggtttatcctgtgtaataatacagtgcagatgaaagcaaagaggaggatgtgtaataaagaatttgaccttactcagaggtctggcctttgcccttggcttctgggaggtaatctatatcgtacctgataggactgtctttgtttagtggggtaactggccccaaaagatctcaggatgggaccaacatgccagaaaaacctaccatgtgatttagggtgggggctttcagtcacatgatattagtccacctggcagccgagatgactcagcagacaatcagcaatcatacctacataatggagtccagtaaaatctttgggccaggcgcagtggctcacgcctataatcccagcagtttgggaggccgaggcaggtggatcacaaggtcaggagattgagaccatcctggctaacacagtgaaaccccgtctctactaaaaatacaaaaaattagccaggcgtggtggcaggcgcctgtagtcccagctacttggaaggctgaggcaggagaaagccgtgaacccgggaggcagagcttgcagtgagccgagatcgcgccactggactccagcctgggtgacagagcgagactccgtttcaaaaaaaaaaaatctttgaacacggaggcttgagtaagcttcttgggtta

SEQ ID NO: 68975 - DNA, 1050 bp, Homo sapiens
atattgctctgactttgcatttctagcttaacagaaaacttactgcataatttattaaaatgatttgatcatttaagatgctcccaatcctaaataatgttattatcatattgggagccaaaaaaactcacaagatcaatgcccagtattgtgagactaataccccagactccctgtccaacctcatcttaccctgataatgttactgtgcttgaattgcctttctaatgcacatcattctttgagcatgatttttttggtctgttttaaaaaggcaagaaaataccagtctgaggcatatctatgacggctgggaaacaaaagcatccattggtgaaagattcaagagacagaggagagactgagagcctgttctttgtggctgacccactgaatctggcattgttgccggttgaggcatagaaaaatcgtaggtccaagtctctttgatacaggggacgcatcccagcaaaattccccagcctgatgcttaatactggatgttacactctaccatcccaaagaagctgctaaatgcttgatcactcactccacctcctgctccaaagcttatcgtgtctcactgcaccctcatagagaatggaagtgtgaagggttgatgtgaaaatggagttttatcagtaacgatttaaaggccaggtgaaacaaggtgaagagatgaatgttttttatagaatccaagaaaacaactgagtaagtcatagatccatttttatttccttcatttttttccagggaggccagaatctactagaacattttctatgtcttttattttttagttccttattcctagcattattataaagaaaataggccaggcacagtagtgctttgagagaccaaggcagcaggatcacttggggtggcaggatcccttggggccaggagtttgaggtctgtcttgggcaaggtagcaagaccctatctctatggaaaaaaaaaatgcatttttttttgctgggcatggaggctcatgcctgtaatcccagcactttgggaggccgaggtgggtggatcacgtgaggt

SEQ ID NO: 68976 - DNA, 1009 bp, Homo sapiens
gagaggtgaaagacaatggggtgatgtgggtgccttcccctcttacccttgtgcctgcccctgaaagaaagtgtggagtttagtgtatacacattgtctttggttgctggactaaggctgaacaagattaataacttgttgtattgaactgcttatcttcgatagctagtgtttggacagtgtgccattcccgtggaatcttggggacaggagtgagattcgagaagccatcctttcctcctctgtcctcaggcggaatggcccccaactgggagagcgaattttcttcagatgttcaggagagtctagtagttcatgccattgttacacttttcattgatcagaagaactaactctgtgggcctttgtgtctctctttcaggtctaacttcaaacttgtggctgttaattcaaaactctatgccatcggagggcaggccgtttctaacgttgagtgttacaaccccgagcaggatgcgtggaattttgtggcgcccttacccaatcctctggctgagttctctgcctgtgagtgtaagggaaaaatttatgtcattggaggatacactaccagaggtaagtgaagggaccaggtaggtggtctgcccatgtgtaggcgtcagcagtctgggaagggcaagagggtgtcagaggaagccccgacatatccgagtgtcatgttatgctttaatagtgtacacttacacatctggaaggaagagagttccatatggcagggatgattgggacaggagggatcttttgataactttgtgtgagcatgaaaatcgaatggggaagggagagctgtgaaaaaaaaatgttatctctttttttttgcttctggaaacccagctttttggtcagccgtcttgtgatttggctgggcctggtttgtgggggtcgctctctgaggttgggtagctctttggagaagattatctgggaactcccatccttatcccaaacatacaccaaacctgcccccatccaccattatggaatttag

SEQ ID NO: 68977 - DNA, 1084 bp, Homo sapiens
cagatgtaggacaggggctaatcacttagagttcttcagtttattagaggagtgactacaggttttctttacaaccatggcctctagtatacttaaaataagcgtccagttataaaaagcctatttgcacaactttttgggaatacttctattaactaaaatgaggtaagccattattttggacatagaaacagatctttgtatcttgtcaccaaataatcttacctctagtctacttacaactttgtaagggtttctaagctatgcccatttattcccaaatattaagcccttaaaaaaataaaacctctgaaccaaaatcttcccaggaatagtacttaatagattttaatgttaatttatattcattgtagaattgaatttccagtgacctgtaatttcattacatatattttaaaatctatttattttagatggtgttaacttttcgttgctgaagagcttaactttttaaaggctttgtcctatacatttagaagatgagtcagttgaattagtactggacaaacagttggagattagtttgcaaataagcatatcatatcaaatacaatattccagccaaccagttaattctcttcctggttacattcattgggtctatttgcctaatgttgacaattagattcttggaccaagtgagggtgtactctgatccacaaagctcttttataaaccaggtttgaggttgtgtgtgtgtgtgggggtgtgtgtgtgtgtgtgtgtgtatgtttgcatattatagctctctttaagacagacatctaaaaagattttggttattctgggctgccagcagtacgtgggaaaggtggaatgtgcaataggaacagatctgtgcattttgtgacatcgtccttcctgctgtgcacatcagctgtgatgacattttgagggtagttttaatttagctcggttctcttgttggtgccagtattacattgaagactacctatgatagaggcaatgttgctttgaaaatctcccttcaggcggaggttgcagtgagccgagattgtgccattgcactccagcctgggcgacagtgcaagactctgtctcc

SEQ ID NO: 68978 - DNA, 1908 bp, Homo sapiens
ctctaaatgctttatcattttttcctgagatgcttctgagggatgctgacctcccactatggggaaaagggttgcttggaggacctggggtggcagccccccgaccagaagcaccctattttatagatagcagtctgaatggtagagagtcctgtgtgtgggttgttagaaggttggttcttcctgttattctctctggctttcctttcaacccacttattttcagaggcctctccccttagcatcctttaaaaggttttctgatgaatgtgtgaaagagttgattatttcaacagtattggttaagtcacaacgacgaagtgctgagaaggttatgggtaccaggaagaaacaaacagaagtcttaagattagaatgagaaccaaagagaatttaaccctgccatttttttttttttaacaccaagatcctaagtaattccaaatgccttagatatcaatgaaagctacacaccattgagatgggcaaaattctttctctacaaagggagtaatcaagtaaatacctgttctctttcaatggactgttgcctattgagcattgtggatgatgtgttttcagatttccaggtgaagttctgaccctacctgtttggccaaagacgtaaattgagaggaaaggccttggtcttcctgatcaaccagcatttaacgaacagtggcttaatgcagatcactcaagaggcagcatagcaatgtaaaaggaatataagtaggtgttggatgcctttttcctagaccaggaatggggaatatataacacctgtgccaccgctcttttaaggaggcattatgaatgagtgcagcattcctgtcctctgtgccaggatttggtcttagaatccatgtcagattggtgcttccagacatctattcccagtccatcagagtgaaatgaaggctatttgccatccctgccttagacagaggagtgaaagaattaagtgggtagacaccaaccaaaatgactttgaaagcagtgagctgattgagctccagttctgtggttaccagaaatactgagtgtctgtcatgtgcaagacaatgctaagaacagaatacagacataaataagtcacggcccatgaccttgaagagcttacggccttataaagaggttcactgtaattgtcttcaccagggcgtccttctcaaagatgcccacttttgtctggcacattggggctcggtggtctggtggtcccttcggtcttggccctgtccgtcctttgtttttgtgatttactaacaatcatcacgaaccagttttgtttttcttttaaatttgaacatcacatcttgtgttttagttttttgctctatgatttttttctcactgcttttcagtcttctctgtacttcatttttgtgaaaaagtgaaaatcacatataatctttatttaaaaatgctcaccaagcactgcagactttggagttagggattcagcagcttgttccagtgaaaaggaggagtgaagctggggaagttagtatctaagaggggcaagctgattgcatgtgcatttatacctatgcctttaaaacattcccataaaaagtattaataaagaaatttccattccacactagtactgatgaaaaggtggttgattttgccttgtgataattatcaaaggatagtttttcatccttagattttattcacatgagagattttttttattttctctgttgacttaggaacacatcataaattcacaccaactgacacgttgctgacgtctgtacttgacataaccatttttattcatacaggaagcattaaatataaaagatggtcagttttgaagagcaaagggtgctgaaatgacttgtacggttggctggtgctttctcaaatggattgccatagttcattactagtaaa

SEQ ID NO: 68979 - DNA, 1055 bp, Homo sapiens
acctgttccttgtgatttttaatcttccttgaaagtttatcaaattttcttattttctgtccaaacaatgagaacttaattgaaaaaggcatctctctttggattaactcttggtgtttatgtatatctgtttcttatttactaacgataaattaatattttagatttccagtattttaaggatttttggtctccttactgttcctccctgccctattcccatacccagtaagtttggtttagctcatttaaactgatgcatatttttaaaaagggcatatgttgctttttttaaaaaaaatcaagttttattgaggtatgatttataagtaaaaaagtaatttttattatattgctgtataaagtctgacaaatgcatataatggaaccactgccacaatccagacaaataatattcccatcattctaaagtttcctcccctcactcataggtcctagcaaccactgatctgttctctgtccctgtctatagctttgtcttttctggtatgttatgtaaatggaatcatacagtatgtagccttatgtttcaggtttctttcacttaatgctttgattcatccatgttgatgcatgtttgttgatgcttggttgttttttacagctgagtagtatttcattgtgtgaatatatcatagtatgtttattcgccatttgatgaacaatttttggcatttaggaatgaaggtactgtaaacattcatgtgctgttctttgtacattaaggtgcaagtctttgtgtagacatatgttttcatttcttttggttacacatctaggaatggaattcttgggccgtgtgcaagtgcatgtttaaccttaaaagaaattaccagctgggcgcagtggctcagacttgtaatcccagcactttgggaggccgaggtgggcagctcacgaggtcaggagattgagaccatcctggtcaacatggtgaaactccgtctctactaaaaatacaaaaattagctgggcgtggttgcgggtgcctgtaatcccagctactcaggaggctgaggcaggagaactgcttg

SEQ ID NO: 68980 - DNA, 1011 bp, Homo sapiens
tcttgtcaacctattaagataggtgcagttcatccacaaggactcagatatagaagtatggaatccctctcaggccatatttagttttctttaacacaagttttctatcatcttgggaaaatgtgagcaaactagttatttatgtgtttcccttggtgaacaagtccgttttttattaatgaggcactactagcagacctttgattgatgcataagcaaagatttactaactgccaaaactgagtctatgaaagttaaataatggagaactgaggtatgttgagaagcaaaattcagtttaatagaaatctttatttgagtcctgactatatttcaagtacctgtactaggcattgggggatacaggagtaagtgccactctgggtcttcaaagacctcacagtcaattatttaagagttttaataaacaaataagttatagtgagtttattgattgggaaggaatgggatcttgaaaattggaatggggatgcatggaaagaccctgatgaagctggggactttgaatccctaaattctgatgagtcttctttgccagttgaagagacccccacacacctagtgggaatggcctctttacccacctcccctctgcccctcctttccccccaggggaattaattctgcattgcccaagcaaactgtaatggctttccctgaggaagttggcatgcaagacaattctcaagacctctccccaccgactcctctttgtttctagacctataactacactcaagtcttagtaggcccctaaagatgaggcacaaagtgtgacccatgaagacatgtactacactctgaaataaatgcttaagttttctatttatacagacaaaagtccagagaacatgtgtgatcatgcatattaagggtataggataatgtcagaaggaacataaagctggatcagaccaaatctattgatatgggctcactaagcagagattctgcagcttggggaattataaaaggctctaacattttgtt

SEQ ID NO: 68981 - DNA, 1009 bp, Homo sapiens
aacaagctatccagatagatactttaatccaaattagctccttccaaacagcttatatagagggcaaactaaactgtcacaagctgaccctttagaaggaataatgggaattggaccagcagatgttgaaccaaataagttagatgtggttcactttgcatctggagctatttgcatacaaagccaacaggaaagttcaaacatttttctcaagacattggcagagagaaacctggaagacagatgccttttggatttcatggttcaatttttccattctccattctgtccaggaaaacctaggacaacagatcggtcattttattaatatcccattactctccttactaaccctgtttttccagtagaatctgtgttacatatctatgagagctcagaacctgagtccacaaatttttgtttgaggaaaaattgtctcaatatttttcttcagattaatctgtagtttgtacctagtaataatgaatgttaatcaaattcatttgtctgatttatatttgaggtaaaatttgaaggtgacttattacatagtcacatatgtgcattatggtaggcagtataggtaatgcttaaaaactttccgtctgtctttgtatttacattagacatttttgtcaggacataaaccagatttctgttgaagtctaataattttgtagtgcctttacacagattatttgaatagaaatttgtcacatatcttctttttgctacatcttgtattttctgtttaactcctaggttattaactcaccttcttttactctggagccagtttttaaaaatgacgcctaaaatgatagcttctataaagctgtgaattattactgtacatataaatactagtcttgatgtgggttttcagtaatttattgcagttcatgtttttattaatgcatatgataggaagtatacagtgatatttgctatgcttctgaagattaggtttattatagtgtggattagagtcaaatatccgtgttgtgga

SEQ ID NO: 68982 - DNA, 1038 bp, Homo sapiens
acttatactttgtatttactcaggttgagttttcatgtatttcctccctctttttaaaggttgggcatttgagcttcttaaacggtgtctctaattcttggtggtattctcctctgtatttgtggtacttcctctttgtggcaggcggagtgggagggtaccatgatttcttgagattctggaatcttccaacccctttttgtgcccattctctccttgtgattatctattccatatcccacccatcagcaatttctgtagtttctaagttcattcaaaccagggatgttttcagttctctctacttccttggtcactatctcagtcaaaagccaccatcatatctttcttagatgacttaagcacctttttttcctgcatccactctcagtgtctgctccccccaaccaaccctgccacccatgactccattattttaagtggcaccagagagggctgggacacagtgaatgatcagtaaatgttacctgtttgtgacatttgattttaaagtttagaaatgtgtaggatttatgttttcatttgttgtggattcctgaatatcaataaaacatgatttgattataattttggaggttgtaattttgacttatgatattcctctgaatattttgttgtaattcctttgttgggcactaaagatttgtacctgttattaggaatctcctgaataaattttacaaactaattgcagttataaaatcctccatgatttgggtattgctgttgtgcctaatcaaagttttttttagtcccaattctgatttttgtattaatttacatgattatattggcttgcagctagtatgcattaatttttttccttattaaagcattgctgaggtgataatcatttttaataatgatttaattaataaaaatgtttaataatgatttaataatttcattaataatgaaaatttcctacatttacattaaaacggaaaatcttctagatttgttttttttggagtgactgtgttaaaggctagttttattgtggacctcctcagatag

SEQ ID NO: 68983 - DNA, 1042 bp, Homo sapiens
ggtattcaagcaactatttcaattttagagtaaaaaccaaaaatatagcagttataaggtttattcattcaaatattttttaaagcaagaatttatgctagctgctgaaggtagtcccaatttctaaagtgctgtacacaattttgagtcacctgttaattttgcgagacagtggtgatcaatagaggtcattgataaatttcagagtttgatttacagtttaaaatataaacaaattctaggtctgtgtgtaaatttaagaactgttaacaaccagatatgtctatccttattcatacattttcaagcacaggaaaaagttaagtcttttagtgcattggtagcaaaataatgaatactttagatttcaaaattaagaggaaattttgtttcttacagcaaagatcgggttgttgtaaaagtttgaggtcttctcttgatttacttaaagggtgaaataatttcggaaccttttcaacaacttaatttccaaatgtggtttctagtgccctttggatgttttcattattggtatagtgtaaactttcctctcttgtgtatttttttttttatgtggtttagattcagcaatcaacacacactcatctggatatctcactttttccattgggtttaactgatgaaaaaagtaatggaacaattgcccttgtggatgattctgaggatcctggagccaatgtatctaacatacagcttcagcaaaaaatttcaagtctggagattaaactcaaagtatctgaagaagaaaaacagagaattaaacaggtatatttacatttgcctaagaaatgtttgaattgcaaatattagaaatttgatataatctcaaactctgattaaaaactcatcagaggaagaagatacttttctcccttggttgtaggtttaaagcagtcatgagcttatcacttagaaaagcctttgataagaaatatattttacatatgtacttttaaagatatgaacatcgtttactaggttttttctaactattgctttcttttttggtttatttttattt

SEQ ID NO: 68984 - DNA, 1019 bp, Homo sapiens
atatattatttgttaatatcatgcaattatattaattttaaatgaattaataattttattttttcttgaatttctaatatgtattaatacatatgatcaacataaacaaaatctctttgatatcctcaataattttaagattgtaaagggatctttagaccatatagtttgaaatctgctactccaccctaaggcctgatttctttgaagattagaaatgccatggaaattaagtaggaatatttgtataaaaaagaataatagattttattttgtagcagttatttactatgcataaaaacagcaatgttagaactaaacactataggatcaaagttttttatcttttaggttaaccaagtctgttactcaagaaattattatgcagtctttcaaatttgttctggtctttatttattttgaagcttgaaaaagaagcagtgaaggatgcagttttaaaagtcgtagaagaagaaagaaaaaatttagaaaaagcgcatgctgaagaaagggaattatggaagacagaacatgcaaaagatcaagaaaaagtatctcaggaaattcaaaaagctatacaagaacaaagaaaaataagtcaggttagtaatattaactgttagtaaatatttacttttttctcatttttctcaaaatgaagtacccttactctatcttttatcttacttaaaacaaccttagtagatatttatgactttttaatttttaattttcattttgatgtttatattttgaattaatcatttttaatattttaatgtgctttcatctttctgatattgaaaacttagtaactgaccattttacccttttactttattttctaaaaggtcaaaacaaaatttatgtttagtcattgcaaatatattaacctttctgtgttgtttttccttttctcatacatagagacacatacgcacacatgcacacagactcaatcaatacaaaataatatatttgtgtagaaaacaatttgattcaattaatttataattcta

SEQ ID NO: 68985 - DNA, 1037 bp, Homo sapiens
gaagagtaagaagcaattttctttacttcaaaggttttgtggtcaaggcattgtcagaattttttaaatataaaagggctcttttaatccagttttgctgcaatattcttggatgtttgcatctccaactattaaaagataatatttagacaaaatgaactttccttatgttctgaccagttacacagttacttgaataaaccattatttcaatataagttatttaatatttcatggtcccttacttttctcttcttagaaatatagaagtttgactagctgatctctaatgactcttaaagtcctaaaattctgttaagactatgagtaacattttccttgacagttgataaaccccttgagagatttttaattcttgatataaatcagttgcatcatagtagttacattgtatggtatttataaattagtgtaggaaaatggcgctttcctgacatttcccatcttcctgcccctttctcatcctaattactcttgcttctatccaatctggaggaggctgtgtagttgtatgtgcaagaagtagctcattaacaattcagcatctgtggtctaaagcatctgcccttgtaacttttgatttgggtctcatatttgaaaatgcttttatgtaaccaacacatattaaaaagcatactatacccttacattcattattgcctgttttcggttgtacctcattttttgatgccaaagggaatttagccttctctacataagctatattgtaatttaaatcatcagaagtttaccttccaaatttgtataattatatccatttcaggtggcacaataaacaaatggaaaaatatttggatttagaaaaataaccagtactaaccatcttgccaaatgatgtttcaactaggtcacaaatttatccttcttcttaaattaaaagcttaggaaatttgatgtgaaagagaggttagtgaaggcaatgaagtaaacagattttaaaggttttatagttgtttaaggttaatataattatgattttaaaacttattcactat

SEQ ID NO: 68986 - DNA, 1033 bp, Homo sapiens
tttttcttatacttgttttattttaggttctgaatagtcttttactgtattacttattcttccttaaaaatgtaatacagttgttttaaaaagataaccacactacacatattatttttattaaatcttcatcttctatcataaaactatgtacgctaattcattgtagcagtatgagttcagattctggagctagacacttacatgttctaactatggttatgctactgatttcagacatagaactttttggtattttaatttcctaatctgtaaactaagaataatgatcataatttaggcagtgcttactttccatcctacttttgagacttcctttgaaaatcataagtgaacacagtgaaatgaaggaaggaattctcagttttaatatttataatttatacaacttttttatgaatagttatataccaatggccatgacaggtcattggcttttccaatataaggaaccttgtagagggagcatcaaatagtaaggtgaagttctacaaggcaaggaaatgccagtcaagctttctttgcttcctgggattttgtcccattgtttgatgattgctccaaatggtcagtttctcaaccaaatccagcacttatgattttttttcctgtctacgggacatgtgtagaaactcttcctgatactccctggaggcctcaatccttcgattgctgatcttaactaagcaagactcaaacatgtcttttcttaattatggttcaagactcctttaaaaatggaatccatattggtactttttagactaatccatgaactaatgaacttttggtactcctagctctaatgctatatttgagaaaaactactgcagaggacttttaagtctgcattagtgtagtgatcatcctctccaaacgttattcctgctttccctcatttctctatcatttaaccaacccaggcaaggttagacacttaatccatttaaatctaaacctctgctatcaccaaaagactatatttttggtaaagtttgtgtgtgtatatatg

SEQ ID NO: 68987 - DNA, 1052 bp, Homo sapiens
tctttgtctaaaatgaactctggtgcctactggctacatttggacccattagctattctcatgggggaaatgaaatccaatctatcttattttgtggttaagcagttacttttttggtttatgacttcatagcttaaagtaaaaaaaaaaaagtaatgatgtcctagcctttaaaaattttagaatagaatccaatttagtatattcaaatctcatactgctattgcactgtctcagtatttttgcttttcctccaagtatgatcaagcctgtcctgtatccttctgctgccagtgctctcagaaggatcagttccatgagggtgatagaaggtcttcaagatcttgatgttgtaactccagtcttaggcttcttgcatgtctcatgtctctggggatagctttttgtacctcatctggttaccaatttctagctctctttttccatttccttgtgtccactccacttaccttcttattaagcatggacttcaaacacttacttggatgcacttattaccaccatagcattccctgcttctttaagcactgggagaatatattctgtctattgcatctatgtttcttaacagcctccagtacagaatattactcaataaatatttgttgtattaaaaaatgtaagacgtgcttcttccagttgttaaaagatatttaaaatacctgttttttaacttgtgaaagagtccaatttgttttactctagcagattcaaagccagacgcagagagcttttggctactgtgttagtcacagttctccatagaggcaggaccaataagacagatggatagctagatacatagatagatagataggtagatagatagatagatagatagatagatagatagatagatagatagatgatagaagatttgttagggaaattggctcacatgattatggaggctgagaagtcccatataactttctgcaagctggagaaccggagaagccagtagtgtggctcagtccaagttgtaaagccggagaccagggaagccaatggtataactctcagtttgaggt

SEQ ID NO: 68988 - DNA, 1034 bp, Homo sapiens
aggtatgcaaataataatagcaacctttgattgggtggtttgccatgttccaggaacagtacaaagcactatctcatttaatcttccaacaacttatgataggggtattaatcccatttcgttgatgagtaaactgaggctcagaaagattagataatttgcccaagtatttgttgagcacttcctgaatgtttgatactatagagaaggatacaaatgaagcaaaatatggatccagtaaaactttttaaacttaacaaaaagtttaattaatatattttttaaatatctataattgaaattatgaaaggcagtttctagcctatggtttcattataccttaaactaatgatgtggagcattgacttctttcaaaactctctgagtattcatttaagaaatgaagtattgtatcagaggctctgttgatcatggctatcaagcaagtagacatacctcagatatttgaactcaagaaaaagcaaaatctcagacttaatataagaccatttgtatgaaccaaaactcatctctatggattgaacatagagcaaatgatcaacatagcttaatggtgatattaaatgtaatgattatattaagtgtaatggtgacattaaatgtatttcaagtagatgtgacattgctgcctctttatttatagctgcgaacagctgtgtactttcaaaataacaaatttttaatgagaaaaaagaaaagcaaaaaacatgcttggagagtttctttttatgcttactgttttgacacagttttgcgcataggtgatatatttatattctctccattattctgttttttattttaattttaacttaattttattttattttgagactgagtctcactttgttgccgggctggagtgcagccgggcatgatctctgctcactgcaagccccacctcccaggttcatgccattctcctgcctcagcctccggagtagctgggactacaggcacctgccaccatgcccagctaatttttgtatttttagtagagacagggtttcacc

SEQ ID NO: 68989 - DNA, 1050 bp, Homo sapiens
tcttactgcatttttgaggatattgagaccattctccttttactcatcttgattttaaatttttcttttgggtacccagaatggttccaaggttagtactgcttgagctcatttcagcttctgccatgcatctttccatatttactgagtttaaatgaatcatctcagagagaaaagaaaaactaaatatagaaaagtgggagtactttcacgtttaatacgcaagggcataaaatagaatgttaggaaacaatttggatttttttccctaaaatataggtgactatgggctagtttacaactttccttctctcactgaaataaaaatacatagttaaggaatagggacgaatacataacaggtgacatttgacagtttgggcatattccttgttactttctaatcttgagaatcacagtttgctgttttagaggtatctgagaggttccagataaaaagcgatggctaaatgctcttaaactttgagcgtgctggatgctctaaagtaggagaggaatttataacagaagcttacaatgaagaaccagacattccgagccatctgagatcttgcaatgagaaggcgccaggcgataaggaagagggcagtattaaagaggtagtgaatatttcggagcctagggaacagacagacataaccaaagttaaaactaccagatacccaaccacattatctgaagataaatatgtgttttcctggatatgactggcaagtatttatgaagtgctcagagtatttgatataacttggccaattggtttctgcgtctttcatttccacagcattcttgctgaatagtcagatttctaccatatttccctaatttctcttatacctctctccacttgaaactatttacaagcatgactagcataatcttgtaaatatactttggtcatgttaccacatcataaatcttcactggttcttgttcattagaaggtaaattctaaagttcttggcttgctattcaaggttcctccttcctgttttgcaagctacttttttatccttatcatctctgcac

SEQ ID NO: 68990 - DNA, 1685 bp, Homo sapiens
aaaagctgtatttggaatatgtgtaccaatatcagttttccttttgtagtactgaatggcagtagaagaatcagcagccaatcctcaaagtttaaatcatttaaggaaatggggaaacaaaattccaggtaaataacaagactgaaaaactagatttaaaatagtggttttagaaaacaggatatcacaagtaacagtttttcaaatggatttttttaaagataaatttatgaaaacaggataaacaatataatggagagaaggagaaatagtgatgggtctgttttgcagtaaagtttatgcagaatgacgttttgcagaaaataacagaagcatcactttaaaaaatatatcattaagagccatgacgttaactgatgaaaataagtgatataacatactttgaaagatttttaaacagaaaattctgaatcgtgaatgagccttctctaggttttaattttttttcttcaaattatttccaacaaagtttggctataaactaacaccatctatccacaggaattttaataggaaaggattagaattgtagactgattgttggtcctttaagtatgcttggaagaaaattcaatcgagtttcaaggctttttctaaatgggagggagaacaatattgatttaggattattttctttcatttaggattagaacagttaagtgcctttaaaaaggactttaaaaattattttgatacttatatatgatttttaattgttttcgtattttccaaataccatattaaaattttaatgaaatttatctcctatgaaaggaatttctttaaagcaaaattctgctttgcctttgatttccattttaaaagttaaaggcttccatctgaaactcctcaaatagagtcagatttttggcaatggaagtattaaaattccgatcagccctttggacgatgaagtttacctgcatattaggatttgttaggagtttttggcctcaccaagtgattcttttctattgcagagagcactttactcacctacctgttatgcaactttccctatgcctggaggtgcctccagccaggataccctactttgttacccaattctcctttttgttttacaagagtattcataatatctatatgtttatattccagactacatatttaaaaatgagatctcaaattatatgaaatggatttttaaatactgtgtttgcatacattgacctataaagaagattaaatatttaggtgaataattccctgctgcagtatttgtacacttcagactacctcttaggaaaagcttaacttagtattgcaaaattccctttctctttttttttttaagagatggggtctcgcactgttgcccaggctgaagtgcagtggcatgattgtaactcactgcatcctcgaactcctgggttcaagcaatcctcctgcttccatctgctgagtaggtaggactacagccatgcaccaacaaacctggctaattctttttcatttatatagttagtatcttgctgtgttgttcaagctggactccaactcccggactcaagtaatcctcccaccttagtctcctgcattgctggaattataggcacgagccactgcacctggcacccaaattacttctagttctcaagttagatgattaatatcacacttttctcatgtatgttttatgatag

SEQ ID NO: 68991 - DNA, 2692 bp, Homo sapiens
cttggtggtagcttggaatagatcacctaccttttctgaggttttctaatcagtaaaaatagcaataataatacctaatttgcaagtgtgctataggattaaatatgaaaatgcctagaaggcatttaagacatttttaactgtacagtatgtaaaatcatatgttatagtactttgaattatgcaatacatgaaactagatttgtaatcagtaacatgtttatgatttttgtcctgagatcctggaattcgctaagattatttgtcgaattgtaatgatgaaaattgggagttaagtacaatagagaaaaaggaaacaattctattttcatcttcagtccttattcagtattagatggagctgggtagtttattatacttagaatcatatttttaaatgaatgaatagcttttctttcgaaattctttgttagtgcttcatttcaatctatttaaatttgtgttgttgacatcatttattttccaaaattgtattggtgtgggaaaaccttgaaaagattgtgtttaggcccggtgcagtggctcatgcctataatcccaacactttgggaggccaaggctggcggatcaacttgaggccagaagttccagatcagcctggccaacatggctaaaccccgtctctactgaaaatataaaaaattagccgggcatggtggtacatgcctgtaatcccagctaattgggaggctgaagcacaagaattgcttgagctgggaggtggaggttgcagtgagccaagattgcaccactgcactccagcctgggcaacagagtgagacgtctcaaaaaaaaaaagattgtgctgagatcgtgaattatgtggccttgtgactttgaaaagaaatccatttgttttaaaatctttcttgattatttttaaccatggaagtgaataatgcaaactgctttgttttcttccgtaatctattccattatagttatttattcttaaataacagtttaggaaataattaaaagcataaacttattgtttattacaggcatgttacatggaattggaaaatttatagttgaaataatttgctgtcgtttcagacttggatcctataaacctgtcaattctgtaagtggtgtagtatacatggtgctgatctctaaatcttagaatcattgttaagtctatgagccagtcatggtggctcacacctgtaatcccaagactttgggaggctaaggcgggaggatcgcttgagcccaggagtttgagaccagtcaaggcaacatagtgagagccccatttctacaaaagatagaaaaaattagctaggcaaggtggtgcaagcctgtagtcccagctacttgggagggcacagtgggaggatcacttgagcccaggaagttgaggttgtagtgagctatgatcgtacgtaccactgcactccagcctgggtgacagagcagaccctgcctcaaaaaagatagagatagagagatagagaaatagggggagagagagagagaaatagtagcttttggttactagaaaggattgcccaaaataaaaccttgtgtttagaggaaagagtataaggaataaaactaattctttggtctttttttccctccttttctccttaggttccttttgaggatggccacacagacaaccacttacctcttttagaaaataatacacattaacacctcccgattgaaggagaaaaactttttgcctgagacataaaacctttttttaataataaaatattgtgcaatatattcaaagaaaagaaaacacaaataagcagaaaacatacttattttaaaaaagaaaaaaaaggataaaaaaacccaaactgaaattctatatacgttgtgtctgttacaaatgtcgtagaagaaatcatgcagctaaacgatgaagaagcccaactggagtgttgctttgaagatgacgccttcttatattttcatagcaaatgggtggtatcaaaatcagacattgcttcttgctgataaaaagcctgaaggaaataagtgaaactacatctatgggaaaaaaaaaaacattgagaagtgcaaatgttcgcatccttttgtttttaaaagatatgatgtcagaataaaatgtggaaaacatacggaaaactagtctagactttaaagaattgtgatcaggtcacattgttaataaaaaaaaaaaacgggctagtccctatgttatagccatattaatgttaagccatattgacaagaccagttatccaataatttggtcttaaaaagtaactacttttctttgaactctggttattgacttatctaactgttgaagatagagtcttagaagactaaggtaaattctcacaggggcagatatgtaggtgttatgtaactagggtgtcattcacaaatggtatagtagaatcttatacacggaaaagaaagcacatttttttaaaaaagatgccaagttttttaatctaatcattatattattggtgtattttgggcaacatagggtgagttataaaaagatccgctactgatagtgaaaattaccggtttgtaaaacattaagagaaaaaataggatattttatacatgtggtgagtggagaacagggtaactttaaatgaaagtgtaaggcaaattgtaagcaccacaagatatatcagatttgagaggtgccatgttaaacattgtc

SEQ ID NO: 68992 - DNA, 1958 bp, Homo sapiens
gtagcggatctttttataactcaccctatgttgcccaaaatacaccaataatataatgattagattaaaaaacttggcatcttttttaaaaaaatgtgctttcttttccgtgtataagattctactataccatttgtgaatgacaccctagttacataacacctacatatctgcccctgtgagaatttaccttagtcttctaagactctatcttcaacagttagataagtcaataaccagagttcaaagaaaagtagttactttttaagaccaaattattggataactggtcttgtcaatatggcttaacattaatatggctataacatagggactagcccgttttttttttttattaacaatgtgacctgatcacaattctttaaagtctagactagttttccgtatgttttccacattttattctgacatcatatcttttaaaaacaaaaggatgcgaacatttgcacttctcaatgtttttttttttcccatagatgtagtttcacttatttccttcaggctttttatcagcaagaagcaatgtctgattttgataccacccatttgctatgaaaatataagaaggcgtcatcttcaaagcaacactccagttgggcttcttcatcgtttagctgcatgatttcttctacgacatttgtaacagacacaacgtatatagaatttcagtttgggtttttttatccttttttttcttttttaaaataagtatgttttctgcttatttgtgttttcttttctttgaatatattgcacaatattttattattaaaaaaaggttttatgtctcaggcaaaaagtttttctccttcaatcgggaggtgttaatgtgtattattttctaaaagaggtaagtggttgtctgtgtggccatcctcaaaaggaacctaaggagaaaaggagggaaaaaaagaccaaagaattagttttattccttatactctttcctctaaacacaaggttttattttgggcaatcctttctagtaaccaaaagctactatttctctctctctctccccctatttctctatctctctatctctatcttttttgaggcagggtctgctctgtcacccaggctggagtgcagtggtacgtacgatcatagctcactacaacctcaacttcctgggctcaagtgatcctcccactgtgccctcccaagtagctgggactacaggcttgcaccaccttgcctagctaattttttctatcttttgtagaaatggggctctcactatgttgccttgactggtctcaaactcctgggctcaagcgatcctcccgccttagcctcccaaagtcttgggattacaggtgtgagccaccatgactggctcatagacttaacaatgattctaagatttagagatcagcaccatgtatactacaccacttacagaattgacaggtttataggatccaagtctgaaacgacagcaaattatttcaactataaattttccaattccatgtaacatgcctgtaataaacaataagtttatgcttttaattatttcctaaactgttatttaagaataaataactataatggaatagattacggaagaaaacaaagcagtttgcattattcacttccatggttaaaaataatcaagaaagattttaaaacaaatggatttcttttcaaagtcacaaggccacataattcacgatctcagcacaatctttttttttttgagacgtctcactctgttgcccaggctggagtgcagtggtgcaatcttggctcactgcaacctccacctcccagctcaagcaattcttgtgcttcagcctcccaattagctgggattacaggcatgtaccaccatgcccggctaattttttatattttcagtagagacggggtttagccatgttggccaggctgatctggaacttctggcctcaagttgatccgccagccttggc

SEQ ID NO: 68993 - DNA, 1055 bp, Homo sapiens
aattgtggaatttttttttttgttcttatgagattaggtattggagtttttaggggtgaagtgtcatgtgtctatagcttttcacttggcttgggagaaagtacaagttcatataactgcatatatatgtataggtatgtgtgtatatacactcacacaaagaaactaggtaaagtttataccagaacatattgtgcttttcaacatttctttaaggagtagggagattccatttctcacctgtaagattggcaaacacctcaaggcaatacatacagttgagaagactttggggaaaataggcaaacatgcagtgctatggggatgcaaagtggcataatctttgaggaaggtagtttagcagtatctgcaaaaggacctatgcatttatcctttgactcagcaattgcacttcgagaaagctattccaaagatacggtgggcaaaaatataaaaatgtgtgtttcaggctattcgttgcattgttatctgtaatagtagaagattagaaacaacccagatggtacatctacacacactggaggaagatgcaattgttaaaaatcaaatgagaaggatttctatatactgataggaaaatatctccagggtatatttttaaaataacaaagccaaaaatacatatgtaatagaatcccagggcatttgactgttgaaggatgtgtttatactgatagggtgactaaaatagttttttaacttaaaaaagaatggagtaactggggttggtaaaatgcaggatagggggtgggagggagagggctgacattcattagtcctggaacccaaagtgaatcattattagtctttcattatgtatatgccctgatccctaaaacagtttctacccttataggtagtgacaatatatttataactcagcatgatattgagcattttagagctttaagatgtagtcactttattggaaacttgatcagttggcttataaggctgtattgtgctagtaatagggaaagagttttgtaatgccctacgtaaaactgttttaatttcccttggtagtagttaac

SEQ ID NO: 68994 - DNA, 1094 bp, Homo sapiens
ctgctttagaggacaaaacaagtaatggattccacagaaaattagtttggtcacatttagcaatagtgtattaaaaatatatctgatcagttttattatatggccacatggccatcattccaattctaacaataccgtcctgttaactatatgatgatttggaaaaggaaagatgtatatttttggctttcattatatattaatattttctagacgttaaattgtatataattattaaatttgagatatagcattttgtcagaatttattttatacatttaattcgcatatatttacatttatttttctcaaagtattgtggcttaaaatactgtattattatccttgaagattttaaacattttcatttgagaatagataaggatgtaaaccagtctgtaccaagtaattttgaataatataatttctctgctaagttgtttttattttttgccttttagcttacaatttttctcatagaatagatcatttgtcttttggagagcttgttccagcaattattaatcctttagatggaactgaaaaaattgctatagatcgtaagtatttaataattattgttggattttacatgtagaaaattttgcttataacctgaatattaatacatttttaatgtcttcctaactactgtgtaaagataatctttaagtggttggtgattgagatgtatgtgaagagaatttgtcctagtagtggatgaaatttgaatattcaaaaatgagccatagaacagaataaagaaattcaagttaaaagatgaaggaattaaaaggcagaaggagttcaatttaaacagtagaaatagatgaaaggttaatacattaacagggcataactgcacttttttgtattcaccaaagaataagaatgaaaaaaaggttcaacattatgagaagaattttcttctttgtataatataggttcaaagttttaaaatgcatatatatcatttcagaaacctctctggagaattttacaaacaccagaaacctagttattctggaatggtttggttattaacatagaaggagtacattatagcacagataacctttttaaaatgttctatt

SEQ ID NO: 68995 - DNA, 1207 bp, Homo sapiens
tcagaaggggagtaatataatacatgagaaatatatgaaatttaaattcgtgtccaaaaataaagttttattggcatatagccatgctcatttgtttatatatggctgcttttgtattacagtaccacagttgagtaattatggcagagaccatatatgactctctcattactttgtactttggtgtactatgaattgtagtgatgcagttataatttgacagcattaaaagtgctgtgtgtattcctgtcctgcaacattttatttatttattgtattactatgttaaaaaaaagaaatatggacttcaaatgttgcatttttaaagcacagtgtaccatggattatttgatcaaatttggctgcagaacatcctgcgtattaagcaatgacactatttaattgtgctaaaaagaatacagtatctgttgatggtgccagattgagcattcatcacaatattaccaacctataaaaaagcaatgatcagaaaaattagaaaattaaaaatggaatatccaaacactgtagaattttatcataaaacgtgaaaatgaagctgtaatctttaagtgcctcattgtttagcaagtaaggaaagccatccaagtattgataagtctgtgaagcaatgtttgactgccaaagctaaagaaatgactccagaaaaaataaatttgctttagacaatcagatgactagccttcttcaagaagagtgttctggtagatgaggacattgagagcagtatctaatagccagttaaaaaacaagccaggagattttgagtagttcctaaactcttgataagtggacagatgttactagaactgcttattgtttatttgaggaatcaatgctgaatttgaagtgattgcagaattagtatctatgaatcgcctgctttcaacaaaaactataggcaagaatatttttatagaagttgagagaacacaaattcagtacatcctaaagtggaatctggtatatgttacaaatgtattataactgatggtggtgtgtggagcagaaaaaggcttacttgaatgcatttcaaaccttgtgaaaatgtagtgtttaatgcctattgctttgcagaaaatatttgaattgattttgtattttaaactggtgtgtcagtggtaaacttcatttgctctcctgaacctaaatattgacatttccatggtttttttttgtcagatat

SEQ ID NO: 68996 - DNA, 1724 bp, Homo sapiens
ttacattagagttcgttcttggtgttgaacgtacattctgtgagttctgacaaatgtataaggacatgtatctaccatactgccatacagaatgatttcactgctgtaaaaattatctgtgctctgcctgtttattcttcccttcccactgtgtataacatttgtacttaccaagtttgaactttactacagatgatttggaatattagttatttgaagaaatagaattaaaagagataaaataggactacatctaatgacacaaagttattgctgaaaattgtaggagttaacatggctcaatggtagaagtattgtagagagaaaaatttttgtagtgaaaatcagttacttgtggtatgagtttatactgagtaatgtaccatttcaagtccatcaagtccattgtgtagccccttatttgtcctactctttgtatctacaatatttcattcagtgtctgacaaagataagaattttgttaattgtgcatgtatgcatgaaagatgaattgagatacttaagtgagtagaagccctactttggtggtcctgatggcacatccattactgatggaatcaaacaagcttatggagctcagctattagacctcttagccaccctgcctcatttgctttcaaggaaatgaccaaagaaaacttggtatgttattttagaatatgaaatcctgtaataataaatgtatgatttaactaagtcagctaaacattgtcatttttgaataagtgtcagctctctttgtgtacctttctgtagttctaaattattgcttcttatttaggatgctgcagctgattcagagtaggctacaagaagagcattcacttcaagatgtgatatttaaaagtgcttttaaaagtacatcaacagctcttccaccaaggtgagatctgtattttaaatgtgcaactgtttattatgaatttactttgacatagttaaaactaaagtgttggtttagttttctgaatcttatttttcttaggaagggaaaatagaatcattctgtactataaagacgccttttgctcttaaatttatagcctgtgattttgatcagaattatcacaaatatttatttgcatttaattttcttttttatgcgtggtatacccccacataaaattatattgagttttaagaaaaattagtttcatttactattttgaggatatataagctttggttagaaattttgttttatttcccgtttttgtattttaattaaagattagaggctgggcgcagtggctcacgtctgtaatcccagcacttttggaggccaaggtgggcggatcatttgaggtcaggagttcgagaccagcctgaccaacatggtgaaactccgtccctacgaaaaatacaaaaaaattagctgggtgtggtgggtgcatgtatgcagtcccagctacttgggaggctgaggcaggagaatagcttgaacccaggaggcggggttacagtgagccaagattgcaccactacactccagcctgggtagcagagcaagactgtgtctcaaaagaaaaaaaaaaaagattcgtggatatttggaaatgctataatcataaacataataaaaatatacaagattttacatttgcttaggaagaaaatgtcactgtctctttgaatttaggtggcatgcctttcctttacctcaatcatgtttctgccctccctccctctccctgctacagtac

SEQ ID NO: 68997 - DNA, 1077 bp, Homo sapiens
tacccgtttttttttccctagtccctaagtatattccaagagtctttctcttttaatttccagtttcaccacttgaatgtgggtgaacaaaagcactgaatattagctgtctctgggctcttagaatttttagtagaaagccatccacagatgaaatactttactttgatccagaaacattaaagtgagatttctcctttcatttagaatttttttcaatgctcgaaactagtaataagtgggagaagagattgtatttttactattaagatgatataaatttgccatcatagtagttttctgcatactttcatgtgtggaatataggctgggatatttattggcacagtgaaggcagaaatttttttcataaacacacataatatatacatacatatacacgtatgtatagtttgttgtcatcaaaccccttgatcactgccatgcttcaaaagttgatctctcgaattacaagacacaaaaaaagtgaagatttccatttctgctggcattgaatccaaagattcaatgtcaaagattcaatgtctttaaatgtctgaatctgaagatgggatctggcttcttgaagcatcctagattatcacgttctgattctaaacattattaaatagctcttgaatggcctagagatacccaaggtagatatcttcctaactaatgtgcataccaaaatgttctttacttctagaattttctaagagatttaaattttctctcagttggtgttctataatactttcctaaaatatttaggatcacaattaatctctctttaactgtaaatttcaaaccctggacagaacctttctggtttctactttttatgtcgagatttcagatttattttattccaaactatacagtataaatatgagttgttattttacataggcctgttatactaattttctagatagatgatgcataagtttttaatcttctgcttgcacatctagaaagtacttattttatcattatggtgggatggtaaagtattatgagattcacatttgctttctttttgtgagtacctatgtttataacttttttccaagt

SEQ ID NO: 68998 - DNA, 1050 bp, Homo sapiens
attttaagccctaggataccattttgtacatatgataaattgtcaacttgcatatattcctgtaaatgtcgataactgtaacaggaaagtatttgtgattagaaaatttctttatgctatttttcagtaaagatagcacattaaaattttaatttgacttatagaagttgaatgtaaaccatgaatacttgtttttaacaacacttaagtttatgtttcctgctcaaagaaaaaattttaaattatgatgtaaaagccaagagaatttgacaatgctagtgattatgttttctttcatttcagacagtatttgatctttcaccacagcagaaagagtggcagaggtaataagagaacaaagtattgtggtccatagaaatctaagtcatattttgtctattgtaaactatttatagattaacacatttctctagggatttctttggatgaattcttagcagaatttggtatataatataatccttacaatttcaaaaaccatcagatcttaagaaagtcatgcataatcttttctctggtaaactttgattcataagttttagtttttatttaaaatggtatcaactatttacattttttgattacaaaagtaatatatgatcattttaaaaattcaatttgaatagaaatgatataaagcaagattgtccagactgcggccccacaggaaggctttgaatgtagcttaacacaaatttgtaaacttcttttttttttgagacagagtctcactctgttgccaggctggagtacagtggcgcaatcttggctcactgcaacccccacctcacaggttgaagcgattctcctgcctcagcctcctgagtagctggcgcacactacaggcacacaccaccatgcccagctaattttttgtatttttagtagagatagggtttcaccatgttgactaggctggtcttgaactcctgaactgaagtgatccgcccatgttggcctcccagagggctgggattacaggcatgagccactgtgcccggccacaaatttgtaaactttctgaaaaag

SEQ ID NO: 68999 - DNA, 3733 bp, Homo sapiens
catttatatacaaattatatttatagacatggatgcatttttaataatgaagcaactgttttcaaatttgtgctataaggcatgcttactttcatcatttatcctatctgtgacactgttttatataagaaatacaaattttgtcaactctacttagtgagagatgcccttaaaattggagaaataaaatgctttcttagtaatgcaagtgtttatgttcatatttgtatatattaaaccttaacttttgagctgtattagaaaaaatgcataataaacattttgaataaaaaccttctatagtatgcattcaaatggaagttacattattaggctttttcttttgaaaatttaatctcacttaaattagtttcctattctttgctttttttattgttttaattctgtttttcttttgttgttggatttcccagtttctctaatagcatttacaactatggctttattaaccataatggaattctcagtatatcaagatacatggatgaagtatgaatacgaagtagacaaggatttttctaggtaatcattttttttcttcttggaatacctttagattcaaattgttttaaaaagagcataccttttaaaaaagaaaaagtctaaccttctagatttggtttgttttagttctgaagaaatagtcctgaaaaattctcattaattgcatgcattaagtgaaaccttttagaatcatttaaatagtggttgaattctaaaactgaggttctttgatttagcatgctttgtttcaaaaagttaggggaatatttttccttagatatgtatattgtggaaattgtttaatatttgaaactggttgaaatacctcactgatctgtgtgagctggaaaataagttgtctaaggatacattgtatacccttatgacttgatgtctataaattatacctaagctaaatctttatgtaaataagattacttttaaacttttgaaaatatagtaccttaattatacactttacatctattcgtttgtattatttggatttcttcaatggaatgaagataataggtttataatattaagattgcaccaaataggaagacacatttagttttcaattacaatccaggtttgccatttacataattttagggaatttactaaatctgcacctgtatatgcttcagtttccttttttgtaaagtacagacagcaattatagtatcttcctcaagaggtttatgagaattaaattagtcaacatttgtaaattgctgtgtaaccttgggcaggtcacaccactgacttcttttggacttcagtttcttcatctctaatgtactattcaggatagtattggttttcaaagaatttgttgttgttttcagcaccaatgcaatacttcatttttttccaaatgaagtcttatgtattacatagttcgccacataagcatggtgaggatatgcagaagtttgtctacttggcctactcctggttcctatctcctgagcctaaactcctgggttatttggaacacagtttgaactctagatgactttaagacttcatgaaggtctaaaaatctgtaattcctattttaaatcagatgaaaattattacacagaaaaaagttatcatagaaagcacaggactgaatttgatcatagccagtctattattcgcaatgcttcattctggtattcgaaaattgctttgatctaatcatttgaaaatgaaaggccatgaaaaattttaagcatcaggtgatttacttttggtagtttggttgcatttatcctgagttacatagacctagtttccagtatgccactttaatggtgatgtgatcttaagccaggtatttacactaccgtgaacaccagtggtttacttgaaaatctgtgaagccatccatttatagctccatgatatagaataaaggagataatatttgtagaacatctagcatcatgcttaatatatggtgtttgataaacagagaagaaagacaattcctaattcttgattttgagagttttacattcttaaaagaacattctatcaaaagtttatgtaaatagagattaagaggttaagactttttctgagttgcttagagttattgattatagagttgccattattaaaggatactgtgttcaaaaacctgtgaagtcagaaaggcttttggaataagggcaaaatagaacttgtaatttaaagagcctttgttttggccatgagaaatgcaattcaagttctaatcgacataatttattctgcttgaaatccaagtttttaataggtcagttgatttatatttctcatgttttgctaattaattggtaggtactaatgtttaatattttgtctttcagcaaattaagaattaatatagatattactgttgccatgaagtgtcaatgtaagtacaccttcaacttgctgaatccacatgtaggttatggttcaaacaattgccaagcaaaaataaaaatcactggttgtactttatttttcctttataatattttaaagttttactgtggtattatttaataatacaaattgttttactcctcagcttatattcttcaagtttcttttccataaagagaagagataaaactttcacattagtataattaaaagaaagttggaggaaatgtttgtgaatcagcattctagtttatgtacatcctttctgtctttttttgtttggagtactagcttttatacccatgtttcacaagcatatccttgtgtcactgtttcagtttaccaccttttatgtttactcttgcgtttaaaaatacagatccagttattttaagttaatggtgataggttacccttttcttttttcgtcactggactcacttggttatactaatagaagtggaaaaatgctaatatgccagatagtgaatgtttgaatcaatactgttttcaaaaataagaatgcttttgcatgaaaaatattttatgagttactgcttaaaaattacagaccaagaactcagagaaaatttttacatttttaaaagtatgaaataattttacccaattaattagaggttattttctgtgagattctatctcagaacgaccttgaatctctttcttttcaatatgtttttccttatgttggtggttttaagagataaaaaaatactttatttttaaacttgtagttagtggtaattctgaatatatgatattctgccttattttggatgtttaaatactgttaaattttagccttttccgaataaaatttcctatttgttgatttgtagcatagctttacgatttcttttaatctctaaaaatatttcttggaattaatattttgttcagcagccacttagtacttgtgattaggttcttgccgatatttgcaaagctcttcaattcagtgacgcttatcctttttaaatgagatcttgaattatctttttttttttattgggtaagaagttttttactgggtaagaaaaaacattattacattttggaataatctccacctaagctatataaggctactgttttagcttttggacaaatatatcggaaattattctacatagttggtgaggttttttttttttttttgcttggtgagttttctgttagttggcttaatttgtttatattggggatggtttgcctccaagcatagaatgtaaaacttctaattcttttttctatgcagatgttggagcggatgtattggatt

SEQ ID NO: 69000 - DNA, 1088 bp, Homo sapiens
gattgaattacttttcactttttttcttgctatataatgtgtttttgtatttaaattgccttccattagtagtttttgtcagggcatgaatggggaaaggagtagtgtggataaatactatgctttttatttttaaggggggatgagaatgttaagttgttttaaggacatttgtcagttatcctaaatttaaagaaacctttttatctctttaaaggattcatttattcattaatttatttattccttagcatgactatatgaaggaagaggaaggttttcctgaagatgaggcgactgaatcggaaaaaaactttaagtttggtaaaagagttggatgcctttccgaaggttcctgagagctatgtagagacttcagccagtggaggtacaggtgagtatcagttaacattaaaagttctgtagtaagtacaacttctgcgtgatccagtcaacaacatatagaaatgtagccatgaggaagaatttatcaatgaattctgccgtaacttcgtaacttgtctgtcttcatgccactctgttggctgtaattcttattaatattctctatagcctccaacacagtgccatctgtgcctttggcagtgtttattaaaacattaatacattaaaccaatgtttctgctttgctgccctttcctaaatatgtgaccttgaggaagttattcaaatctatctgtcttagtttcttccatgaaatagggatcatactagtatttacctcctaggggttactatactattaatattttcataaaatgcttagacccagtgcctggtacagataaaagtatcagttaagtaaaataaataatgaaatatataagaaaaatgtgtgactataacaatattcagtataatttctttccctatgaaaaggtagtaaaataatgtatttcacttaaggttgacattttatttggtaaaatgggtaataagttgcttactatttctgatccacttgtgattaagttttgttaatgaaaatagtgcaagttcttgcaaaatctattttaagtattttgctttagtatataatagattttctttttgtcagatcttttact

SEQ ID NO: 69001 - DNA, 1017 bp, Homo sapiens
aatttagctttaaaagttcttttctacgttgtccatgactagaaaattttgtcacagaatagcaatgacttctggcaagcattgatgatctgaggtatttccaaacacatttttgaaaatggcttaccacactgagtagagaggcaaatagagtgggaatggagcaatgaaattgggtatctggtaggatttaaaggatttgagaacaccagtgaaaatgaagagcagatttatcttaggaaagagcttgaagggtagttcctacttggggaggtaaatgtgttttggattttagaggtggaacagttttaagggttgaccttgctcatgggtggctttccatagaattaagatggaggtcacaggaggagaagcgctgttaagcttacatggtaaaaaggttttattgtgaatgaatgctataggataaatgccatcagagcatgaattccaaaggatgataatggagtgggggagaagcatattgaatgatctgggtgctgaagtcattaagcaaattatgaatatattcagatgttagtggaatatagcaacaagtacggaagtgagaatcagtgtgtactgtggtttggagcatagtttcaagttctaccacctgctatgtagcctgggaaaattatttgacagttctgtgcctcatttcctcatcaaaaagtaggattaaaaatagtacctgctgcttcatagagtcatttacaagattaaatgaattaatgtttaaagagcttcaaataatacatagcacaaaacatgagagatggttgagaaatatggtaaaacatgatacttctgtaacctgtgagtctcagaaatgactaaggattggaatggaactgctgccaatagaaagtcaggttttataaagagagcagacagcaatttcttttagaaaagctagaagttattggataccttgtttatgccagacagtgacttttacagtaggttggcaagtatgcaaaatggaatgaatttcttggaggtaggttagtgctg

SEQ ID NO: 69002 - DNA, 1026 bp, Homo sapiens
aaacctggaagacaataaaaacgctgatcaaataataaaaagcgttacctatggcggaaaaggaagctcaaatgttcttgtcaggggaaaacgacacaaaaactgaaagagggaaacaaaacaattgcacaggtgatatgcattagggttgttagggataatttctgcgcccaaggctcttattagtaatgaaatacggtgtgaggagctgagattcgttctgcagtctcagtgttagtcggaaagtaacccctcccttcccatagaaacagaaccggactggcggcgcgattacacctaaaacaagttgcaacctcatttccctgtaggcacgcctcttttatcttaaccacgcctcttcattccctaagcacgtcgtaagcaaagggaatatcgcgagatctgtacattgtctcttttctgacgttttcagctgtgatagtcgcttttgttctcgcgatatttccgggtacgcgggagccccggcgacccgggcttctgtgaaacatggcggtaggctgggaccataacacaaggtaaaatactgaaacaccgctgggtgctgttccctcggttgttccagggctgtttagggcgtaaatgcaattgagggaactgggagcctgtcatgggcttggcttcctgtcttcattgatctctagagagccggtcggacggagaagccgctccacctcccacgggggcgttactggcaggaccctaggcaacgatgctactgggagcttccctttgccaggtccgggtgcttgtgtgctatcctgcaactcgaaggagttcaggtgcttcctcgatcgcacctgattctgaccctttgcttgtcacagtgcccggttcccaggtggtttctccagtccgcaggcgagtaggatcccaatcggtcgagtcccagtcctcccggatgtcagactccctacccccattcagacaaatgccacattcgtggcagcacgttgccctctgtctctttaagagtcttggccttgcccggaaggagtttcgcacagt

SEQ ID NO: 69003 - DNA, 1054 bp, Homo sapiens
gatttaaattttctgattcattgacctagaagtctaacaacggcataattatgacaactgcttataattactgtttaaaggctttaactgcttttttaaaaaatctgcgtatcctcacaacactcttagaagataataccagtatttacctgttttataaatacggaatttgagtcaaggggtagtgaagtgatttacccaaattcagaccgctgggagagtcagggaaatcttgatcacaatactaaactgtgcctcaaaggaaaaaaatcacattgttttatgtagtgaattaacctttactgaaatactaaatttcactaaattgaatatcccccaaaataaggactgatgaaaagtttccaatgaatcaattttattttcagactttcagagttagtctaattaaatcaatttaaagttctcactttcttgacatgcttaagaagtatagtgtagtgggtgaaatcatagacactggagacaggacttcctgggttagaattccagatcagcaacttactagcatgtaaccttgaccacattatttcatctctttgtgtctccatttgctcatctgtaaaatgggcatgataatatctcagagttgttacgaggattaagtaaattaatatacatctaaaatgcctttttttaatctttgccgtaaaggcatcagcaactcttccttctttgtgaatatgggctcttgcttggatggaggctggctgttgttcacttagttacatctgatccctcatctcctggataacctactttcagggtaacaactatcccatgagagttggatttcccagtgtagcaaaactgactaatttgatccttcttatttagaaaacaactcaccattttctaatctacccagtgaagagggaacttaatttcccctgaagattgaaactctcgggctgcagctaaagccgcattcttttcattaaaggccagggtttgatctaacagtagcacgacatctctgcaagcgaggtcaaaggtttgccctagaccctgtaggacatctatgtacctatcagga

SEQ ID NO: 69004 - DNA, 1044 bp, Homo sapiens
tgttttgaaataacttcaaacttatgaaagtgttgcaagaatagtaaaaaatttacatataccctttcatccagctccaatgatttgtaacattttgattcatttatcactccattgtgtatgcatatgtagatgtatatgtacctacatgtatatgtgtgcatatttagatatgtatgtttgtatatacctattattagtgtgtgttatttttttcctgaaccatgtgggaattagttgtatatatcattcccctttatctctaaatacctttgcaaatagtttctaagaaggacattctctaacataaccacagtgtatttattagactcaggaaaattaacattcataccaacaaaatttttatttcagtgtttggaacttcactcatccttttccttagatgtgcaataaatcaaatttgttatcttgctgtaaacacactgttctgatgaaatcagaggaaattctttctcttctgacttatttggtcaaccttttttaaaagccacaagccatttcactggatatatttagtgtttctgccactcactcacaaatgcatgcacaaaactaaataaagaaacaaacagcaaaaagtcaaaacctgaaaactggtgattcagccttctctatgagtcactaaattgatgctgagcatgtttgtcaggagtgcgttctgaatgcttctattcagggatgctttatttgataaggtaatgaagtctctgctaagccaaggtccatgtggttttgtaggctcaggttttggccgtgatgggtcagacaaaagaagctgaaaagatgaccaatcacattgtgtcagaggagaccggatgccttgaatgctatcgcctcttgtcagccatctatagcaagcaggagaaccacgacaaggtaaagaaggacattgtttagagttctttggattcataggttaaacatggggtgcacctaagtgattctccagtttgcgtgtttataagcctgggaaatcttaaatcttatccgtcagcatatcctatctcttggaaacttttcaca

SEQ ID NO: 69005 - DNA, 1050 bp, Homo sapiens
agaaaacaagctcctaagaagttaacagaggtccaaacaagttatccttgtttacctcctcttgcctgttacaccatagagccaagtggctgtatctcagcataggtcagtcatagaattcagtagattaaaataatgataagagctaactctgaaaagctttccagtttacagataagtttcttttaatattcattatttaatctttaaaacgatctattaggagatatattgccttcctcatccccattttaccggtgaggaaaccaaagttcagaggttttatgtgaccttggctcaggccatggcagagccaggattgaatccctacccttgaactccttttcctgttcactttccattacccacgtgcccaaatagctttccaatccaaacattacataatattagactgtttaatggcatgcaattgccttttgggagaaaggaccaccctgcatctctcttaaagaaacagcaaatttgatttccatcaccctgaagttatgttgctaagtaacagagagagatgacccagaaaatagcacttagataactgagctttatttctgcttaccttaatacatttctgagccatagcaatgggtcaaaggcaagaagaggataaaaacactttcaatttgatttgacttaatctgttttactatttattcactttaagatgtacacaatattgatttctccattgagttaacttttgagttattgagttaactttaaaaaattgtatccttctttataacctggaacttaatgctcattctgagaatccaagttatctctttagatgtgaacagtttatatttgataatccctgagaggaagcactatcattattcctgtttgattaataaggaaactaagatttggagaaaataagtaacatgccaaagtcctttagtaaggaaatagaagacacagaatggaacctagacctgctctagcccttctgcccctaaccaccgcactctactgcctccttgtggcccacctgaaaactgggctacagcctgcagcatcactgcccag

SEQ ID NO: 69006 - DNA, 1107 bp, Homo sapiens
ttttttaaattcaatacatagctttctaatgccttttacatttttgttcagaaccacaaaaataaagaaagttcatttctaactttttctatgtcatcataaattcctgtaatagttgcattctaatcaggaaaatatttattcaccaacatttttctaatttacttaattaccttatctcctcactagtgcttgcttaaagtgaatagaaatttttgcactggactgatatttttcaataaagtgccttctaaaaggtttttgcttttattttttaaacattttaatacacacttatgcagaatataacttacatttccaagtaaagttagaaattagtttattctcaattagagtaaagcaatccgggagcttcatgattcctcctcacttaattctgaaaggtaattgctgttgtgagagaagacgttttaatctcaggaactggtgtttgcaagaaggatcagactgttgattaaaaacaaatcaaacaaaaggctctgtgcaaaaaaaaaaaaaaaaagaagttcagaaccaaagaccagaaatctaaaatgtcagtttataaatcctctgattttaatcggccttcggtgctctgttcattagtacatctggcagtgcctcttggcaaagaaagtttggcatgggaaaaagcaatgtttaaattggcttagggaagacatcaagtatacaagtctacttttgtctctgagggggtataatttcttcattcatttccccttttaaaaatttactccctgtgcatttatgagtaaattttagagctcatgaaagtgaggaaatgatatcaccagcctgagccaactagagagtgtgggttggcagctctgcttttgagatcctgaacctgagccattttctgtcccaactcagtgttcacattattttcagacaagaggaaaaaaatgtaaatggcacctttccgtgtctacatttgagatgtgggttgtgctcatgtcacaagaggactgtccctaaacatctcgcagtgtgaccttgtgaccactggggccggaatcagggtccctttcaccaaggtgtgtggcagctgtaacaggctctgagaatcggctttaacttttc

SEQ ID NO: 69007 - DNA, 1040 bp, Homo sapiens
gtctcacctttgcctcttgccagccatgagatccctgagtaagtacctcctccgcctcatttgcaagacagggacaagtatggactcacagggctagtatgaaataaaaatggtaaggtgcttagcacagtgattagtgcctattaaatggattcagtacctgccatcactaatgaattgaaacttccctgggactgttaatgagagacaagggtgatgtctgaaatttttgctattagttgtagaaggaataaaaaactagggcctccaactaaattaatcatagagggaataaaaataaggtcctctaagtaaattgatgaagcttaaactcattgacctttgacactgaaacatcatgacctttttgcaggccaagtaacatttctgggcatcatttttttccctcattataaaactacatgagctgttttgattcctttcacctctaactttaatttgcagaatggttaagagaactgaaattattttctcctatggcttctttgtcgtcattttcaccgtttaatatatgataattgaagtaactgtttccttggaagtaacttgaattcagagtttaaaatttctggaaggaaaatttatcatagccttagaatggggtattgaaggtcagtctgagtttctgagtagatagaactgaaatatgcatcattgttttcttagaatagtgagctcctttccttcagaatctttatttgaatatcaaaggagacatcaaaggttgttcgactcctccatggaatgcctttgcctattaaggtttagacgaggcacttcatgggttcaaggaaagtacattaaagagagaacccataaacacttaagtttcctttattgttaagtgtcaaaagacacttaaaattcttttgttgtttttgttaagcttttgctttttttctgatgtgagctgtgtctttgctatattctgatcaactgagaaatcttttttcttgagtttcaaagagaagcagtaaatctgcatttctgttgaaaaagctctgattccaaaacatttt

SEQ ID NO: 69008 - DNA, 1051 bp, Homo sapiens
tggcccctcttgcctacccagactctttcatcttctctgtctcttcaggcctaggtctttcccgcagcttcccttccttttccagcccatgttgatttctttctttagtacttgatcacatgcacccctcctgggtagtgcagcaagtgtaaaaagggccctatggtgtagcattgagtgtgaactcaggaccagaatgcatacattcaaatcccagttctgctaatggctggctttgtggtcctgggcaagtgaattcacttttttacacctcagtttccccgtctataaaatgagcatagcaatagcacctgctttgtagttgtcgttgttgtatgcacttaaagaattagcgtgtttagaacagtgtctgtcgcacagtatgcactcaatacattttctctgtaatttacaagttaaatgtatgcatgtatgctttttctatattgcttctaagacttaactcggtgttcaacattttggttgtcaaattgaatattgctgtttcaatagtttgactttttttgtagtgataaagttgtagtagactttttgtttatttcttttatttatttatttatttatttatttatttatttaagatggagtctcactctgtcgcccaggctggagtgcagtggtgcaatcgctgctcactgcaacctccggaggcctcccaggttcaggtgattctcctgcctcagcctcctaagtagctgggattacaggcacatgccaccacacccagctaattttattttgtatttttagtagagatggggtttcaccatgctggtcaggctggtctcacacccctgacctcgtgatccgcccacctcagcctcccaaagtgctgggattacaggcgtaagccactgcgcctggctgactttttgataatttcttaaatggatcaggtatatcttggtatcctgaattcctatccttttttttctttttttttgagacagagtctcgtgctgtggcccaggctggaatgcagtggcacgatctcagctagctcactgaaacctccaccttctgggctcaa

SEQ ID NO: 69009 - DNA, 1002 bp, Homo sapiens
ttttgttttctgatatatagtgcaaaaataaacaaaaacagtatttaaaaatatattcttcatcttggcatttgactcttgttcaatatcctttcttggtgatttttctctcgttgtagaactagtctgaaaggatattctcttgacaaaacaatattttcttatactcctatgtttaggagaataagaaattacttcattttctcagaagaaaatcgagacgaaattttgttgggacttggcccttgattttagatgctcatttcaactgcaaagcttcaaactttgggaatctctcttgttgcagaggctctatctcctattatataaaaacaggttagcctaagggctcaagacggtacattctaggttgatatttgggtttgtgtgtgcttctggcatggaaaatatcttgtctttagaatgtatttaacaaacgcaagttttcccaaggacctgccagtcagcagttggtgttgactttgggtatcctgaagcactgtttggaaatgtgcattgtggctctgtcctgaagtgggctttatgggtaaaatactttaaaactgggagtcaatgggctttagagaattccattgtgtgcaatattggtttgtttttagattttcaaagggggctcagtggttaagagctagtgttttggatgatctctgaagtgacttcgacaaattatttgttcctctgacttttggtgtctattataagagacatttgctctgcgctgttcatgtgcatttatttaataaataaagtgcattaagttttgtggtagctttctttaatttatcattccctggctgtattcactcattcatttattaaaatcttgtgccaggcacagtaccagagtaaagcaaagtgaatcagagcacctcattatatattcattctgcaattctgtgcttttctgttttagctgttatcacattttctgtatgcatttgtgtgttgtatccttctggaggtcaaggcttgtcttgtttc

SEQ ID NO: 69010 - DNA, 1045 bp, Homo sapiens
taaatatataaaattataaatatataaatataaaaataatataaatataaaaattataacataaatataaaaatataaatataaatataaaaaattataagtataataaatataaatatatatacattatatacaatattttatatatattatatataaggatatatatattttatatatatatatccttctttaaaaatcatcttctaaaggttcaggtagatcatgacaaggacatttgtgatctaggttgatgacaaatactaggcatccgccttatttggtttctcagccacatgtttcctgagagatccctgaaataggagtgtggttccaatggctgcaaggaaagagcagcctgcagactaattggcatgcagctgggagcaagagcagccaaagtgacttacaaaagatctgctgtgtcctaacaggcctggagatttcctgcagaccccggcaaagtggttcaggctgtgtttggagtagctcagtctgaaagccagttagattgtggcagctgcttgattaaagaacgctgttcagtagaaaagagggaaacaaacgagaaaacagaaatagactctacgtactgattgtttgactagagacagatagagacccattaccagtgagtctaacagggtatagcagtatcagaacaacctaactttggctggtcatttcactttttggcaaggtgtttgcctcccatgtgctatggattttctctcggctttattttctctcaaatgatggtgagactcatgttctgcgattggaaagcactttaggcttttccctgttttcatctctatagttaaactcctatagcaacctcaagaaacctatcctacaggttagtgcacagtaaagagtaagacgaattattaaaagccttttaaaacacctgtaaatataaaggcattaaacaaattttaaacacattttggaaagcagaggcatatctagaaaagtgttgtcaagttgtgattggtgcattaccatctggcatcttgttcctacccaggaaagaaggccagag

SEQ ID NO: 69011 - DNA, 1019 bp, Homo sapiens
acagggatttaaaaaagttcctgcttcatattaacaaacactaacaaaaataccaacaatgtgagggccttttgaacaaatactgaatggcatttcccattctgattccttcccgttttataccctagctgaattagtactatgttgagagtgaagactttggaagctaacagctgttattattactgggtttcctggcttttattctaattaggaacagctgaagaaagagcaggtgaaatctttgttggcctcaggaaataattaaattgtcttagtgctcgtagccaccatcctcgctgcagatgacaatgctgtcatccggtgatccttctcagggatggttctaaatgtagattctctgcttgcttgcagtaaatctgacttttggagaaggaaaagcgggagagaagaatcaatagcatctcctggtctctaggcatgggtattattttgatgaaactttcaagcaggtgtggaaagatgaccttgcaaagcccaaactcagaattttaagtgacacatattcctaataagacatttagcttaacctgtttgcctcctaagaaatgtggctgttttccaggaaattcatcttttaaaaaagcacaagcatgaatattcacctgtggtgtagttctttggcagctggtgggaattaggctgcacgcagtggtttgatctgtcagaaaagccacaaagctcaccttcctgtgtttattttttaaatctcactttgtcaggtaaaatattttcagagtccttgagtttgttaaatgaaaatgagtagatttggatccacatctatatgctgcttgtttcaactgcacccttctgcaaaggctcagagtcacttgtgtggcttacttccccccatcccttgttctcgttggcatgtccgctatatgtaatcagcaggctcttgctgaaccccatagtaagcacttctgattcagggttgaggaaaagttttaatgagaagaggaaattatatttatccctttagaagggcatctgct

SEQ ID NO: 69012 - DNA, 1025 bp, Homo sapiens
tgtgatgatggggagagggaaaggaaggaaacaaggatttccaagtttctggcttaaccaggtgggtggatggtggcattagttactaagtggaaaaattaggggagtaatagattttctgggggttggggagagaataaaatcataataatgcatgaaattcccaaggaaaagggaagaggaataaagggttaaaacactgagaaaatctggacatttttgttgagggccatggagggaaagaaggtgaaacaattggggaaatcgtgaattttttaaatggaggctaaaggagtacagagatcactggagatgtttaaggtgggacagaagctaggctgccatgtgactatgaacttggttagggcaggttcatgccagggtgtctcatagatgtgttgccagctcctgtcacagtgtctggccgataacagctgcttaaatatttgtgacatggatcagttgatgagtggatgataagaaagtgttggaaattaagcatagatggaacattttcaataaatttgccaatgaagaaatggggaaaaggttgttagtgggaggaatgttcatttttcttttcagacgtgtgtgtgtgtgtgtatccttagataacctgtagagaggagagatgaatgatgctggagcagaaagggtaggaagaaatatgaattcctctggtatgctgctaattgtttaataactggctctccaaagaacgggactcctgatttgtagtgtttgctaatgtaaatactcccactgtggctgattgcaagctacgagtgtgacttcactgaccatggagttgtgagagctgtcatagtccgccatgatgccatgtttctaccagacggatgcaatagacataaataacctcaaaagcatagataatagcaaagtgaagcaaaaagccaactcaagagtagtgagctttgaatatgtactaccttgtttaaaatatgacatatttaattttaagtttatttacttgaatttttaataatggctgttttttaagtaag

SEQ ID NO: 69013 - DNA, 1048 bp, Homo sapiens
cggctcgctgcaagctctgcctcccgggttcacaccattctcctgactcagcctcctgagtagctgggactataggcacctgccaccacgcccggctaattttttgtatttttagtagatacggggtttcactgtgttagccaggatggtctcgatctcctgacctcgtgatccacccgcctcagcctcccaaagtgctgggattacaggcttgagccaccgtgcccggccagcaatactttctttaagatgttctgagtacagacatttttcataactgtctgccaaattgctgctgctgagtattcaaccagaaaaatgaaaaagaaatgtagtgataattaaattaacaatttctcatagacctttagcatgtgaataaatgtgttagaaattcgcatcaggtgctgtgaagatccaaatgccatcctatcctccacctgctgtcattggctccagcagcgtgtctaccataaagagttgcttaaaacaacagtctgtgaataccttagatttcaaaagcatcattttaaccaaactctgtgaattgaaagtagttttcctgaaaagaaatattaaaatccattccctcacattgtaagttttagaagtaaaatatgacagtaaacagtttttccaaagtgcaatgactaactttttaactttcccccacttttttgccacttaaaatgagcaaagacatcatttttttttttggcctaaaatattttactcccatttctggatttctgagctggatttcaattccaagtcctaaaaggtatcccaaatgaccatgtgtttcaagagctaatcttctctttaacaacttcgacctcgagaatagcctcataactctggcttaatggaaagtgttctcagtaactggccttccctttctctaatgattctaagttttgttaacttaaaaaaaatcactcaattataagtttggaaaagagagaaggagactttactttttataaagggttttagcctacaaggtggccatcctgcaggctgggaagcatgcctcaggccaagacca

SEQ ID NO: 69014 - DNA, 1033 bp, Homo sapiens
atgtcaactattctgcattttactctgtgaatttattgttaggcagttactgcaagtcactctggtttcaaaatcttcacggctccctctgctcaccctgctgctggggggcttttttcaggggttgtattataaaatatgcactggctgtggtttttcataagatgttttgtggctttttaaagaagtgtcttactccctcttctctcatttttttctgccttgaaaaggggtggtatttcttttggggtcaacaaatacacatatcagtttcactcctaaccttgtaagttcaggactcattttcttggcagcaagtggcaggggctctttagtcactggagttaacagtaagtctgagtatattctgaataatgtaattatgcaattaattgataatcatacctaaagcacattgaacttctaagagacaggtgctacgtaagcacactgtctttctggatggggacttgtattttaaataacttatcattccagctatgttggactagggtccaaagcattttataatatttttttttaatctaggaaaaagacccaaacaaatctaacttcttgctttctcacctatttgaattttctcctacctaatttgtttgtgtctttattatagctcagtttgacttctcaaacttttcaagggttggggcagctgcacttttaggttgcctataggaaatattgcatatggagattacagtgtttttctgacctagttcaagaccagaacatgggtcatagggtttttattcagcaaaatgaaaacgtatcttcagaacttaacatattactggatgtgatacagattttgctttctgtggaattgaaaattcacaaaaattcacagcttaaatttcccatcagtgactggaggaatttttttcaggtgcttcctatattaccatccctcatgcatattaactctttagaattttaggttaagtgatgtctatagaagtagcctggaaaaccatgagttttggagttcagtgaccccctgctttcctctgct

SEQ ID NO: 69015 - DNA, 1092 bp, Homo sapiens
gcatttttgtttaatggttttaagcatattgacagttttttaaagtgggaaattttggatcatttgaaccttaagacagtagtttaagttgaatattagaatatacttgatggttgaaataggacatttacacgaaaaatgtaacccgtcatagattttaacttattttaaaatatttgataccaacatatgttgaaaaattcaaaagatgtgaaaagaaaattcagtgaaattttaccttctcactcaactccccagctatctaattctcctctctggaagcagctatttttttccttttttttaaaccaggttttcgggtccttctagagatttttctattaacatataagcaaaaagtgaatgtgtatatttttcttttacgaaaatgatagcatgctatacacagtttttatttgccatttttaacttaatatatcttgatgatccttccatgtcaatcaataaagttatatatttttaatggttgcttaatattcccttgtatgatgtgtcaaatttatttcaccagtcccggtttagtggatataatttaactgtctcttgtttaaatgggcatttgattgctagtaatcacaaacattgctgaaatgaatgaatggccttttatgtgtcattttgcacacataatatgtgtgaagggtaaatcccttgaagtggaattgctggtttgcatcgtcatttgtatgggtaagtttgaaggatgttgccaacttgtccttcattgtgtataccatttacactccagaaatcaatatacaacagggtctttcttcccagccccataattgtgatcatttccagtcttaataggtgaaaattgttaatgttgcacttggaatttgtactcttaccatgtattataacgaacatctttttataaacacaggcaaagattataaaaaaagaaacacatttgttttctattgtatttcaatttttaaaaattcactaattttatgtaaggggaatttgatctttgtgataccatttgaaaatatttcactcatttttttttacttccccatgccccatgcaaaattctttaattttttagtcagatgatttcat

SEQ ID NO: 69016 - DNA, 1054 bp, Homo sapiens
agtcaatgacagattgcatatacgatggtgcactcctaagattataataccgtatttttactgtaccttttgtatgtttagatacaaataattccattgtgtcatgattgcctaagtattcactacattagcaaactgtataggtttgtggccttggagcaataggctatgccatctagatttgcctaagtacattcaatgatgttcaagcaaggatgaaattgcctaacgacacatttctcaaaatatatccatgttaagcgatgcatgactgtaactgaaatattgataaaaaaattattctgatattactatagttcattagactttaatcacatttaggataatttctttcatctagaatattctgaaattttataatatgtgctttctaaagttttaatttctgggctttgaatcaggaagctcatttccttcagtttggggcaatttattgttttacttttttgataaatttctccttactatttttttttctgtttgtatttcctgatatggagaatcacatctggactgtgtctcttaatttttttaaaaacttttcctcctgttttccatgtctgttttttttttttgtttgtttcattttctaagtgattcctcgacttctcaatcttctattgcatttttctttttactattacttgatttcacttgtcctagattgtgattttacttgcttagtgacaaccagaagttaaatattagctctctggatataatagttaatgtaaatagctatatttaaaacatgacaagttctgttattttaagaagagagatgattcagtcagcaaagtgcagacttcaaagtttgagcaatgcagacttcagatgtgtgacactgccattttgctaacttttgtaaagcggggacgtaacagtactactaattgcggaatactttaatgttattttcataggctgagatatttggcaaagttcttcaaagtgatgaatatgaagaagttgaagacaaaacagtaatggctatgggaattttacataccattgatactatcttaacagttgt

SEQ ID NO: 69017 - DNA, 1024 bp, Homo sapiens
atctttaatttatcacattagttcttgtatctattaaaattttagtttgtcttaaaatgtgcagtattatttctcttgtccatatcgtgagacaaagtattttgacatttagcttacatacataaatgcacagaacttaatgactagttcagtgaattttgacatacacttgtgttatcacccagataaaaatgtagaaccctttcatcatctcagagtgtcctgaaggaaccatggtgttttgtattttgtcctctacttatttaggccttttgaagacaggaggtaaatgtgaacagcagcattgtttagttgaaatttactttgcttatttaattcctgcctagcaatctataaagaattttcatttgtatagcaatctaacttcacatttaatatgacttaacctatatcaagatttatcttgcctttgttattcacataaatccttttattatgcagaactttaatctgggtaattttgtcctgttaggagactctgcacattgatgaggatgatagaccagaactggtatggtggaagtgtaagaagtgggcactgcatattgtagctcggctctttgaacggtaattatctgtttattacattgatgatcatacagccagtatctcagtatcagatatgattatctgtctttagagccaccgagagccaagagtcactctgtttaaagtagcttaattttaatcattggctttgagatcataatgaagtgggtggtcttctctggatcttttctattcttctgtgaaaaacttggaaaaataacattgttcagcccattggtaatatctaagaattatgcaagaagttgcatggtcactcaactccgtaataatgtcaaatttaattttaaaagcatttattgaaaaaaatctatgtcagttgtaacattttaatttccaatattcaccctttaggagctcttggtttagcaagtgaaagcttctgtctgaaactttacagtatggcccatagtctaagtacaggttatcttgattt

SEQ ID NO: 69018 - DNA, 1056 bp, Homo sapiens
aaagcagaaccagggtaggtaaacctacctgctctaaaacctgattactcgcaactatctgttctgtagcattcctgcctatagattagttatgattacaagagaagaagaaggaaaagaagaaggaaaagaagaaggaaaagaagaagggagtccctcttctattgggaaatcatattgatggtagtttctttgcatttgactcaaagctaacagaggatttagggttcattttccttggtttaaaatactgcctaaaaaaaaaaaatctgaatgctataagggataccaacatgggaatccggaaagaaatgagaagatagagatggaatatgtttgaaatataaaaatatttaacatcaaatccttgaaagatttgggtaaattatttaggtctgattggaggaagaataattgttttcagtcttaactgtttgatgaatgaattaaactctattacatgctttctagttgaatttgtcgtgagaagaggatggttttgttgagctcaaaaaccatgatagtttggatccatccttggctttttattgacttagatacttaaactatttcaaaatattttactttaataaagatttatatttttattaaagcttccccttttaaacttttaatagggatagtctgaggcagatatttttttttttcccccagagcagcctttttgcagggaaagagaagagggaaggaggcaaatgtgagaagagaagaaactagaatactaggaaaatatgttctctcacttgttttgaaataatattcagaggccagacttcctttttctattggcagaaacagctagaaattgggaagtaagacaaaggctaatgaaataatttttctaaagcctctacctctaattggtttgctaagacgacagaatcttcatatttttctcagtctatacttgctaaaaacctggaaaacctcaacatttttaaccattttggtaatctgttatgtactaatacattaatattctcctctgggaagtagaaatttagaaggcattaggagccactattacaatgctga

SEQ ID NO: 69019 - DNA, 1549 bp, Homo sapiens
taagggagatactagaccactagataggctatggaaaccaattgcaaattgaattaaaagggtgggtgttttttaaaaatctgcttgacactagagcatatttaactttatatattcactatgctgatttcgaatatttttcatgtgatgattcacgatggtggtttttgtaataatgggtacttcttactgtagtgtcactgcattaatagattcaaataagcacaaattaagacaccgtgacttgagacaatagcagaatagttataacactttttaaaatgtgaaggaactattaaaagtttgtataagggagaagaaaaatcactgaagagtaactttggcacaggaaagcaatcttttccttctgaaaaaatagctagtattcaatttgcctttgccttagtgtgagcagtgtttttgtatggcacttaaaacattacaagtgtatgacttggaaataaaaaaagcattcatcatcatgggacttagttccatatcaatatatctctgaatggctagtggctagtagttctaaaaattggttcttttatgtagtctccattttcttgagaccttctacattaggtgctttgtagaatgacctctgagaaattaagaattatgggaggaagatgaagtaaaaagtgttcagacctgagttttagactttgctaagttatctggccttttgggggccacattttcttaatcttaaaaaaggatcagttagacaagattatcttggacctttctggctttagaagagtatgtaaaaacctattaccagaaaaatctagaaaagtataatctagctatatattgcttttgttttggaatttactataaaatgtatctttgtctgtttcagtagccgactaatgttaaatattgtgttcaaagctaactgcttcattatgagaaactcactgttgctaataaaacagcagggtggagtgattcttctcaggtgagcagcccagaaagagacaacgaaacctttaacagtggtgactctggacaaggagactcccgtagcatgacccctgtggatgtgccagtgacaaatccagcagccaccatactgccagtacacgtctaccctctgcctcagcagatgcgagttgccttctcagcagccagaacctctaatctggcccctggaactttagaccaacctattgtgtttgatcttcttctgaacaacttaggagaaacttttgatcttcagcttggtagatttaattgcccagtgaatggcacttacgttttcatttttcacatgctaaagctggcagtgaatgtgccactgtatgtcaacctcatgaagaatgaagaggtcttggtatcagcctatgccaatgatggtgctccagaccatgaaactgctagcaatcatgcaattcttcagctcttccagggagaccagatatggttacgtctgcacaggggagcaatttatggaagtagctggaaatattctacgttttcaggctatcttctttatcaagattgaaagtcagtacagtattgacaataaaaggatggt

SEQ ID NO: 69020 - DNA, 1020 bp, Homo sapiens
cttgatctgaatttaaattatctcattcctcattttaagaagaggaagaagtgattgttaccaagtaactcacagctgtctgcttcacaatctagttgagattggtttttggtattttttttaagcctttggatttataatctgttatgtcaagaacttgtggcttccttaggtaaggattacttaaattggatcggagttgttttctgttttaggtagctgacttagaaacctactaactaataagtctttaaaatagagaaaaattaacactaaacaactaatccaagttttttcttaaatccaattctgatgtataaattttgaataatattaggttcttaactggaaattaccatttcagggtttgaaaaggactaggtgcgtataaaaagttcagcccctcatctgttagactgattattggtaagactctttcacttagtcagcaagctgtgcaaagcaaatactggtatgcatcctcagcaattgagatttgaaattgtaagcaaaagctattcttttgcattcctgtgtccaaatgtcatcctaaagaacttgctgacttatgccagtttgggttttagagtaagttaactgcttgttatatggcaggtgattggctgatgctgcatttctcctccccaggcagcaattcccccaggcaagcaaccgtcttcactagcttctccaaatcctcccatggcaaagggctctgaacagggcttccagtcacctccagcaagtagtagttcagtaaccattaacacagcaccctttcaagccatgcagacagtgagtatgaaacatgaatgatgattgcagttcattattcctgttaaaagccattgtttctcttacataattattggatactatgtgaaaagtttgccttttgtaaaatttatttgggttggtagaattatatttggccaatggcagtacttgtttgtggcagaagaataggaaatccacagcctctagaattttaaatgggtgttttatcagagcattattcct

SEQ ID NO: 69021 - DNA, 1756 bp, Homo sapiens
tcctaaaaggtccaaaaaggactgatacacataaatgtgaaagagtaaaatgttgaaatgaatatggacatcaatgattggtacttcgctactcatcatggtgatattagcggttctagacatatcctggatttgggagtcagatatttgacccccttggctctggttacctgagacaaaccagtttattactcagtgacttctttagctcaaaaaggagacagactaaactggtagtttgacagtcatgagatttatcatctaatctcagctatttgggtttagactttgtagatacgtattgctaatatgggatggtagagaattgttacccttaattagccatttgttttaacagctactaaaagcgcaaaagaaggcccagagaagggagcacatgctaaaacttgaggctgagaagaaaaagcttcgaactatacttcaagttcagtatgtattgcagaacttgacacaggagcacgtacaaaaagacttcaaagggggtttgaatggtgcagtgtatttgccttcaaaagaacttgactacctcattaagttttcaaaactgacctgccctgaaagaaatgaaagtctgaggtaagctaatgaaaagattttcctgaaatgaaacacttgacactttagctttttaggggtgtgtgtatgtgagagagagagtgtgtgtgtgtgtgtgtgtgtgtgtgtgtgtgtgtgttagagagggggagagagaacttaagaaagtattaatttgattcaatatggaaaccttggctggcccagagtctgacagggttgacagattgtctggaaggaaagtgaatgtgaatggtctcattaacatgcttctttattgtaatactgatttttaaaaaaatgaggtctgagcatcaaattttaatcctgtacaagtataatattatatctatttctaaaacttttaaagtaattttctcagagttgccttcttactcctgctatacttaagtagaggtaaataatatttaacttggctggtgtcattaaactttcaaagtaacaattatttggtgttcttattatgctgtgaataactagtgataaatacatttgatagtttaaaatacaaaacctgcaaactggggctgtctgattttttttccctcacagtgatccattgctctttttgttttgatggagtaaatcagctaggggacagatgctgtgctcttgctttgttagatgcaggctattccagctttgtatttgttagccctactaaagtagagtcagatttcaacggttaccagaaatcagtctctgatcagaaagaagcctaatagaactcttaattgcctatatatagccatgtattttttaattctcatgctgatagtctactccatcgtcatcatctatacattgcctccttcacttttgtgggttcagggaatgtagcttcactttaatatatgaaatataagcaaaacataatttgttaaataagctgctttctttaaagtcaaatgcggctcttaatatttcaatttcactgttcttttatgtagggcatacacctgaactaatgatactgcattggcagctttaaactctttttggtctattctttaatgggtttatttggtaaaatccatattttagttgttttaaggaaaaattcttacatttgaaatccttaagcaggcatttagtcatcttgtatacatttcaatttttttatttccaaagagcaaaaagacaaaattaacatttgaat

SEQ ID NO: 69022 - DNA, 1621 bp, Homo sapiens
catataagttaaaacacataataaagcaagcaccagatcccaactctcaactcaaatagtatgtttccaacagtgttgaggctcctttctcatgtggtaccttctccttcctgtaaccatgaccctgaagttttcccttgcttttaagaccattttttttttttgctgccctgttagagttgtgttttttttgtaccttatagaaagtggtatcatgctatatattctgcagtttgcttttttcactcattatatttagtatttttatatcaatacaagtgcctgtatttggttctctctacttagttttagtgtctgaatagatggatgcttgaagttttggggtttttttttgtcactgaagaattttactttgaggaatcttttaggtgttactgagaatcaggagtaagattttttttcagggtacatatctatcattaggctgtaggacatgctcatgattaacttcataggtaaaaattctgaactgttttccaaaattattgtaccaatttatactaatactgttattattacataggagttcctattgttctgtacctttataaagacttaatatcagtctgttttttccaacactattgaggtataatatacttaacacaaagtaaacccattctaagcgtacatttgtttatagtaaatttgtagagttatcgaactggtagcacagtctaattttagagtattcctatcatccccccaaagttctcttttgtgctctgatttactttctatctttaaaaatttgtcttttctggacatttcacataaaatagtcttctgcatctggcttcttttacttagcatatttttgaggtttatccatgttatagcatgtatcagtatttcattggtttttattgctgactagtattccattgtgtgggtgtaccacattttgtttatccacttaccagttgctggatatttggattgttttcattttgggccattatgctgctgtatacatttatatacaagtctttatgtggacatgttttcatttcttttgggtagataccttggagtgtaatactttactattttaattactgaggctttataatatgtatttatccagttgcacaggttctccaccttgttctgtttcagattggtcctttctcttccgtatagatttgagttaaagtcccatgaaatgcccccctcttttctgtcaatgttgtttatctgggaaatctttaaaaaaaagttttgctcctttaaatttcctgtaggacattgcatattgtttgttataatatttatttttgtctgttacaggtaattattctaaatctttccactgtattataaatgtcttgaagttgcttgttcatctctctgatactcaccgtgctatttgtgtaatatgtttgagtagtgaatgaatattaacagagaaatcctattggctcagtgctattaaaaccaacaggcctttctgatcttagactttataggggtaaaattaggactcatatttctaatataaaaattgaatttctggcattagaattgaatttttaaatgcaacttaataaaactggtattaatactctttctcctttttcattaggcaagtacttttttt

SEQ ID NO: 69023 - DNA, 1209 bp, Homo sapiens
ggcgcggtgggcgggcctgggcgcgagcggctgagtcggctgggtctctggcgccgcagaggccgcgggcgaggaccgggaggggagagggaggagacaggaggaggagacgcgagtgcggggtggcgccggtccacctccgcagcgctcctgcctcccccaggctttggaaggcgggcccgggctgcggcagcggcggcctcggctgcctggggaggtgaagtcgggctgcggcggcctcggtcggcgcggcggagggaggcggctgacccggcgagggtgggcaggtctgggcggccggcgccgctgcgaggtggaggggcggcttggcatccccggggcggggcggggctcccgagggccgcggtcggtgcgttttccgcaggtcagcctcccccggggccttgcagaagcggcttctgcgtacccggggcggctgtgggaagggtgggggtcggtgcctgcagggctctccgtggccgctcgggagaggtgctcttcgctcaggctcccccggagacttgagggggtgcgcgctggcgtgcatggggcctgttctgtccttggtttggggatgctcctaaggggggagaaagggatacctcgggtgcttggaggtcgagagacggatacgtaagtgcgcaagggccactgattagggcacgggaagggctcgctagaatgagctcttaaactggttgggtgtaagcggttttgggctagtctaaaccaaacaactgagaataaacgcggggttcctgcaggttgagagagtacctgtctgcaaatgtccagtagtgatggattgccttgtaggccccagagcaatcggggaagttagcattcttgttcaagaagctgctggttcacttagagctataaaagaatgttgtgagtttggattttcttccaaacgttcaggattgaggttagggctggtggtgagggatcatgtaaagaggtttgagtggctcagccttaggtcccggtgtggaaagcttattcttttggtgtcatcacgtggccgtgggaattatttagaatgtgatctgccctcatgagaagaaaggagctctgaagccgttgcagttcttcctccctatgtggaaaatcgaatttctggaaacatcctccgtattgggagattttgcctatgtaaaggctatccttattggctagcggcactaattactttaaaagtaggatgga

SEQ ID NO: 69024 - DNA, 1037 bp, Homo sapiens
agttgtataagcaggaggaataggaagtatgtctattccatcttcttcacttctttaaaaaacacgttagtctgaatatcttcaaatatcagtagtgcatagaaaatgaattattttttactttttcttttttaccaactctttcacagtgtcttatgctgaggtttagttgcaattacatgtaatgaaattgaaaattttattttttctcttaatctttattgcagattctgatgctcacagtaccacctcaagtgcctccccagctcaatctccttgttacagtaaccagtcagatgacggctcagatacagagatggcttctggttctaacagaacaccagttttttcctttttagatctcacttactggaaaaggtaaaagaaacaaagtatctctctaaccagcaaaccatcttaattatgggcagtatttttctacttccttagcaattaaatggcatttggcaaacagttggtaacacacgattgcagtggattaagcaggaattgagcagggaagtgggatttttgtatgttcttcctattaaaatttatttaaaataaaaatcacatcaaggtacctacattgcctattgctagataagtggagtagaaagacaatatgcagtggagagaatcagtaaaactaagagttggtccttcaaaaagacgtgaccaaaaatatactagagataaagtggatcaggaaaaggagataatacacataagcaattttaggaaagagaaaagagacttaggtatagataaagcagacatttaaaaaataataggatattatagacaacttgatgccaataaatttgaacatacaggtgaagcaggtacagtactagaaaaaagacatgttgctaaagctgtctcaagaaaaagtgaaaaacggagataatctcataataaattgattcaggccaggtgtgatggctcacacctgtaatcctagcattttgagaggccaaggtgaggggattgtttgagcctaggaggttaggtttgcagtaagctatttttgcacc

SEQ ID NO: 69025 - DNA, 1700 bp, Homo sapiens
taatttatctttgccttgttttccttctgtctaaaattggagtaacaaaagtagctctattttttgctttgtactaaatataaaaagtatatgaaagcttttcgtaaactgcaaaacattatcctgtagaaatggagttgtttttaggtttgattcttaacctagctgggtcatccagtaatgattatcccatatacaaatctatttaaatttttttccaatagactcccactattacccacttcacaggaaagaatatctttaaaaaccccagtagataaatattatttattcccttatgtcatgtgatgattaaaggtgcacatggagcttcatcctcttttcagtataaaactgtggttctcaaataggcacggatctgaaccaaagggatacactggtgtcattttaaaaatattattaaatattcagtattttcttccaggtggtagatgcaagggctggacccagtctaaagactacattgaaaccaaagaaagtgaaaactctatctgggaacaggataaaaagcaaccagatcagtaaactgcagaaggaatttaaacgtcatagtaagtttgatattacaacattagtacttaataattgttttgttatttttggctgggggtggtgtatggcatgtgtggatcattttttcctttattgctttttataaagagcactggaaggcaacgttgacttggtagagatgttatcttatttctgtgaaatgttggcactttttctgattttgatgtctcaagagagtatttctactagctaaccacttcagattgtactgagaccaccctgatgtctttattgacatcttaattttctagaaggtgcatttctagctcatttacttgatttttatccataaggaaattgagtcctgcagatgtgcaagaaggtacgtaaaggggacaatctgagaccaaagtccagattttctggaaagtaactttagaaatcataacgcacatattgaaattcagccaacctcagggcttgctttcaggtttaaggggcagtgtgtgttgtgtgatagaatgagaaaggaatgtctaattaattaatgtcaggtcacatgctattattggaagttttggggggttgctgtaatggcacatctgtattttggaattgagattttagattttgaaaaggaaatacactgcatataatgttattgtctaataaatatctctattacccttggggtttgaaggagcattattgaaccaaacacattagtatttttacagcaaaaagtagcagtattcacatttagtggaataaatagatggtacataggctagtcaggtttgtctgcttatagtcatagtttaggtcatgccagattttgtggccaaataggttaggaatatactttctgtttccagagctttctcagaattgcggctaggggttgtggatctctattggagctctcagtacttttaaaaaatctatagggccctgttagagagaacattatcaatcaagacatggttatcatgcttgttttagaataatggaaaaagacatctaagtttagtgacggtaaagtgaggagtgcaggagaactcaacattttttgagcattttggtatactaagcactttacatatgtaatctcagttatttccatcttagagctcagaataggaggcacaaagaggtgatttaaactt

SEQ ID NO: 69026 - DNA, 1058 bp, Homo sapiens
ttttcttttcagttatcatatgggtttgttgttggattgagaaaaaaaaatctgcctcatttgagcaggcctctctagatcttttcttatgactgtgtagagggtacttcctcatttttcttcctctcaaagacatcaaattcccaagcatttaactaaaattattatcaactaaaaatgttttttttaaaacagttcttagaggtaactgtttagacttaattattgaaatgcatgaaggccttctgccttgcccccatcccactcttttgcctgcctctctcaccaacaaaaacatggcagaggaacagtttattaacaatagcctgtttgaaagggaagcttcagtttttagctaattatttgctaataaaagttttaaaaaaattttcttttaaaagttgtaaaacctctgtctatatttcaaaacccctcaataccaaaaaaatacacataaaaagcctggatatttggttctgaatcattttcattaatacttgctatattatactaaccagaattggaatggaatgggatcagacgagataatccaaagacaaatacagccatatgtcacacaaggacgtttcggtcaaccacagactgcatatatgatggtggtcccaaaagattatgataccatatttttttgtaccttttctatatttagatgcacagattcttaccattgtattacagttgcccacggcattcagtaccgtcacacgctgtataagtttgttgccttggaacagtaggctatcccatatagcctaggggtgttgtaggctattgccatcttggtttatgtgaggacactgatgtctgcacaaggatgcccaatgatgcatttctcagaatgtgtccccattgttaagcaacacatgactgtactgaagctttaggtttactcatctaagtttatttctaaaacaactttaaaaagatagtgttctgtggtaataactcctaaaactatggacacgaaagtgatattaataattttcttggccgggcacggtggctcacgcctgtaatcccagcactttgggaggccg

SEQ ID NO: 69027 - DNA, 1954 bp, Homo sapiens
acgtcagggcaaagccatgaggaggaacaagccccggcagcgcggcgtgcgggaggcgcggcctgcgggaggcgccgggccgggctggcgcggggcccgttgttccggcgcaggtgagggaggtggcggcgagcgacgcggttcacctcccgctgccctcgccctcgccccggcgagcggcccccgcaggaactttcctcccgacgcgagatgtcttatttaccaacaaatccaccagggagcattcttacttgctggctcggcgtctctctcggcagtcaccggagtgcccgagggggaagcacgatttacggaaggtggggacccgagggccctgggaggagcggggaggcattttactgctttcagagaaacgggtgagggcggcgagcacctcctccccagccgagctgtggcccgcaagtccaggggacccagccccgacgacgcccgataaaccaccgtggggaagttccggggctccctgttgccctactaagggaagtgaggactgtgggcgaattgtgcgtgcggccagtttctttgtgtgtttctagggggtggggggagcggggaagggcaaggtttgttttggtgtagggggagttggtttcttgaggtggtagggcggtgcagtttgttctggtaactatgaccctagtcagtttctttgtttttattttcttcctgtaaccttccattacttcaggcactcggaagattaggatttactcttgagttaaacagggaccctatccgagacagttttaccccagcaattctttctcccccttcttaagttgtcctaaggagggttaagaaaagcttttctttttcttttaataatttaaaaatgaatttgaccttgttattcagagtacgctgaaagcacctgtttttgaactggaatttgccagacttgaaaagccttttaaaattttatgtcgcaaaattgaacacatttagttgcccaatctaaaagtctgggagtttgtttctggtggagtttcggagaaaaccctcatggcatttaaagtatttatataatgattttgggaagggggatcttttttaggcgaaaggtatgcgtgactcagtgtttggtggttattcagtgccttaggatgaccttgaagaagcaaatgtttagggagttgggccttttggaaacattgtaaggaggctggggagctggctggggaggaagctgctcaggaagatgacacagggtaacggctagcttcttcccagatcccgtgaactgtggttgaccttctggttacctctcctagatttttcttttcaagctaaccttttctttttttgtatgtggccccaggcatagctcaaaaattatgctggtttgacacatggatgcttctttggtatttggggtttgcctgtagtctagacatccgatacccaccaccatatctgttgcttctttcctgatttctcctgcatttgaatcatgtgtaaggcctagaatctaagtgatcattactaggaaataatacccttgaatgcccctgcccccacacacctaaaaatcgatactagttgaaatccattttttttcattattttgttattaataaacctatttttcccaagttttggttgaccaaattacaataccaaaaggcaacctatattagtacatttctgtagtaaatagaaagagcatgtcaggaaaatgaaaaactttggacctatttttcccaagttttggttgaccaaattacaataccaaaaggcaacctatattagtacatttctgtattaaatagaaagagcatgtcaagaaaatgaaaaactttggatttaataactttggctttcctttcgcagctatttctctgggtcctgtatttaaaatgcatatgaggtgctttgcaaatacgctgagattgtttgagttgtttttcttaattagtatttcatagctaagtta

SEQ ID NO: 69028 - DNA, 1012 bp, Homo sapiens
cttcggaccgcgcccaagagcctctggtgtccggggtgctttcggagcccgaagttttgctcccggtgcgttcacctgtagcgtaggtgtgggcgacaccgcgagggcttcccgtttatgggcggccgtccgcgctgtaagatggccagggaagccaacttggctggagatggaggcggcggcgttgtgtacgccgcgggagtcagtgaactccgcagggcactgctttttgtgctctacgtgacagaccacgtgcttcgggctgcgaccctggtccttgtccgaatgtccagccccgcgtgagccgtgggatgcggccgccgtcgggcaggtccggccggcaggacaatgtggtttgctgatgatggcgtcttgccagtttaaaaagcagagtgaaagtcgccaactctccgcccgtgcggggcggatactccgggcgtttctcatcaaggacactgcaaaactttgattaaatgggcctgctcccgaggggagggtcggggggccaggctccggactcttcggggcgcggggtccggacccctacccagggtgatcgtccagtgtccggcccctgcgaaacgctccgacatccctgatgctgcacgtaggcagcgcccggctggacagaaaacaaagggctgcatgtgcccgtgcgggcccccggcgctcggggccgccgcctgggcgtagggccgtgcaggtcggaggccctcgaagttcgggcgagtttcgggaggggcttttgtccctcagccccctcgtggggaaactttggcggcgctacttgtgcgaggtgccatgctggtgcgtagggaggcggcgtgcttccccgctccgggcgtgcgggcgggcgaccgagggaggcggcagtgcccggcgcttcagccctggcgtcgggggttgcgacggccgagggttccggggagcttggcccggactgctcggccggtttctcgtggcccgggagcctgtgtctgggaggtctgtgggttcgcctttgaagtcgaac

SEQ ID NO: 69029 - DNA, 1084 bp, Homo sapiens
tgtgtcaccagtcatttctgacacattaaataaagtctgtcatatcggcttctaagttcaaggttttaattcaccttggaggaccaaaaagcattttgcagctagattcgctgctgggtgctattctgtctcccatgcttttcatttctcagaaccagttcatcgagactaaagactaatgccagtgctgttggcttgtctggagaaaacaaagccattaatggtagttaccatattaattgcagaaagtgcttctttaagtttctgttggcaagaagttaccagtctaacaaagtaagtgaagtgcgtccaggccaggcggggtttttaatcttcttgcttcaggtttttgttattgcagttgccaaaacgccaagcttataatttacaagtcgtatccacatgtcccttagaaagaaactcaaacctaaaaatagaaatgaaactcaggaaaacaccaacccagataaataaatcttatgtcaaatggagaaagcttgtaaatctgtgctcgcggttacattaattgcttacatttcgattgattgaagcaagtgccttaaccagtcagcgtgtccctgcccaaaggaagacggcaatcctctcatgtttcagaaaaatttctcacatcatttcttgctcttttttctttttcttctcttttcttcttctttttttttttttttgagatggagtctcgctctcgttgctcaggctggagtgcagtggcatgatctcggctcactgcaacctccatttcccaggttcaagagattctccttcctcagcctcctcagtagctgggattacaggcatgcaccaccacacccagccaatttttgtatttttagtaggagcagggtttcgccatgttggccaggctggtctcaaactcctgacctcaggcgatccgcccgcctcggcctcccaaagtgctgggattacaggcatgagcccccaacccagccacttctcagtttcttagattcagtagctagggcctgcatattaaactcacagaagataccttaacaggagaaaaataaaaaagagttcacactcacatgtgcaaggtgtatacaga

SEQ ID NO: 69030 - DNA, 1033 bp, Homo sapiens
tttctattcttttaggacgctagaattaagtaattctaaattatgggttttgagaatattctttgtattaaaaaatattcataatatttactttgagcaagtcaaggcattactattatatgtcaatataatcaaggactaactcggttaagatttgacttattgttatgtatgtaagtatctaaagtgtattgatactgtgcctttttgacctcagtttttaaaaattctgattgtggtgatgacagcacatatctggaaagatactaaaaaccgtttggttgtatgttttaaatgggtgcatagtatggtattttaattatattttaacaaagctgctatatattttttaaataattgattttaaaatgtgtgtgtcagtcttttgtgttgaatggttaatgctttctattttaaagataaggaacacatttttaaataatttgattgtttcagtcgctgggtaagtcggagtgccactgcacagcgcaggaaagaacgccttcgccagcattctgagcatgttgggctggacaacgacttgagggaggtatgtggtctaccttcctggggtgcctcacagcaagcgccatgaactaggcttattccttccagcagatgtcattgtgtagattcttaatgttctttaaaaaaaaaactgtttagttatagtttaaaatattaatccttttgtacggacatatagcagaaaacacccttttttccatttttgtaatttcaagacatctataataaggctctaaaacaagtctttctgtgtattacatcaagtaaagatcaagttgaggataaatttttagttactatgtctcctataggagaaaaattgtctgcatgagaagcctagacatttctaagtttcaagcataattataaggagtagtgtgatgtacttgcctatgctttgttcttggcttgctggcaccagttttttttcttgaatctctaaatctactttatatttttgaaagtgttttaaaactatttttaaattaagatccttacactttta

SEQ ID NO: 69031 - DNA, 1038 bp, Homo sapiens
tgattctcttgttcttagtaaagccccttgcatgtaacatcacacagtaaaagtttttcccttgtatatactccttttaagaataattttatatacatgtgtatgaggaatttataatatatttctaatttaaggctattgcgaatattaaatctggataaaacctgtctttttgaatcctgttatgttaaaaaaacaacatttatttctggcttgaagttatttgtgtactgcattctgatttttttttttctttctttcacagttgtgcatgcctaaagggctatctttcaggacacaaacggacaataaagacccccagtttcactcatttataattaccagggaagatggttctcgcacctatggttttgttctcactttttatgaagaagttacaagtaagcaaatctgcacagcaatgcagacactttaccagatgcacaacgctgagcattacagcagtgtgtatgcttcatcttcctgcagtatggactcattggcaagtagtcttgatgaaggagatacaacttcccttttgaaactccagcgatacaactcctatgatattagcagagacaccctgtatgtttcaaaaagtatatgcttgatcacaccgttaccattcatgcaggcctgcaagaaattccttatccagctttacaaggctgttacctcacagcagccaccacccttgccacttgaaagctatatccacaatattctttatgaagtaccccttccacctccagggaggtcactgaaattttatggtgtttatgaacctgtcatctgccagaggcctgggcccagtgaactccccctctctgattacccccttcgggaggcatttgagctcctgggattagagaacctggtgcaggtgtttacctgtgttcttttagagatgcaaatccttctctactcacaaggtaggttttccttggattttacattttccaaaaacaagtacttttgctcccaactactgtgtttccatggggtatattattagaaccgaataatgatcacagtctt

SEQ ID NO: 69032 - DNA, 1060 bp, Homo sapiens
tcctgagtagctgggattacacgtgcatgccaccatgcttggctaagttttgtatttttagtagagacaggatttcagcacgttcgccaggctggtctcgaactcctgacctcaagtgatccacctgcctcagcctcccaaagtgctaggattacaggcatgagccacagtgcccggcccatttctgaattcttaacagtgatatcagaatttctacatagttagttcttcccctaatatccttccaaatcatatttgccaagacagctgtgtatatatagcaatgatctttcctgttaccccttttttaagcagtctaataagcagtggtggtggtggttttgcttttcttttgttagatttgttactgttttgtggctttttttgtttttgtaaaattatttctttctggaggtggtttccttcttgttgattctttgtgtgtcaagaaggtgcaatgttccttagttaacagaacaattatattgagaatggcactttcatgacctttctgatatatctcctgtcccattaataacttgatacatgaatgaagataatgttattttaactatacacaggcaggactgaattaaaaggtaagtgttgcaaggagttttatgataggttatgtcttgtttcttctgcttctgcagtgtttcatattttatttacatttgtggataataaaagcaagtatttctggtgttagagggtaggtgaaggagagggtttcttgatggctatcatgaagttacgctgttgctgtgtcagtacactatcagcagcttagactataactgggaggaattttgttttttctctaaagtgaaatgaaaagtaacctaaaaaatcaatctatctttcttttcttttcctttctttcctctctttctttcccttccctcccctcccctctcctccccgccccctccccctgcccttgcccctgcccctgcccctacccctccccttgcccctccctgccccctccactgcccctccccctccccttgccccccctgccccctccccttgcccctccctgccccctccgctg

SEQ ID NO: 69033 - DNA, 1185 bp, Homo sapiens
tgggtgtgttgcagcttcccaaggtggtttaccgtacctattggctttctttaatcctacttttttggtaaatattcccttcattaaatgctgttcagtcaccccactttagtgaatcatctatttccggctaagatcctgaaaaaagttattaaccattaacacaggttaatggtgaaattagaccattactctggttggtggaattatgatgaaattacagagaaaacaacaaatgcctgttttttttttttaaacaagtaataccatgataggtgcactacacctaataatagtgagggctaccattaattaattattagtgagttagttgtatattgtgctttatagatcacctcctttaatcctttaaataactgtataataattaacatcacctccagttagacatgaggaaacattaaacattttttattgtcaattaatatattgtcattgttttcttttatagatcattcccgagaagtgttggagcaattagtaggcccaaacaaactaaagcaagtgacatggactgtttattgatgcttttttgaagatgatcaatgctaggaaagcttatcaaaactactttcccaggaaaccatctatagagatttgcattctacttaatgttaacactatttttaattattttattgtcttaagttataactctcagagaattagctaagtcttggtatatacatggtttgtgctttactcttaaacatctttaaagtgctattattctatatctgttggatgagtcattatttttgaaatgataatcctagcatgaactctgatctatggtgttggattctgtttcttaaataactttaaaattaactgttttcccttgagatttccttctcctatgtaggtatttgagctattgttctaagtttacctgtaagtataaaccttgggagaatctaagtaaacatatttctaaaagcatagttaccttcctattttctggctcttaccttcttggagtatttaaatgcccatttgccaaaagcagacctgaacatcaagcctgttaattcttcaaagaatttaggtatttgtttcaccgaaatgaagtgacttattagccattcagcgtattagtattacagaggctcttgcccagccacatccattcattgatttttatggctactcttcccagttaca

SEQ ID NO: 69034 - DNA, 1049 bp, Homo sapiens
gtttgccaaagggtctgaactaacatgtttgagatttatgtctattaatacaagtagatatttttcattttagctgttttctataaagcattgattttcccgttctccactttttttactattacaagtaatactgcaaagggcatatttataaattgtttccttgtgcacatgtagaagagattctctgtagatcaacaattggaattgctgagttctggggcatactcatcttcagctttaatagctattacacattactttataaaatggttgggcatttaactttttaagctgctccttccaaattacttcagacttatattggtcttttctatatactttttttttgcaagtagatatctggttctttttgtatcagaatgtttctcaaaattgttcatactgttattatagatctttgttttcatttgactttattttctttatttttgcataggagattcatatgggacattgtgtaaatctgactgatggggctgtcgaagctgtccttacttactgtcctcaaatacgtatattactcttccatggatgccccttgataacaggttagtgcaatagattgcttgggttcaaattctggcttcatcttttactgtgtgaccttgagtacattacttaacccatttcattattcagtttcctcatctgtaaaacaggcataatgagagtacctacctcatagacttagtcatgattatctgacaattctttattttattttattttattttaattttttgggagacggagtcttgctctgtcacccaagctggagtgcaatggtgcaatctcagctcactgcaacctccacctcctgggttaaagcaattctcctgcctcagcctcctgagtagctgggactacaggtgcacgccaccatgccaggctaattttttttgtatttttagcagagacgggatttccccgtgttgcccaggctggtctctaactcctgagctcaggcaatccgcctgccttggcctcccaaagtgctaggattacagacgttagctgccgcgccc

SEQ ID NO: 69035 - DNA, 1201 bp, Homo sapiens
ggtccaggctaacagaaggagcatggtggtagaaaataaattcacttttgagaacagagtcaaagtggagcgagagagaacacataggcatagctataaatttctaaccgcaagcatgaagatcatgactgaaaccatttgggcagtttaacttttggtttgcctccaaagtccactagaaaagtaatttgattacttgaaaatttttgttttaaccaaaaggagaatcgcctactatttcactatctaattgggttctgaatgacttttgcctatttcctaaaaggaattcaacctgtggacaataaagccttgccattaattgcagatactacagactgtgtagagaattcctgaaacattccaaaagagttctgaataatgacagtatcactggaaaatcagtatttcctcacaggtggactactttgaaaagggctaacactgaactggtgattgctaaaatgaaaatcagtcacatttctcatgtatacatatacacacatatagctcattgatatataattatattttcccccaggaataaaagctgtggcttcatcttgttcatacctacacgaagcttctttgaaaagatgctgcaatctcactgacgaaggagtcgttgctcttgcactcaattgccagctgctaaagatcatcgatttaggtggctgcttaagtattactgatgtgtccttacatgcattaggaaaaaactgcccatttttgcagtgtgtcgacttttcagctactcaggtaaatgacatataggctacaaacatatagactatgtgtttaccaaatgtattttcatgactaatgagaacatatcataaggagttcattttgtttttgttgaaactattgaccacttcatgctttttgtggttaagtaattgagatatatattggcatattcctctcaattaagtagcaagggtgaaaggtatatatggctaaaacacatgtttgatgaatgggaggcattaagactatatctaaataatgaatacattttggaaaattctacttccgttgtctggattcatggactgtgtttctttttccctttgcttaggtatctgacagtggtgtgattgcacttgttagtggaccttgtgcgaagaaattagaggtaattttaaaacaattataaagatggtggtgattaaatttttatattcttagaaattatgtt

SEQ ID NO: 69036 - DNA, 1050 bp, Homo sapiens
aaaatataaaaaggactgtttgaaactcctattatttttaagtacagaacttgaagcttcacagatattacagaacaagaaacattaaaattctcaattagataaaaataatgaaatttatcaggaagttcaagttctgtgtgataaccttggtgtacccaagtaaacaacttctgacattctggttatgctaaaccaagtggaatcaaaggtgaaagacaggcaggacgcagtggctcatgcctataatcccagcactttgtgaggcagagatgggaggatctcttgagcccaggagttggagaccaatttgggtgacatagcaagatcccatcttatttcaaatttttaaaaattgttaatttttttattaaaattaaagaaaaccactctgctgaaaattaatttaaatttgaaacaggcagaacaactggaaagagtcaatgatgctctttcctgtgaacatgagtgcctctagcgaatgttatgaaacaattagatgcggcaatacagtccgttgcacggtgtgatacagccaaggtaagaaaagatgacacagcaagaatttaccagcctcagtgttatgctttgtcacccaagacagcgattataatggtgcatctacttgctgctcatgataatctatccaagatcattaggacaagcagtggagccagccagatgatggcatgtgccattaataaggtgctgatgggaagggtgcctgacaggggaggctggccaaatgaaattgaaccaccaccctctgaaatgcccccttggcaaaagagacaagaaggcagtggcggaaggggtggttggggtggtggttgtggaggtagaggtggtagtagaagaggctgtgggggtggaggtggaagagttggctggggtagaggaggatgggaaagtggtgggggagagggaggaggtgggatggaggtggtaaaggaggtttctaaggcagaggagatgatggtgggaggggagattatggtggaaaagattatgtagatccatatggaggaggtggtgatggtggtggatata

SEQ ID NO: 69037 - DNA, 1089 bp, Homo sapiens
atactgtcttaacataaggatgtgtatgagcttgaggcgcattttcatttagtggcgggcgggtgcatttcagtaggcgggccgcagagcttgtttggggattgcatttttctgctaaatgtgttagctttaatcatgtttcagtcactgttaatgtgcatgcatgttaaggttttaggttttttcccctgtgcagtcggatttttttctgtttaatattaatccaataaagacaagtgcagagataaagtattattgttttgcagtgatactacaatagcggacctagaggagcgcacataaattctaacttaagtgaatggtattttcaggccagacctagtttctatttctgttacttaggacacttaataagaattcagtaaacttagcatgctttcagtgcagccataaaagaaaacagttttgcacagcagtgtcatatctagtaaacacattagcatgtgctcttttattataaaatgtttcttgctgtccctaggaccaaagaagtaaacactgtgtggagagggactgacgtgtttggagggaaatgggaatgtacacgataattaaagagtaaagttgtgctcaacggtaagtgtatcacctctaagaaacccgccctgatttaaccaggcggttattcacactcaactatggagtaattcacctattaccgaataaaattactagctcagtgaatcaacatcggttttaaattaaactgtgggtcacaatggaattgacagcaaagcttgagaagaaatgttgttggcatagtactgaaaaatcagttgttaatcttagcaaaataaggaaagaggtctttggtaagggaattgtggtggaagttacctgggcagaggtctgcttctgtctgtgctgtgtttatttgattgtttttattatattttattactgttggtggcacataggggaatgtggcgcagagcaccactctgggaggatgcttcccgtgcagccaaagtgatcatgtccagggctttcatctgtaaccacaaagtgtgttaggaagtctcacctaatgattaagaccatggtccctgtaaccacactgctttggtt

SEQ ID NO: 69038 - DNA, 1051 bp, Homo sapiens
aatttactgagttcattaaggtaaccttgaatagccctggggagtttagactttgcgaatgaacaatgagaatgtttttaaccatatgtttgaacttccctttttttttaaattctcatttttattgtcatgttagcttttttaaaaaatgcagttagcatggattacttagaagaaagtctgttaaaaataagtaaaaacagaaggtgattggcatttaaatgtaacaaaaagctagctgtcattgtgtggaatgaatttctgttaaacacgttagaaatttcattgacacttgccttatttattgttgtatcctctattgctcctcttcttcccaaattaaagatgaggctgctctgaagattcagtaattaggatggacagtcagctactaattttcttagatattctatctaggcaaaacagcattttaataaaatatctttatttcttacagattcctgacattcagacaactgacttgtaactgacttataactgacttgtaatacactgctactatatcaaaccgacaatgaattggaatgaaaaaccaaagagtgctacattaccaccactgtatcctaaaagccagccaccttttttgcaccagtctttaataaaccaaattaccacaacatctcagagttctttcagctatcctggaagtaaccaagaagcatgcatgtatcccggtaattcaaatccaatttcacagccactgctgaatatccaaaattatcctcaacaaatttctgtttctgatatgcataatgggacagttgtggcctcacacacttcagtagaaagaataacatatgcaaatgttaatggacccaaacaactaactcacaatttgcagatgtcttcaggagttacccaaaacgtatggttgaactcaccaatgaggaatcctgtgcattctcatataggggcaactgtatctcatcaaactgattttggagctaacgtacccaatatgccggcactacagagtcaactgataacatcagatacctattctatgcaaatgcagatgatcccttctaat

SEQ ID NO: 69039 - DNA, 1020 bp, Homo sapiens
agctttttaccagattctaccattcaaaaacaaaactttataccacatacatcattgcaagttaaaaatagtcagcttctaaattctgtattaactttaccatcaaggcagacctcagctgtaccatcacagcagtatgccacgcaaactgacaaaagacctcctcctcctccttacaactgtagatatggaagccagcctttgcaaagtactcagcatattactaaacacttgtctatggaagttcctcagagtcgagaaatgctgtcatctgaaataaggaccagctttcaacagcagtggcaaaaccctaatgaaaatgtcagcacaattggaaatttcactaacttgaaagtaaataccaacagcaaacagccttttaacagtcccattagatcttctgtggatggtgttcagactcttgctcaaactaatgaagagaaaataatggattcttgcaatccaacttcaaatcaagtactggacacaagtgttgcaaaagaaaagctagtaagggatattaaaacattagtagagataaaacagaagttttcagaacttgcaaggaaaattaaaatcaataaagatcttttgatggcagcaggttgtattaaaatgactaatacttcttatagtgaaccagctcagaattctaaattgtctctaaaacaaactgccaaaatccagtctggaccccagataactccagtaatgccagagaatgcagagagacaaacaccaacagtagtggaatctgcagaaacaaataagactcaatgtatgttgaattctgacattcaggaagtcaattgcagaaggtttaaccaagttgattctgttttaccaaatcctgtctattctgaaaagcggccaatgccagactcatctcatgatgtgaaagttctcacttcaaagacatcagctgttgagatgacccaggcagtattgaatactcagctttcatcagaaaatgttaccaaagttgagcaaaattcaccagcagtttgtgaaacaatttct

SEQ ID NO: 69040 - DNA, 3708 bp, Homo sapiens
ataaatcaaaaattcaaaatgaaaatatgctacttctcgctttgctttcacaggcacgtaagactcagaagacagtattaaaagatgctaatcaaactattcaggattctaaaccagacagttgtgaaatgaatccaaatacccaaatgactggtaaccaactgaatttgaagaacatggaaactccaagtacttctaatgtaagtggcagggttttggacaactccttttgcagtggacaagaatcctcaacaaaaggaatgcctgctaaaagtgacagtagctgttccatggaagtgctagcaacctgtctttccctgtggaaaaagcaaccttcagatactgcaaaagaaaaggagtgtgataaactcagaacaaacacaacagcagttggaatttcaaagcctgctaacatccacgttaagagtccttgttcagttgtgggaaattcaaattctcagaataaaataagtaatccctcacagcagacagctttgtcgatggtaatgcacaattatgagtcttcaggtataaatataacaaagggaacagaacttcagatagctgtagtgtcaccgttagttctgtcagaggtcaaaacattgtctgtcaaaggaataacacctgcagtgttacctgaaacagtgtatcccgttattaaagaaggcagtgtttgtagtttacaaaatcaattggcagaaaatgcaaaggcaactgctgctttgaaagttgatgttagtggaccagtagcaagtacagcaacatcaaccaagatttttccactaactcagaaggaaaagcagaatgagtcaactaatggtaattcagaagtcacacctaatgtcaatcaaggaaagcataacaaattagagtcagctatccattctcctatgaacgatcagcaaatctcacaggagtcaaggaatagtactgttgtgagtagtgatacattacagattgacaatatttgttctctggttgaaggtgatacctcttacaattcccaaatagcaaagatattcagctctcttcccttgaaaatggttgagccacagaaaccttctctacccaatcagcaagggattggcagcagagaaccagaaaaacaattagataataccactgaaaataaagactttggttttcaaaaagataaacctgtacagtgcacagatgtttcacataaaatatgtgatcagtcaaagtcagagccacccttagagtcatcttttaacaatcttgaaacaaacagagttattctagagaaaagtagtttggagcatgccactgaaaaaagcacagctaacgatacgtgctcgtcagctgctattcaggaggatatttaccctcaggaaatagatgcatccagcaactatactccccaagatcctgcaagaaatgaaatccacagtgataaggcacctgtcttatacctacatgaccagctgtcagaacttctaaaagagtttccttatggcattgaggctgtgaatacacgtgaaggttctgtgggccagcaaactacataccagacctcagaagatcaaactgctgataaaaccagttctgactccaaagacccagcagatcaaatacaaattacaatattaagctcagagcaaatgaaagaaatatttcctgaacaggatgatcaaccctatgtagtagacaagttggcagaacctcagaaagaagagcccatcacagaagtagttagccagtgtgacctgcaggcacctgcagctggacaaagtcgtgattctgtgatactggactctgagaaagatgatatccactgctgtgcattgggctggctctccatggtttacgaaggagtaccccagtgtcagtgtaattccatcaagaactcatcttcagaggaagagaaacaaaaagagcagtgttctcctttggataccaacagttgtaaacaaggagagagaacttctgatagagatgtcactgttgttcaatttaagagccttgtaaataatccaaagactcctccagatgggaaaagtcattttcctgaactacaagacgacagtagaaaagatacacccaaaacaaaacataaaagcttaccaaggacagaacaagaattagttgctggtcagttttcatctaaatgtgataaactaaatcccttgcaaaatcacaaaagaaaaaaattgaggtttcacgaggtaacctttcactccagtaataaaatgacagcatcttatgaacaagcttctcaggaaacccgacagaagaaacatgtaacacagaactcacgtccactaaaaacaaaaacagcttttttgccaaataaagatgtgtataagaagcatagttctttgggacagtcattatcaccagaaaagataaaattgaaactcaaatcagttagcttcaaacaaaaacgaaagttagaccaagggaacgtattagatatggaagtaaagaaaaagaaacatgataaacaagaacagaaaggaagtgtgggagctacattcaaattaggtgactctttgtcaaacccaaacgaaagagccattgttaaagaaaagatggtatcaaatactaagtctgtagacacgaaagcgagttcatctaaatttagtagaattctaactcctaaggagtatttacaaaggcagaagcataaagaagctctgagtaataaagcatcgaagaaaatctgtgtgaaaaacgtgccatgtgattctgaacatatgagaccaagtaaacttgccgtgcaggttgaaagttgtgggaaatcaaatgagaaacacagcagcggcgtgcagacctctaaagaatcattaaatggcttgacaagccatggtaaaaacctcaaaatccaccattctcaggagtctaaaacatacaacattctaaggaatgttaaagaaaaagttggtgggaagcagcctgataaaatatggattgataagactaaattagacaaattaaccaatataagcaacgaagctcaattcagccaaatgcctccccaagtaaaggatcaaaagaaattatatctgaatagagttgggtttaaatgcactgaacgtgaaagcatttctctcaccaaattagaaagttcacccaggaagcttcataaagataagagacaggaaaataaacataagacctttttaccggtgaaaggtaacacagaaaaatcaaacatgctggagtttaaattatgtccagatatcttactaaagaatacaaactctgtggaagaacggaaggatgtaaagcctcatcctaggaaggagcaagcccctctgcaaggtccagtatgattttcttggtggtgtctacaatattgtaaagagtcgtaggtcaatatttgggctagcacctctcatgctgtcttgggctgctgggaaagactttaatgtgttatgccactacctagtatttgttttgcctggtaaaccaatgtttcattgggcaatatttgttttgtgttcattgccaccttattgtaaattgtagaaaattggtcgtcatgacgagctatatgtaaaacttgccagatagaaatatttcagttagtaccaagaaggctgtactgtgaaaaacattccacattccttgtgggaatgtcagaaaagtgtcaagtagctagtaatgtaagagtcttggttttgttaattctcctttggacttgtaatttgaaagccctgtgaacttgaaattttgttctgaatg

SEQ ID NO: 69041 - DNA, 1820 bp, Homo sapiens
tctttgctctgcttttctgactatatttgttggggttcataaaacaatagcataaacaggatatgttttcctggaaaagaagatagggatatattcattttgtaaaaaattggtgatttcaataggttctttcatttggatccttggaatttgaggtggggatataatgggaacattggaagtgggtgggggcaatgtagttttctatctcatgtgtcctttaatatctggagatgtattaacctcttcagttcatgtgaggggaacataattacatagtaaagataaactcattttttaattgaggtaagcatttcaaatagaaatcatttttccagtcctttttttagagttgtgttacatgtggttatatctagggcctttcaaaatctattttcagcttacatgattttcctttgttatagtactaaaggagatgattagcaatatctagagttctgaaaatgaatatttaaatagtttcaggaataaaaagtacaaaagaagactggttaaaatttgttgctacaaagaaaaggacacagaaagacagccaagagagaggtaaagtcatctttttaaatcttcattcacttatctccctatctggtatatggaaattggattatggttatgatatgattgtaaagtatgattttatccatgttcttttttttttttcagtcattcagtgtttgtgtttgagtggtaggaggacatttttgtgttgtcgtgctgtggaatgaaaggctgagctttattttattttaataggaaaataagtcttatcacaatgagttagctaagaggtttgcatattttacctgtataggaccagacagcaaatactttaggttttctgggtcataaggtgtctgtcctgactactcagctctgactctgtttcagggaaatggctgcagataatatgtagatgagtatcagctgtgttctgattaactatttatttatttatttatttatttatttattttgagacagagtctcactctgtcacccaggctggagtgcagtggcgtcatcttggctcactgcaacctctgcctcccaggttcaagcgattttctccctcagcttcccaagtagctgggactgcagttgcataccaccacgcccagctaatttttgtatttttagtagaggcagggtttcaccgtgttggccaggccggtcccaaactcctgacatcaggtaatccacctgcctcggcctcccaaagtgctgggattacagacatgagacaccgtgcctggcctctaattaaactttatctaccaaaataggcagcaggctggacttagtttgccagaccctggattcaattatttacatgttaatttgattaatcttcaatacaatttaggcaaggatatttccattttatagatgagaggttacatcatttgacttaagtttcattgctagtgactgaatagggacttgaatctggtcccctcttttcaaagtccattaagtgtggttgaggtatagtcagccctccgtatctgcgtgttccgtatctgtggattcaagcaactgtggatccaaaatatttgggaaaaaaattaatacaaccataaaaatagaaacttaaaagacaatatagtataacaactgtttacatagcatttacattgtattaggtattaaaagtaatctagaaattatttaaggtatgtgtggggggtatgctttaggttatatacaatatactatgccattttacataaggaacttaagcatccccagattttggtatctatttgggtggatgctgcagaagtgtcctggaatcagtc

SEQ ID NO: 69042 - DNA, 1037 bp, Homo sapiens
cccccaaaagaaaggcaagatgtcacgtgtatataacttacaattctataagtgaagagctatggttctgaaacttttgcttaactccttgccttaattttttatccctccaatatatattttccctctgaattttgattatatattgatcacagctaacattgagaaataaagtaagtaaagtttttatttcccttagataatgttaattcaagactctcgaagagaagcttcagtgcagatggatttgagatgctacaaaacccagtaaaagattcaaaagaaatgtttcaaacctacaaacagatgtacctggagaagagaagcagaagccttggtagcagtcctgtaaaataattacaagatgtggttttgtaattgccactgggaaatttctttccttttctgttcaaaatatttcgctgaaactaatgagaaatgccatgataaagatttctcagagtttggttcccactttcattgtatttcattgaaagtgcttaattaaaatggcttgagaactttgggtagccatgtgtaagaaatggatggtattcaccggggaaacaaggtatttgaatttctactttattgaaccagatttaccattattttaaaaggaatgcttatacaaatcaatttgaaattctacccatcttgagggaggaccgttcctcagttaaggacttgtttatttaaatgggactgtaaatatgttttggtttctaagctatattagcaaaatttatttttcaaaaatgcccactgtgatgtgaatgtcaaaatatattcttaagtgttttataactaattgtaaactttttttcagaagtcttattttatacttgtgaaactgaacacaattttgggacaacgtttaaacattacttttcatacttgaaataaacatttattttttaaaaaactaatttgaaaccttcacagctcagtttctttttggtttcctacctttaaaaggacgcattttggaaagtgctttcaaaagctgaaatgcgaggtggcttatgcctgtaatc

SEQ ID NO: 69043 - DNA, 1045 bp, Homo sapiens
tcctgagcttcggccctcgacgtagcaaaagagcccgggcgcccacgccgctctcggggtcttctactgccaccgggacaaagccctgggaggagctcccgcccccgcgagccggacagggcggaggctcccccgccgcgcgcgccccaccgcttcccagtcccagacccgtcgcctgcgcctcctcctggcgcgcctcacggtgcagcgggcggcggcccgcgcgcccggcgggaggcgcctcgggatgtttccgtctggtccttccctccgccccccgcgctgactccatccgctccccgccccctgctcggagccgccgccacgcgggaagggagggagccggccccgagactgcatcattccgcaccggctgctgcagggccagagggagcaggtggagcgagagagcgagccgcgagccggagcgcgccagacccagggcgagactgcagtgacgcggcccgggagacatggcggacgggcgtctctgaataagcagaatccggagcccctcgctacccgcggccgccgcagcccgggccatgccgcacggctgctgaccgcacgcaggggccggccccgaggacacatgcggcggcctttgccgcctcgcccctgaccctctgccctgttctccatgttgcatttctcgtcagtttctcgggcggtgtagctgccgctgccaccagagccggcggggcatcgcgctgctcattcatccggccgcactttcttttccgtttccacccatcccttcccatttccttctccctttccccgccagcttcgcatccatctcccccaccccgtaaccccctcctgcctccatccaccggggctatggccgcagaagaggtattgcagacggtggaccattataagactgagatagagaggctaaccaaggagctcacggagaccacccacgagaagatccaggctgccgagtacgggctggtggtgctggaggagaagctgaccctcaaacagcagtatgatgaactggaggctgagtacgacagcctcaaacaggagctggagc

SEQ ID NO: 69044 - DNA, 1620 bp, Homo sapiens
tgggtgatgtataatgtctctttagttttttggtatttggcctcttttaaagcctgtcggatgtatgggagaaaacaatgaacgtgctttgatttcctatcagtcactcttaagaacatacatattgtttaagtaactcggtcttttttatctgattcttgaggcactatgggtagcaaataaccacttacaaatttaaatgtaatatacactccttttctgtgtgtcaagtccttatttttaggtgcatattgacatttaaatgttaattattgtttggcatataatatcaaaaatctattatttattttatgctgttacagttaaaagatgtgatttatgacatactgaatcaacttgccttccaatttagtgtgtaatatggtaagcatttatacttttagatatgtcttatttttatttggatgcctgtctaccaaaaaataaatgtactacctatgattaaaaatcccaactaggaatctaatttttgtgtgtcaggctgtaaatttctggttcctattttacttaccatgtacctgtctggtcttaacaacagctggacttgtttatattttccaacttagattaggctgacatgtttaaatgcagtgatgctaaaccttgtgaagtgaggaagcaggatgatgactgtcattctcagagatgttttgatattgtctatacctatcaacactgctttgccaagatagggaagtgcaaaccagaaagtggtaagccatcaccttcttgataaaggagatggacttaatttaatgaaatgtacctcttactgactttgctgcttgatttaaacaatccttctagggatatttctgtcattgcacttaccttgcatagcaaaccttaatgcaattgtgttttgcctttgctacaccatgagctttgcatcccaagtctttaacacaaaagctagcacacagtgggcatgaaatattttatgaaagaatcagtttgtactagaagaaggcacacttttatcaagggttcactagtcaatattgattagtgttagataaatactaagaaaattaggatgtataggaagtgacagatgttaataaaactacctgtattagtttcaccagcagtaatgagaaaaatgtgaaaaaaacgttttgtaggaataatgtaactgtggtttcttaatacagaataatgcaaataccaactaaaattttttctataaatattttaatatatattttgttctatatagcaggaggttaataaaaatttaccagcattatttttactaaacgattcttgttcatatatttattttcagttgcatttagcataagtgaaattcgagattcctaaaaaactggtttatacagttatataaaaatgtattttaggtaataaaattattatagttgattatttgatagtgaggcctattatttttattctttaaacatagaatatactttagttggaaatataacttaaatgagttaaattgatttcaagtaacatttcttgtatgaaaagtaaatccaaaataattgtgcaaactgaggtgttccaacacctcagttttgaaaaatattttgtgagtgttttgatttttcaaaagaaagttttgctcatcag

SEQ ID NO: 69045 - DNA, 1071 bp, Homo sapiens
cacgtcgctcagtaaatacttgctgattgactttcaaattcagattacttttacgctagcatacggtgggcacaaagggtttttttgtttatttgtttgtttgagacggagtctcgctctgtcgccaggctggagcgcagtggtgcaatctcggctcactgcaacctcctcttcctgggttcgagcgattcctcgtgccttagcctcccaagtagctgggactacagacaagcgccaccacgcccagctgatttttgtatttttagtaaagacggggtttcaccatgttggccaggatgctcaaacccctgacctcgcgatccgcccgcctcggcctcccaaagcgctgagattacaggcgtgagccaccgctcctggcctgggcacagagttaaaaaaaaaatactggtaacagaaaacttgttggcgtgtttcagttttcagagtcttctataaggtcttataccagccgagaagcagcagaaccatctgtccgtgtaccgaggacggatctcagcagctctctgttcagtggctcctgcctttgtagtggattcccttgctgtgctgtaattaagtcagccggcaggagttcctgttttgagggggcctctcccggctggagaagtaccactgcctttgtgttacctgccatgttattgtggagtggataatttttttttcctgcatgggtcttggtttaacagcaggatcctctgggcttcttccaagaagcaccacatttccctgaaaataaatggcagatgaattatttcttgagattatgaaaatctgttagatgaaagcttgcctttttctcatgttcaaaacaatgctaaatgcttataattatactcccaatgaattacttctttcactggcttcctttgctctggcaaaggtggattttttttccatggcagagaaattttataaaaaatgtaatattttagaaaatgcctaaatgtcaagaatacaacatcttgtttgttgttgttgttgttgttttgtttgttttttgatacggagtctcgctctgtcgcccaggctggagtgcagtggcgcaatctc

SEQ ID NO: 69046 - DNA, 1002 bp, Homo sapiens
atggcccacttcagtagcaaagacagtgcactgtgctcaccacgccatttcatcttttccctgggttgataggaagatggccttctcaacccctttgcatctgtgtggggccaggagactaaacaccgccagttgattatgaggaggaatgacgtgtggcacttccagacctagctcacaaacgtggcaaaatccactctcccccaactccttgagcctgtctctccaaattgctgcatagaggcaatgtttccaggagaacctcacctggccagaaacatctgccttgaacatggttagaacaaatgaaacttttttgtattaaaacacttgagattctgtggctcttcgttactgtgttaccctatcctgaccttgctttgtggtttatttaatgatgcacatttactagagtggtgtacattcaatagtgaggtggccacatacaacatacccctaaaacattgctgaaagtacacagccatttctactataaaaatataagtatatgagtgaagaactgatttttgaattttgctttaattaatttaaatttaagtggtcacatgtgggtagtggccaccgtattggaccacagaaccttaagcagtaggaagctttttgctacgtgatgtattataaatctttccactgtctcagcaatctaaacataaaaccaacatgtctaaatttcacactttctagatgatgaagagtcataaaatgaacagaaagtctttatatggtgtttcagggggacagttgtgacattggagtgctggtcaaagttctttattattttttatttgtttccaaatatggagtgcagaaaaccaaatggtggaatggacatttttgccaaagtataattgtggtctttaatgatgtaaaataaaataccatattcatttctgaatttttttcatcgtgaagtgtgtgagatgtgacttgacaactttgcaaatgtcgtgcctctgcttaaatctctgcattatatttatg

SEQ ID NO: 69047 - DNA, 1116 bp, Homo sapiens
attacaatggtgtatgtcttttattctatgttttgggcccacagagcacaggtgacaaaatttgagttctaacatattccaatttgattattcctattgaagctgtgcttctttactaaataattggtaaaaaaattttttttgtataaagtttcattttggctccctccttgtcctaaaatcgcatactttcagcaatctgcattaaatatttattaaactactgtcattctcttagctcctgatactgactctggctcgcagcgggcttctagggcaatttaaccacattatgaattcacaacacattttgacattaaagaaaaacttccctgtgtccaaagcgcatacctatgtttatataaaatgtaaccaaatcaatttcactttccttttataaaagaacataataggcacagcatgaagcaatctgtatgatggattttcctgatatgaaaattgtaagcagtgtgattttctgctttagacagctgaggtggcgctagctaatctcaagaacaaatatgaaaatgaaaaagcaatggtgactgaaaccatgacgaagcttagaaatgaactgaaggctttgaaagaagatgctgcaaccttctcatccctgagagcaatgtttgcaacaaggtaacagtattttcttcctatgactgggtgtggtaggtggggtaaaggctttaaaattcacagccctgcctttgtgcatgttgagtgtattcggtgagtagtctaggatggctaagtgtgaagaaaatctgtggaagtccactctgacgtatctaaaagcaagccttctgtgctgttttccagagccccctactgaacactctggatccagaaattctattacataaaaatattttttaagtaagctaatattaataggttgtttctagaatttatgcaccccaaagagagtctccctccaaataaaaagctttcaataaggaaaaaaaccccacttcctagaatagctaaatattatcacctctgaaatagagttctgtgaaggaagtacatgaaagtatataaaagtgccttacctttagtactgtgcgagaagatactgtcataatgaagattaataatcatcacatcagctaa

SEQ ID NO: 69048 - DNA, 1617 bp, Homo sapiens
ttggcatggtggcacactcctgtaattccagcaactcggcaggctgaggcatgagaatcgcttgaacctgggaggcagaggttacagtgagccaagatcacgccactgcactccagcctgggcgatacagcgagactcagtctcaaaaaacaaataaacaaaacaacaacaacaaaataataataaattttttaaaaatgtcccatatatctcattgtatggatgaacatatattccagttttctgctattgtgggttatctacattctattgctagacctttaaaccagtcttctaaatttctaaatttcggtcaaatttattacttttcagcttaactcccaaattcagtttcaccaagattttcctctgaccacttctctgttttggttccagatgtgatgaatatgtcacccagttggatgagatgcagagacagttagcagctgcagaggatgagaagaagactctgaacactttgttacgaatggctatccagcaaaaactcgccctgacccagaggctggaggacttagagtttgaccatgagcagtcccgacgcagcaaaggcaaacttggaaagagcaagatcggcagccctaaagtaagtggggaggcatcagtcaccgtgcccaccatagacacttacctcctgcatagtcagggcccacagacacccaacattcgggtcagcagtggcactcagaggaaaaggtatgcatgcagcgatcttcatagtacggtgcagtggccagattttagttaactgcaaaaataaatgtgctcttgttgtggaggatggaggaggggaagcaaaagaaaaaatgggagctggcatataaatggtcttgctaatgtgggtctttccagatcaaaacctttttgataattgtgtttatgtagtcctttctaaccccctgcccaatccctcctcttgattaatcgtaatataattttcaagtgtctgttaatatttttgctactctttgtatgtgtaaatatgcctctcccttacctccaacctgagaattggtagataaaggtggatattaagaatgaagctgtgttctacctgggttataattttaaaagtcattgtacctttggaaatggtgctgtttatcagcttctctttaacggggcaaggatatgaatatgttctcttagggaaacttttgtccatatgaccaaaactgatgacagactgaaaggggatgtctatatctagataaaatgggatggaatacgcacagtccttttcttgaaagcaggtttttgtgctttttcatttggcatgggaatattgcccagagaaaccacttgtaaggtttttaggggcttgattttgtgagtcctggctgttgagttacttaccctgtattttcggttaatggtaacatttttattttaggagctttcattaaagactcaaataatatattttctatttgcggttcaagctgactaactgtaataaatcttttttccagtatccagaacagtttccaaatagggttgtatcctgatgtggaaactaaaaaaaaaaaaagcaaaaagattgatttacatatttaaaaaattaaatgccagtataaataatgttgtcactggtgaggc

SEQ ID NO: 69049 - DNA, 1421 bp, Homo sapiens
ttcgcactttgccacagtcaccactcctccttattacttatacccagcctgctatcctcatttctattctctcctggcccctcctgtagtctttgagtttgccaccgttgaaatagaattttttttttcattttaccttaattcctttttgcaaacctcagcctttggatctctaatactttccttatctgattcatgaagtcagcctactgattgggattaaaagatgtggtgtagaaactgatagtgcatttcacgttctaaaggtgtttgaggaaattggtagtgataatgagttggaatggtgtaatagccaaaatatacacctaagaagaaaaaaagtaaaaactgcttggtgtttttaatttcataactgatttcctattgttttagacctccttggaaggtaccttgaagtattctgtgaatcaccaaagtggtaatgatttatcaggatacctaactcggataaaacccacaagtcttctttttagtgttccaaatggatttagtagcactatctactggaacttagaaaagaaattggtatgattaataaataactcctattgctgtttaattaaaaagataacatctcaataaggttaaaaattaataatcaatgttaacaacaataactgttttcatttttgtatgactggtttttgtttacatgaatatatactttatattgttatcattacattgtttaagccatgaacattatatcacaagcttttccatgttgctatctagtcttgtttttatttgttaaagttattgtatcatagattttgtttcagatgctgttatcacattaatcactacttctcttcttgtccactgaggtagtttttcattatttgttatattatagagcactgctgggaataccctcatgcattcagcttctcatctattacatttttctcaagagtgagatcactcagttaaaagttgaacatccttatgttttttgctccattctgatgttgctgtcaagaagggtatatcaatgtactaaaagcccataaaacactttccctttttcccacattgggaatctttctgctactttatccacactgtgcacatcttacaactctaaagtcagttagcatacatgaatgagagtaccatatattgtcttaaactctttagttttgaataaccagaaaataccattgaccttagaaatgattactatttatgagattcgaggccggctgcagtggttcacacctgtaatcccagcactttgggaggccaaggcaggtgaatcacttgggctcaggagttttagaccagccttggcaacatggtgaaaacccgtctctacaaaaattagccaggtgtggtagtgggcacctgtagtcccagctactcaggaggctaaagtgggatcccttgagacagggagg

SEQ ID NO: 69050 - DNA, 1041 bp, Homo sapiens
ggcaggggcagcctgagctccggctgtgagcatagctcaactgatgtgtagttagaatgttcatggaaggcccaggcttgctacttcccattcctttattttaaatgatgtagtgagccaggcgtggtggctcatgcctgtaatccccgcactttgggaggccgaggtgggtggatcacttgagcccaggagttcaagaccagcctgggcaacatggtgaaaccctgtctctacaaaaaaaacaaaaattagccaggcatgatggtgtgtgcctgtagtttcaggggaggctgaggtgggagaattgcttgagcccaggaggtgggggctgcagtgagctgtgattgcaccactgcactctagcctgggtgacagtgcctacataaataaataaaaagaaagaaagaaatgatgtagtgaaaatatagttacatagcacttatacctagactacttaaagtgacctagtaattaaacttatatagctcatcaaccagcaaagattcctagtgcaccacactcgttatagagcagggaagcatcgctgccaccctcagggattcctcttgcatatctctgtgttctgtcctccacacacccatctctttagtcatctattgattttattcaattttcctggcagtttccccagtgtattttacctgaaaggtatgagaggaaaaaggaaaagcacaactcaaaatggttgactattccattctttgttttcttcaaaaagtgtaaagtcataaagatgccatagaaccactaaattcattgtcctttgtcacctctcagccaataatagtcattgatatactctccataccacaaatttaaagttttttgtgaactgtacatgcaatagccaagtttattttaactttagtcattactggatcccagagattttctttctcttttttggcatatagattatttatgtcacttcagtatgcccagtccacagatgagatcttctgagggactgcttctggagccggccctcttgtgtgattgaattagtcagtgatggttctc

SEQ ID NO: 69051 - DNA, 1376 bp, Homo sapiens
gatcacgtcacttcactccagcctgggcaacagagcgagactccatctcaaaaaaaaaaaaaaaagaaagaaagataagaaaaaaaggaagaacttggatacttggcctgaggagaactcagaggacagagatagttttcatgggaacacgtggagcatccggaggttgtttatggtcatgagggaaagagatgtggtgtggaaaatacgatcttgtgaaaaagtagggatgcattagttctcaagtcaggaaaatgaggaggtggagtcaagcgatgctacaggagactgtttgccacaaagagttgctgctgtgcctgccccagagcacttgggcccaaagaagccacctctgcagcctcactactcatcgtggctgggtttggtctccacagatgggctttcactcacatggtgctcaccagtgcccactgctgccatctgggccaggtgtggagccaaaacatagaagtgttccttgtctcctacatgagctgttccttcccatcccaaacagccaccagtgggctcctggactccctaaggcattgacttttagaaaattgggtagtttggctgggcgcagtggctcacgcctataatcccagcactttgggaggccgaggcaggcagatcacctgaggtcaggagtttgagaccagcctggccaacatggcgataccccatctctactaaaattataaaaattggccgggcatggtggtgcatgcctgtaatcccagctacttgggaggctgaggcaggagaattgcttgaacccgcgaggcggaggttgcagtgagctgagatcatgccattgcactccagcctgggcaacaagagcgaaactctgtctcaaagaaaaaaaaagaaaattggttagttttctaaattgcattgaaaattttataaataatagaagcccgagagaaagccacacagcaaaactttctctctctgccaatgaaatgtattattttcagccacctctttttaaaaacaatattatcttcattcctgtacccttcattttgctttgtatttttgagagcgctggttgccttaaaatcagtatctcaaatctctggcaaagttccttctgtttctttgactctatgaccctgatattttctagaggtagctggtgtcaatttgagaagcatccagaggagtgaatagaaaagaggccttagcattaaaaagactaaatttaaatccttgttccgccacttcctaactgtgtgaccttgggcaagttaatacacatgctgagcttggattaatcagtggaggcttgtaggacacctactgtgatggcaaattctgtgtttgtttctagcaggagagattttaaaaagaagttaaagaaaaaaata

SEQ ID NO: 69052 - DNA, 1059 bp, Homo sapiens
agcaaccaggacgttttgtgttctttatatgagtgctattttccacagtgtcatttattatgcaacgtggagtaaagagttgaaatcttcaccaaaataagggttcaggttaaagtacagaaacagaaacaaaacgattcgacatgaagttcccaaccatagcagcctaaccttctgctcttttctacctgcatggccttgctgttcctaaacattgtcttcatttcactggcgttgtatctgcctagtaccagtattagtgagactgtggattttatcagagttcaatgaaagaaagcttacccctgccctcactttgtgttttttatttttccccctttctcaagcaccacgtatttggacctgagaagtggcatagctgctaagttgacttttaataaaaaactgtttgtgcctgagggaaatatatgcctttttaaaaagtacctcagaacatgttcgtagatcgtctcatcggttttgtttggtgggactgggagttcagcaggaagtattgtctgtgtgtgatgacggggcagtattgccagtcggcaatgttgtatttgcattctttatccctaactctgaatctaggactccatgaaaagccgggtcacccacaaaacatttcttccaatacaaagtgtattattacgtctattataaactagtttcatttcagttatttatcttcatagagtgggaaagtctttttctgaaatactaattctatgaaaataataattttagtgaatctttgccaagaagttatagaaacttggaaataaatttctcattttcagcacaaaattaagtgatagtccctaagcagtaagagagaataccatgtatttacactgtggcatcatttagtatagtttacactgagccatatttatttataggcatttaaagtgaatcagtatgtgtagtgttgataaaaatcagtatctgtaaagataacatcaggaattcaaaaggaaattgaaaaggggcagaactagtgagaaccaaaaagaatgaactccagtaagactaattgaagacatacttggagag

SEQ ID NO: 69053 - DNA, 1114 bp, Homo sapiens
gcagtgctttaaggcatgcatgcaggcaccgtggtaaaggaagggcaagacaaggaagatcagcttctatttcaagggcttcctttgtttttctatttcaacagccccttaaaatgtgtgttgcatattgtgagcagtagaaggagatttgggtcctaacaaatggatgactgacatttttctgtgtggctaagaggttggtagctcaaacaagggacttctatgtcctttgtaaggcagcattgtatccccttccccaaaactgtgccctaaaatataaatgtgaaaaaacaaaaagagtgctgtctatagtctggatacttcttttgtgtaagttttttttgtttttttatcattgaaaccatagggccagtgctctgtgagtctaactgggtctgccatttttacttgatagaggaaaggttgcaaggaaagccttggctcatgcaggttcagtctttctgattgtgctgtgctgctgtcatcttggacatttgtgccagtggctgcccagagagttagaaaaggttattgctaataggccctaattgtttcattttctttttaaaatgataatgtaaaattagataacctcatattagtcaaggactcatgttcttacttcaagaacaggtttttaggccagacagttgtgagttcttggtgttaattgtagttgactttaaaatcttaccctcttttgtgcttactggtgtttgtacatcattattattactttttaaaagtttttttcttaaggtacaaaattagtttagctacatactagctctaagaagcatcttttaataatagtagatatatgtctgcctgaaaatttccttagcataatctaaaaattttcaagccaatgtaatagtattgggataatttttttcacccataaatgtcagtctttcataagcaatataaggtttgggaggaaaataggtaatttgaaagcctcatgtatgattatgtgttcatgttgctttaattaccattatcttagaatccagaaaaaggctgtgagtgaatgggtctgaagtgtgtggcatccgtgtacttgggatgtagttacccagagcattggggtaggctagataaatccgtacac

SEQ ID NO: 69054 - DNA, 1004 bp, Homo sapiens
gactatctgtctaggaacatgactactgcctacattctaggagatgccttctatggagcagtgttctatgaagggtggtgtgccctacagggtgcaaaagatgaacacttggagagcaggaagcaggtactagaccttggagttcaagaccagcctgaccaacacggagaaaccccgtctctactaaaaatacaaaattagccgatactggtggcacatgccggtaatcacagctacttgggaggctgaggcaggacaatcgcttgaacccggtagtcggaggttgtggtgagccaacatagcgccatttcactccagtctgggcaacaagagtgaaactccatctcaaaaaacaacaacaaaaaaccagccctggcattcctaatatttttgtcctttttctagcatttttttccatctatgtgtcagatacatctatctatatggtatatgtatggaattctgaggagagaacagagactggacaatgcaagctcacttgtctgtttttgtgtccatggcattttaagcatggctggttaagtggactgagatgatgttattttagatagtggaattctggcaatacttggtaataagtgaccacaaacatcataagctatttaatggcacgatatttaaacaagttgtgagactaaagatactacatctttttctttacaaaagaaaaaaaaaacaagggccaggcacggcagctcacgcctgtaatcccagcacattgggaggccgaggcaggcagatcacctgatgttgggaggtcgacaccagcctgaccaacatggagaaactctgtctctactaaaaatacaaaaattagccgggtgtggtggcacatgcccgtaatcccagctactcgggaggctgaggcaggagaatcgcttgaaccagggaggcagaggttgcagtgagcccaagatcatgccattgcattccagcctgggcaacaaaagcaaaactccgtctcaggaaaaaaaaaaaaaaaa

SEQ ID NO: 69055 - DNA, 1038 bp, Homo sapiens
agctggctccgttcccaggttctagtagctgcgggagggttaagcagcccagtccatgcctgcccctgctccctccatcactcaggcagaagcctgaattcttttgcaggcgttccaccactcttgcataaagtttggaggtcttgtgatctctccaaaatttaccatcatactctaaatatgaaattaaaaaaaaaaaaagaaatgcagcaaaagggaagtgttttctcaccccaagcagtgaagttttaggttctctttttcctgaaatagcttctgtccattctcatttatcttcaaacagttagagatgattggagagacagtattccctcctggaaggcagctcttaattagagaggaaaatatttctagaacaggaagatgaagcttgagaggtgaatgttgataaacatagagaacttgttggctcttgttttctgctttaatggacagcaccctttagagagtggccactacaacaatatggactttataagttcctttttaggtttttaaactgagaagacagtaatatagcacttcctgcctacactactggataattttgttaaatcatctaagaaaaattgtaaatatgcatatttagtgcacatgttattttataacagttttttttttttaatgacctgaaaaaacttctctttctaaagcttacgctttcaggcaaactcctttcacatgaaagaaatgaaatatgatagagtatgatgaatgactcaataggaaatattatgcagttctttggaagaatgataacttggtgttcctttaataaacatccaaatgtacatgtaacctaaactgcaaactaggattaagatttaaatttaatcagttcttcttagatactagaatagacttgaggaggtcaagagtagataggagactcctggaataatccagggaaaagttgaagtcatttatttcaaaaataaaaaggtattttcttagatgttttgtggaccatccctgcccacttcctgagccaccttctgataacctttactgtaggca

SEQ ID NO: 69056 - DNA, 2124 bp, Homo sapiens
agctactcgggaggctgaggcaggagaatggtgtgaacccgggaggcgtagcttgcagtgagccaagattgcgccactgcactccagcctgggtgacagagtgagactccgtctcaaaaaaaaaaaaaaaaaatctgtacaaatatttccacaggaatattgttatatgttgggagtaagtttcattctcctattaagactactgttatgtcaagcagtaataaggactttaaagaaaaataaaatcagatgtggagttagtgatggagagtgctgttatgatagatgaatctaggaaagcctctttggagatgtgatacctgaacagaaccccgaatgataagaagaaataccagtgttttaggagagattgtcctaagcagagaacagcagctgcaaagaccccaagacacatacacttggttattaagaatgggagcagcaaggagtatggcaagaacacagtgagttaaggaagaatgaaatctaatgaggccatgcactttgggaactagagtatgtagaatctcataggctgtcactgggacttgagttttcccttgagtgtgtgaggaagccctcagagtttgtgactgacttgtagaggttctagtggaggggatcagagtggaaacaaagagaccagttaaaaaggtatggcagcatgaataaaaaagttttgagagtattcattatgccttccaaataaaaaactctttggttcataatttgttcataaattaaggactggctacactgtactatttaaaaatgttaagaaacatcaataagtaaaaatgttaggaagagatgataaatacgtaagtattatatctaactaagtctttactaactagtcacattattaaacagtgcaaggatcaagaaaagttaagcgttgaaaaataaataaataagttataaataaaataaacagcccaaggaaatgttccagtccccataggtagactcggggtcatcttctttatttaaatctttatttaaatgtggatagcatcccaagagacttgggtctacactaagaatattcaaatccatgtttctgaaaccatcagagatagaaaaaaaaagtagcgaatatcccttttcaactggaataaacttgtcttaattctagaacttttccataccaatgttttcatgcttcctttgtattttatcttttagctcattatcaaattatagtgatttgaagaaagagtctgctgtgaacctaaatgctcctagaaccccaggaaggcatggattgacaaccacacctcaacaaaaactcctctcccagcacttgccacagaggcagggaaatgatacagataagactcagggtgcacagacttgtgtggccaacggtgtaatggcagcacaaaaccagatggaatgtgaggaggagaaagctgccactcttagctcagatacttctattcaagcttctgaacccttgcttgatacgcacatagtgaatggagaaagagatgaaactgccacagctcctgcatcacccacaacagacagctgtgatggaaatgcttctgacagtagctacaggactccaggcataggcccagtgctccccctagaagaaagaggggcagaaacagaaaccaaggtacaagagagggaaaatggggaaagccctctggaactggagcagctggaccagcaccatgagatgaaggtagagcatgagactagctcatgagcagggaaaaccctgcctattcgattgttgtcttaaaactctttatttattgcacccctgaaatgtatgaatcagatcacccacactggcagttaaacgattttcaagctctggctgctgattagcatttcccctatgctctaagcagatatttcactttttcttttcatgtagtttctgttaatatctctgttgtaatttcaggagtcagaacagtgtggaaactttaatataggaaatccacaaatgtattgtttttacatagaaagaaaatgttccttgttgctctagatgttggtgctgtatccctaatacttacgggccaagcaagaagaaattgtataatctttgttgttcagaagtttctaatagaataaataggcctgtaagatgaacttgccact

SEQ ID NO: 69057 - DNA, 1060 bp, Homo sapiens
cgtatgttgtcagcaaacttactttttgcttatccttgtgttggctttgtcagggttagggacctaacatgtagaaggtggtctgtgtggagagagcatagcttttgctaataactgctggcatcccccttggattttgcaaaatctgaccaggatatccacaattgccaagttcagctaaagcatgctttgcagtcagcaaagattattctgataagcttcctatttaagatcctgtaggattgtggaggacctcaggggtgacttcattgcatagcagtaatacacagttatatctgttagttaacatactccctgattcatgaaagatgtattattttatcatggcacaagttctgccaggttgctgtctttaaagatattgtcagaattagaatcagaacataggatatgagtgagtcaaaacgatacatcagcactatcagaataaaaccaaggtcttgaaaagaataggctactgctactaataacaacatgcatgtatttcaaatgaattttgctgaatgacagaaacaagactaagaaggcacatgcatttacatgacattatagaaaggaaagatcactaggtaccaggatctggtggtaggagcatagagggggttgattacaaaggggcacaaaaatagttgaggcatgatgaaatattccatatcttgattatggtagtggttatatcagaggtcctcagcccgtaggccacggactggtaccagctggtctgtggcctgttagggatgtggccttttgagtggtggggcaggcgagcaagtaagtgaagcttcatctgtatttacaggcttgctccccatcactcacgttaccatctgagctccacctcctgtcagatcagcagcagcattagattctcataggaacttgaaccctattgtgaactgcacatgcgagggatctaagttgcatgctccttatgagaatctaatgaccgatgatctgtcgctgtctcccatcactcccagatgggactgtctagttgcaggaaaacaagatcaggtctcccactgattcaacattatgg

SEQ ID NO: 69058 - DNA, 1001 bp, Homo sapiens
tcaagtgattctcctgcctcagcctcccaagtagctgggattttgggcatgcaccaccacgcctggctaattttttgtatctttagtacagacggggtttcaccatgttggccaggctggtctcgaactcctgactttgtgacctgcccacctcggcctcccaaagtgctgggattacaggcgtgagccactgcacctggccccattttgatgcaatatctgtgtgttcactgaagaatgaagtagagtcatcagttgaaagttaaggggaaggaggaggagatggggagattcaagaaagaggactaagtgtgaagattttctctgggcagagaaaagtgagcctagtagagaaacaaaggtggacttgggcacctgttagaaatttacagttataaatttaaagggacactcgtcagcttaatggcaatgatttttctctaacaagatatagcaactcaggccagcgaaggcagatagcacggtttatccagagtagtataatgagaaaaacactggaagagaagggaagtatttacatcagagagttaataatgaataagagaagtctcaattggataaaaagagcaggaaagctaggaaacaggctgatggttaatgagaaagtggcggggtcagtggacagaagaatttcggtaagttcagagatgtatggtagcggacatcttgggggcaatgaattagaaataagagagatgttggtgaaaaaaatgggatatgtgaacctggcatgccagatatggttcaccctctgatggtgacacagtcccgggggtgaccatgagattgaacagctaaggtagactgcacagcgctggcagcagagacataaggcggtagagttgggcttgtcatgtaaatgttgaagtccacagacattgtggtagagcagagaactatgatccgttagtgagaaattcctgagtgaatgggtgtggggcagatgataaggagatgctaactcagtaggggagatgggt

SEQ ID NO: 69059 - DNA, 1059 bp, Homo sapiens
gagcattttttgagctattccttgaatatgtgcttttttgtcttgaagaaatggtgtatcaattgattctgtcaccgtcaggttagaatgagcacttccatttaagaaatcctttcatgtcttcttctctttcacatgtaggacctggaacagtttgaaagatatacctccatgttgccaaaatagatccatggtgaaaaatacagggacagttgaggctattgtattaacttatttaatttagtttataaatctctagctgcataaatgatgtctgttcttttaaaacaaaagaaaaaggacaaattgttggtgttcagatttccgatttataaagaaaagataacttgtttttgtagaaatactcctaagaatgtcttaagtatatagcaattatgtatatatagtattaaatatatatattatacatgcttttaggttcacattcatctctaatttattttttaaatataaagcatggtttatcgtggaattgagcaatgttctaaactgaagaaatgttttggtgatttatgttttgctgattggcatttgagggtattgatatttttataataagcggtaatttatgtggcatgggatatatttgtgaattccaacagtacttttaaagtaccattttttgtttctgtgcctatttaaaacagtgcctctcttagaaggtgctattaatataagatgagggttcagttaatgcttcagtcttgattattctaagattaaagtgcattttggtcactgggacagtcaaagtcatacaggttattttaccgtttacaatcctataattattgcagtagttaacatcagcatgtacaaacattttcaccaaaacccaaactttatgagacacctgaccttttacagaactaggatatgtggaaaccacatttatcgtaatgtttttcttttccgtaagataatcgagcatggttaaataaggtctctatataatgaacacttaagataactgtatgggccttttcctttgtcggaatgaaacaaaatccacatgtgataacctatgtttggggtggg

SEQ ID NO: 69060 - DNA, 1568 bp, Homo sapiens
tattttaagcttaaattttgcttttgctgaaagcctaccatttggcgtgttaagtatgaaatatagtgcagacttttatcttggttttaagtggggctcaataaaaaacaccagccacttttgtaataatggcatcacagtgtcatcatgtatgcaagcaataaaactctttagggtatggttttatactgaaaatttaatatgaaggccccttcccacaagaatatagataattattaactttctagatgtgatacggtaattcgaattgcagagtataaggaagggaaatgggaaggggcatcattccttggattttaaataactatcaagaacatttttactttaacaaagaaaatggatagaaaaagcacattttgttttccctgaagtttaatttgacatcaggtttgtgtacttatcttcactaggtgacttaacttaccccaatttttttaaaaattattaaactttttacagaaactaaccttttaaatgtaccctttccccatatatatatacgcacacgtttggattttttttttttaagaacacttgttctagttataaatatataaagaaaacgataaagtttgtggtactgcagggttgttaaagattctttgatgccttctaaaaacttttgtcaaaaatacttttgagttcacaattctgttttacttttccttgtccttactttttggaaacagggtggttgcttttatttgttttctggttatattcaaagccttaagttcttaatctgagcatattgtctgtgataaatttctgatgatctttctggactagatacaacctgagtagcaagcaccaaccggagcaagtaaacttctagggaacaagcgtcttgggttttataggtatctttgctataatgcagaatagattaatgaagatttcctatatcatatgatatttgtgttagtgggtctaagattaagcacatgatatttataagctaaaattaactcaaaagtcaagaatgtcttaatgttttcattcttaaattttgtattctccaagaatgtattagtatatgaactgtggccaaccagttcctattcttcagactgtattgacatctgtagtggatcatgttgcttcttcattcttaccaattttattagaatcaaacttcttgttatttgcatactattatctactatagattctcagctttagaaaatgactatgatacataaagaccactaggtcaacttaaaaaaccctttctgtgaatttatacatgtatgtatatatgtaaaaacactgttgatttgcaattctgtctttccatagaaatgaactttttctatcgaaattgtttaacttaaatattttaacataaattatttacatggatctttatgtataattcatccttatatataccccttaatcacgtagtcatgagaagataactttgctttctttacagaaagggcagagaggaataagataagaaactgaaacaagcaagaatgaagagagatgtgggggagagactgctggtctccagaccacagcaatgtgttttaagataagat

SEQ ID NO: 69061 - DNA, 1777 bp, Homo sapiens
gagactccgtctcaaaaaaaaaaaaaaaataaataaataaaaaataaataaaaggaagtgacactggataattaagagacacaccattgcgcctttaacacatattcacacccagcactgtcacatccatcgtgccttgaggacaggcataaatttacggccttcctcctgcgctcccggcctgctcctagcctttgactagagcctgcgcagcatcccagtcccaggctagggcccaccggtgccgcgcagcctcctggaagctgtggggagtagcgttcctccgctccagaactacaactcccagcaggccttgctcctctccacctccctcgcagcgcatggcctgccgggagggggcaggtagccggcgggcccggtccaatgggtgccggcttccgaggagagggcggaggagaggaggaaggaggcgaactgtgggccccggccccattcattgccgtggccggcgggcactggggccccgtgttttcagagtcatggaggcgctaattcctgtcataaacaagctccaggacgtcttcaacacggtgggcgccgacatcatccagctgcctcaaatcgtcgtagtgggaacgcaggtgagagcagcaggcggcgttcgctcgggccagaccccggccgcaggcctggtcggtgctgcggcagtgcccactcccgcgccagcgcccactcccgcgccagcctttggggcctgtgggaggagggccttgctgggggccccagggctctccgggctctgccgcacccgccctcccggggcagcgttgcatcaaggcggagaatccggggcccggccaggggcggagccggcgcggcgggcctggctagcccggcgggtcccggggacaggagagggaaggatggggccggcgggcggaactggagtccgctgggaccgggcgcggcctcgtccgcgtgccgctgcctccaagggcacctgggggacgcgcggggcactcgggtctcgctgggctcggtgggctggctgttcccatcactgttggctttcgtgagacgggtgttttatttccctccttgccttgcccagggactgcggagttagttttggaatcgctctgttgaggctgagagacgctacggtgcgtgagcgccagtgttttcctgcagtataattccaccaggtttcgagaacgccgaagcagcattttaaaaaaagaaaaacaaaacgtgtatctagagttctgcgggtgttgggaaggaatatccgatttttctgcgtaggctgtgctttttgtcttccacagttttgtgatcgtgacctaaattgggcatcagtttctctggtcttctcatagctaactcatttttttttgaatgcagaaatgttggcaaaataactgttatttctagagtgacagaggagaagtataattttccttttctctgctacttcgattagagttcagagaaacggattttagaaattagtatattgatattaagtgctttcatttcttaatagtatcttttctattgagaaggagcggtttccccatcattttccaggaggtacatagtatagggtataagtgctatcagaaggaacttactgttcaaagtattagtggctatccaaacactggaaactatagacaccctgtactcgtttgtttgtttgtttgtttttttggcttttaaatagttgaagcaatagaaattgttttagaaacacatttccttggtctgcgataggattgggaaagattctgctcaatcttgcctacgtattcta

SEQ ID NO: 69062 - DNA, 2581 bp, Homo sapiens
attttatatataccaatattgtgtaggttttgaaacctggttggtggagtatcaaaacaggtgggataattatgggaaaacagggctgttattttctggttttggcttaaaaacaaatagatcatgtaataggaaataaaattatctttcatttaaaaagtctgtggccgggcatggtggcttacacctgtaatcccagcactgggaggctgaggcaggtggatcacctgaggtcgggagttcgagaccagcctaatcaacatggagaaaccccgtctctactaaaaatacaaaaaattagccaggcgtggtggcacacgcctgtaatcccagctacttgggaggttgaggcaggagaatcgcttgaacccgggaggcggaggttgcagtgagccgagatcgtgccattgcactccagcctagccaacaagagcgaaactccgtctcaaaaaaaaaaaaaaatagtctctgcactaatttttcctttaaaataattctgtatgctggtttgttaatatagtttattgaattaacaaaaaatgtgttaagaaactcattttgctcttgtatatattctgttttcagagcagcggaaagagctcagtgctagaaagcctggtggggagggacctgcttcccagaggtactggaattgtcacccggagacctctcattctgcaactggtccatgtttcacaagaagataaacggaaaacaacaggagaagaaaatggtaaatttcagatttgagataattattttacagctcttcatttttgatctattcttaaaaagatatgaattgattagataattagaaattagtgactgtagcatagttagaagtcctgtgagaagtagtatgcatctttcttaatgtaaaaaaaagagtagtttttgttttgttttgtttttgagacggaggtcttactctgtcgcccaggctggagtgcagtggtatgatcttggctcactgcaacctccacctactgggttcaagcaattctcctgcctcagcctgccaagtagctgggattacaggcgccccccaccatgcccagctaatttttgtatttttagaagagacagggtttcactttgttggccaggctggtctcgaactcctgacctcaagccatccgcccgccttggcctcccaaagtgctgatcacaaggcgggtggatcacgaggtcagaagttcgagaccagcctggccaatatggtgaaaccccgtctctgctaaaaatacaaaaattagccagatttggtggcacttgcctgtagtcccagctactcaggaggctgaggcagaagaatcacttgaacccaggaggcagaggttgcagtgagctgagatcacgccactgcactccagcctaggcgacagagtgagactccgtctcaaaaaaaaaaaaaaaaaaaaagaagaaaataggcattgtcctttataaccgttcttttttgattaaattgaaaatatattagggaatgctgtgtctatcagcagattttaagttgcttaccaaatatgtatcctatgttaattatacttatattaatgaggtttgaaatgttgaatgagagtaacgtatttaatcttcctatttagttcagtatttggctcagactttcttatttatagaactctgtaacatagctctaattattaaattacttttgcagcagagtaccatatctgtttcttatctgcagagatctgttttcaatgcagttttattctacttcttattctgatttaagatgggatgatagttttgacaaaattgaacttattttaatttctgtgtctgattttttcatttactgtaggagctgttggtggtgatgacttgaattttttttttaatggggaaaaaaaacctcatgagcatctgctatgactctagaatgttagtcactgaagcaaattagtgtagttgtagatgttgcaagtaatatttttagatagactgccagtggctatgtgggagccttttaattacattaggtagcttctgggtatgttattcatcactttgcatttctctaatacttattgaagttctgaaccttgaatttaatcatgttggattaatctggggttcaccttcaaatatatagaataacacttataaaatttcatccccactgatttcatcaaatttaccaaacatctgaaactaagaccttaagacactatatgatattaggtctttctctctctctcttttttttttttttaactttccattttcttctgtcaccttgagagggcccatgatatcctgtctctcagaaactatttgaattgtgggcagtgtttccttagataaaattgtgcttgttagaaaagggtgtacatttcagctatcgtagtgtcagctctttggtatctctttgtttttatgtccactatgttttgttgatgtctcctcttagtggttggtcagtaaatctgcctacctactgtttttttccaagcttagtgctgattttgtatatatatttgcttaaaatgacaactcaactaccccaaacacaatatagattatataaatttgagtactagatttcacgtgt

SEQ ID NO: 69063 - DNA, 1115 bp, Homo sapiens
aaaattgtgctatatatgatacttctgaacagtgtcagtagaaatttgaaaaaaaatgtgaaaaaaaaatttattttggggagaaaagttgttgaactaaagcaaaagttttttgttttctttttaaaaaatgcaaacataggccgggcgcggtggctcacgcctgtaatcctagcactttgggaggccgaggcgggtggatcacctgaggtcaggagttcgagaccagcctggccaacgtggtgaaaccccatctctactaaaaatacaaaaataagctaggtgtggtggcgggtgcctgtaatcccagctaatcgggaggctgaggcaggagaatcgcttgaacccgggaggcggaggttgtagtgagccgagatcgagccattgcactccagcctgggcaacagagcaagactccgtcttaaaaaaaaaaaaaaaatgcaaacatacatgtttcgtagaataatgcttaaaatcttggtataatttgaaattttacccccatttcattaagtaacctatttgtaaaagcaatcagttgccccccaaaaagcagtaaaattacacattagaattaaaggaaaaagataggattaatttttctgcatagggtgctgtgatacacgtagtagtctccctttggactgagtccacgaaggtcaagagttaactttctgcagtgttctattaaatccaatgtatgtttcaaataaaatacccttatatagtccagtcttagctaatggggcaaatacttgcatatacttaccaacttttaaggttttgaaagatgtatttagtatattttgtagatttttaaaaatcaggcaatttatcttttcctgtagtaggttatcagatatctcaggcaaagtttttttttttttttttttttttaaggcagagtcttgctctgttgcccaggctggtgtgcagtggcacaatgatctcagctcactgaaacctcctgggttcaagcaattctcctgcctcagcctcctgagtagctgggattacaggcgtgtgccactacgcccagctaatttttgtatttttagtagagacggggttttgccatgttggccaggctggtcttgaactcctgacctcaggtg

SEQ ID NO: 69064 - DNA, 3305 bp, Homo sapiens
tttttgaatagtgaattaattgtgcttcatttgtgtcagaattagaaataatggtcacataacttttttattaattttaaaaatttaatttttattttttagactagtcaagtgcagtagtaaggcgggaaagagtagaacaaggagttccatctgtaactgactgaacagtcaattgagataactaccttcagacaagccagatataactaattatattggaaaggttgtttcctaaaaatgttaaaaataagttatggcaagcaatatgctttgtttctatgacttaaaaatattatatacatccctctaattctagttgtattttgcactgcgcagtgggattcttaatttttcttcttagccactaactttactttcgtcagtaaattttgaataattgaatgctatgtgcatttgaaatgtgatcaggtttctgcacatttgaatttttaataaggtttaaaattttagggataagcactaaacttattctgtgctgtttctctttaactacagaccctgctacatggaaaaactcaagacacctttctaaaggtttcctttatccatttgcttttgaccctttttttctcttatgcctgcatgtgtgcttatgtactattacaggctgtgtgtatttttttttcttccatttttatttgcccatccacattgattgcaggttttagtggttcttgttattttttttggcattgcatcaaaatgcaagcttttttggtggtgaatgtaatttattttatttttatttttgaagacatgcttgtgaagccaagcctttttaaatataataagataaattagaaacagctctttggtatgtagtacttgcattttgtgagttctgttcacctagattactccagtcctccaatgagacttcttggaagaaggtactaagctacaagtaggtgagcattttatctgcaaaaaggatccggttttatttacctttattccaccaaaggaccgactcactcttctgtttgtctgaatatcttatgatcatttttatttagacctcaggaggctgatatgcattattcaatacacttattaagatattttaaccttctctaaatttgacaaaagcaaaacagctgtgtttggaggagataaagttagattatctttccacaattaaacagttctagtttttctgggaaaaacagactatatcttgctctccaagttttagactacttcacacagtgcaacagtgaatctattttccttctttcagcaagtacaagaggaacagacctatgactggaaactaatggagagtggcaactccttacgctgcatataccagggttcttgtttttccttttcttccattttatttctttcctgcctccagttccaagggaaaacagtcttgaccctgggggaaaatcaccttgaaagtgtgtgtaaattacaaagcagctagctctataataatgagagagctctttaaaggaacagcaagttgtggctctacaggtaaccaacaggaaaccaaatttttaaaaagaactgaagaattagctgtttcattgacacattgtaaaatttttccttgagtcatatgtgtacatctgttacatatgttttttgcactactcagtgggattcttaatttttcttcttagctactaactttattttcgtcagaaaactgcttttatatgtaagattttcaaaactaaagaatattccttttactgtaatataactacacaaaaaaatatgaagagaaataaacaattttatttgcaaaatctagatttcaactagtgggaagacctgtgagcagctctgcctgaagttggtcatgtttttgaaatacaccatacaatttttaaaatataatttagcagaaaatacaattttagaaaaatataatttagcagaccttaaaatacttgttaacttgtacttaatggcaaaattaaatacaagttaagaagtgttttattatgttgcctttttgaattcctaaagataaaaagtagtttccatagtttccaataaatgagtttttcttttttccaggggtggaagcagaagaatggggtaaatttcttcacaccaaaaataaggtaatcacacatgcatataatgaagaaataatgttgaaaaaaatatattgtatgaatacttgataatttagtttctaatcattggcaattacgttattttaaagtaactataactattccttataaaataaatcttagtaacatttctaaccacaattgtttattggaaaacacttgaaattgaggccgattttctctgtgatttggtgattcttaattgttgtgggatcaggaagctttgaaaagttcgtaatggccaggcatagtggctaatgcaagtaatcccagtacttagggaggctaaagtgggtgggtcacttgagcccaggagttcgagtccagcctaggcaatatagggggaccctgtctctataaaaactaaaaaaaattagccccgcgtggtggcatgcacctgtagtcctagctacttggaaggctgagtcgggaggatggcttgaggatgtgaggttgaggctgcagtgagccgtgattgtgccactgtactccagtctgggtgacagagtcagaccctctctcaaagaaaaaaaaaaagccaaacagaaaaaaactcataaaaaaactataaatccttagctcagaaaatatgtatacattagaattttatttattttctgaagcaaatacatagacatccttgaagtatatggactccccctccagcttaagaacttttgatcttattttgaatattatgcttttttatttcaaaaatttttagctttacacggattttgatgaaattcgacaagaaattgaaaatgaaacagaaagaatttcaggaaataataaggtaggcatctttttagagctagaaggcataagcatcagtaaatatataattgaggtattctgtacataatatgtgaagggcattgtaaattcctactcttgatcttagccaaaaggccgagaagcgatggacattgtaaattcataatggactttgaaacaaatggagtattttcacagatatatagaactttgcttaaaatcccttttctttcttaaagctttcatataaatcaaatattttatttagatgtttattgttgttcctgtcatgtacatgccacattattatataattctacttagtattgctacaataagttatctttttctgatggattgattgtactctaactcaggaagcattgtttcacttatatatatatc

SEQ ID NO: 69065 - DNA, 1927 bp, Homo sapiens
gttctgccttattttcccacagcccttaccaccatctgtatactatatatatgtttttgtttattatatgcgtgttattactaaaacataagttctacgaaggcagaaagtttggtctttttaaaattcactactgtaacataatctgacatgacctgaaatcacgttcagaaaagtgcctaaaatagagtaggctgccagtaaacacttggtaattgaatgaatgagtgaatgaatttgtatctagccaatcaacattgaccagttcttaacatgggactgtattaaatcaacttttgatatttgcaagagttacactttgagacttgacacattaccagattcataaataccattgtagtatattagtaatgtctttatttttattttaactatttttaaatggatatacctatattctatcgattaaatgtgggtaaaaaagctgagttgatttttaattattagttccttgctcatctctgtttggtttaggtgcctgtaggtgatcaacctaaggatattgagcttcaaatcagagagctcattcttcggttcatcagtaatcctaattccattatcctcgctgtcactgctgctaatacagatatggcaacatcagaggcacttaaaatttcaagagaggtagatccagatggtaaggacagatgttaatttaatgagatgcttattttacaatggtaaatctacccttgagaaaggaatttttctctttaaaaacagtatctctggttttgaatacaaatttaaaagataatgctttcctatttttgtttataaaaatagaaattctgatggaaaataaggttattaagttgctatacagactaggcgaaaatattttacaactttatttgtaatggttacctaataatttaaaaataatacggtggctttgcaaaaaggatttcttgttttgtgacctaggtatttgaatagttgacttttaagaataaataacatagccaggtgtggtcacatgtgcctgccgtcccagctactcagaaggctgagatgggagcattgcgtgaggccaggagttcaaagtcagcccgggcaacatagactctgtctgttaaaaaaaaccaaaacacagtaggtaatcattgtagattattatggtacagtagagaattatggtatctacattctgcagaggtagataatatttagacatgctcaaggcacaggggatttttagaaatgaaggtaaaatcctttcatgaagcattttagccccaaggattagttcatactgtgggtcactgatgcttgactaatgatgtagtgcacatctcatagtatatataaaatgctagcttgtaagagagtggttactattgttgctaacaaatgtatgcatggcctcatatagaaaccatttttttcaccttactattcagagggtctgaaggttgtgtcatgtttttctttccctgctttgaagaataatttcaaataaaaatttgataggaaatagtgctaagactgccaatctgccaataaaaattcccataagcagggtcactttaacaattttttttttttttttttttgagatggagtcttgctctatctcccaggctggagtgcagtggcgcgatctcggttcactgcaagctctgcctcccgggttcacgccattctcctgcctcagcctcctgagtagctgggactacaggcgcctgccaccacgcctggctaattttttgtatttttagtagagacggggtttcaccgtgttagccaggatggtctcgatctcctgacctcgtgatccgcccgcctcggcctcccagagtgctgggattacaggtgtgagccaccgtgcttggccccaatattttatatttcaagtttttaagaaactcttttttaccacttgagtaaataatgttcatttcag

SEQ ID NO: 69066 - DNA, 1050 bp, Homo sapiens
agtatatatatatattttagatggagtcctgctctgtcacccaggccgaagtgcaatggcacgatctcagctcactgcaacctctgcctctcgggttcaagcaattctcctgcttcagcctcccgagcagctgggattacaggcgtctgccactgtgcctggctaatttttgtatttttagtagagatggggttttaccatgttagtcaggctggtctcaaactcctgatctcaggtgatccacccgccttggccttccaaactgctagaattacaggtgtgagccaccgtgcccggcaaaaatgttttaaaaaattatacacaatgtttaacattatttttaaaaaagcactggtaagtaaggcattaccaaaatgatgacagaggtaatactaagtgggattgtagatgagggttttcctttattaacactaaatagttgtatttaatggatcattttctttcttttctttgcccttttttctttttgcatttaccaggtcgcagaaccctagctgtaatcactaaacttgatctcatggatgcgggtactgatgccatggatgtattgatgggaagggttattccagtcaaacttggaataattggagtagttaacaggttagcagttagaatgggataagaattgggataagcattcttagaatgggataagcattctcacttcagagcaagtctgaatttctaaaatctgtttgaaatgtgatgctgtactatattttttctcccttttattatgatcttggtattgctaaagaatccgttgccctaaagggagaaaagagagagaatttttttttttttttgaaatagggtctctctctgttgcctaggctggaatgcagtggcgtgattgtggctcattgtagcatcaacctctgggctcaagtgatcctttcacttcagcctttcaagtagctgagactataggtgtgtatcaccacacctggctaattttaaatttttttgtagtgacaaggtcttgccatgttgcccaggcttgtctcgacttcctgggctcaagcaatc

SEQ ID NO: 69067 - DNA, 1178 bp, Homo sapiens
aggctgttctggtgaccagctcccatcctgaagctatctagggacccccagccaccagtcatctcattagcatgcagagacactctaaacacccttaatgctcttggagagtccaaggattttaggagctgactgccaggaaatgaagacaaagaccaaatatatatttcacagtatcacatttgccaggacaaattatttgataggttttccccattgtaaaaatttgacttgtttagggctttagaatacacaattttacttttaaatccttcctttctaaccttttttaggttactgatgcatcacatcagagattgtttaccagagttgaaaacaagaataaatgttctagctgctcagtatcagtctcttctaaatagctacggtgaacccgtggatgataaaagtgctactttactccaacttattaccaaatttgccacagaatattgtaacactattgaaggaactgcaaaatatattgaaacttcggagctgtaagtaagaaatttttctgtagatttggttacctagattgctaggtcacttttccttttgtgaagatgacttcagctcagattatctgattaagatttattttctataaaacaaaaatataactttgtagagataataggatgatgtctggttgtgtgaaaatatgctttgtaaatgatataaagcaaagtaaaattgtcacatatttttaaatattttaatattttataagtatttacttatttttataagtatttaataagtattaaatattttaataagtatttaaaaataatttagcttttaaagtgtttgtttctttagtacacacagtataattgctcacaaaaattagaaaatgcagataagtaaaaataaaacataaaaacaaaattacatgttggtgtgcacctgtagtcccagctactcagaaggctgaggtaggagaattccttgagctcaggagttcaagtccagcctgggcaacatattgaaattccatccttttttttttttaattgaatccaaattttattaaggatttcaagttacatacttcagatttctagaatggaatggaataattttggaactggaaaaatggcataaacactgatatcccttgaaacttcaattttataaagaaaattcttctgcaaaccacatccccattatat

SEQ ID NO: 69068 - DNA, 1470 bp, Homo sapiens
atggctgcttatgtgcttaatggtagagttgagtagttgcagcagagactgtatggcctgaaaagcctaaaatactatgtgaccctttatggaaaaagtttgccaacctctacttcagattgtgaatcaatggaaataaatataaggcactgtttcctgtcctcaaggaaaactagggcagagaaaaggtgcttagcaattcttagttaactgttgatttatgtcagaacatttattatatttacatatatataatttaatgattccttttcccctttaaaaaaattagagaaactagttcataatgagctgagttagaacacatggtaatgggaatgaatgaaattgtttatctgaggctttctcagaaaataagatgagcttaaagcttctagaaagacttctaacttgtatcttctttccctttttgcaatgccagaaaccatatacttcattgcctttcagatgcggtggtgctagaatttgttatattttccatgagacttttgggcgaaccttagaatctgttgatccacttggtggccttaacactattgacattttgactgccattagaaatgctactgtgagtatgtttagctttttagactgtaaaaaaaaatgaggttaaagtttttcttacccatatactgtgtctttttaaatttaattatacagtttattttgctctcatatttgaaattaaaaagcatttttcatgaaaagtaccaaaaatgtgactttcttaacccttgggaagaactgaaattacatatataataagagttctaagttttattttctcagggtcctcgtcctgctttatttgtgcctgaggtttcatttgagttactggtgaagcggcaaatcaaacgtctagaagagcccagcctccgctgtgtggaactggttcatgaggaaatgcaaaggatcattcagcactgtagcaattacagtacacaggtaacggagagaaatgtaacaggtttcacatgaactagaaaaggacatgaagtggtggtttcactgggtggaaggaaatgtataagatgggatacaaggtaaaatctgtagttcccttacctgaaagtgatttgaaataggattcttaaatgtagtctccaaattgaattcagtatttctgtgatcattaagtaaaagaaaatgactgttagcctggcatggtggcttctacatgtagtctcagctacttgggaggctaaggtgggaggatggcttagtgagactatgacttaaaaaaaaaacaaaaaacaaacacgtttttctttcatctaccatttgtaggaattgttacgatttcctaaacttcatgatgccatagttgaagtggtgacttgtcttcttcgtaaaaggttgcctgttacaaatgaaatggtgagctactatagcatagatcattgtaattactattagtaaaagtttaaatttttgcttggctgctttttaata

SEQ ID NO: 69069 - DNA, 1172 bp, Homo sapiens
actacctcaggtccttagatgtatcctttacccaaataagttaacatctttaacttatgccttgttacgaacttattttcttattgttgaaaatgaactaaaaaagtgacagggaatagtggatgatctgaagttttaatagcaaagttgcataaagtgttggaatttagatttgcattaggtagatgactatttttccctaagagtaaaatacttgtagttactttaatgttatttttccctcttagaaatgcagttttagatgctgaaatgtaaataattttaaagctagagtaaattattgtttggcataagatttatcagttggaatataattatcaagtaatttaggcataagtttcctgtactttttcggtattgtctgtttcataagttttatatataaatttctcaaagtaaaatatggttgatgtatttttgtatatcgcctaacttactttttttctaggtccataacttagtggcaattgaactggcttatatcaacacaaaacatccagactttgctgatgcttgtgggctaatgaacaataatatagaggtaaatataattcttaaatgctttttcacaggtagaaaaatctgttgtaactcagttatatcaaacttatttagcatggagtaactataaaatagacatgtgccacattagtgcctgctgcatgtcaggaaatatgctgaggggattacattgttttcttaattctcaaaaccacctgcaggcattattactttctgcttatgaaattgaaattcagaaagaatctgaaaattcattgatttggtgtgactggctctattttggtaacttatagtttatacaggggaagtgtgtacaacaaagtatttaaaattcttttcatttggctttgaaagctgtgaaggaaacactcaagaattaaccaacttagcataaatttggaaaagcagagtgcttttttcaccactactggggtggctgcatttcatggatcttttctttccttttgattttaatgtaacaaattgaataagatctcagatggagccaaggctggtggacagagcaatttatccagaagccattttttttctctgccgcttttctccaaaaatagtacatttttctgctactccctaattcagtaagacctgagtcccctgctatacca

SEQ ID NO: 69070 - DNA, 1761 bp, Homo sapiens
tttagtaggcatatatctcaatacttggataatcacttttgttttgcttgtgtttcttaggaacaaaggagaaacaggctagccagagaattaccttcagctgtatcacgagacaaggtaaaaaaatgtttttaatgcatattcccaatacctaaagatagattgatgagctcagaatattactcagtcctaggagtaattttttcttcttttcctccctttaacactccattggaactaactgagtaaaggcatacaagtttaaaatgggttttgagtgatttaaagataatagtattttgaattcactgacataaatgcttaaaagtagatttaagcatttatttaagcatttaagcatcaagctttttaaaaaaattcagtcagtgactttatcaactttgcacatagctgaaatgactcaagattttattataataagagggtttcttggaaaaaacagtatgcacagaacagaggttttaattactagtaataattaaaatagttgtaatactaaagtgtgtataaaaatcttttaccttgaattctttgccagaaaagaatcttattaaataccaaaaataaaaatgaagcttttggatttggatttttcttatgtattcatctgaaggaaacttttaacaaaggtgacaatggtgaaggaaataaggcagaataaacaatctcccatgattattttcatctttcatgttattttacgatttcattacagaagggaaaaattcatttatagaatgttcctgaatgcatttttgcatccttgattttttttcccccctggattttttgcctttagtcttctaaagttccaagtgctttggcacctgcctcccaggagccctcccccgctgcttctgctgaggctgatggcaaggtctgttctgattcttaatctaagcctgcatgccttgttctctggtacaacataatcttctggaaacaatacactgaatagaagaatattaatatgggatactgtgctaaggtcagatcactttagtctaatatatattttaaaattatataacaatgcaatgcatagtttatattgttgacatgcttttgcttgcaatatagaagatgcacacagaaaaagtaatttaaagaggaaattatcctgcactttttgaatttcaacccattggtatttaaattttgcttgttaaattgcatgttttaacatatcttttaacagttaattcaggacagcagaagagaaactaaaaatgtgagtctcttgcttcagaatggaaatgttggtacctttggttctcactgaaacactgtctataccaccattaaagaacctgtttgtgtagtggtatctatctcttgtctgtgttatgttcttaatgttccttttatctaacctgtggaagatggcattaaacgttgttttaattagtaacaataataggctttctcactgttttgttaccttcaagaatagttttaaatttagtattttggtaggaaattcagagatttcctagatttcagagatggaattgtatttttggacatttcctttcctctttaaagatcttgagatctgttcagtactaatagatctaatgcttctttcttatgcttccagttagtttgcacttgttaccctatatatagcttcacatatgcttcagaagcttaagcaaattaaaaaaacaaatggggactgtgagagtttgagactgttttcaattcttgataaccattttagaggaaaattaaataatg

SEQ ID NO: 69071 - DNA, 1965 bp, Homo sapiens
tggtatgtcattcatgtatagttaacaaacatttaaaaatctaattactcatttttaagttaatgtgtaacataaatatactacttatatttaaatgtagttcaccttaactgacatactaaagacagattttagcaaatattttgattcagaatgatacctcaaactaccatttttctaactgccataatcctctattaaacttatataatccatttttagattgtaagatcttaaagaatacctaaaaaaaaccctcttaaatgttgatgaattgtttttccattataaagtcatttttgacttttagaagtcaagactaatacattttctagaaaacaaggtacaaaagcacttgtgattaatggtagcactagatttctttcagcaaatccttaagagtacagaggttgaggggacttctgttgtttgtcacattccgcatttgaaacaactcacagtgactgtcagcctaagaatagcaaatgtagtcttgctttttgttaaagagttcttacttataccttatggcatttttgttgactattagaaatgtaaattgagaaacatataaactcttaagttcagagacgtaagttcatggaacttttagagtttaacagtgttaatgattacttaagaaattaaactgaatagcagttctttgtgcttttaacgagtagttttgtttttaagggcagcatatacttttcctacaatttagtgtttgaagggtgggagaagaggaacgattttgaaaagttagcgaatgataaagaaaaaaggaattaaatagaacataagttggttgatgccttgcaaacaacttagagcagaacttctttattatttagataggtcagggttccagttatacatgctacctagtgtctccttctgacctcattatctgtctgaataaacttcagatgggtactggatgtatattgactactgtcaaataaaatgaactttgttttagttaaggtcagatatgatgtggttggtatgttttggaacatgttttttcaggttgcatctggaggtggtggggttggagatggtgttcaagaaccaaccacaggcaactggagaggaatgctgaaaacttcaaaagctgaagagttattagcagaagaaaaatcaaaacccattccaattatgccagccagtccacaaaaaggtcatgccgtgaacctgctagatgtggtaagccatgacaatttggtttaggtaataaggtaggtgaccaagttagtaggaaaacgattagacagaaagaactaaaagtctcaaaaacttacataactttcagatgttaaagctgccattttagtgtcacaaaagtaatattttttccccctcatccctatttagccagttcctgttgcacgaaaactatctgctcgggaacagcgagattgtgaggttattgaacgactcattaaatcatattttctcattgtcagaaagaatattcaagacaggttagtattacttaatataaatgacggactttaatacttctggatgattctgtgatctgttttgaaaaatacatgtatttttacaattttaggtttttattctaaatcatcaagtggattttctgatagtccttgggtaacttgtagcaagacccattttgttaacatagaatgactaggacctcatgtatcagctagaaaaagctattaaaaatgagagattcttttgttctatctggctgccacattttgagtcatttaagaaaatctttttcctaaattttaatttagtagtttcattaattattttggctagtaacactgacttgcctttttaatttaacttggttttccaaagtatcaaaacgaatgtcttttactaggaaatatgtgtattttttctcgttcagaatgttttttcatgtgtctagtccctactgcatcttctccttcatgttgcctggtatgtcatttcatg

SEQ ID NO: 69072 - DNA, 4536 bp, Homo sapiens
aagtgattctcgtatctcagcctcccgagtagctgggatcacaggcatgtgccaccacactcagctaattttttatttttagtgcagacggtgtttcaccatgttggccaggctgctgtcaaactcctggcctcaagcagtccacccgcgtcagcctcccagagtgctgggattacaggcatgagccactgcgcctggccgagaactgcttttcttaatgtttaattacagttaagcaaaaatctaaagggcgattatgccattaatgaaatatccaaagtagtagtgttcttacttaactttatttcatgaggttagcatctaagcccaaattgttaaaagtagaattttggctaaaattccataatttggttgtgttttgcagtgtgccaaaggcagtaatgcattttttggttaatcatgtgaaagacactcttcagagtgagctagtaggccagctgtataaatcatccttattggatgatcttctgacagaatctgaggacatggcacagcgcaggaaagaagcagctgatatgctaaaggtattgtggaccttttgattttttatacttgggtagtagatagaaacatagaaatagttttaaatgcagtttgattcttggatatgtatagtctttatattctagctaggcttgtttcctgttggtacttgataagaatctttttttttttttttttttttttttgagtgggagtctggctctgtcgcccaggctggagtgcagtggcacaatctcggctcactgcaagcgccgcctcccaggttcacgccattctcctgcctcagcctcccgagtagctgggactacaggcgcccaccaccacacccagctaattttttgtatttttagtagagacggggtttcaccatgttagccaggatagtctctaactcctgacctcatgatccgcccgcctcgacctcccaaagtgctgggattacaggcatgagccactgcgcctggccggtacttgattagattctaattccagagaagatattggttagtataaactggttagttataaacctaccacatatatattggaaaaattaccctgcgtaattcagattaatttcataactttataataagcatttaaaattttttttcctttaatgcaggcattacaaggagccagtcaaattattgctgaaatccgggagactcatctttggtgaagagaactatgtaatactgagactttgttgactcaaaacttgctagttactgcctacctgagtagaatcttatttatgaactcctgtgtattgcaatggtatgaatctgctcatgtggagactggctataaactgaaaagtgtattccaaattgcagaacacatcacacatttaatccaaataataaatggctgtttctaaagtttcccagtatatataaaatacatcaagtctgtcttgtgacagtttcatctgaacttaacttaaaaacaactgttaatgttctagttgtgcaaagcagtttgcctgtggataagatgacctgtgtaataatctttgttagtagtcttaaagctgctgccatagtcctccaagaagaaagcaccaagacaacatttcatatgactataatgcatgtactatataagctgatctggctttgaaagatgtgagttggcaagttcctcacatagagtcattgtattccacctgtccttcaatttagttttttctgagcttctttgcagcctttgatgtgtttttaagaaagctgaatgcacaagaggatctgtgacactgacatggctgtggtgtgcatactgtgtagttacatagcccttccaattctgggtccatttgcactagcaaattaaaatatgctttgattcatacttaaacctgaaagcaggaatgcctacattaattcctacattaaaaacagccatctacccttgattatctagaaagacttggtaatgatggtcagttccttttagatttcagaaaatcaaatgatgacctaaatttcccttaatttgcaaatacagtagtaattaaggtacatctctaaagtggagcacttacaccaggctctaagattcactttgaggtggaacttaaaaccagtgtactgtatgtatgcattggtaatagctacttttgcttcatagcttcataccaacaaaatatatttattagaatagtatgaaagtactggaggagctgaaagaaaaacacccaaggctgggcgtggtggcacacgcctgtaatcccagcactttgggaggccgaggcaggtggatcacctgaggttgggagttggagaccagcttgaccaacatggagaaaccccgtctctactaaaaatacaaaattggccgggcgtggtggcgcatgcctgtaatcccagctactcgggagggtgaggcaggagaattgcttgaccctgggaggtggaggttgtggtgagctaagatcgtgccattgcactccagccttggcaacaagagcgaaactccgtctcaaaaaaaaaaaataaaacaacacccagatagatacacatactccttcagacttacagacctaagctgcatttatggggtagtgatgaggtttagaacatatacatattttgttaaaattccccagatgattcttggtatgaacgactatattataaattttaagatgtacttagaaatccttaagacatctagccccgtctctaatagacaacacatttatattgcagatattacttttttttcagtttatgaccaggtatttatgaaggactattggcagggaaaatatgaatatgttaactttagcttatggcatcaatttactaaggaacaacaggctcaccaactgatgtcaaacataaaaacccccacatcagtctgatacgatatggtactactttgaatctgttactagtaccatcttgacagaggatacatgctcccaaaacgtttgttaccacacttaaaaatcactgccatcattaagcatcagtttcaaaattatagccattcatgatttactttttccagatgactatcattattctagtcctttgaatttgtaaggggaaaaaaaacaaaaacaaaaacttacgatgcacttttctccagcacatcagatttcaaattgaaaattaaagacatgctatggtaatgcacttgctagtactacacactttgtacaacaaaaaacagaggcaagaaacaacggaaagagaaaagccttcctttgttggcccttaaactgagtcaagatctgaaatgtagagatgatctctgacgatacctgtatgttcttattgtgtaaataaaattgctggtatgaaatgacactaaagtttgtcaaaaaatgaattcttaacttttctcccagagaaagggagacaaaaggagctttttaatacctaatctactttggaacataaccgtatagagtacgaaaaattttacgacttttttcctaccagattctgacagttcaccaaggtattataacatctccatttttgcgtatgaagacagtgacttgctccaagtaatccaggtagtaaatggctagaatttgaacactaaagccatgctctgctgcctgtaaggttttcaaaagaaatctgattaatcatttcgtatgtgattcacttgatcctcaaggcaacagggatgccattgccttgatttttcagatatggaaatagttctggagaattaatttgcctcatgtttgaagagctgaactcagtcttgattccaaatcctttaagtttgacctgaaaactttccttacctggatactttttgatattctcatatgattgcatatttggtataattggctttatttttggggggttaactttttaatttacctcaagttgcaatctgcttggggggaaaagctgaaacttaaaaccaatttaagtttctaaatttataaaacattgctaccttaggaatccactgacaacaaggcttaatgtgaacagaattatactggaacacaggcaaggaaccagaaaactgaattagaaactttctgaaaagtcacgtactgatttttgtactattatttgtaaagaaactacttactgtaatttctcaaagcaaccatggcctcatctaactttttctcctttttaagaactacatttgctctctgaactacaaaaaaatcaaatttctattcaaagtttctaatactagttttcccatttctaatgtggacactagaggccctgatgattttataaacaactatataacattagtgacatcggtgctccatacctgatagaaaagcagctacaattccttttttttttttttttttttgagacagagtttcactcactactcatgctgtctcccaggctggagtgcagtggcgtgatctcagctcactgcaacctccatctcctgggttcaagtgattctcgcagctcagcctcttgagtagctggggttacaggtgcctgcaaccacatctggctaatttttatattttcagtagagacggggtttcgccct

SEQ ID NO: 69073 - DNA, 1059 bp, Homo sapiens
atcactaccccataaatgcagcttaggtctgtaagtctgaaggagtatgtgtatctatctgggtgttgttttattttttttttttgagacggagtttcgctcttgttgccaaggctggagtgcaatggcacgatcttagctcaccacaacctccacctcccagggtcaagcaattctcctgcctcaccctcccgagtagctgggattacaggcatgcgccaccacgcccggccaattttgtatttttagtagagacggggtttctccatgttggtcaagctggtctccaactcccaacctcaggtgatccacctgcctcggcctcccaaagtgctgggattacaggcgtgtgccaccacgcccagccttgggtgtttttctttcagctcctccagtactttcatactattctaataaatatattttgttggtatgaagctatgaagcaaaagtagctattaccaatgcatacatacagtacactggttttaagttccacctcaaagtgaatcttagagcctggtgtaagtgctccactttagagatgtaccttaattactactgtatttgcaaattaagggaaatttaggtcatcatttgattttctgaaatctaaaaggaactgaccatcattaccaagtctttctagataatcaagggtagatggctgtttttaatgtaggaattaatgtaggcattcctgctttcaggtttaagtatgaatcaaagcatattttaatttgctagtgcaaatggacccagaattggaagggctatgtaactacacagtatgcacaccacagccatgtcagtgtcacagatcctcttgtgcattcagctttcttaaaaacacatcaaaggctgcaaagaagctcagaaaaaactaaattgaaggacaggtggaatacaatgactctatgtgaggaacttgccaactcacatctttcaaagccagatcagcttatatagtacatgcattatagtcatatgaaatgttgtcttggtgctttcttcttggaggactatggcagcagctttaagactactaacaaagattat

SEQ ID NO: 69074 - DNA, 1096 bp, Homo sapiens
ggatcacttgagcccaggagtttgagaccagcctgggcaacacaggagaccccgtctttacaaaaaaaatataaaaattagccaggcgtggtggcacaagcctgtggtcccggctgcttgggaggcagaggtggtagaattgcttgagcccaggaggttgaggttacagtgagccatgatcatgccactgcactccagcctgggcaacagcaagacccccatctcaaaaaaaaaaaaaagaaattgaaaacaaagatgccaaaatagtaacaccttaaatctgggtgatgtgtgcatgggacctactatgttcagtacatttctgtatgtttgtttcatatttaaaagtaagcaggataaccttaaagggtagaagagctggagataaaaattaggtatgttatataagtgtaactctttattttttgtctcaaaggtacctgaagctgttcactttcctgccccttccagagattgatcatatcatgcagctgcatgtcaaagagccagaaaggcggggtcctcagaaacgactggcagcagaagtaacaaagcttgttcatggacgagaaggattggattctgctaaaaggtagtagtttagtatgattaacacttgatagttagttattcagtggatagacatgagaaaagtaggagtatgttttaggattatcttgtcatttatcacaaggactgtcagtatttgacttagcaatttaaaatagcccctgtttattggaaagaaggattatcttgaattaagtttatgaattataccagatagatgtttaaaaaacttttagtctatgccgggcgcggtggctcacgcctgtaatcccagcactttgggaggccaaggtgggctgatcacgaggtcaggagttcgagaccagcctgaccaacatggtgaaacccccatctctactaaaaatacaaaacttagctgggcgtggtggcacacgtctgtaatcccagctactcaggaggctgaggcaggagaatcgcctgaacccgggaggcagaggttgctgtgagccgagatcatgccattgcaatccagccggggcaacagagcgagactccatctcaaaaa

SEQ ID NO: 69075 - DNA, 1479 bp, Homo sapiens
aacaagtaagtgcctttaaaccttggggaaatcctgggaccaaataatttacacactagtagcctgtgattcactcttaggattgtagttgctgcccttcgttccagctcttgttggttttatccccattaaggctctataatggcgttaataacactggctaataagaattaaagggctgaattaagggtattaagagtaaacggtgtattctaaaaattagctgggcgtggtgatgcacgcctgtaatcccagctattcgggaggctgaggcaggagaatctcttgaacccgggaggcgaaggtttcagtgagccgagatcgcgccactgcactccagcctggggcaacagagggagactccgtctcaaaaaaaaaaaaaaaaaaaagggaaacagaccactagtgaagatttggtcggtctgttttgcttcgcctaagtcgtcctctctaattagagaaactgcttttgtgtgtttataccagaacgtgactgggcctccttgagtagctagcctctgctttagctctgcaccctccatgaaactagtgttagtccttggttggtatctcaaaaagttttttcaactccaaataattgacaagtaatgcgggtctaatagcattttcttgagagaggtgaaggatagggctagctcatgtgcaacagagcaaagcacatgtttaaaaggcgtttagaagatttcctttagtgtctcttcctgacaccccttcacccagttttctccttcccactcagcctttcaaaatctctagtccattgttatgtagcacttccccttggcctgcctagaacctgcctggaaccactcatgaggttcagaatgaatagagtaagtactgtaacaatacataagaggaacaagaattcagatttaggaggtcaaggaagttttcctggagcaagtaaccagaaagaaatctggaaggtgaacagtagaacctaccaccacttgtgcttgaggcacataatgaaattgttctttatgcgtaggttgactggagaagatgtatttggaatcaccgttcctctaattacaagtacaactggagcaaagctgggaaagtctgctggcaacgctgtttggctaaacagagataagacatctccatttgaattgtatcaattctttgtcaggcaaccggacgattcagtggaaaggtgagttctgaataatgggctgagaaaaactgacaccataaactcatgatgtaattttagccattgaatctatgtacattttatagtttttttgtttttaacgtagtttctgtctgtacataaaccattacatcatagaagactaatttttactgtgttctaaagttaaacactttgttggttaaagcagaaaaacagtgggtggctagaaaatgtagagccaactttttgatctgtatctagcaagttcttaggattttatcacctgcatattctagttttttcactcctttcaa

SEQ ID NO: 69076 - DNA, 1033 bp, Homo sapiens
atggctagtaagttacgtatctaagctatacagttgttctggacacactctttagaaagtaaactaaaaagactcagcctctacttcttagcattgtactcctgactgttcatgaaaaccttagcttttctagccatactcattgcatttcccccaggcaacccgcagtttaagcacacccagttgcatctggtaaaccttgtaagagctaaagcctgtgtcctgtgatatcacacctgcaaggatatctatatgtatacgatcaatattcttgtcctgttttctcaggccacggagaattgtgtgtgcattcttcataacctctcctaccagctggaggcagagctcccagagaaatattcccagaatatctatattcaaaaccggaatatccagactgacaacaacaaaagtattggatgttttggcagtcgaagcaggaaagtaaaagaggtatattgggaagtttttgaaagaatgagaaagggagagaatgagagagagtgtgtgtttgtgtatatgtgtatgtctaagtacttggtatatatcggcactattttaagttattttaattcttacatcaaccttttgaagtgtgtattattaataccctcatttaccagtgaggaaacagagacacagtaagattaattttcctggaataattcagcaaataagtggaagagattgaatacaatgccaggcagtctggctccagattttcattgctacccatgaaccgtactgctttatgccttataggttaggaaataagcttaatgcagcatagctaattgtatataaattgtttttattaaagtcggccctgatatttggccttgggtattctaaaaacaaactttggacatactaaaagcaaacctcataggaaggaatacatatttatttccatactgatatgaaaactaagagaatgtaacctcccctccttctctgagtatcgtggtatttgtggaaaccagctggtaaatttagaaccctggtgctatcctggacactttcacaagactct

SEQ ID NO: 69077 - DNA, 1050 bp, Homo sapiens
atactgaaatttagaaaaccacaaagaatgtagtccaacacactgtctttacaagtgaggaaactgaggcccagagcaactttaagttacttaaagttaaaacatggggcaaattgggacttggcatccagtatattataatgtctaatgtgccatttgctcttgttctagttgcaaaaacatttgcctcatatccacactcaaaatggagtgaagattaagtaaataatgttttgatcatggtacttggagtgaagtagaagacttatgacacaattacgtgttgtttggaaatatttagaaagtatgttcatagttgatctattaagcagtcaatgatttgttgactgggcaagtctgccacacttttacaaatttgccagtttccaaacacctggaagaagcatcaagtaaaacttcaaaacaaagacctgttggatacacagcctagacttacttttttgttttttgttttttctgatagaaacatgagttctgctggcgctgatgggagaaaagcgatgagaagatgtgacggactcattgactcactggtccattatgtcagaggaaccattgcagattaccagccagatgacaaggtaattcaagagataaatatcctgttttgtcttactaagatgcttcagaatattcttaagatagccgcttggttttaggtttattcactgattcatttactgagcctaagatcttccattcatccttagaaatattaaaacctaggccaggcatggtggctcacgcctgtaatcccagcactttgggaggctgaggcaggcagatcacgaggtcaggagattgagaccatcctggataacatggtgaaaccccgtctctactaaaaatacaaaaaatatagccgggcgtggtggcgggcacctgtagttccagctactcaggaggctgaggcaggagaatggcatgaaccccagagcttgcagtgagcagagattgcgccactgcactccagcgtgggcgacagagcaagactctgtctcaaaaaaaaaaaaaagaaatattaaaacc

SEQ ID NO: 69078 - DNA, 1055 bp, Homo sapiens
cttggctcactgcaacctctgtctcccgagttcaagtgattctcctgcctcagcctcctgagtagctgggattacagatgcccgccactatgcccagctaatttttgtatgtttagtagagatgggtttcgccatgttggccaggctggtcttgaactcctgacctcaggtgatccacctgcctctgcctcccagagtgctgggataagaggcgtgcgccaccacacccagctgaaaaacttttgtagagaatgttttgataacctttgatcacttgccatatcccagggtggtgtgaaactagcatttaaaaacattaacgtacgtttaatacttgttcttggccttcattacttaaatttaaaagtttaatacatcattgttatacagtctgtaaatattaattagcctacttgtattctgagttattttaatatttgcttgattgcaggaaatcttcaccgaaccagcagtgttcctgagtatgtctacaacctacacttggttgaaaatgattttgttggaggccgttcccctgttcctaaaacctatgacatgctaaaggtaggatatcaaagaatgtaaccctagtgatcagattactaccatgaaaatattttcaaacttcctaagattatttttgagtgtttacttttcccaagtattatcatttcctaaatgagttttgagaaaattgatatttatgaggataccatggaaaactagggatgtgaaacattcttacatcctagtgcaaataaatatgactcaagtcaaccaagtcttattttcaaaaagcctttacccagaaaggggcaaacttctcgtcatctgattcagagaaacggacatgttgggtaatagtcccagagtaattagtcctcagcaaagttgaaatttgatttatgccccctttaaactttatttctctcatgtgcaggctggcacaactgccacttatgaaggtcgctggggaagaggaacagcacagtacagctcccagaagtccgtggaagaaaggtccttgaggcatcctctgaggagactggagattt

SEQ ID NO: 69079 - DNA, 1033 bp, Homo sapiens
ctgcagggcagcccctccctgcatcgagcggaaatccatcctgtccagcgcggggcgtgggcagagcggggcgcggccccggcaggcggtatccgctgggactccgacaacgtgcgcgaccccaggcgaaccgcgcccctctccccacctccccgcgggcgggtacaagtctccaggtgtccgcgcgctcagcgggtccggcccgcccccgcccccgcccccgggcccgactgcgcgtgcccggccggagccgcgccccctcctcagggaaggccgggcgtccggcccacgaggccgagctcccccccggcccgggcctctcaccggcgcggggggcgggccaggggcggggccggactcgagcggggcggggctcgcgccagcgcccccagctccgtggcggcttcgcccgcgagtccagaggcaggcgagcagctcggtcgcccccaccggccccatggcagcccccggcgccccagctgagtacggctacatccggaccgtcctgggccagcagatcctgggacaactggacagctccagcctggcgctgccctccgaggccaagctgaagctggcggggagcagcggccgcggcggccagacagtcaagagcctgcggatccaggagcaggtgcagcagaccctcgcccggaagggccgcagctccgtgggcaacggtgagtggagcccgccgctccccggcgccgccccctgccccacacccggtcacctcctcctatcccgccctcaccccgcgtgctgggagtgcgggaccccgtgttctgcccacctgttgctcgccgtcttcggtatgaccgacttgcttgtggaaagcactcttttccataacctattactcagctttgtcatataggtacctatgtatattaaatattgtacatatctatcaatgttaactaactcacttcaagatttcacccctttctttttctactccgccggtccgcgcccctcactggtgcggacttaatttgaaggttcagggagtctataaacaccttgagatgct

SEQ ID NO: 69080 - DNA, 1053 bp, Homo sapiens
cttgaagaaccagagacccgtcaatgccgaatgaacttcagtgagaggagtgtttgttcgtttgtttgtttgtttaggttaagagagaactctttcaaaatgtggatgctctcagaggatttagtaaaattgacactcctagtgcactctcatagccatattaccctgtaggatttggaagaaaatatatattttagaatttgggatgttttaggtgtgcctgtaaattaggttgttaatatttataaggcagccttctgtttttcctactaaatcataagcgtgaacatcttagtgggtggcattatacatcctttatgtttgtagtcccccaaatggctttcacacagtaggcacttaaatttgtggacttttataggctgtgtagacatcatcaaattcctgtattctgggattaggtgttgggggcaggagatgtggtaaataatttgaagaatgccgaagataaattatgtgttggaattttgtcttgagcatggttggccatgttttgtagaaaaactttctctcaggtaacctcagtcaggttgcctttggcaggcatatatcagattgagtcgggatttaaggttgcaaacctcagagttctcaattgagctctttttctgggttaaaaataattcagtatttctgaacttaagaaagtttcttaaatcaagctgactgcctttccagtctgtctctgcctgtttcctcaatgataagaggaggtagtggtgaatgagggctgggacgggaatatttacattactggaataaaatcatgtcaggattctactctgatgtgatgcttagctttgctttaaccatcatctcccattttattattgattccatgctgtacttatctgtttaagtcacttgtaacacatctccagatgattcagtcttcaagaggttgatgtgatctacgagtaattagcccctgacctattgacctgctaaatcgtgttatatatactctgcagcttactgacccaccctagaaatagtgggccgtttttaaagggagtagaacaagactagacattt

SEQ ID NO: 69081 - DNA, 1050 bp, Homo sapiens
gaaacgtcgccaccttctggtaagtgatggaaatgagcaggaaaaaagatccaagctaagaagcggcttttttttttttccaaagcagcaagccacgcccctcccgcgctcgcgaaatccgagacccgccctttccggaagttttgacactgtgcgccccgagtaatgtgatggagagggtaatcatccggtccgttatctaaacccgtcactccaggaaacagcgacccgctgttttccggatccgcgctctcccagcatcctttgccttccggtatgtggccccgtctggctagtcctgtctagcgcgcccatttcgagcccaagtttccagctcgggtttccgggctcagaattttccaggagtgggttcttgggcagtggctgtgggagcaggaatggcgcagctagagggttactgtttctcggccgccttgagctgtacctttttagtgtcctgcctcctcttctccgccttcagccgggcgctgcgagagccctacatggacgagatcttccacctgcctcaggcgcagcgctactgtgagggccatttctccctttcccaggtggggtgcccaacctgtccccaccccaggagaggcctgaaaggtcccagcgtccccagctccttctcccatctttagacttaactcgtccctttccaccccaccccagcctcagaacatgaaagaaactgggtatagtcttttgttcctgtctctgagatctgtgaaatatttattaaatgaatgaataaacagcagatctgatccccagggaggagtgatctgggagaatacttagtggggaactgagcgctcctcttggcagctgacaatatcgatcccactttgtttttccttgtctcaggattaaaggcattcgggtgctccttggaaatatcagaaaacttccctttagctcacctgttaagcacctcactgtgcattttaggggtgggatagggtggactggagggatcttcggctaccaaaaagtgacaatttataatcacaaattccttccctgggtatttttagtgaacta

SEQ ID NO: 69082 - DNA, 2706 bp, Homo sapiens
attgattaattttatttaaataaggtttgagtagttgagtagttttaaataaatctcttcattaggtaagcagaaatagcatttatcattaaaataattgtatctgtgttttttcttcctccaaggctgcctcaagtatccagagagtcttgtcaacattaacactagcagtatttccaacactttatttttttaacttcctttattatacagaagcaggatctatgttttttactctttttgcatatttgatgtgtctttatggaaatcataaaacttcagccttccttggattttgtggcttcatgtttcggcaaacaaatatcatctgggctgtcttctgtgcagggaatgtcattgcacaaaagttaactgaggcttggaaaactgagctacaaaagaaggaagacagacttccacctattaaaggaccatttgcagaattcagaaaaattcttcagtttcttttggcttattccatgtcctttaaaaacttgagtatgcttttctgtttgacttggccctacatccttctgggatttctgttttgtgcttttgtagtagttaatggtggaattgttattggcgatcggagtagtcatgaagcctgtcttcattttcctcaactattctactttttttcatttactctctttttttcttttcctcatctcctgtctcctagcaaaattaagacttttctttccttagtttggaaacatggaattctgtttttggtggttaccttagtctctgtgtttttagtttggaaattcacttatgctcataaatacttgctagcagacaatagacattatactttctatgtgtggaaaagagtttttcaaagatatgcaattctgaaatatttgttagttccagcctatatatttgctggttggagtatagctgactcattgaaatcaaagccaattttttggaatttaatgtttttcatatgcttgttcattgttatagttcctcagaaactgctggaatttcgttacttcattttaccttatgtcatttataggcttaacataactctgcctcccacatccagacttgtttgtgaactgagttgctatgcaattgttaatttcataactttttacatctttctgaacaagacttttcagtggccaaatagtcaggacattcaaaggtttatgtggtaatatcagtgatattttgaactgtaaaaatggacttaataattagaccatttctacaaagaacaactgaataggtggaaaacatggaatttcttttaggtgcagtggtggtcctcaaattacattagtttttttaatatatattttaaacatatgtaagaaattaagtggcaaagaactgggaaagcttaagacctgcttcaaaagcctgaataatgggaaaataaaattgttttcagatatctcatatcgctctcgtaatgttggcccctcacaaagcttgggaatgttttgtatgtataagtttattaaaactgggtatgcttcatattactagaactaatttattctcttcagagagaactattaggttagtgcaaaagtaattgtggtttttgccattgaaagtaatggcaaaaccacaattacttttgtaccaacctaataacaatgtgttagcaaatatttacaaatggtcaggtgatattcttgactgaaaagttccttaacatttcagtaaatataattttaattctaagtcaaaatagaaatgcatagatagtaaatgataaagtagagactcatatatgtctgtctaggcatcaaattgttggttattgtttacaatccagaaatgatgaagctctttcactaattcctaatatgaaatgtatgatggccaaagacaaattgtgttgattataatcctttaaaagggggatttcctttatgaaatacatattgtattagcttcccagggctgccataacaaatgaccacaaacttgggtgcttacaacaattttcctcacagtctggaggccagaagtctaaaatcaaagtgtcagcagagttggttccttctggaggctctaaggaagaatccattctatgtctgtttcctaatatcttgtggctgtctgcaattcttggagttctttggcttatgggcatatcttgtctaagtattgcagacagcaatcttcactccagtctctgcctctgcgttcacacggcctttccctctgtcttttcattaccttttaaggacagtgtctttgaatgtagggcccaccctgatctagggtgattgtgtctggagacccttaattatgtttacaaagacccatgttccaagtaagtttgtattcacatgttctgagtagacattgtctcttcatgggatacttttcagtccatgacagttactaaaggacattttaggataatcctcatatgattgttaggagactacctttaaaaattttttattatatatcaaattatagttgtatatacttatgaggtacgaagtggcattatgatttttgaatataatgtgggatgattaaataaagctaatctatccatcacctcaaatatttgacatattttgtgatgaaaacatttgaaatgtactctcaacagtattgaaatgtacatacagtgcttaattattagctgtattcaccatgttgtgtaatagatctaaaaaaagtcaaacatattccttctatctaattgaggctttg

SEQ ID NO: 69083 - DNA, 1903 bp, Homo sapiens
ggtgaattttccaaaatagataacagataaaatgattatgtaagaacttggcacaacagatcattttgcctttagtcgttcaagaaatgatactaaactcaaagtcattcacttgaaacaactgagaagaccattcttaggtgtttagatccttgcttttagaaacattcttagttatatttgtgttttcaaaagttattgagtagatagatattttttcatgaatttttaaacattagacttagctgaattgattaaaattaggtgattatgaaaaaaatattgccctgctcgagggcatctggagccctacagttaccattactaaagtctgtgagtatgtctattttgaaaagtgtcataaaaatatctagtccataaatcattataggttcagtaatacatcattttgaactgattctatcttctgtgaaattctagagatatgttatctttaggtagcatgagtaagattcaggtatgctgtgaattttgttaacgtttatgttttccattaatggatagtcaggaatcttttgaactgcgtctatgtatttaaatgatttggaaagatagcatctctcagtttaaacttagcatctcattttggcaagataaattattttagctgtctggccttttctttgtcttcttagagttatttctgaaatgtgcatagccagtcataaaataacttgtgtaaatagcctaatgtaatttatttctaataaatacgtagcttaatgaaatgtatttctagtttgaacttaattgccacttggcttgatattattttccttagaattgttggaagagaggagagaggaagggatctaccatttttatttataccacctaaatagtggactgttattttggactcacttttaaataaaatatttattcacatgaagaaataaattttgtgtttattaggttagcaagcgtttattatctttgaagtaattggaatttcattaaaaagtgaagcaagtaagaattgtgatataaatttgaaaatttttaaatggaaattgaaatatgacttaggaactgtgggcttgtagaaaaaaacatttaacatgggagttaagatttttatatttggttgtggctctgggatcaataaggcaagtggtttagtctttagtcctcatttcaaatgagaatagtatttgtcctaactctagtcagtgtctgattggtatgtgtataaccttattttaaaaaggattcattcctgccatatactcataatatttataagtatgtcatatgataaatattgagtaaatatatactgaatgaagtttttagtatagagtgaagtgaatagaaaaaacatcctacataaccgtggctaattttaggaagtaaatcatgtttcataataagagtcatcctaaacatttttctgtgtaattttctgacccagtgttaacaatttttatttgccttagtgcaagcttgttcaacccacaggccacatgcagcccaggatggctttgaatgcggccccaacacaaattttgtaagctttcttaaaacatgatgagatattttgtgattttattttattttattttatttattattttattttattttattttattttttagctcatcagctatcattagtgttcgtgtattttatgtgtggcccaagatggttcttccagtgtggcccagggaagccaaaagattggagacccctgctagcatttaatgcttatacatgtatttacttgtaaacatgttgtttctttgataggatatgatttcaacataattactgtttatttaaaataagaaaaacaaataactttcaaccattaaaaggttataacactttaaaggaaagtttcttattaaagaaactttataccctattaagggtataa

SEQ ID NO: 69084 - DNA, 2883 bp, Homo sapiens
aaaaatattaaatgtattggtttttcacagtgaaacttaattcagtttagttgaaccatatatgtgtgtgtatggcatatataagatgaaaaaaggagaaaaagtaacaataataatgatggttgccatcattcattgaacacctataatgttttaggcattatactagctgatttacaaatattgtctcatttgatgctacatttatatttctatgaggcagatgttgatttctctttgactgctgaagaaactgaaggtcggtcaggtcaggtgatttgcccaaagtccacactgtcactaaatgaacatagattggtatgactcccaagcctgtgagtttttgaccgtcatattctgcctcactatgaaaagttttttttcaattttttttaaatcaaaagaagtagtatatggagagagaggtgaaaatccatgtttgctctctgcagtttccaaaccattcatgacgtgttatttttgtactggatatagtcattttttaaaatgctacaaactgttcaaaagagcatgaacaacatgataactccttataattttgttgtaagataaatgactaaaattatgtgggatatttaatttggataagtggaaattctatcacttgataagctctcttgaagaataattatttgaaagattggacttaattctgtattgcctgaagtgtaaatcagaggtcaacaattagattgcaaatcatgaaaagcataacttctaattgtttagtctttttagggaaacaagcccagaaaaaaagtaagattctcattcattggagataagatttctatttatcaaagatactacacaagagttagatagcaagtagttcaaatgtcttttaaaggtatctgacatctttaaagctctgtaatttttaaattctaaattttgttacagctaatttttaaaaattaattgctaagtcatggtcaagtatttctgatgacttacatgctgtctttggtatattttaagtttctaaaccaaaactactatttgactctattacaccctgttttagaaaaacatttgagttatacaacttactaaaatgtattttagcggtgatgttttggagcactggtaatatagtgtttaacttattttctattttttatccctctatattcgtgaaattacttctatttgaaaagttttccgccagtgataaaaaaaggctgagcactatctgtaaaaatttttaaggtgtccactaggtggagatattgtgctacatttccaagtgttgtagttaaacttttattagtctgaattaaactcttttatagtgttttattgttttaaaccacaaagatttataatcatttatatctatttatctaatgttattcaaatgttttctgcgttgtatgaagctaagataaatgtaaaaaaaacaaacaaaaaaaacctcactttgtgttttgtaatcattagacgatttaacctaatatatcttcccatatgatatgatctttgcatatggcatacttcattcatatgacatagttagaatcttttcccacaaacaatgagtgatgatatctcatttgaaaactcgtgtaacattgtatcagccactgttataaagtgatttacccatgttagtctcataacaactctatgagatcagtaccgtacacatggggaaacttagtatagagaggtgaagtattttttccaagattacaaaataactgtctgagctgggattcgtaaccaggcagcctgactccaaaatcaatattcttaactctattgttatgatggagaaaggcatgaagtctaccttcaaattcatggcattttagaaggaaaaattgtcgcaagtaatgtgattatacttcctagttttataggtcagaaaaatgaggtccacactaattttgcctcttccacagggagatagattctcatctaccattgtgtcttttgtttctgtttttgtcatgatacctcaaattgatatatgttgtaattatgaatttaaggaagtaaaaaaataactcagggctggagccttcagccatattaacatacattgacataaagacctttgttttaatatgaatgattccagttaacaaatggagaaatagttgtttgaaaattaatatttagcttctcaaaagagactcctgtttggaagcaaattgttggtttaacaggacatactttagatatttgaaaaattctctgtggaatcacaatctcttatttttaagaatgtaggaatatgtgttctatatgcttttaagttatgtattacatactattctctaaaatagaaatgtttatttggcttctaaaagtcatttgtgagttgatgttatttaaaactgcttttcagtcaacttattctttataaaaaagtttgttcaaatagcatgtttttattttgtttctaaataaattcatgtttgataatattttataatgtgttgtgtctattttttttttttttttattgatcattcttgggtgtttctcgcagagggggatttggcagggtcataggacaatagtggagggaaggtcagcagataaacaagtgaacacaggtctctggttttcctaggcagaggaccctggggccttccgcagtgtttgtgtccttgggtacttgagattagggagtggtgatgagtcttaaggagcatgctgccttcaagcatctgtttaacaaagcacatcttgcaccgcccttaatccatttaaccctgagtggacacagcacatgtttcagagagcaccgggttgggggtaaggtcatagatcaacagcatcccaaggcagaagaatttttcttagtacagaacaaaatggagtcccctatgtctacttctttctacacag

SEQ ID NO: 69085 - DNA, 1136 bp, Homo sapiens
gttatttttttgaactgtccagagaaaacaaaagttgtacaattccttgtataaataatagattgctcaaacctagtgggagtaaatggccaggaatgaagcaatttctctttacaaatgttatcatttatatggctgagaatgataatcagaaacttatgtgaagttaatgctacatgtaagattagaaaatacgtaaatcttgtgtattcattgcaaaaatgtagtaaaccaagattggagggattaagtgatgtatccaagactatataactagagaagagctcattaccatcttggaaatatttgttataacttacattttgttagttgctattaggtgctatgcaataggaaatcccagagacatgcttcataaaggaaaacacatagtaatagttgtacatacaaactggttatcagggatatttacacttacggtaatgagcaacaagaaaggtatatattgagaaggggtgatagattcaagtcattaaacctgctgcagaagtcagtcttcaagtggtgccctcaagaaccccagagactttgggcactgtcctatctttgtaatctcatttccttcctctccaatgaaagcctctaattatcatttgaactccaggatgaactcttggtgttattttcaagtatctccatcatctgaatttgcccagttatgtaataccaattcctattgcttctcaaattaatattaaaactaaccaggcctgcctcattccttttccgcaaccactccgagtttacctggagtctgtctatagtgttcatactctgttctctcatcaagccctcttctctggtctttacctgaggatatcctttgcactttccaactcaagccccagctcctctgaaccttgttctttaaaacttcaatgctaacaataatcagtactttctatgagctcatctttgtattgcatttcagcatattaattgcctcagattatttctaaactattttattttatctggggcatcttgtctctccatccttatggaatagtatttaatggcacctggtaaatttttaaagctccccagtttattgtaatgtgtagctagagtgtgaaattgctgcaactaaagactattggatgactcaattacta

SEQ ID NO: 69086 - DNA, 1052 bp, Homo sapiens
caaagtatggatgtcttctctaaatctttctttctttttttttttaacagaaacagctaatttccaatgtattgttgggaaaaagcacaaactgtgtttttaactcaaatattgtcttcgactgctatgtgtataggaaagcagtctctgtatcaatgtttacatgttactactttttaaatttcaatacttttataactgttcttaaaaataagagttttaaatactgaatcctttgtcttctaaattgcaatagctataatcacaagagcaatatctctttgaatgactgtctggacaaacacaattgcaaataagggaagggaaaaatgcttttctatttttcagtaactggattgtcttaagaaactacatctgcttaataaacaatttctcagcaatgtttgctgggtatgggagtttaagcccggcagatgtgtctcctggttgaacatgcatttttcatggagtttgggttctaaatttagactgcagttggtttgtattttgtaacactaagtagaaattataaaaagtcaaacattgtgatctataaatgcacagaaaatactttgtaaaaagtagcatccttatataataatgctatttagaaagactgaaaccaagactatttaactgtgaactatgtagcagatgttttaaactttttattccattatatcttgtctagatattttaattcaaagggatactggctctcttgatcggaatttcttgttatcaccattccacgttgccacacaaggtgcacaggctggaagtcttttgtgaaattcccagttaaatatatacaactatgtgacttagtgcacaacacatttgtgaaataacctactcctatatactgacctgcctgtccacgaataattgtaaagggtttttgcatgtacagtttttacaagaattacagttttgtgaagttgtgtctaaattaaagcatttctttagaacaaatggccttaaattctcacggaattcctggaaatgattgtgaattgccttcaaataatagaaaagtgtatttatttgtg

SEQ ID NO: 69087 - DNA, 1056 bp, Homo sapiens
aagctcttctttagctaaatacacacagaaacagacaaacacactgtactttatcttaataaactaacttcccatcatacatttccatggttcttgcttttactttcacttgtcatttacctggaatactcttcctcctcatctgtgctgatcgaaatcctatactttcaaatttctccacgtatagcctgtcacacagccctctccaaagacctcactcgccgcacctggatgaattttcactttgtccccatattactttatatcttcctaaaaataccggtcattgtttgtctcatagttatttacagataagaaaactgaagccagccccagatcaaaagttaaacaacttttggaaagttatttaggtcataagttggtagatccagatttccaagagtgttctggttctaaaacctgtgttactcctattataacacactgtcctaaaagacaaaattataaagaaaattattaagatctattaccctttttgtattactgaagtggctaatcaattcaagtcagatccatttgagttcaagtagtgattctgacatactcagagctgatcctggataagttaattaaactttctaagtttcagtttcctcttacgtgcattaaaagtatataagatatttgtgaatattaaatgacatattgtgctaaatcgcctagcagaagacctcccaactaccagttgctcaataaatgcgttattatcagtacagtacattggtacagtccagtaggaaggcattttttttgtcattatttcatagtagctgtgccctaacataagaaaataagttacttaagttttagaataataaccatcctgcttactgtttatactatagtgatatgaaattaaatattgaggcaatgagacttaatcacaaataaagcttactaccttgtcataagtcaatatacgtaaaggctttctatttgtttgtttatgctgtggattggccattgtgtataaggcagtgccattccgcctggctgcatgtagctgctggccagcttatcatttcctgaaaaatt

SEQ ID NO: 69088 - DNA, 1111 bp, Homo sapiens
agaactggtagaatggagagatgatagacccagagacagtttcacagggtctacaaagagatagacccagagactggctctgctcacctttcaaagagtcacaaaagatcttggttcactttctttgtctgtaaaatgcacacttaatcaagttttgtatgagaaatgaatgaagacatgaagggatcaacatgctttctgtcttttcatagcacattttgctacttcatacatcttgatttccttgttgtccacattgttttagtatttggctaaaatgtactgaataaatgatcatattttctcttaaagcaatggtcgaattggatggagatgatgtaagagtctcctctagaggaaaatatgctgaaagagacattgtgcaggtaagaaataaaccttttcctactttactattgctagaaaatatcattgggatctttaacaaaattagaagctagaaatataacagactttttaatgatgcttttctatttgttagtctcaacaaaaactaaatatattttaatctggtagatactcagagtgaataaatttagtaaaaatataccaaaaactttgtatgtattttcatgcttccctcatacattatggttagaaaaaatagagaaatagatcctaaaatatgtcatatattaaaaaattacatctacatatagaaaaggctagaattaagaaaaatacttaagtaaagcgtattactctggaagtgaatataaacaaccagtaattaaatgtagttcaaattataattgaaagcaaggcgttaattcaacttaatagttgcataaaatttccatatttttaggatgtcagaaaaaaagctgtgaagtatatctttttggataggaaaaggaagaaggtctcagtaccatttaagcacatggtatcaaaattttaagggagcaaacaatgaactttaatattatttcctaaatagtaacatatatattcacccataatacagtcattaatagaaaataatttgtgattgtaagaattaaagaaagaggagagaaacacaaagggtggctcgacagtcaacaggttttcaaacctgggagggacttttgactgaattagatcagaa

SEQ ID NO: 69089 - DNA, 1078 bp, Homo sapiens
ttggtaggctaaaataactcatgctttcttctttggctactatttgcttttgactttgaaggatgtatctttcatgggtatatctcaggtctctcagactcctatggaagtccacctttaggcatatgacctcagagatggtaaacctcaatcagttctttttctttgagagctcccacacctgattcataaatgcaaagccactgacccttcctggcatatatttctggtaacacatttctatacagagcagcaggcacagccgttttgctactgcccttatccaatagccacagctatttattttcttcgtttctttagttcccagcaaatttgttagggttttaaggtatgataattcatcattttctctctgtgaggtcctgaactaactggaaaaaaatatatgcaagaatcattcggatcactctatcagctttattactagcaatgcagaatttgagaacttgggttaacctgtggacaatcacattcccattactttttccctccaaaattaaattatctcattcttatctccaggacttctccttatagaggcggagttttgcctattaagcatgccaccgagagaaattatacttatcctcaggatagtgctgctccaaatgagagtgattcaagctcagttatttctcctaatcttagtaatcctattcctctttccatgcagaaaggtaaatgaagattgtagatgaaaagggaagttgccttcccagaagttagagtgaaattttcctctggaaacatgggaacagggaattaggctcctgtaacacctggtttctgttttcaccatgatggaagttctaatgggatagaaaaacttctgggcccagtactagaaaagtagattattctgctaggcgacaacaggtgcttctctaaaatatttttccttttttcctttcaaaacacatctcttcatggcttaaaaaaaatttctatattaaactcatgtttaatatagaaaaatctctgactagtcaaattgttgctctcctatcagaggagcctctcatgacacttccaaatctactctagagtaagtgtatat

SEQ ID NO: 69090 - DNA, 1057 bp, Homo sapiens
gtactggaacatggtgaactcataacattgttgctagcatgactccacacatgaaagttgttttcttctagtttacctccaagaaagtggggaaaaaatgtatgttagaaagagtctctatcaaacgatcatgatactttgctgagaactgtacattaaaatatcaagtgaagaaacatttgctgggttatgttaggaactatctttgttcaactaaggaaaacattttcttaggaaaaggcatccatgaggaaaataacaagatcaatggtgatgccaactgtgtaaatcattcttatctaatatcacattccataatagtaataagtagcatagaagtagtaagagactgaattctattagatgactacttgaagctgtcaacgacatatagggcacattattttaatctctctgaaatgaatatagtagctaatttataaattcccagagctctacctgtatatggtacatagtactgagatcagaatataattgcttattactccaagtacatgttctgaagaaaatgttaaaatgttaaaaataaatctatacatacttatcattttttcgttagtacataaatgaattagacaacactttttaaatccctagaaagtttggcctatgtaaatcctatgacaccctgaattattttgagataattagaaattgcatatcctttcaaatatgtagccagaacttgaaaaaaattatgtattttggtcagtttatcaagtacaaaggcaatgtgaaaccccagttctctgaaggttctagtactttaccatcttccctaatgaatattaccggcaacttcagtgtgctctacttttcattatctgggacacggacaaaatgctaaaatatcccttgcacccagggctgaccccagtgcaacttccctgtggaactccaactcaggttgacagtgatacattgatgacttttctctgagtgtgacccttcggcttgaatttttcggacaaaatcatctgcaatctctactaaaatatgaattttattaatatatattaaccctgtacatacacaa

SEQ ID NO: 69091 - DNA, 1043 bp, Homo sapiens
tttcagcaaacttcgtaaaatattcagatcaaatttgggtttgttattgattttcaggaggattaatctctttatattaaaagctcatttggtcacacacaaaaaagaacatctgtttagtttttttctaggattatggcataatattaataatataatccatatcctttattgtgtgcctattatagccagaaagtttgcaaatatttaactggagaaacagattagttgaatgtgaattcaaattccaatgctgttgtttattactggcatagaaattattaagttttgtgagcatagatttccttctctgtaaaaagaggatgatagtatcttctctttaaaattattttgtggttaactggtacaagccatgtaacatcacattatatataatgtgtgatatgtataatgtgaatatcttatgatatatgtatatatatattatgtgtgtaaaataaaatgtatatgtaatatctcatgttgtttcctttcagttctcattttttttctatctgccaggtacctgccctccaagagttttgaaatttggctaaggtcaccaactgggttgctgggactcaaacccagttcattcagattcaaaatccacaccctttctaatctaccttactgccatgtatcacagtcatttctctccctaccacagcatgacgaagcaatgtgctgatggtgattgttcttttcaatccctcaaaggggcttttatctgaaaatgttctcccagaagtcttactatattctttttctaaaagtttgtactcacttaggttcatgctggttagtgttatgctccaaattagcctatattcttagcctataaacctgatttctactctgagaaaaaaataccatataactattaatataaagggaatctatactagtttttgttaaatataagcaagaaaggttgttgtttccgtaggaaaaaaaatgtgtgaatttgattcaatccctgcattgtatttaggtctttccaggccgaatatttggagaaagaaggaaatgtcacaatagtt

SEQ ID NO: 69092 - DNA, 1060 bp, Homo sapiens
gacggccatttggagcacgattttctaccctttttttctcccaaatttcttatcaaaattaaaacctaatgaacaaatagaactttaaatacagaatgtgacaaactggaatgcaaaccctcacatctgtctctctcagattttatcaatttgcgatcttactctctccacgagtcacacagcaatcatcagataaaacagatggaccaggctttctggaataagaaaacatgcttttgtattgcctctaccgaatttgtctcagctgaactctatatcttcgttgtagttacttggaggaagggcaaaatcaagattagaagcacaaacagcttgttttcttcatatcttaagagaaagggagtatgagagaaggtaataggagagacagtaagtgggcagtaacttccttattgaataagaaattcaataaggaataaatgtttgcgaaaaagtcagcccaatttcaaagaagtggttgctgataattgaggcattgtatagtagtggcaaagaatttgggttctggcattaattgtacagttcaaatcctagatctgcctcttgctagcataacctgttttcatttctgtaaaataggaatatgaataacaatgattatttcatagagtggctgtgagggttaactgaatttcatgtagttaaccctcaataaatgctagctattatttttctgaaaaatctcaaagttctaatacgtctaagctcatcgtattgttgtcatcatattgttgtagtaattgccctagttataagagatatgaagaaaaaagtatgtattcaaatttacaaagcccatgaaaatcactttcttgtagttcatttctatttgaggataaccccaggatacttctttcagtccagacagtcctgttcgctccaacccaaactcaactctaaatctaaaacttgtttgaaaaaaatttttaaagagctatctacctatcataagctaatcttaaaggctaaagtgggcttcttgatactacttattttggaggctagatcaatatcagtaagttcctttatcaacaggccc

SEQ ID NO: 69093 - DNA, 1029 bp, Homo sapiens
aaggaaattattggttgtggtttattatcaaagtatttttcgtcacgtttctctgtatagtgagaattgtttcagtattacagtattgagcatcatgaacagataaaatattaatgcacattatattttttcttttaatcttagtagaatctaggaatagttggtaatagtgtaaaatataataaaaatcagtgaaaaatacctttaatattctctttagagtaagtatctgtgatttaatgtatagtatttgaagtcagacaggttacaaaggttagaaagtataaaaatatccatgtattaaaagagatctataacaaaattggcctgagaatctatctacttatctacccagattcttcagatatattcttgagacaatgcatcttatagcttgggttggctattttatttttatctccatatactgccttatgtttatgacttttagcaaatcctcactgctggatcatctacttctctagatgctgaatggatgcaataatatgttttcttagtcttacagaaatgttatgttggaggctgaaatgcaatatgtgatcaacatactttctcctctacaacacatggatagcattgcatttacatgacatgcaaattcagtgttttgttcaaaataatcatcttgaacaagatttagaaaggaggactaatattttattcattgtttcatttatgtatgttctatcttattctgaaaaggatccaaggcagcttatagagatgcttgtaatatgagagtaaactaaattggctggggacattgaaacaaaggagtaatatagggtgagaaatctgaaaagtctgcagaggacagtatgtcatgaagacatgtcttgctagagactttagctgtaagctctctaaccactaatgcagaggagaaagctttctccctttcatgataaaaagggtcctttcagaacagaaaatataagtgggcagcacaaaaacacagattcctagtcctgagaccaaagagattgtcgtagacctgttgttcactgc

SEQ ID NO: 69094 - DNA, 1039 bp, Homo sapiens
ctgtctctactaaaaatacaaaaaattagctgggcgtggtggcaggtgccagtaatgccagctacttgggaggctgaggcaggagaattgcttgaacctgggaggcggaggttgcagtgagccaagatcgtgccattgcactctagcctgggcaaaaagagtgaaactccatcttaaaaaaaaaaaataaaaaaagatgttcactcattaaataaaatctaaatattaagaaaaatacaactaatccaaaaatgtcaactaatttgaaaaaactatttttaaaagttggtgaatctcatttcagaaaacttttcatttatatttacacacagaaacctagtttgccagctcgatccagatattttatgtatgtgtacgcacacataggctttgttgtattttgagtgtatacagatgcttttacgcctcactttttgtctccatttttaactgcaaagattctagctttattttaaatatttttttaatatgggactatttcaaaaattgcctaatacctagtgtatttgtggcttatttcgtaagaaagacaaaaacttaatttctactggaagtattaattaaaagccttcatacttatgatcttatactcatgttcttgctttgacatttatttagtagcgtgatatttatatatgattgggtaataattttcctttggaatagctatttttggtaaatggcctcacttaaagtatcttaataccagttattcaataaaaatatatttttataatactatttgtaacacacacattatatttatatagaaatatttctgaatgttaggcaaagctacattggactcctggcagaatttttatgagttacaccagcactggaattcttaccagtgaggttttcctatatatatgatatctaatacattagaaatgagaatgattaataggcaataaatgactgcctgcctcataaatatctcagtaagaaggacatgccttccctcagaggaaatgtttcaagtgtcaaaagtatttaattactgcagctggtgaca

SEQ ID NO: 69095 - DNA, 1097 bp, Homo sapiens
gagtggtgcttggaaggcagcagtatgtgagctgatgttgggtagagtgatgttagcctccagctttctacttagtggagatctgtaggcacatcacagtcatcagctcttgcttcttggacaagtgatccattgcactgactctgggaaaagcaataaaccctaaaagactgctaatctagctaattgtgtaaaatatttggaggatcattgtccacttagctgttagcaagtgagctgaaatgtggttactgcttttagagtgggcaggaggagagactgagaaaaataatgatatataatctcaagtgttgtaacgtagttagggaatggtgtaatgtattacaggcttagcaaaagtttagagccagaaagatctggatttaaacggcaactccatactttactctgagagttcagataagttagtttccttgtgcttctgtttatagaaattccttctgatacagttgtataaggattgtttgagataatattaataaagtgttttgaaagtttcaatagcttagcaaggaattcttgtttttatacagatattcaactgaaatatttggaaaacagtagatcacttcatgaagataaagttgtaaaaatatgcaaaaaaaaatcaaattatgttgaaaagagcaaaggagaaagtacaaatcaccccaactttcttacccagcaataggtcaggccaagcagatatctctttgtgcatttatttagaggcatataaggcatatttccattcatatttattttacaatgacttacgtaagatggaagtcgagtttttttccttggattttggcttcagatattaatacctgaacctagctgctgcttttcaggcctagtaccccctgcctggagagcatctctccaagggaatgatctcagctgtggtctcaatatacccctcttcctatctgtctgcctccatggagccttcactgctgttgttaaaacattgctgttgacagtgccactgggaagttgcagtaatgtcctattgctacaaggcctggcatgagaccttgctgtctgctgtccctgtaaccctgtatgtaactctgctcattgcctcctgg

SEQ ID NO: 69096 - DNA, 1021 bp, Homo sapiens
gcttgtcaggtatttatatcagtctgtagtggattcccaaatttcaaagctcttttaatgtaatggacaaaaataagatatgagaatattattgatgaattttcataaggtggaattgatcttaatctactaacagagaagggtagacagtttgtgttaaatgttggcatttacttgtattgaccaaagttttgcagctctactatattctgtgctcaggactaaaatgctgttaatttttttttttttttccagtgctgtgcatatattctgtgatgggaaacattgttgatgtcctaacagaaatatattttgatctattttcctatggagttgtttctattatgaccatttaattttgtttttatttaatagtagtatttccttcccttttatctaattttttatatgctgctaaatatattttaaatatactatgtttgcgaaccttggtagctatgatgagagctattatcatctgtggtgggaaaagctatgtaaataggtagattgtatagagagactatcttgtgttgtgcctgtatgaatttttaaaagttgttgactggattttgcaaaaggatgtataatatttctgtctgctcagaatattaatttgtaaattctgcaagtttaatttttatgtagatggtataacatttgaaaatattgtcttatgtgattttttcccctgaaaatatttgcttgtaaatgaaaacttagctagggcttaaataaacatgttgctatgaaattatttttactgtattgttctttttccaaattgcaagagaatggccagtgtttgtaaaactttgttttatttttgtgtgatggaagaaaagacatatttttggttatctggcaatccatatgccttcctttctttgcttactagacgtgaaatattcttgaggattttaaacagtaacctaatcttgatgaaccatggaaactcactacttaaagcaattaagttcaactgtgtaatttaggaatttgaacatggatgataaaacaa

SEQ ID NO: 69097 - DNA, 1035 bp, Homo sapiens
ataatttatcaatcattgacccttggggggaaaaatgtgtgtatatttactagtgttgagaatgttgtgaggaggtaggaatatgatcagagaagaatgttttgaagaggctgatctgagactgccattctaaattcagtggcaatttgaagcaagactcttgatatgaccatttcaaaaattttcataaatattttttcaataccacatgatacatacaccagacatcccagacttttatctgatcctttacacataccttgtctttgagcctgttgcagagggtcaaggatgaagttaggatccttgtggtatgttaattactattttcatttccttcccatagaagagaaattatttaaataatttttattgttaagagaacctaaagtagttcatattaatggtgttttcttttttttatgtgtttgttttagatcgtacttgtaaagtatggaatctggtgactgggcaggaaataatgtcactggggggtcatcccaacaatgtcgtgtctgtaaaatactgtaattataccagtttggtcttcactgtatcaacatcttatattaaggtgtgggatatcagagattcagcaaagtgcattcgaacactaacgtaagtaacttgaagacatatagcataaaggaggaatagctcttcttttttttttttttttacaaatataagaaaagagaggactataaatgcattttaatttttgtatacctgtccacttcccagaggatattaaagtgttcacaaagaaaagcacagataagaggggggaaaatttgacaaatgaaatataagagcctggtattaaacagaaagggataagccatatttgatcggtgactaagtatacatttcatattttctccctcccaaatataaggtattacattttcatactatttcttacttgatagagttcaatgttttatattacttgcttcaaataactaccattccttgggaaatggctgaaatcaccatggtaggcagtgaagaagtacttataacttttaatta

SEQ ID NO: 69098 - DNA, 1064 bp, Homo sapiens
ttaggtggcatatatattacactttctccagcatgttcctttacacaccagtttgacatagaattatgttttcctgttatttgtcatttctgctccttccttatttgtcagaattcagtacactcaaataattcccattgtggcttcgttaaaccttggagagatgaaattattaataagaaaatctagatgtattatagtctttgctctttgcagaatgcagctgttagcagatgcctgattagttgatatactccatcactattattatttcacactttgtccttttgcttaaaagagagcagtctggattttattactaattacttataaagacttcttaaagttaggggaaaaaaacaaaactagtctcatgatatagtctcatgatactgaagtgagtcttggtttgtttgttttttccccaccttaggggcataatcaacccatttcctgcttcaaaaggaatcagagcttttccacttcagtgtattcacatagctgaagggcatacaaaagctgtgctctgtgtggattctactgatgatctcctcttcactggatcaaaaggtgctagtagttatctaatgcagatatttaatagctttttttttaaaaaaaattacatttttaacatattctagaaaactgtcaaactatttaagaccagaaagaatcggataatctggttcaacccctgaatgtaaaatatataaaattattgcatagttgagcagcaagtaaaacctctgttgatgttttgtgaatacaatggtgacagaatacatctctctacagtatttgggcatgtactgcatgtagagtcctgaattttgaaatgcaggttatataaaaatctataaaaggctatttaaatatacaatatgggaaagagaataagatgcatagcaaccactatttctgcaacacttactacatatcaggggctatgctaggcagtatactaatatatctcacctaattctcacaacaatctcaatgagatacatgttgcatcctcattttgtaaacaaagaaactcaggattcaagtgaataaatact

SEQ ID NO: 69099 - DNA, 1029 bp, Homo sapiens
gttctacgtcgcaaaactgaagaggtacagtaagcaagctgaccatttggaagaaaccttctgactttgagataaatgatgtatttctatagactaagagaatgagtcaacctttgctgcaatttcaggttacggctcttcgtcggcaagtaagacccatgtcagataaagtggctgggaaagttactcggaagctgagttcatctgatgcacctgctcaggacacaggttccagtgcagctgctgtcgaaacagatgcatcaaggacaggagcccagcagaaaatgagaattcctgtggcgagagtccaggccttaccaacgccggcaacaaatggaaacaggtctacataattctgttcctgctgatgtaatcttcttggccgttaatactgaatgttgtacttaaatgaaaaaatggctcattatttggcagtgcacaatcaaataagtgcataagtaattgagcttgtctgttttatatgattataggaaaaaatatcagaggaaaggattgactggccgagtgtttatttccaagacagctcgcatgaagtggcagctccttgagcgcagggtcacagacatcatcatgcagaagatgaccatttccaacatggaggcagatatgaatagactcctcaaggtgtggaaaatagagagtagatacgctcccccttagctaactgttaattttactcttccaattttgttccctgggtaaatttaacacttaccaagttttttttggggggtgggggggtttgatggtactgtatataaataagtgaacataatttcttaaaatccaacctgctttctcaatagcaacgggaggaactcacaaaaagacgagagaaactttcaaaaagaagggagaagatagtcaaggagaatggagagggagataaaaatgtggctaatatcaatgaagagatggagtcactgactgctaatatcgattacatcaatgacagtatttctgattgtcaggccaacataatgcagatggaagaagcaaaggtttgta

SEQ ID NO: 69100 - DNA, 2501 bp, Homo sapiens
tgaatattctttatctttaaaaccctttacacatgatatttcttatatgtttcttaaaaaacaatcttactaatggaaagtactacttttctccccaccccccttttttttttgccactgttgctttatagatatgccctttcagtagttagtttataataattagtaaactctttaatcccagtgtgaaattttattttcaattaataaaattacagtttttcacagatatcataacaaccatattcatttgcctgcaataccatttcatgtataactttgaaatcagattttttttagatttattgatattcatatgtagtatattaaaacagaaagtatgtttttaaaagtagtatcctagaatgtagtattagtggtattttcatattatggtataaaggcattactttgtgaaattcttttaatgatgccattaaaaggtcttctgtaaaggcttgaaagagaatattattgaaagtggtcttttttgggggaagctgagtaaattgacccacttcagactaaaaaaaaggcatccaagcatgcctaatccttatcaacttttataaattgagactatacattttgctgctgcataatttcaactgatagtctatatactcttcttagatatattgctgcttgattttctacttactttttattcatacaaatgtattgcctttttactgtgtattgtcctttgatgatatcttttaaaatttattttaaagtcttcaagctcatgtatcatttttaccttcttatcactttcgctttttactgtctggtttgtccttcattggcttggccttccaatactgtgcctcgtgattttgaaggctacagaaacttgaggaaagcaatcgagaagaaagaaggttggaatatttcccaggttttttattaaaatgtcgtttaaatacttagttgccattcacaaggaaatgtgttatagtattatagattgtttcagactagataagctgggctgctcctaaaagtaatgctgattttataaaactaacaagaacactgtaataaatttttaagaaaatactttttaagaataaaatcttcactagatacttgaattaaaattcaggcagtttcatgtgattacagaataaactatgataattatgatgatgacttaccttttgtaggataaaaataaccctaaaacccctgccatttgatttattaaaaaaagaaaaaacaacagtaattctttgtcttacagaaacttgtgagcagagtggaaattgacattttgttgtagcacatgctgaatcatgggtgggcctctgtctctctcttctttatttggtataatctttactggaaaaaaaaatcattaaaatgacaacaaacaaaaggaaactgtggccttattacaaataagatttataagacattcttaaggttgaaatagaaaaacaatttttgcttttaaaatgtatttgaagtggacatcaaaaacaggatagttgcttttttttcatttgaaacgagcaaaatttagaataatattcttgattgcattttactgattcagaattatgattatttaaccaaagataagtggtattttccttcttatcagaagttttcttcatagattttcctaaacaaatctctagattacatagtcaaaatgattaagaaaatatactagtttcaaggtaatatttaactattttggaagccctactttagacattcatcttttacttaagaacttgagaacttatactatgcaattagttaaatgaatatcttactttaaatatcttaaagcttaaaatgtttttctttaaattaccttataatttttattttataattatatttagtatgttatatagtattctaaagtttttatacttacatgccataagcccataggttctttaaagtacttaggctataattttaattttttattggtcatactataactcacctaagcaatacatatttaggacaacatgtttattattggaattaagttaaggcattaaaattgtgaaatttcttctattctgaaaggtaaaaataagatgcgtcattaaagttgtgtgtggaagcatttaatcaccataaaatattcaagtcctttaaatgttctcagtgaaaggagtttactcccatctttacatgatccctgaaggacagcaaaagcagagtggttgggtggttacagaacaacttctcaaacatagtcgtgtgtacagatctcctagggattttgataaaatgcagattctgattcagtaggactgaggtggagcctgagattctgcataagtaataagctcccaggtggtgcagatgcttccagtctgtgagctgaactttgagatgttctgggagtcaggataactggttttagttctcttgaggggattcacttctccaggccacagttccctttttgtttgtcaaatgaaggggttaattgctaatgttccttccagctcccaagcttctgattc

SEQ ID NO: 69101 - DNA, 1119 bp, Homo sapiens
ataattattcaatcaggaaatatgaaaaaattgttaaatgttaatgtgtgtgagcattcttttatgattatttttattattttgtgagaattttatttagtttaaaaatccttatcttgtagccatgttgaaatgcattttggaaaactttttagcatgaagactaactcatttaaaatgttcctgccttattgctagagcagtcagattcatagagacagaaagtagaatgatggatgccagagctgaggtagaggggctgaggggaagttaatatttcatgggtatagagtctcagtatgggaagataaaaaatttctggagatggatggtggtgacggttgcagaacaatatagatttgcttagtgctacagagctgtacacttaagaaatggtagtgtggtacactttatgttatgtatttttatccacagagaaaaatgctccctatttaaatatatttttatttgctagggcaaaattattagaaagtgaagcagtgaatgagaaccttcgaaaaaacttgacaagagccacagcaagagcgccatatttcagcggatcatcaactttttctcctaccatactatcctcagacaaagaaaccattgaaattatagacctagcaaaaaaagatttagagaagttgaaaagaaaagaaaagaggaagaaaaaaaggtgggattataaaatcaccactaaatgaatctctatttccttttcagggtattttaatttgcaattataaagagcatacatagtctcatgagtaccttagtatatgaaataaatcactatgttagctgaaactacaactatctagtttttaatggtttatctctacttatatgtaagaaaaatagatttaattgtaataacatggtaatgaattttatttagaacatgacaatataaaattactattataaattattttattatttcttcaaatagctgcttttgcattccattcattttgcttttcagcaaagcttgctgtaccattacaactcagtgttttcattttttccccatttcctaatgcaattaaatagtctcatggatattttcatccctgtctagattagtttaactaaaggctaaactaatccatcaga

SEQ ID NO: 69102 - DNA, 1059 bp, Homo sapiens
tggaatctcagtgttttcttctatttaaaaaataatacactattatactgagaagtccatctcaaaaagtgcctgtaactgaactaataatgtgaaattccacatcttttatatcccttaacatggtgggttttagccattacctcagactttggattgtatagtatcttgtttattgttcaagtaaagtccttgtttcttcccctttttcagatgatgcagtgtttgaagttgggtgctttatcccggacaactgccagtacccagatgaatgttcagagctctcgttcacatgccatttttaccattcatgtgtgtcaaaccagagtgtgtccccaaatagatgctgtgagttattaattctaatttcttaaactttcaatttttatctccctaaaaccacatgaattctctgagaatatatttgagccaaattcagttcatttagtcattcctttttctaatttccttttctgatcctagttaagttgaagctggtcagccatgtaagattttgaaataaaaaattgtataaatgtctgaaaaaccaaaaagcatgctgtggccatatgttgttggatgtcatcacctgagaccttttgcttttgaggattatatgctgtaggtttcccttcattagcataagcaaagcctcagttgataatagttgagttctgaccatccaggctttttctgactttaaatttctaattgccagcagacatttttgaatttatttggctttatgcctgtttctttggttgtgcctatatgtgtacatgggataagcgcaaggtaggttaggaggatatttaatgttacattaataaagtattttcaattatttttcttaatttcaggacaatgcaactgataataaaattatttctgaatcagcacagatgaatgaatttgaaaccctgactgcaaagttccattttgttgatctcgcaggatctgaaagactgaagcgtactggagctacaggcgagagggcaaaagaaggcatttctatcaactgtggacttgtaagattaaggctttgtgctgagaatatat

SEQ ID NO: 69103 - DNA, 1035 bp, Homo sapiens
tctgggttttttcagccactattgatacaggaacactaatattgttactgaccttgcaaacatgctaagtgttaatttttcaacacgttaagaaaggtttcagggcaacaggaaatatgtttttagctcaagtagtaaaaattctttaaatattctgaagcttaagatttgtccacatttggcacatgtttctagggtttgcttgtatttgtaaatatttgactatctcttgcaaaggattagtagatcattttagctagtcctcaacccattagtcatgattaagtcacttactgtttttacttttgtaaataaatctggcatttacttataattgttataataatagcctcattcattttaatgtgttattttgaaaaaatatgtcattttgaaatactttaaaaatctgtatgaaggaatcattatgtaatgtgttgttatgacaactacccagacaatttctgctaaaattagatttctaatatttttttgatagctctataatgaagaggtccttgacttatttgataccactcgtgatattgatgcaaaaagtaaaaaatcaaatataagaattcatgaagattcaactggaggaatttatactgtgggcgttacaacacgtactgtgaatacagaatcagaggtaatatttatattatagttaaaacagagcatagttggctttatttaaatagtgagctttgctgataatctgcttaagatcaagatatgaaatttatatcctgaagcatgacatggaattaagatcttgtgttctttcctcacatttaaaaaatcagaatattagtataaaaatatcaggattattataaagtcagcatatttgtcatagcatcaaaagaatctaaggcaatttatgaacagttttcattcacagctagagaaagagggttagacaattgatggtgaagaatgagaccacaatccttttgtactttttgctttaacctatgtagaactgtatcatggctcctagagggagattgttgagaaaaattacaaaaaata

SEQ ID NO: 69104 - DNA, 1046 bp, Homo sapiens
cctttataatctacttacagacattaggcctttgccggaaggggaaagctagtggcttagacaactcattatggttcaaaaatctctaatgacatttttattcaattcctaatactcaaattgttctttcagaatgtacaaatgtagttcctaactctattagtattcacgctaatggatcacatttatctatttcctttgaccttcaattcaagaagaggattaagtgcattttgcacatttgtcaaagatactttgtcctctaatgtttctctagtacattcatgcattaaaatgtctagaagagcaagccagctttcctagatgcctgctcttgcccacttgctaaggatcttttcacttccctctgattttgtcctaaaagtaatagaccaaattaaactggtcagaattgtatgagaaatgctgtttgtattctccatttctgatacttcatgcagtaatgtaacgctccatggatgacattcggctagctttctaaaaggcaaacaatctgtaaaaaaaaggttgaagcaaatgtatgcaagtttattagaaaggtaatttcattgacaggtaagttcactccacatgctgttttgtgtgcatttaggaaaatatggcttgttaattgtttttttgggaggggggtttgttaattgttcatttggattttaaatacaaaaaatctatttgtatcctgagtcttatggagactcttcagtttgccttagtaagcatgacagtaagatatcagagttgtttcgtatagcaaattcaaatacactataaaaataattttaaaaatctaagtctgctgaaactattgaaaatgccccattggagtagattatttttttctaaattaaattcatgttgaccggagaaattaagacacatatgcaacattgccctttcaaacatgactcatgtttttattttattggcaaccagattacctgtaattgttcttagaatcatcacaatataaaattttcataattttagagctgatgcttaagagaaccttaggatcatcttatttc

SEQ ID NO: 69105 - DNA, 1037 bp, Homo sapiens
tcagcgttccaagttaaaagcccgcctacttctatttatatttccttgttcttcatcaataaaattggatggtttattgtgagggttaaatgacattacatgaaattacatgaaaacccagttgtgattttcatgttatttcatgtcatgttattaacctcagtgccaggcacattgtaaatgtccaacctgtattagttccctttctcctcactccactgcaagcacagaaatagttaaaaatttattctttttctcttaatacttttgggaaagcattaaaaaattgcctcagttagtttaatactgactatcttaggctgggtttcctagacaactgtgcctagaagcttgtgctctaccaagtggggaaataacagtgtaacagaagtgagggaaaaatgaagcaaggcagagaagacggaatggcaaatacaaggtgacacataatggagttgcgaacacagccaagtcaccaggggtgtctctggacaacccatatggaaacactcatttgggattagtccattggagggaggaaagggaaataatttatctgtgcctttttcttatctcttgccttctattggttagcatttgcctcctgccctgctgggttctgctactcattccagaagctactgggaagccagatcctgcaaccccatggagcagccttcatttgtgtctagaaatggtgggaagtgcaagggcttttgtgagtctagtcagaccaagtctggtgccatactgctgcaggtcttgcacagtgccaggagctcagccctccctccaggcgaggctgagacagctgacaaggttaggaggtgatgcaggtagggctgaaggatcttcagaagaccaaaaactgggttccctacacagcaatttccttagaatgctatttatttcagaaacattttcttttaaaatgtggatccttgttttatgtaaacatctagtatggctcatttatagtatatattttcccacaatctgaattttattttattgtctttattttattttattacctt

SEQ ID NO: 69106 - DNA, 1072 bp, Homo sapiens
acataagtcttgactcctagactcatgctctttccatatcaaaccatattaagttatctaaaattgaagcactgaaaaagtgtgtgtacatttttaaatatgtaggtgtatatgtatcacactcacatgtatatacaaatgtatcatcagaaatgattaaactttttctaattaaaaacttagtatgctgattagattttggcatttttagacagtaaacatgctttgtcttacaaactgtagactgtgagttccataagggcatgtactgtgtattgcatatcttggtattctcattgcctagcctagtgttttgcatagagcccccaggtgttcaagggtttgatgaatgaacaaatgggtaaatgaatgactgttaggtttttttttgtcaaggggtgtttgaaggtttttgatgtgtatttttgtctcaaagtgggaaaggttcattactgagctcttgacttttaagtggggatgacacacattcttgaattatgagtacatgtagtgccagttctcacaagcagatgccaaacactgcttcatgaaccagcacaacaatcatatgatggtagtagtttcttctcttgcaatgtgttatgacatattttacagtttttagttatatacaggtaatttttttttaactaaatataatgcaagggtgtccagtcttttggcttccctgggtcacattggaagaagaagaattgtcttgggccacacataaaatacgctaacactaatgatagttgatgagctaaaaccaaaattgccaaaaaaactaataatgttttaagaaagtttatgaatttgtgttgggccacatgcaaagtcatcctgggccgcatgcagcctacaggctgcaggttggacaagtttgatataatgtatgttactgggtaaaattaaattctaagtagaggagaaaggggctcctcttattttattatttaaaaattatttatttatttgtataggtatgtataatacaggtgtcttgctatgttacctgcctaggctggtctcatactcctgtcctcaagcaatcctccctcctcggcctcct

SEQ ID NO: 69107 - DNA, 1536 bp, Homo sapiens
tattttggagagtgggttgatttgagattacgaatgagtcttttgatagtgctgagggcccatttaagtttgtggtcatacacgtaaagtggagattgtggcagtaggagagaaaagggaggcaggaagcttgacatctttgagaaagaacaaaagatgaattaacatggtgaagccaagaaaggaagaaaacagtccttcccttgaaaagcttaaagtatacctgccaagttagatgatacacagggaaaaggatacataagtaagcaaatgataaatgccaaatgacctagaacacaggctttgttccttcacaggagggagtgaacattttgggtgacatggatggctttagtgggaggtaagcattgattggacattaaagtatgtgcagatgccaaaagaatagagaatcatttgccaactccctggttccagtactgtgctttcttttatttggagcctttgaatttcctgtctgttgattctacttcttttggcattgggcagatagagacattgatgcatccctttctgtctgaagataatacaatgttatagttacccacaaaggaggtataatcacactgtaatgaccttgagatgttttcacttttacataatgtatcaaatatgttgcttgaaaatttgttaaaacttgaaagtattattttgtgtttgtttggcttttttttttggaggaagtggggtgctgttagagaatagaataattttttttgtttgtttgttttcaggctctgttctgttacttcaaattttagttgaaatttacagatgtgttttgaatgttctaagctttctttgacttgaacatgaagggtgggaagaaaggaaatctgcaaagacacgctttacatataagctaaaggggaaattttcttctacacaaaataaaatgttagtcacacatataatgatgggtttgtaactgtcttgttactattttgtccactactgagtgactttattatttttcttattgcatatttttttttcttacggcctagttaagaatgatcaacttcgtgtttttagtcatttcagtgaacaggcagtcttctgtttcaaacagagaaatgtctgttggtaagaaacttgcaacaataatgtagggctttttttagtggtttgttttggaactttatatacgctttttaaaagcagctgcaaggaaaagtgtgtgtaggtttttgtttcttaaatgttaatgtaagggatatttaaagaactatatgaagctttttaacagtgctttatttgacttttactagttaaatatttcctgcactgtagttttactgtaagatggcaacaattttacataaacaaaatttttcttacaaatactttttttaatgttgcaattattttggcaaagatacatttttgaaaaataaattgcatttatttttctagttaatctcttactttaaaaatagcatttaatattaaatttaaaaaataaattctctcttttgtttttttgatggagttttgctcttgtcgtccaggctg

SEQ ID NO: 69108 - DNA, 1075 bp, Homo sapiens
gccagagacataaaggaaataaatatgacagtatttatgatagattagatgaaaggaataaagaaaagaggagagaaattggttttggggtttcttctatagcataagggaaattttcaaatgaatgtaagtaagagtataaactgttttgttagagaacaatatgagtttggtctctattttgcttttaaagtaccagtgggagctcagcttcatttattctataggacatagaaagtcgagtgaagaatagagtcaaagattgagtcctagctccattaaatatatttattaaagattttagagtgggtgatttctctgaaagaattagtataacaatagaagaacataaagctggcattttaaacataattatcagatgaacagttttgaataaaatatagctgtgtgagatcaaaaaatatatgtgagaagatgcaagctgaaagccagtcttgcctcctataactgactcaaaaatctcaaaagattttgtgagttttgaatttgttttttgttagtttgcttgaccttaaaatgttgacttctacaaagtgaataaagtagattaaaggctgatcatcagactcccttgataatgcaaattacatagaacacaactctagtaaacatcaatttcaatatgttattgacaatgtgacttctcttaccttaagcattttctttcatatggtattatcaccattccagtaacaatgtttcaggtaaaacatgatttaaaacaacttgtattttagaatcacaacactcctttactcgttgtgtgaaacacgtaaatcaggtaataaaaaaccaaatagatgaataaagaagggaaactcttcttatgctagaaattcattttgagagatgtcattcattaatgctgaggtaaatattataaaaatgaaagacactttttcttaacattagtaaataaaatatagatggaaattatatgtgtaacatagttacaaatttcttaccaattaatttctttatactgaccatcttcacttgtagattaaatttgtcaattttatgctaaattttcagctaacagtaaagaaaaata

SEQ ID NO: 69109 - DNA, 1031 bp, Homo sapiens
gtgcatttctaatcaatctaaattgtttctttatcattgtttatatcatgtgcttttaaatgccaaaatataattctttatctttgtgctatattttcagattgatagtatccctgcattaaaatgttgtatctcataaccttgtctctgggaactattacttgcaaaaaccctgactggtaaggtttgtgaaaattgactgtctaagaaagtgaactgatcctgttctctcttagttcctagctgaatcaggacaatgggaagcattttcaagtaaaaacaaaatatctgatatgtcatgtcctactggcatagcctcaatcttgaacctcatgccccacaacaccccaccgtgactgccaacacctgctttattgaggaggaaatgcagggggtgaaattaacatgctgcctagttctgtgcaaacacatttatacctcaccaaccacaatcccatccaaccacacacatacacgtataattagaattccttctgctcattagctaccactattgtttccaaattgctgaagactcattactgattatgtaaaaacctagaacatatctacatctaacaaaggagataattgcatgcctaacaccttattttattaaaagcattgttttatggatattgcattcagaaagcatctacaggcaatggaagtgatgcacttcaaatctagggaaaatatagacctcactggagatggggaaaaaaaacgaagacaaaacttacctcaaggggtggttgtgaaggtttatgaaacatgttaagaatctgtcttgaaagatatattgcaagcaaaaatttttaaatattgccacatagttccatattaccatgatgtgaaattacaggttttatgtgtgtgcaatcaaaagcttactgctcagtttgaaaagttttgcaatcactactccaccagtgagggtcaaccttcaaggcacctacctcaattcagacatcatgctgtgaggccagtaataaggagagtaaaagtctctgcctcctatctatttattt

SEQ ID NO: 69110 - DNA, 1048 bp, Homo sapiens
tcatggtctttatgttacctaggcttggaagtgatgccacttgtttttatttttttaatcagtatcgttttcttccttagacataaaaacacatcaaggtagcttttgtagccttctcattctaactaatgtccgcagaggaccccagccagcaacatcttttgatgtagtgatgtgcagaaatagatcattgtctccaagcattatttaaatcattcaaaaatcttctatataaaactgcaatttaaactccagaaagttcacttggagtaacagaaagactaagttagaaacagacaaacctgagttctaatcatggttctgctacagccatagtcatggttctgctagaggcatagcctagagaagacttcatgagctcagatttctaacttgtaaaatgaactagctaaatagatgaactctaagatcctttctagctcaaaattgtatcaagtgaattcttggtgtctaaaagaaacttgcccttattaaaagtatcaattctacccaaattagctttcattcgttacatttaaactattcctttgtatatggtgttaaaataggaaattactaaatttgtttgcaaagatccaaatatcatttctctatgcagtttgactactttaatgtgaaaataacttgcagaactgcaaactgcagaggaagtcagagttcatagaaaatctcttgccttcttttaggaccttctgctcagagtgtgtttttagagttaggcacttcaccatctgaggcaagaaaagaaagagaaagcaacctaatcaaatagaaaactctgaaaagaactcttctttcataaattagacttcctgttctttacttgaggatctgcagtttggacagaagccttactgtttagtgtaaactccccaacccccttcagtgaatttgggtagaaaattaaacatattttccaggactgtcaccaaagtttctcccttatgtagcactgacatttcttcaaatctcctctaaatattatgagagaaagaagtggccttttgtttggaatgctagttgtgac

SEQ ID NO: 69111 - DNA, 1036 bp, Homo sapiens
ttgaacattgtggaactaaaacaaggaaatttctgcatattgccacaatttgaggccatatggatcataaacttttctatttatatttcactggtagacataaatgacatcccatcacaaaaaaagaagcaaggaatacacaactgaagtttagaaatggacgtcttgctactgaatgtcagataaaggtgaagcttttaaatagaaggccccttgatttagtacctttaatgtgcacaggaagggatctgcacagcacatcattagtgtgacggggtgaaaggggcaacacgtttcttctgttactgtggaaagaggatgaatctggcacagctctgatgtcagaacctccatcacctttctcacagatgatgtagattttaattgtactcggggctgactcgcgtcgcaccagctcctacgtgacattgagatggatgaagccatttgttggcattatcagaaccagctgtgtgcttggctgcagctacagtaggcattttatctcatgcataatcctctcattgagaggggatcacaaacatctgaaccatatggcaaataattttattatgatctaaaaaggactcttgaagctagttaaacagaagagtccttgaaattcaatcagaagaagttttattttcatgtcgcaccatcgtcctaaattaattgttagtactgccacaatcatcaagtagagcccagactcctccacccacccttgcttgcaaagtgaaaataaacttataattactttattttgcctggattttttttatacttctcaatgtgggagaatttattttgatccacattagagaagagaatctggatttcaaagactgaagctggcttctgattaaaaataataatttttaaaaaactcttcaaatataagaaccttatatcaaatggaataagcttgaatttttgtctaattgcagctctcttaaaagctacataagatggaggctatatatatattttttctttagggaagtaaagtcttaaagaaagaaaatctattctttca

SEQ ID NO: 69112 - DNA, 1046 bp, Homo sapiens
gatagtcccactctgttgagcatttccagtattttctactcttgactttatgcttcactttcaaccatttccccccaagcacacctaatagtgccagagaataaataggaaggtgcttcaaactcatgtacatgagagagtcatatagctgttcctcattgagctgtgaaaggatgagtatttggtgagatttaaaggaattatatacacgcacatacacacacacttcaaacagaagctgtcagccattattttccaaataactctcaatcaagacaaccctgagattgagcacagaagccccagtctagtcttccccgttttctcacctctaagttttttggggtgggggcttttggcatctttcttgcctgcagatttcagttggcattatctcactccatgcaaaacattatgatattatttgttctttaaaggaatgtttagatctgtatcgcttccattaaggtgctcctgtatacattagctcatctcctcccaagtgaagagcagtctggggagccaaggggatggtggtcagtggctgctctcaatgaaaatgtaaagctctggctgcacgtttcttatgggtgcctcctaggacaatggaagtatactgtttcatatttacataagtaagagagttacccaagatcgaaccaatcttgaaggtaactttccattttcactttaaataaatcacttttaaacttttcttgctaaaaagtactgcccagattgtactcatttcctgttatgaaaaactttttcataaagataattatttttatgtgtcaaactcaactattaagtgctcatataaaaacagtattgagtaatctaatgaccctatctttattatagcttattaaatgaattttattgggaagggaagataatgtttctaggtactataaacagcatctcattttacctgcactacttttttgtctgttttcagtttctcagaatggtatgataaaatcttacagtacaattgtgcatttgccaattcttccttgtagttctcttaatttctttcttta

SEQ ID NO: 69113 - DNA, 1452 bp, Homo sapiens
tcatattctcatatgctgggaaatacacatactcacagatacatacatacatacgtacacgtaaaataattacaacggtaaagatgaatattctgaaacttgtgcataagtctgcctttaaatataagctgcaactaagacttccttatcataggcaatgctataattaacatatctactgtgcaaccattttactattgagccttctgatattgttttgggccaggctgaagtgaaatgctaaaatattatattatattcacagtttagatggtgcagtcttttctttagcatttagaatccaaagtatattttgttgggtaccccatccaggaggaagaatgctgcattgaaaagaatgatttaattgggaatcccactctggcttaatggctctaactgttaaacctgtctcagccttaatttcctcatctttaaaagtgaaagggctgttgtcaggatgaaattacataacatgacgaaatgccttttctcaccgttgggtgcagagatacctgagaaagagttactcaaatctgcttaggaatttgtagcaagtgaagcgtaggttttgggggatattttctattttgagacagagttttactgtgtcactcaggctggatggagtacagtggtgtgatcaaggctgactgcagcccatacctccaaggttcaaccaatcctcccatctcaggctcccgaatagctaggaccacaggcacgtgccaccacactgagctttaaaatatatatatatatatatattttttttttatttgtaaagatagtgtcccactatgttgtccagactggtctcaaactcctgggcttaagcagtcctcctgcctcagcctcccaaagtgctaggattataggcatgagccaccgtgcccagcctagcataagttttacaacctaatgcctagaaggttagaacaaataaaaccactgttacccccagatataagtacagctctcctatttgtagtactagtcttcatttctagccccacttccttcatctttccatttaagaaaggaaaagtgaaaaggaaggagaaagatggcagtcccatgtgccaccttagagacacaccacctccccttaggtttctctgctttagtcatgggttagattagtacaacttgcacctgtgagtgagaactgtcattgatcagactgacttctctcaccagctgaaagacaaaaaattcaattgattcagagttccttgtttattgggcactcatcaacaaaagcacagatattgcatcctgagtttgactttttagcacgccagagaacttggaggataagcaaattctggcttatttgatcctaccgtgttattgcttttctggggactgcttaattgaagcaagaatgctatttcaagtaaaatacatcaaaaggcatttcatttaaacctagttaattctttacaaggc

SEQ ID NO: 69114 - DNA, 1079 bp, Homo sapiens
aaattaacttacattttaaagggtccttgaggaaaatatccacttcatatatgatttttgtattttgcagaattgcttaatatagtgcttttacaaaatagatatgcagtgtttgtggaacgaaattgttaagacaggaatacctataaaactcagatggagtcattcaagtgctgagcatgcatttcttatgtatatttctcatagaaagttaatgtgccaggaagccttcattaagttttcattatgctttaactctaaaaaggtattgacatggtttaaaagtcattgatcattagtcacaagatgctgctaatctctctacctgagtaaaacaaatgaagctatccaggtaaaaaattgctcaccagttagtcattccttcagaagagttcctagactatgtttaaggatatacagacatatctttaggaagacctaggaagtgtctcctgcctggattctgaaatcttttctagccaacctctgagaaaaaggcagagaacattgattaatgtcagattttggcaaatcaagtttaaaaaatgtgaattttagatgagggggagactcctttgctatagagagaatatattataaaaaattgatgaacacaattatgtatcagtaattctgtgatttttttttcagaaaatggtcttataaaaaacataagaattatgataattcaacagtgatattagcaagaacaattggccagatgtaaaaggatttgagatgtgtaaaaggaattgtggtctgtccactgtcaaactcttggtgcatcttggcttcctcaaggatcagaaggagggatggaatatctgacccctgagattgcttctgtccatgataggcacagccttgtcaccctgatgccagatatgtattcttaaagaatatcaaactatagcattctctttctcagaaatcttcagtagcttccaactatctacaaaatcaccaaatcagttgtgattagcaagtattttaagactgcaaagctgtgatcaaacccacctttctctcaagccatatttccctgtgctctgaaatgtacaaatgccaaactggacaaa

SEQ ID NO: 69115 - DNA, 1073 bp, Homo sapiens
ggcctaaagaacaatttcatgccagttttgtgcttcattttcttttgaaatttgcgttttacctcttagtagatatattgtggtttccccacacccactttcacaaattgatactccaggaagatgcaaagtgcttaaattgtagttttctggctcccctgacattccagtttggaaaactcaggcctatataatgaaatgtaaactccatagcacatgaggcacttccccccatctgcctctctgtgctcacctcccactaatccaagtgtgatgtgggaacgctgtgcttctgcacacacaaactgcctgcagttccccagggatgacgttttcttggttttttgtttttgttcttgctttcctctgcctagaatatcccctcttctcttcctccacactgttctataccattgatttcatgacggaggtagaaataagaacacaaaagcaaaaaagtttttttaactcttaaatatttgacaaacaaaagatatggttacagtttttcacttaaagaagtactgaattcttctttaaaaatgcttagattctggcctctgccctctcttccatttgccttatgtgccattattgttttttcttactttgggttccgccaaaagtctctaaccttcttcaatatggctgaccttgttttatgcatccctctcttccaagtactctgcacatggtagaatgattgaagcaatgactaaatcttaaagacacttgcaggctagcaaagctaaagcataaatctcgaaaaggatttagaactgagactctttggatatacctctcactttttcagaaagttgttttgttcttcaaattaaatatgagagaaaatatgatcatatttttgtagtttaaatttgaaattattatttacttttccagtaaacatgcctaaatacagacacacacacacacacacacacacacacacacacacacacacacagcctctaactcagccgcattattggctggtagcatgtttaaagtgtgttgatggagcaaataaatcttttggctcatttcaaacccagagaaagatgtcagcagta

SEQ ID NO: 69116 - DNA, 1098 bp, Homo sapiens
taaggcaagatcaaatgagaaccaagaggtttattctccagcacttgtgaaccagagagtctctgagcttggagattccagacaaatgggatgaaggggtgccatgcacactgaggattcctgcagccccatcctccctgccagctcagaatgccaagagccacaggtcagctctcttaagcctccccatagctctaagacatatggttttagtagccccacatttagatacaggaaactagctttagtccagatagagctgtcctagaattggaaggaagggcagtgtggtattatggaggcaaaggagaaagagcctctcaggaacatgcaatggccaagtacaccaggtgttgttgagattataaggtagtggaaggtaggactggatttggtctttcaactatttctcatcatcctcaaatcagatttcaatgggttgagaaataaatgagattttttaaaaatggcagagaatcaaagtactattttacgatgtttgggaaaagggacaatagagaatatgaaagtcaaatatacaaatgggcttaatttgaatttttttttttgatgaaggacacttgaatatattcagacctactatgtttctcagagcattcttccttgtgcatggctctgaatcatgtttcaagtgcttgtactcggaccctatcatccacaaggtatggagtttcttttccattttttcctttcttcataaatattctctactataggtgatgaaattgagacttacaatggttaaatgatggaatagagatatataacaaatctacgtagatctgtctatacctatatctatcttacatatctatattccatcatttatatggtttcatatgtgtatatgtggcatatacttacactatgagtttatatatacatacatatatatttacatatatttcacatatgtgtcagccatgatattacatgttcttatatattatctcatataatcctatgaagtatgtattattaatattatcttttcacaggtaaagaacctgagtgtcagagacgtctcacaagtactaagcagtgaagcttgatttgagttcacttcaggctgattcc

SEQ ID NO: 69117 - DNA, 1143 bp, Homo sapiens
tcctaccaggtccctccttcaacatgtgagaattacaattaaacatgagatttgggtggggacacagagccaaaccatatcagaagttcaagataaaaataagcataattatagaaaacaaactgacattatttgcacatttgagttcatagttgagaaatctgtattcattttataattttacctccaggaccttaatactttcaataacatatgtttttttgacaggactaagaaagaaagagttgaaagcactgattagctttctgatgtaactgaattgacttaaaatttaaagtttccaattcctataagttaaagaggatatataagccaatataatttattatgtttctgaagtctaatggttgaagattttttttaaatttcaaatcagttttagtgaatcatattttagaaatgtgaaattttcattgatttttgagagtctaaaaaacctgatcttaaatataaaacatgccttagtttaaaaaaatctcaaaacacgtaacagttttataataaatttaaaatggctataaggaccattttatgctcatttattattcatttgcacaattatgaaacagaaagagaagtatattttctattagttgcattgttttatcaatgtaagcgtaacaaattgccatacttatctctctttctgaaatttctttctgaaattatgtttctgattttacatagctgataacgtatccatttgggagcttggcttattatgatcataatttgaaaaattcactggggactgtcaaaacttgaaattcaaaacaatatttatagaaaccaccaggagaaacactagtttgttgttttatccagttgtttctgtggttcagtttctgagacagatattgttagttgcttatacagttttcattatctctttctttcttcttaaggaactctcccttaaatcaaccaaatatatcactaagaagttccattatagagttacacaacagaaaatgaaaacttaagagttttgagagaaattggtgctcctagagcctatcaaccccggctcttctactattaagattttcaaaaaactttgatcttctgaggtttcaatctaatatacctgggtgtagttttttttttttttggcattctgtt

SEQ ID NO: 69118 - DNA, 1062 bp, Homo sapiens
agattgattattctggtaaaaatgtaaacactccatagggggttaatacatattatgtaattaatatcctagtataaacttctatcattgtttaatcaccttctcaccctgtataaatgccaaagcacagaataagaacgggatatacctctctacaggatccccattacagatgttttgtgcgatgcaggacatgagtttgacctctttaatcacttgccattacacgcagttgaaagcaaatatggaacatacagctccatcctttcttctcttttcagaagctgactttaataccaaagtagtaaggctctttgcagagcttgctgcatatgtacaagaactcaatttggagcagtctcagatattcaagtttactgataattcagcatgttaaagggaagaggaaataagtgagtgccaatggcttgtccctgctcatgtcctcttgtatctgctctgccctgaaagagaagaaggctcaaatatactgaaaaggctgccatgggcatatatggagactgccatggacattttcaaaatcacttcccctaagtggggaatctcttcaaccccaaacaatacagatccagagctaaggactcagagggacccaaggctctggaagcacagggtcaggtctcaggacttatcatgcaggcttctgaaagtaacaaggtcacatcacattaattagctgtttcattcattttcaggtaagacagttgcttttcttctacatactctccaatacatacaagatgtgaatctaaacactacaacgctatttttaaaaaaattaaacctatcagaattctacatccaaataaggttgacccatgtaaatacttaccttgggaaacaaagcattcatttcaatgatgtgtcatatctcagaacattgtcagaagtcgcccttggaaattgccttcagaaactatagtacatttttttagagttcacaataatagaaagtagttcttcagaaatataatcgacttagaacagctattctcaaaatttggggtcccatggtcattttacacaggtaaaaattatgga

SEQ ID NO: 69119 - DNA, 1067 bp, Homo sapiens
taaaatagaagacagcaatccaagataaagactaccaatttaaagccacaatataacaaaagtgaaaagtacattcaacaccagagaaaatggacaaatgaattagtagatacatttgaaaagtttcttaggtaaaagaataaaaataagactgcatgaaaacaggaaacttttatatataaccaaatttcacaagtggaattgtttaaaaacaggaaaaatattcaccaaaaaaattcacaaaaggctaatagccttaatttttaggaacccacagaaaacagttaaaaatactgactcctttaggtaagtgaaaaacaaacaattcagtaaacaacagacatgtgcagcaatatttaccctatttagtaagcaaagacataaattaaaacatattattttcactatcaaattataaaaatataaaagcctataatatctggagtgaggaactgttgtgccctgctggaggccatgaaagaaaccatcccacttcacctttgctctaaaagcaagttggcaatttgggaaaatatcaatacattttgagatctgagaatctaaaatctccccataggtaatactgtgcaactggccctgtttcctgtgagagctggagtctatgttccctcctctggaatctaggtaggagcttgagactactctgaccaagaaagtatggaagatgcatgcaatgtgccttccaaagttaaatcacaggaagaatacaacttccacctggtgctgtcacctcgtgcgatgctgcccctgggaacccagccaccacgatgtgaggaagcaagcagccacatgaaaaagccatgttccactacagcctcagctgttctagtctccctagtcaactaccagcatcaactgccagacatctgttgattccaagtgagaggaggtgagctttctccaccgaggcctccccagattggagattcatcagcaaaatgtgtttattcccatccccacaactttaaacagtgtgggtttagaagtcttcatcctggcaaaaggaatgcttccagtaaggaatacaacaatggtcctgtagaact

SEQ ID NO: 69120 - DNA, 1016 bp, Homo sapiens
cttggcaaggttacatcaagcaagcagagaaggtgatagcagagtgaaatcatggtagaaatatctctgcagatgagaagtaataaggtcaaagataagaggtacatgaccagactgggaaagaagaatagaaaaggtagttaaaaagaaagctgatttaaaaaaaaaaaaaaaaaagaattaaagatgaaaacataaaacgagttttataaatattagagctgggctagtctagtaaccttgaatttggttaacaatacttctaccagagacatccgcagctagctatgcttgatggggattttcaagtccctaggccagcaggatgataggaaaaaaatattcacgctggcagacaagatctttctcactgatcctggacatctggtcactaaatctttcagaaggacagattagagatggagaattgaaaacccctccagcagaggcaccaatagtgatttttaaatgagtatggaagccagccaatctcttgccacaggatctgcaaaactacattacatattcagtgttacagtaaaaacaaaagaaaaaaatttaccagaccgtattttttcaagaccctgaaggggttacaaggacagtaaaaagagtaaaatgaggacaattattcacccaaaatgcatcatgactcaaccaggtcaagcaacctttagtaaggtacgttccgtatgacaaggaaatctgtgccacaagcttaacattgaaaacaagtcctgcatatcttgatgatgttgctcatgggataatgactttccaaactgaacatttcacaatcagccgactttatacttagttcatgtgtatacctccatcaggaaccgagggcaggcctaaactccattcacaatctgtctttctgtaataatattgaaaaaatttttttaaaaaggttggggggaagagaagacaacataaaaatcaaagaaagatcagtcaacccagagaaatctcccaatgccatcatcccgccacctaatgctgtcgcaaacagg

SEQ ID NO: 69121 - DNA, 1014 bp, Homo sapiens
taggaacacactgcaaggttgcatgggtctgcttagggatggaacctaagccatgaagtcaggtggatgcagcacattaagaatgagtaaactcagcctctgtgctatgtggtgtcgcattttcgaaagctggttgttatcagcaggaatatgctcccaggggctcattgtttctcggcacaatctctgctttaggcccctctgtttcttgaaaagtcttgtcaaggttcccagtctgaagacaaatatgtggtcctctgaaggcttttcacttaatagactactacccaccatgtagcccgtgtgctttgtaatttcacttaaaatgtttgttatatttattatagtaataggagtggcagagatagtgtggagatagatagaaggcgccgctgaagcctcctttggtcctcttggaggatagcaggttatcgctttgttttcaaataatgcagttggtaataagtttttggatatatgtgagctgtaaatcgttctgaaaattgaactgaagatacaatatcataaatctcttccttggtggtagaatatttatggggagagcaatataatcagttatgtggctgtgctatgtctgacatctgactgaaggggaccctgtaccaaggatctatcgcttattagaaaactcctgtgggtgagcatgtgtgtgtgtgtgtgtgagtgtgtgtgtgtgtgtgtgtaggttggaagactcttttaaatggggataatcagatatttccttattaaaattaatcgggaatgcattagtggagcaggtagggatgctggggtagcatggtgctggtagggcaaggagacgcaggacgctttaccctcctgggcagcctcctcctcgaccgggtggtgtataatttggttcccaaaatcaatgcttgtttgttctgggaactcagaatcctaagaaaatgcacgtttcattagacttgttttgaaactcatgatcatcactgtaaatacctctgtgtggaaagcaatgaaataaaacca

SEQ ID NO: 69122 - DNA, 1025 bp, Homo sapiens
actatgaaaaacagccattttcaacctttttataaaacctcttcagggaatattggaatattatttttgtcaggcaaaaataatccagggcttgagcattgctgtagaatatgttatctgttcaaaacttagcagagcacgcatgcatcacatgcattgtcatcagtatttgagagctgaaccaatggtttttgatggttgccgtaacagaagatctgtgaagaggatggtggtttgcacctgttcctgaagtcaaactggaaaaggttgcaggtatttcaattttctcaatcattttgcataaatgtattaatattttgagtagtaatagttctaaacctgcaggaaggcatcattgtatactgtggtatgtagagaatactactcttacactgctctttatcttaaaatgttttggtatactgtgaatattttcctctaagtatttggtgtattttgacagttattaaaggagaatataaaattaaagattctggtctaaactaagaataatggaaagttgcttcgtcctgccttagaggagttttcagttcatcctcttcttgagaaactatgtgttgctgttactaaataaacatttactcaataaacgttttatttcctcaaattatatgtctggattattttagcaatcaaaaacagttgtagaatctttgggattgaggtgcttgagaaccaggagtctaggtggagggcagttcctagattggctaattcagcagctgaacagtgtcatcaagagccttagtaccttctgcctttcattgccattcttaacaagtgagtctgatgtctccccttatggctccaaagtgaccacaaaggttccaggtggtggatgataagaggctgaaatatcttttttttttcttttttataagaggaaggtttcacctgcccccattcacttgctctcatggccacagcaaaatgtgtattatctccaaagcaatcacttttcaaagggaataaagctcctatgattggctcagaccatgaagacc

SEQ ID NO: 69123 - DNA, 1016 bp, Homo sapiens
ggatactttcagttgaaccattctgagtagatttaagagaacaaaagacagcagaaataccttaaaagatattattggctgtcttatttttcagatatttgtatttaataaataccttagtagtagtcagaacctctttgagatgtttttagaaagaccactgatttgttttttaaaataatttttttggttccttagagtagagaagaaaagtaggggtgcaatatgtcaggtgtggggccagttatccatttattaaatgcaatttcaagtgtcttaaaaacaataattgccttattgcattttaatatttaataaagtagattaaataaagatttgtattataacagttattcttttatccattgccaaagcaacccttttttgcctattaaaatctggctaaactgttctgatgttgtttcttaattcattaaacatgaaactaggttttacaaactaaattatataaagacagaagtctaaaaatggtaccagaaaatttttttttaaaaaattaatgtgttattcaaatatccagcaattaaagactcatgagaaaaacagaatagcatattagatgtaacagtttaaaatggattgcaaatcaatgtcagacttaaatagaaaatatttattatcacctcatttctaccaataatttcagatgtttaatgggactttgaaaagataggaaaaaatagaaatgaaaatttatctcacctttaatactgtgaatactatttggagggtccctggtcagacatttaaatatcaaacttaagaactgacatggagcctttgattagtttatatacaggatctgaatatttacacacatagcacactatagcaacctcttgtaaaaaatcatgaagatagaattcaacagtgtatattctattaaaaagtaaattggctgggtgtggtggctcatgcatgtaatcccagcactttgggaggccgaggcaggaggatcgcttgagcccaagagtttgagaccagcctaggtgaca

SEQ ID NO: 69124 - DNA, 1789 bp, Homo sapiens
ctcttcttttagccagtccaccttttattagtttcaccgagatactcgtagggcttttggttgtcttcttaaccagtatttcagtcttctctgcccttgcgcatgttctccaggattcccccggagatttaccatggctgtctttctttaatgggagataatagttctgtttaatttattgaaaatatttgttaaacatctaatttctgtgagacgttaaatggagatcgttcatattaaactgattgaagaagtttggaaaataattgaacttacatatgtacctttgccttttaaattttttattttttaaaattttctttctctagtgttcttttgaagatgacaacatccgttccttattaaaacctttagaactggaactacaaaaaacagtgcatacatactgtggaaaaatttacaaaatatttatcaaacaactagcaaaaagtgtaagagatcgttatgccagatcaccaaaggaaaagtgattcttggtgactgcttaatcaaatggatgaaaacaaagaatcagaagataagtgtgaaggaatcgtcttggatgaagtattcaggaaggaattactcatctccagaataattttttttttcctaaagaagttaagtaagcagtattttcaggtaatgaagaataagttaaaatcttgggcctcaacattgaacattttttatctctgatgttttgtaatgttacttgctatcattccagtattgatgaaaatactattgaatgggtttaacctgcagacttctgttgactcatactctcaagagtggtaggggtgtgtagatggagaaaatgtacctcaaacagtgccaacactcaagactgtgagtagagcaataattttatgtcagcactaacctcactttaaaagtgtgagaaaaaagtttgtttacaggagcagaaacaggtctgttgtttctgaagaaatgtgatgtaactgatgtaaccattgacaatctatgtgtgcctttatacatttcatctctgttttaaaatatttttatgacaatcatgtttaaaattatttttagattacaagtaagctgcatgttaaaaattgagctgtgtaaggtagaggaaaaatagtgaaaactttgggattttaatctgtgtgtgcgtgtttgtgtgtgagagagagtgagaaatgtagtgtttcattttgtatgcattaaactgtcttgccaaaactcagatctaagattgttaaatagatatttggggaatttttttttaatcactttaaatgaaaaacgtcagctttactgggcattctggaagcaaaatatattatgctgatggtaaagtgagaaccttaagagtatactcatgatggtggaaagtgtgatggaccaaaatgcataagctatatacttcctgtgagtagtaattttagttacaatggagtagaaaaatatggtccatttaaacttgtcttctacctcataacggccttgcaagatacttttgaagaagcaaatgtctagagccttactttaagtaagttaaacaacttaagtggatgatttggaataagattgttacatccagctgtagaaaatgtggttttaattgggttgatgtgcatttttgaatatcacctaagacagttaatttttttaaatcttgagaaattacttctttggcattcttgacctgttagctaatataactatagattctgaatacttagcatatactatgctggggcacatatcttattttaccaacaatatgattatctatatggttatcttctttttc

SEQ ID NO: 69125 - DNA, 1026 bp, Homo sapiens
gatttatcaatttcaaaatgatctatttgaactgccaattatagaagttaagcaaataaatcagactaatagccatcatggtaaaaaataataatagctaacactgaatatttaccacgtgtcaggtgctattccaagcactttaaatttatatattaacaattttaatcatcaacaactctgacgtaggcccagacgtaggtaccaaaactatcttcattttaagataaggacacagttactttcgctttctttcgtgacttactagttttgtcactgccacatacaacttccttttgttatcttctgttttactgtacagcccttctcacatttagggttagaaatgtcacttgatattgtgaggagtttgcatttctctttgtggatttgtaatggttgctgtgggaagaatgaggaactgtcatcatgctgccattttaagcctgaaagtctgaagctcttttgaatgtttttatcaacagaatgatatgacaactgtacgactacaatggggagatatacttatgccattgcttaaaaaatacaaactaaacatcacatggggtgatcaagatctattgaatatcgtgttttttcataatccaggtaattatttaaattccttttatttgcattaaaaaaatcacagataatacttagtgaaaaaggaaaacatgcacttatctgattctgtcttatattaatgattattgctatttatgtttaagacggagtaaaacttttcttgaattttgctttaattggaagagatctaaatgccagacatttttcattaattcttacttgtaagagctgtattttttaactgaaagttttgcataatgttacatctgtggaattaggggtatttgcttcattgtttggtcttttctttatgtagaaagcctttttgtttttccgtgtcaatggaattatcgaccagatcattgtatatatggaagcaattgccaagaagcagaagaaggaggaatctttattcttcatgggaacagaggtgtttac

SEQ ID NO: 69126 - DNA, 1078 bp, Homo sapiens
gacacaacctagaaataagagtatggactctgaatctggattgcctgggttccagtttggctctaccacttactagttgaaaccgaaatgatgtaaagatgccagtgttacaggccaaggggaataagttcagaaaatctttatttgtattggtttatttctgtatttatctcaggaaattaggattcaagatataaatttacctaagttaatgttattatccattatgaaaaacatttcctccctgatctttgaagatttcatattattctctcaatttttataattgagtattttgttttggtttgttttcatatcttctctgaaagttaatatgaaggttagcatagtatctttatatatatgctattgttaaaaatgacagatttaggaaagattaccttaaaataaaataatataaattagctaatctcttaggtgtatcttacacaattagaggtgcttttatgtttctttttaaaatagaattatagttaatcattcaaatatctctccttgtagttaatcctgaaagaagttgactcactattgtatgtcgacactgatatcctttttttacgaccagttgatgatatttggtctttactaaagaaatttaattccacacaaattgctgcaatggcaccagaacatgaggaacctcgaataggatggtataatcgctttgctaggcatccatattatggaaaaactggagtaaactctggagttatgttgatgaacatgactcgaatgagaaggaagtatttcaaggtaagtcactaatacaggtagttgttaacatttctctaaaaaccttctaaattgtttttaataaaactaaattttattaaaaactaaattgaactataaataatttttctatttagaataatctcattagaagaatataaatatctagatttatctagaagtgtgttcatattattctgtttaacagagcattacaataggtcaaaccagatgacatgacaatggagtaaaataacaatgccctaagtagtgaacatcttctccctagattgccattccaggaagcagatgttattttgtagtt

SEQ ID NO: 69127 - DNA, 1037 bp, Homo sapiens
actaagattttattttgaagttggtattgaaaagatctttaagtgattaataagtggagcagggaaatgacagtgctagtattttacaataattagtagatagctggttgtggtggcatgcacctgtagtcccagctacttgggaggcctgaggtgggaggatcacccaagcctgggaagtcaaggctgcagtgaaccataatcatgttactgcacttcagcccagtctgggtgacagagtgagaccttgtctcaaaacaataataaaataaaataatcagagacaccaaagcagagtgttggaagtaaaggcattcccttaaactatattggaagatattagtgttttagaaatgacttaaacactatcataattcaaaagagattttattcagcctgtacataaactacttagttttttcccccccatagattgtttcttaatgctcctcaggaaatttgaatcagtaattctgttgaaataagaatgagagataatacttaaactgaattagaaacaattcagtatcttgaaatgcatttagggtactaagtgtaaacatgttcatcatagattttcagatacattttgctttttgtaataatttttaaaaaattggcattggctatgtatcagaatattctcagaaatatttaggcatattaaagctatgcattgatggacaaatattttttaactagtttcatatttggtctgactttgaatgtaagcatctttcatatcgtatatatggtggtaataatattagtgcttaatttttctgattttagcttgttaatggattaagagaatttacacattaggtaaagttgaggaagacaaacttgcgagggtctttcacctttctgattttgggagttggaccctgataactttcattatgcttcagatcttaatggggaagtctgggatctaattttgatttttagattttaaatgaaaacaaatacagtggtggaacagaagaatctttcctttaattttacagcataaaatgtatattatcttaattttt

SEQ ID NO: 69128 - DNA, 1114 bp, Homo sapiens
gctaatttttgtattttttgtagggatgggatctcggtatgttgcctaggctggtcttgaactcctggactgaagtgaccctgctgccttggtctctcaaagctctgggattacagacttggcctagtttgttttataaataaaaattttgaacttcagtttttctttctttcttttttttttccttccctccctccctttccctttgcctttccctttctctttcttctctttctgtcctttctttcttctctgtctttcacagggtctggctctgttgcccaggctggagtatagtgatgcagtcatagcttactgcagcattgaactcttggtttcaagtgatcctcctgccttagcttcccgtgtagctgggactgcaggcatgagtcacaacatctggctttgagcttcactttttgagcatgatgaaagtacacattgtaaacatatactaaaactgttgaaaaatgtggttttctttcctattaggtacagtctgaaaatacagcctgttgagaaaatgcatctagctgtagttgcctgtggtgaaagactggaagaaactatgaccatgttgaagtcagctatcattttcagcatcaaacctcttcaattccatatttttgctgaagatcagctacatcatagctttaaaggcagagtaagtatttgagacatagtcaaggttgtagagttgaatatttaataatatactataatagaatgttgttgtaatagtctgttcacattgctagaaataactacctgagacttggtaatttataaagaaaagtttaattgactcacagttcagcattgctggagaggcctcaggaaacttagaatcatggcagaaggcaaagggggaagtaaggcatgtcttacatggcagcagaagagagagaaagagaaagaagaccacacttttaaaccatgagacctcatgagaactgatggttatcacaagaacagtaagggggaaacggcccccatgatcgagtcatctcccactaggtccctcccttgacacgtgggaattacaatttgagatgagatttgagtggcaacacagagccaaaccatatcagttgttttatttcttaattgcaca

SEQ ID NO: 69129 - DNA, 1028 bp, Homo sapiens
aattgttattaaataaagaatttgtatgaacctttgccaatgtttttgacacgttttactaattattgttcctgaattatgtttctggttttatctattttttgaggtttttttgtttgcttatttttcaaaacattcatttattgtaatgtttactagcggactagtaaacaataaaacattgattatttagctttataattcaggtttagtgctattgtcattgaacactggtattttctgtatcatataaaacattaaaattcaaataattataagcatttggcaaaaacaagagaaaagaaacttgccatattttacaagctgcaattttagaaaagctttaacttaatgatagttttatcattgttttcttgtcccaaacttatccagggccatagaagtatgaatctaattaaaacagaaatgggaattattgcacagaaatgggaaataactaattttaaatcagtcaaattggcttcttattaaatacaataattcttatgaaaatcatagtaccctattttcagacacagctgccagtttacacatttctcagtatcctgaaaggaaaaaagtatagccccacttatactatgtaaaattaccaataaaatatttttatgactacagattttgcatttttgtttacaactatttaaagagttttatgttgtatttagaatttcaacctagaaaccacacagtacttaaattctcctggggtctcctgctttctcttaaccatttgcttaatatatatctacctaaaggagacttctgaattgtaaatgaacttaaaaatagaatgtggatgcaaaatatcacataagacatcatgataacatttgaagaaaaaataaaactgtagaccctaacagttgtgatatttggtggtttcatgtggtaatgtaattttctgtttaattacagtactttttacaggcacagtggtactgtcttttttgtaagatgctagttgtgaaatacaattaattgcatacagtaaaagtctgtgattaaaa

SEQ ID NO: 69130 - DNA, 1121 bp, Homo sapiens
aacttacatcaatctaagctacctgcatgttcaattattagcagttttaaaaatgttttcttttaccatcagtataatgtatgattgaaaccacagccgacagattttattctctcttgtgtcatgcttactttcttgctgaatcttagctagaggcagagaaaccattttgatagtctaggcaagaggcagtaatgtcctgaacaaggggaatgccagatgggagacagaaatgaatgtattatagatgtgtttaggagagatctgtggaacttgatggttgattggatatggttgtgggaggcaggaagttgggtcatagtgaaggggaggtatcaaggatgaatctcaggattctggcttaagcagttgagtgagtggtgttagttctcactgagatagcaaataggaagacaggtttgggggaaggtaatagtttgcctatagatttgttgaatttggggtgcctggggaaaatttgagagggaagatctctgaagcagtttggatatgttgggtaaggcttaggaaggagaaaagggctgtaaatacatatttgatagtcatttgtacacatgatttgagttgaagctgtaggagtgggtaagacagatcagggagggaatagattgcctaccatgagaaaagagacctaggagagacttttgaggaacatctttatttttttacagtggtagaagaagagcatcccacaaagaagaagaaagaaatggagaaggaaaaaaaaattaatagggagtaagaaacccaggagagtgtaacaatacagaaacagagggaagaggatattttcaaaaagaggggggtgtgtttagccatctccaatggcttttactttcatcagacagaatcttaatttttctctcaagttccatgtagtatttgttttaataagtatggcatttagatttgtatttttaagttgtaacaagataatacttttgcgtagtgattgtcctcagcttttcatgttacaataattctggtttatatttatagactaaataaaggaggttaatattggtaggtaggaagataagtaaaattatgttagtaactaactttgtttcccaaggatataattatctagtaatatctat

SEQ ID NO: 69131 - DNA, 1043 bp, Homo sapiens
accaccatgtacatgcatgcagtaagaataatgtcagtttgaattaagaatatccttgaagcagaaaaatttactaattttattacatctcatatttttaaaaatattctgtctgaccaaatgggaactacacataaagcacttctactgtataccaaagtacagtggttaagggaaagcacatgtgtagtttgtcttgcaagcagagctagtctttttgtcatagagcatcatttttacttgaaagactacctgaaataccatagttattcagacttggatatttagcatatattttcttgaaaatgaatatattcaaaaaatatatcacttcaaggaaaacacttgatactatatgttgccagtgataatcattcaagtgaaaattagaatttttgaaaatttgtagcaacaatgagctttagagtttctgtgtataaagacttttctgagaagattagtggtggtatcaatgaatataatttctgatatttcaccatgaaatgtgtcagcatttggaagctacgcataactcagcaaacaaatggttcctagttaccgatgtatgattttacaaaactgtaatgggtaatccatcaaagtacaaaataccaacagattttaagggaacactgaaaacttcattgatgtggtttcagatttcatattgcaactaacctttgagaaacaactgtgtttttatgtagtatcaaagaataacacctatagttatctgaaaatgctattcaactacttacctcttttcaactgtatatctgtgagagtccagattttcttaatatttttggaccaaaacaacatattgcaacaaattgaatgctgagatagatgtgacaatccaggtgtcttctactaaccagatgttagaggtttgcaaaaatatacgatgccactcttcatacaaaatatctttgttttggaaaataataagtttttaaaataaaaatatgtcatttaatatgtgatgtatttattttttaaatgaactaatatatttagatttttatcagtttttatttcta

SEQ ID NO: 69132 - DNA, 1329 bp, Homo sapiens
ggtctcaaactcctgacctcaggtgatccgtctgcgtcggcttcccaaagtgctgggattacaggagtgagacactgtgcccagcctatctgaagattcttataaggcaagaaatgtcccaaatataaatgcaagaaactttaggaaattaaggatcattcttggctggcccagtggcccacacctgtaagcccagcaccttgggaggctgagacaggaggatttcttgaggccaggagtttgagaccaacctgggcaacacagtgagatctcgtctctactaaaaattaaaaaaattagctgggtgtggtggtgcatgcctgtggtcccagctactcaggaggctgaagtgggaggatcccttgagccccagagttcgaggttgcagtgagctgtgatcataccactgcactccagcctgggcaacagagtgagaccttgtctcaaaaaaacaaaattctgagtcatcagagaaaatgaaatattaaatattaaggatagtctgtatgagggtgataatcaatgtgtgatgattaatttaagactggtgtcttattggtacttcatctagtagtggacagttacttaatattgcttaattcagatagcaaatatttagaaatgaaaatgatagaattattggtttgggtttcaaactgtggtctaaatggttcataccaggctttcaaatgtaacaggtaatgttacattttgttagaggatattataacagtcctttaggtttctcataggtgttattttagagagctataaaaaagatttcacatagtagaaagagtgctagatgttacactagtatgattttggtaacctgggttcatatctcatttcatatcaaccatttcaatattcagcattcagcaaatgtttattgagcatcttatttaagggctgagttggatactagacatacagtggtgagcaaaatggatttttttgtttctttaaaattttacagttttgcaaattagaaccgctttaactgtaccaagctctatatgtgaggtttagtgttagtagatctttcctttatgtgtaggctgaagaggtggaacttcttcattaaaaatatatgttgtttataactgaacacagtattattattatggttaggtaaaaagagtgagttatttcagcttcttttaaaagtaagctataaaatccacattctgaaagaagcttaaaccaactatcatctggtagaaatcttttcagcatcgttgttttcttgtcatacttgctttatgtcttcaaatttgaggtttggcactgattcttctagacttttggtgtaggaatgggagaaaa

SEQ ID NO: 69133 - DNA, 1069 bp, Homo sapiens
ttccattcttgatatcccttgactttgaagagatagctgatttttcaaatgtattaatttatcttataaatttttagccctttttaaaatgaatttttcaagtattagtatctgttttatttattgctgcctcatttttaactctttgtttatgctttaagggttaccatcatgaaagataaagataccaggaagagtaaaggggttgcatttattttatttttggataaagactctgcacaaaactgtaccagggcaataaacaacaaacaggtaagctattcatctccatcaaggtttttagccccaaagcctttatgctcatccaggccaaaaatgtggggatatagtggatcatcaggtctagcagatatcagtagattcttaagatatctaacttatagaaagaaaagaggtcaaactactgggttctcaaaacattggtggaatctcaggaataagaatactacagaatagaatttatcacacctaagtgacaattgctaaaaaatccaaaataaactggaattgaagatttgagaaaattgattaaataattaattttaggtttcagtgaaatacattctacatttacatttttctcttgtttagttatttggtagagtgataaaagcaagcattgctattgacaatggaagagcagctgagttcatccgaaggcgaaactactttgataaatctaagtgttatgaatgtggggtaagtaaacctaaaacttaatggaactttccatagtttaagatacttttcacatcagtcttttatttttgctcaccaaaacttctgactggctaaaccagattatgaaaatgctttattttttaatatttatttttttgagatagggttttcctctgtcacccagtgcagtgatgcagtcacaactcactgcagcctctacctcccgggcccaactgatcctcccaccacagtgtctgagtagctgggaccacaggcatgcaccatcacaccctggttaatttttaaatttttttgtagaggcagggtcttcctatgttgcccaggccaatctcaaactcctgggctc

SEQ ID NO: 69134 - DNA, 1028 bp, Homo sapiens
ctacagctgattgtggctatgtgagaatatgatcccagttttgccagaacatctaattttttcaaaaaaagttggaaataccattttttaaaaagcatcctctcccagtttttaaatgttgtcagtggaatagaattttattaaaaaaaaaaaagtgggtcaaacacaagtctcatatggcctatcagtcactagtttggaatctgttttaagtcttgtagggtttatataatgggctttgtggagaataataggttttgagttgggccttgatggaccgttggatgttgaatgagagaatggaaaaagatatcccgtttggaaaataaacagctccgtggtagtatgtgttagtctgtttgtggcacagtaaggaaacaggcataattatatgcttttggagagaatagaaggttagatataatagaaggaggcatatggaagatagaagtttggatttattatggttaataaaaaacctcttggattcttgatcctggaaacttcacattatgaatatgcgttaacagttgattatccttttttagggtaaaatggagggtaaaacactggaaggaggctgaccggttaaggccttaacttccatccatatatgaaataaaattcagatttataaatattatatgtaggcagacatctggcatttttgtttacttgtgtaatttcagttaattgatcaattataatggacaatcagggatctcctactaagtttagtgcagtacattcgggcttataaaagaagtatccttaaagcgttggaaagtcaagtgacttgtgaaactagtagagaatgcagtactttttatttttttattttttgagacggtgtcttgctctgttgcccaggctggagtgcagtggcacgatcatggctcactgcaacctccatctcccaggttcaagggattctcctgcctcaacttcctgagtagctggaattacaggcatgtcccaccatgcctggttaatttttgtatattttttaagtggagacggggtattac

SEQ ID NO: 69135 - DNA, 1053 bp, Homo sapiens
agctagtcctcctttccctgggagtgacctgccatagtagtcacattgtggtcaccttaacctatttaattgtctctgtaaccagctacagaaactgttcagtgtcagtggatagttaggtcttggaatttggcatacatggcaattatgtgcagggacattcagaacccatggcagactgtttcttccaaaagaagcaatagaatagatgccgaaaaaaatgctttgataaaattaatcaccaagtagttataaaaatagccagctgggaatggaaagagaatttccttgaccgggtaattgggcatttgctgtactgaatggtaaaattagaaacatttgctttaaaatcagaacaaaacaatgacatctagtcactgcttccactcaacatggtaacaatgcctacagtaaagcgaaaaataaataagttgtaggaattagaatgaaaaacgcaactacttaaagataatataattatgcagaaaatctaggaaagtctatagactgtaagaactattatgaaattagcaaggtccaatgtaataagatcaactatcagcataaattagaaaatttgttttcaaaatactatagcatgaaaactgtaatgagtgataggaataaactcaccaaaagagtatgaggcctatacaaggaaattacaaatcatttctaaaggaaataaaagtgaatcagagtaaaaggagaatcatgacatccttagcgaggaagactcagtatcatataagtgtcagttctcctcaaattaaggtggtaattcaatttggttccagtcaaagatcaaaattttttttattttttattttgcacggaagttgacaagttaattttaagactaatatgaaagagtaaagggctaaatggcaaaaatgccttgaaaaagatgtgaagactcaagataccatatgtgcataattataaagctgtagtgatgtaaacagtgttgtactgttgatgtcaaatagaccagtgaaacagaatctgcaaataaacctagatatatctggagtttggggtacagtagcagtg

SEQ ID NO: 69136 - DNA, 1056 bp, Homo sapiens
cttggacctgggaggcggagtttgcaggcgaaggcgtgctgttgcaccccagcgtgggcgacagagggagactccgccttaaaaaaacaaacaaagttctagttggaagatctcttagtccatatcttatgcctggaatactttcgtttgttctactttttctagaatgcttttaactgtaaacatgtgattttgtggaaacagccttgaacttgaccaccaaacttctaatctgaactcaagcaggcagacaggtgtttgattttttgataggatagaagaagaggtgatatggaaaattcctcagcttaagtcgcagtgtctgtggttttccgtttccacatttaaaataaaagatatttgaggttgtacttcacttattcttaagcttgccttgctaattacctggctgctttctcaaaataattcttgaaatcgtaattctttttggaagtccctattgactagaaaggaagtagccaatattttatatgaatatttgtgtatatttggatgtgggaaggagagaaaaatgaggttcagaataagaagtaaatgctttccatctccccattcttcccttcccttgtatccctttctcccactttgtcgaattttactcataaccggtgaacatatgtctgctgacactgagggttctatcaccgcttacctggtttgactgatgtgaggggcgggaattaccttggggatttgtattaacaggagaatctgagcttcaaaaatctgcttttcaaataagcatctaaagtaatctgcaatcacagatggttcaaggaccacattttgagagacagtgccttatggggtgttagttcttcccttcctccattctcctgatgactttgcgtcttttatatgccagccagtatagctggagtgtttgcgatatagccaaagacactgtcctaactctcaggctgtgtactctttgataataaaaagcatcagtttcgtcagatgtgttttttggaggcctcataatcctggttgtattgttatttatatttcttcaaaggccctttttgattcatc

SEQ ID NO: 69137 - DNA, 1023 bp, Homo sapiens
cctaattccttgattcttgagatgagttcgggcatatttcttcctcctcattactttctccaagcctctgtttccacgtcaactttgaacgtcctcatttacaccaccctgtcttattgtattctctgatgaatttccaggagaccattccttcttccttgatgattacaatttctgactcacaatcttctctatccaatctgcctctgtatcgtgatttaatgccatgtttaactctagttgtttcttgtatttttcaactttatatatccacaggcatggccaggccttactttcatcactgggaattgttttgccgttatcatgaactctgaatttctgctttctgacttctgaacggttcacttacatacagcccttacatgctagtgagcttctttaattcagtcctttttaacatttcgtgtgcataggaatcacctggaaagccttatgcagaatcctgagtcacacccttagagattctgattcagctggtgagggttgatgcccatgaatttgcatttctatcacctttcctgcaaatgctgaggcaggtaggtctatggacgtacattttgagaaggattgctctaattaatactttgccccagaggatcagtaaaactttctaatttgcataaagcctccattcacattctttctttacttttttgatgacttctgtaattactgagacaaaggccttttgatgagaactctgttgtattttattttcttgaaataagagtttttctatttattcttttcatattcttctcttctacttagtccctttgtctcactttctccagttgacttttggctccttctttaccattaacatttttgtgtcttgcgttatcagtttccccttttatagtgaattggcttttttctatcagccttcagtagtggtcaaataagcccctttcctcaaaataccattccttcccatcttccctccttcagcctgttttggaagaaaagttacagcttttaacttcttcactagctatatct

SEQ ID NO: 69138 - DNA, 1022 bp, Homo sapiens
tatattcttgtatatgtaaaatttgtgacccctcacctgctcctgtcccatctaagataccactgtctcttgcctggactaagttaggttcctcgttagtctctctacatccattcttgactgcattcacatgttttatgtatatttgtctaatgtcagcctctcctattaaaccgagagttctgtgatggcagggactgtgtacatttggctcaccattgggtcccagcacctcacacaatttctaaaacctgtttatttaatacccatatcaccactctggctaaccagtgctgttggtatgacccttgtagttttagtgactaaactagtgctagaattccttaatgctctatttcattattagtgttctataccagttcatttaccataaatgaatttaagctattttctgctttttcccagggaaacttacttgtgtctgaagggacaatatatttggggtattaatcagctagtgttcaaatgaactttaggacaacagcctgtttatatcctatggactgccaatcaagatgctgaaatgattttccaagcacttgaaattgtatgctattggtatgtctcttagcactcttctgtctgaaatttagtattctttaatgttgcagtacatttgttaaatcatggattaaaacctgtttgactcttaagtgttcttttattagaggcttagttgatgatggtttcatttagtaattttgatttggtttgacattttaaaatggttttgctttataaggttttactactagggcttacttggtgctttgagttgatggtatttctcaataaagaaatttaatttataaaagtagaggtgatttataaaaagtagttatttagagatgggcaacaatctatgtactgaggatgcacactcagcaagaatttaataggtatatagcagggtttctcagtgttggcattatttacattttggactgaagagttttttggtgtgtagtgttggggggcatgtcctgggcactgtaggaaat

SEQ ID NO: 69139 - DNA, 1047 bp, Homo sapiens
aatttttttttctttatttttgagacagtctcgctctgttgcccaggctggagtacagtggcgcgatctgggctcactgcaagctccgcctcccaggttcacgctgttctcctgcctcagcctcccaagaagctggggactacaggcacctgccaccacgcccagctaattttttttttttttttttttgtatttttagtagagatggggtttcgccgtgttagccaggatggtctccatctcctgacctcgtgatctgcccgtctcggcctcccaaagtgctgggattacaggcgtgagtcaccgcacccggccccaagagtacaatttaaagggtagcttataagcagagcttttgccattgtgcttgtatatagaggatagagtataattaacttattttatgtttttttttttttcaaagggacatgagagatggctttagaagaaaaagtttctactcttcccattatgcgagagagcggtctccttataaaagggacaatacttttttcagagaatcacctgttggccgaaaggattctccacacagcagatctggttccagtgtcagtagcagaagctactctccagaaaggagcaaatcatactctttccatcagtctcaacatagaagtatgtattttaagactttatttttttctctcacagtctcctctgatgagaatgtactgagtcagatttccttctaggtgtaagagatttattttttaaactttttattttgaaaaatttcaaacttacagaaaagatggtagaatagtataacaaacaccatacacacacatttttttcaaactatttgaagtggcattctgcatgacacttacctttaatttcttcagcatgtaaaaggttttttttttttttttttcagagtctcgctctgtctcccaggctggagtgtagtggcacgatcttgtttcactgcagtctccgcctcccggattcaagtgattctcctgccccagcatcctgagtagctgggaatacaggtgtgcaccaccatgcccggctaatttttgt

SEQ ID NO: 69140 - DNA, 1218 bp, Homo sapiens
tggctcaagtttctataaaaaataatatacatacagcactatgtgagtaaagtgactaaaggtaaagattagtgactttatctcatacaggtttatttttaaccatttaacaaatatttgggcattcattaatgccaggcactgattagtgctctgaattatagctttctaactttatgtttaaaactgtctaaacatttcaggaatatctgctaaagttcctatgtagatcctcttgagctaccccttgattaactagttctcctcggtatctatataataactacctttgtatttttattgtgatatatcaaaaattagcatttaggagcatggaagaagtagcattcatggttttaaaatatgttttgcctttcttgaagtctctgtggctccatgtttacttactagcagtgctgtggcctagactggcttctatgatatcctttggttccaggttatttcagattgttgatggtgcttagcctctgagaggtagttttagatattaacctatttaatgtaataatgtaatgaaaagttttagtactaaaataagtgtatgacccccacattaattccattacaaaattactttatcaaaaacaaattagctagaaaaaaaattacatcttatgttttcttatatagataaagagaggcctgtccagtctttgaaaacatcaagagatacttcaccctcaagtggttcagcagtttcttcatcaaaggtttgttatatttctaaaatcagtttaaagaagaattacaaattgagatggactgactagtacagatgcttttattctttactgttatgccaagggagctaatttgctgcatttaaaaacttaaatttttggctaggtgtggtggctcatgcctgtaatcccaggactttgagagactgagattgtagggaaaagaaagagagatcagactattactgtgtctttgtagaaagggaagacataagaaactccattttgacctgtaccctgaacaattgctttgccctgagatgctgttgatctgtaactttgccccaaccttgagctcacaaaaacatgtgttgtatggaatcaaggtttaagggatctagggctgtgcaggatgtgccttgttaacaaaatatttacaagcagtatgcgtggtaaaagtcatcgccattctctagtctcgataaaccaggggcacaatgcactgcggaacgccgca

SEQ ID NO: 69141 - DNA, 1349 bp, Homo sapiens
ggtaccaagcattattgtggatacttccagatctattacctccttcaattctcacaactgctttgcaaagtgagcattattaacccctattttgtaaatgaagaaaccaaggctcatggtgtcgtaagttaggtgtataaagtcatctacctagcaagtcattaaactgcgattcaaagccaggtctgtatataactgcaaagtccataccttgtttagtattgtgtgcagttagataaaggaactagtagtaggatcaaaaaatgaaatttaagtttaaaaattttgtgtaaggagtaggatttatgtaactcactgtacactgtaataatagcatatctgtacgtttctgttgtattaggagtttgctttactgaaatttagacattacttatttcattaaatatgcttaaaggcacaaagttgaaatcagtatgatgtcttttatattctaaatataattattatatgagttaattgtcagtgtcttttgctttgttacttagatgaatttctagagtcttatgtaaatgaaattaagaattagatctggtctatatgtcccaaaggaattgctacttaaagtaattccatgttgaatatttttgaaggaggaaataaagaatgtacctgttctccatagaaatttggaggcttatatgattttaaatgtaagtggagtgtacttcttggtgtatttgaagtttaaaagcccttgagaattgtaacagaaatgttctatttttattaggtgttagacaaacccagtaggctaactgaaaaggaacttgctgaggctgcaagcaagtgggctgctgaaaagctagagaaatcagatgaaagtaacttgcctgaaatttctgagtatgaggtaaggcataatgtctcctttatgtttcacatctgaaagttttgtctggattttaaattatgggcgaaaaatatttggtttattcctatacttcaaaatatatccttatggattacaggtattaaaattaccacacagaatgatagtcagaatatgaatgactctgaattcagtaatcacgctttgtctgaatgtttcctgtagttttggtgtgtaagaatagtataaatatggagtataagaaaaatgcgttatttatatacttcttttaatgggctttgctgttaaaagtatctcaggaaatcatgctaagccactagttataaaccagtgaattcagaacagaaatctaatttgaccttggattgtggaccatatttatattgcttgttatacttcatgcagattatctcataaatatcccaagaaataaaattattcattgtctgggcaacccgagaccttgatgagtcttgaa

SEQ ID NO: 69142 - DNA, 1141 bp, Homo sapiens
ttctttatttgtgtacaacacctctcacttccatttggactttttctcctcagtatttcgtaaactgatcacttaaggaatagtcaagggacaataattttttatctgtatcttaatataatgtgaaataatattttggaatcgaataggcctagaggctttgtcttacctaaaatttaaaaagtaacagcctcacttgcttcggcagcacatgcactaaaaattggaatgaaacagaagattagcgtggcccctgcacaaggatggcacgcaaattcatgaagtgttccatattaaaaaaaaaaaagtagcagtcatttcttctttaatccatttcacatatgctcattatgcatagtgaaatggagagagttttcttttcttaaaacatgttaaatctagcacttaatataatttgccagttagtgcctatacacaaccatctgaactgctctatgttttttaagaaaataattaaagatttctaattccttttcaaggcgggatccacagcaccattgtttactgaccagccagaggaacctgagtcaaacacaacacatgggatagaattatttgaagatagtcagctaaccactcgctctaaagcaatagcatcaaaaaccaaagagattgaacaggtgagagtctagttgtcttcatgtacataatttttgtttgtgttgctttgcacatgtaaacatttattgaataaatatgcttcatttctttttccacctgtaactctaaaactacaacttaaaaaattataaaaattgtttgagttgacttcacagtcagtttgatcagtatggtcccccacctggattgtttatttttaaataaaaaacagacttcttttttacagaatattaatattctagttagtatgaagcaattaaaaattattaaagttaatagggatgggatggaagaaatgttcaatgtagcaaaatgttagcaaatgttatttttgaatattgggattacagatgtttcttatgttttttcattatactttaaggtagtttccaaatattaaaggaaaaataaaggatactatttaagtctagttttttagtgaagtcattctgaaaagcaggactttgtttttaatgtgcaactattatggggttatttt

SEQ ID NO: 69143 - DNA, 1058 bp, Homo sapiens
ttgtaagtgttgtagctgtggccattttctcttcttacagtgtctcatttcagctactactcattgtctgatgattcccaacactcactagctcttgctgtttctcatatataatctgtttttgttttacatttaaagaggctagaagtaaagattagtgaaatgtacagtcttgaaaatgttaactagagttgtggacatggaaaataatcagcttttagcatatgatgcattccaatgaaattgttttcaaagtagtggcagctgtatctattgttgtaggttcaagatctaagcatttcatagtaaccttacataatagaaacattctttgtttttcctttttatcagagcaagtaaccaatgttctttaaagtgcagctctcaccactatcttgtctagacatcaagtctaccctactgtatttaacaatccattattaccaaccacttgttcagattttacatacatacagttagtaaaatatactcacataagatgtacctctgaaagtctggattcccaaaacaacttgaaaagagatgatttattttgaccaaatttcaaagagtttgaaagttacaatttaccagattctggtcatgctgttactgcagaagcttgttgaagtaaaagtataaagtttttattttaagagaatctaaaagctatctctataagataatttgtatcatatttaaaaggaagcatctcttaaaggtaatttagttattttgtacctgatatctctttaagtgggaagcttgatgaatctgttaagatgttatatttacatcaaatataaaatctagatagtacagataccaagtcttattagaaccatacttaaaatgatatgagtaccttaagggatgaggccatcttgcaccttatccttggggatgttaccactgaaacaaaaaatacccagttataaagcagttccagtaaaggtaatccccatggcataaacccaagtataagcttcattttcttacctcttctcctcatccactctctaccagtgttaggtaaggattttacctagtggttccaa

SEQ ID NO: 69144 - DNA, 1054 bp, Homo sapiens
agaaattaaggtagtatggaaaaggatgggattatatagattgtattttactgaaatttgtagatttatattttactgaattttgaaggtagaataaagataatagatagcaatgcagtatcattttatgagataggtggatcagagccagatggttgaaaaatttgaaagccagaaaaaaagtgtttgaattctatgatgggcttgtggatgaattttgaatacatgagtattatgattaagatgtttgttggaggattagattggctatacagaaatgtttggctactttttgagggagggataatgagagcctaagttaaattggtagagtctgaaatgcagaagaataagtgcatgagagtttgtggcaggcaagtaagtaaaacttagcgaccgatttgtctgttcatctgtttacttttgggcacttgtgaaagaagaagggtagaatgagagactgaagaggaaaaacagaataactgataaagcaagaggggctatcagtagcacagatataggaactaatcttgaaaattcggagaaacacttttctgagataggaggaaaggaaaataaaggacaacatttttgaggtggataggagatgagtttgggaaagaggcagttttgctaagagtagggggaaatgggatagggaggagggggagtcctatcagcagttggatttcctgaattgggcgtgcaaagggcttagaataccccatatgttacatgttggtatggaagtcaacaagagagactaaggagttaatagtggatcaaataattgcagttttggactttttccaacaattcacagcctcctttaagtaagcgtagaaaggcaaaccggattatttatccataattgaccaagtaaaaacacttcaaatgttattaaataaaagttgccccctgataaggtggtgaagatgatgattttatagaaaaaaaaaatgacgcaaacttagtctcttttactttttaactcagtgtttatttgccaagaagttcgaccagttctgagtaactagattattgggacatttca

SEQ ID NO: 69145 - DNA, 1045 bp, Homo sapiens
cccttttaaaaatactacaataatttagcagttaatttttacaaatgatttagtgtttttcagaaaataagtcaaaccataaataataatttctggacttttaaatactacaacacaaataacactaaaccctcagagagcaaagccacattttgatgtttatgctttttattgtgataggacactgaaaatgtgtatgaggagaagaatggtttaatgcctttttccaggatgtgtttatatgaaaaatttctgtctatgttgtatctacatgagcacatggtaattttccatgaagtaaggttaaaggggaaatgacagcgtactgtttcttttggctcttgtgctaagttggtcagccttctgactcttatctgaaccaatcaaatgttcagcactgctaaaacaaagatttttatttctggctttccctgttattctttcctaaaattgacgagtcattccagttttagtgattttactaaccaaaaaagttacaatgttgtaaactaatagttcaaatttaaaaaatcaattttaataaacatgctacgtactgaaaatatgtatggcaaggttcatttgatttttaaggatttcagtagaatttcttagttataacactaccatttttgcccttgtaatttctaataaatagaaatactgagttgtgttccttaatactggcttaccccaaattatttgcaaacaaaacattaatttgactggattcctacctcaaatccttggctgtaggtaaattctatttcaaaaagacttcttgaaaacaagattgatatcttcatttactaaaatttaatagcactgtgcttagtaactaacacccggtatttaccttgagcataaagtggaagtagcaatatgactagttgatgtaataatgacagcatggttctaacattagtatgttcatttttgtgcacagtattattctaagtatttctctgattcttggaaggaacttaatatcatttgagaagtcagtagcagtttatatttgtattgccaactggacaaatcaaga

SEQ ID NO: 69146 - DNA, 1050 bp, Homo sapiens
atgaccagaaatgaagagatcactaagcattcagaatgcacaaaacaacttgcagcagcttttcctgaggaatttgttgtgagagaaaatttaatgggtgtggcaataggaacacatggtagtaacattcagcaagctaggaaggttcctggagttaccgcattgagctagatgaagacactggaacatttagaatctatagagagtgctggtgctgtaaaaaaggctagaggtttcttggaatttgtggaggattttattcaggtttctaagaatctcactggaaaagtaattggaaaaaatggcaaagttattcaagaaatagtggacaaatctgatatggttccggtgagaattgaaggggacagtgaaaataaactacccagagaagacagtatgattccatttgtatttgttggcactaaagaaaccattggaaatgtgcaagttcttttagagtaccatattgcttatctaaaggaagtagaacagctaagaatggaatgcctacagattaatgagcagccataacagattggttctaggtctcatagtggaagaggcagaggttgtcagggccctaattacacctccagttatggtacaaattctaagctgtctaacccctctgaaatagaatctgagggtaaagacaagctgagtgattggtcattgaagaagatgatcgagacagccgacatcagcgtgacagcaggagatgcccaggaggaagatgcagaagtgtttcagggggtcgaggtcgtggtggaccacgtggtggcaaatcctccatcagttctgtgcccaaagatccagacagcaatccatacagcgtacttgataatcagaatcagatcagactgcagacactgatgccagcaaatctcatcacagtactaatcgtcatacgaggtctcgtagacgaaggactgatgaagatgctgttctgatggatggaatgactgaatctgatacagcttcagttattgaaaatgggctaggcaaaatatgtgattgaagagcatggtccttcagaaaaggcaataaata

SEQ ID NO: 69147 - DNA, 1096 bp, Homo sapiens
ttttagcatgtccttaatttataattggttttgcagttgcttccttttgtggttgtaataatttcactcacatattgaatgtaggcactatagctctgatccatgtgttcataatgcatttcttagcaaccaccagtgttctttttaggagctgtgtttttaagaggcattggggctgcagctttgaggaggactcaaaagatatctttttctattaatacagcacaagcagcaacatagattacaatagttttgacaccttctgcattactatagaccaaaattaaagggtttaaatttatctccagtatttaatatcaatgtgttatcgcttttttcctggcctcatcaacacattaaacattatgaatggttccttgtatattacgccccaattggagtttcttttttttaacttatttttatatacctttcattaaaagttgtagaacattttacagatgctaattatatttcacaatgctcctttaaaagttgtaagcttttattttccactttaatggtaaaatagttgcaaatatgtatttaatttactagatcaccacttaaccatgacaactttcccttctttttactcctcagtcctccatgacaactctgctaaatagaattgtctgcagtgatgaaaatgttttatatcctcatgtccagtatggcagccactagcgtttgaaatagagctagtgtgactgggaaacagaattaattctatttcactaattaaaaataaaatatagtcacatatggctagtggctactgtattggacagcacagctctccagtctccaccatcccaacaaactgctattgtggtttacctgctaattgccaaatccagtcaatatgtttctttgatctttctctggcatttgattgactgtgtccttattttataaactctttctttggcatctgtgccttcactgtctcttgattcttaatttttctgcggatgatatcgatggttttagatgtctgcacttggctcttacattgtcttaaagcacactttagctattcattcaacatttactgggtatcagttttgtggtgctaggaagaacttactccctc

SEQ ID NO: 69148 - DNA, 1694 bp, Homo sapiens
gatccacccgcttccacttcccaaattgctaagctaacaggtgtgagacaccgcacccggccactaaacagaatttgttatctgatcatgattcaaacaaagaatctaaagttaggggctcagaaacttttttcttccaacaaataaatgaacaaagtcattgatatgtcttccctagcctttgttcttattctcatctctagtctgatgtcctttgagtagactgccttacactgacaaatgccatgccaaacttctatattcagtaatgtagtttgttaatgttttccttctcattcaggtattgtcagcagatctcatggatagaggtttaaatggcctctggtaatagtgacaatgcaagggcgagaaaggttccgctttcttttttgtgtctctcttttagatgtcagcatcataattctgccaactcagttagctaagtatttggctagttattttcattctcagctaaccagaatgtgttttaccttttaggtttaccgacaagactgtgaaactttcgggatggtggtgaaaatgctgattgaaaaagatccttcattagaaaagtctatacagtttgcattgaggcagaatttacatgaaataggtgagcggtgtgttgaagaactcaagcatttcattgcagagtatgatacttccactcaagattttggagagcctttttagatttttctgctcaggctaaaaaaaaaaaaaaacagtttctaaaaattttttttcctggattgtgtaaatccttaatatatggaatttttgtgatgcagagaaatactttatgatagttgacaacatttcagtattaaataaacatctaaaatagtctgtttaaaatgtttgattcaaatttttgtattttttgtagagatggggttcaccatgttggccaggctagtctctaactcctggcctcaagtgatctgcctgcctcagcctctcaaagtgttgagattacaggcgtgagccaccgctccctgcccaacacatataccatctgaaaatgttagaattctgagttgtgattttattgacttgttgcttgctttttcttaggctttgtaacttgtaatatgttaaagtgtactatcctaataaactgaatactttggtatcttagagaatatttgctttgagagtaattctcattcaatgataaaatagagcacttaaatctctgagagatacctcagaaaaaaatccgtttttccaagtaatgaactcagtgtcttctattacaataatcctgaaactcctgactctctcactgatgtatgagtcttaaataatatcatatacaagactaataaatagaagatgcagtttgaggtggaaggtgagggatattttaagtttcggactgtaggaaatcagtcagggtggtaggagaagctataaggaaagacgcaaaccttcttggaaggctgggaggttttgcaaagcttcagagagaataaagctgaaggcagctaattctcttaccccgaggctgagggcgaagagtaggtaacaaggtagtgtaaagaaatttatctagataagtttgtttacatatgtcctccagaaaccaacccttgatcagtgcaagactgctccctgcaaaggggggcgacaatgttcattactcacaaattgtgttggcttcaggcctttggcgttctgtctgtaccgaa

SEQ ID NO: 69149 - DNA, 1109 bp, Homo sapiens
gagaagtagaaagtcccgctccgacaatgccctgaatcttgttacagaaagaaaatactctcccaaggacagactgcggctgtacacccccgataactatgagaaatttatacagaataaaagtgcccgggagatccaagcatacatccagaatgctgatctctacggacagtacgcccatgccacttccgattatggcctgcagaacccaggaatgaatcggtttctgggactctacggcgaggatgatgattcctggtgttcttcctcctcctcctcttccgactcggaagaagaaggatattttcttggacaaccaatccctcaaccccggccacagagatttgcctactatacagatgacctttctagtccaccatctgcacttcccacccctcagtttggtcagaggacaacaaaatccaagaagaaaaagggacacaagggcaaaaattgtattatttcttaaccaagtagtgatgcagagcatttgtttaaaacttagccattaaccgtctgaatcgtttccttttcttccgtaggaaagttgtgaaaatagtttaaagtgctttctttgcccatgtaaatgagaactcaactgctgtttacagtgtcagattaacatttgaaaggtgtgatttctccaatttaccctctttggatggtgccaggtggacgtgacatctcgtgcctgtccggtgcgggtgcgttacagatggacgtagctgctttggttttccagtcctcaagggaatactgaagatgctgactgaaggggattggatgttgattttagaagatggagaactccagccacctttgtaaagcactagtgtttgtcatttatgtaagtcaggtcggctcaggtcttgatagtccgtcttggtgtgaggcatgcctgtcacgatgacctagctaacactgtgcatcttattgtgaggccagcttgtcccctcgaaccctctttggccaggtaaacattgtattgtatcagcgccagctacagattgaaaaaaaaaaacaaaaaacattgctatttataacttagtatttcatagacttaagtgtattcctaatttaacggtgcaaatattaatgtatatactgta

SEQ ID NO: 69150 - DNA, 1109 bp, Homo sapiens
ctatatacacaacatggaagaaccagggattagcgccaaagttggctttgtactgtgtcctttatctctttctaccagacccaacgcagctggctgacatttgacaaacaaaatgctgcctctttatttctctgcctttggcatatttctgattttctattatcctctcctccattaggacattgtagttcagcttgactttagattagaaacagacttgtacaggtatagtatacttatgagggcctgagaagaataatgtctgagaatcattcattcacttaactcatgtttattaaatttgtctgctatgtgccaggcatcattctaggtgctgagaatacagtagtgagtccccaaagtccccagcttctaggaaaggagaaagacaacgaacgataaacaaatagacatgtaaatacctggcaatgctaagtgctttgcagacaaatattgcaaatggagggagggtgatattttagttagggagttgaagccttctctgtagagatgaccttagagcaaagaccaggatggagcgagggaaccaagccctgtgaatttttgggcttcctttctcaactggcccctaaagtgtgatctgcaagcatgaatattccacctggctgaaacaaaaggatgctggttgggggccttgctctccattctgcataagttcacccttgacaataacaacccctttcagaccagactaaagtctgtttcattgagattgaacctttgtaggaagcttgcaactgtctccacactgcttcatcactaaaaacgcttacaatgggtaataaaccatgacagtacctgttgaaaatataacaaaacgtatttacaagtaactgcgttagaggaagcacatttacaatggctgacatttaatagtgataagtgctgctatagtttgtagttggaagtattttgttgcctaatgtagctgtcctttaaaagctattccaaaaagggtctgcctggcttaatgtattcacctgctgatactccctttatcataatcatatgatatttcagagtttgatttaaatcaataattgattgcgcatttctcctataggtaggtagctgaaatcttccctgag

SEQ ID NO: 69151 - DNA, 1136 bp, Homo sapiens
caatgtactcagctgtctttaattggaactagagtttgtgttaagtaaaaatgtttggtcttcagcagaaagtagattgtctttacaagcccatgtgatacgagttctaatagtctcctattatttgagctcatctgcaataaatttttgtttggggacatattgttagaattgcccagatatgctgctagaaagaatattaattctattgcttttttttcatttgttgaaactgaaagattttagtaaaaaaaaaaaaagaaaattaatgaaaaatgtattatagtgctatgagttgagctataatcaattttgtctgaaaagtttgttaatggctgcattacttcattgccttcaggatatcatgtgagatacgttcagtagaatgcgttacacacaaactaacaactgaaccatgctcatggtctctcttttgttcagcataatctgcatttaagtggaagaggtgatggttgggttgctgaactcatccaagagtgctgtctttgactaagtgcttagtacgtactgatactggtaatgcctaataggcaacagagcaactattatataaagatcttcaaatacaggctagttttgttgtatttggacaataaaatgattttgtatctatagaaattaagatggtacaatgaactgcttcagaaagctcagggtgtcatttgtctgattatctccagggttggtgtgtgtgttggagggtcccctatgttttggcctttgtgctgtataactctttggtccgaaaggccagcaaagccaaaatattgtcattgagctcccctaaatgagactgacaatcattgcttcatttctggctgaaataatatggtattaaaaatttctaggccgtggatgggcacggtggctcatgcctgtaatcccagccctttgggaggccaaggcaggtggatcacttgaggtcaggagtccgagaccagcctggccaacatggtgaaaactcatctctactaaaaaaaataaaaataagaataaaaaactacaaaaattagccaggcatggtggcaggcccttgtaattccagctaattgggagactgaggcaggagaatcgcttgaacccgggaggcagaggttgcagtgagccaagatcag

SEQ ID NO: 69152 - DNA, 1049 bp, Homo sapiens
tttctttgccctataatacgacatttgggagactattttgttggcagtttcaaagaaaggataaactgatagagaatacccttatgcaagtcaccctttctcttccagtaaataaactaatgtttccagtgaatttcttcaaacttcttggttttaaccaaatgatattgcttcttcttttcctcattttaaagttcagtcatttactcaacagattttttctttctttcttttaagataaggtctcgctctgttgcccaggctggagtgcagtggcgcgatcatggctcactgcagcctcgacctcctggactcaagcgattctcccaccttggcctcctgagtagctgggaccacaggcatgtgccactatactcaacagatttttgtttgggtgagctgctgtgtgccaggttggaggacagaaggagaaaaatattttgtccctgatttcaaggggcttgcaatgtgggtgcaaagtctgaccttgtgaacaatagcaatactgtgaggtacatggacagtggagcatttcagcatgtgcaaaggtgtcaaacaagaatcagagcagagatgctacttgagcttgggctagaaggatgagtggaagtttcccaagttgttagtatagtaaagagggaagagtgtgtgcaagacagggaggcccccaaagcaggttaagctcaaggacctcttaggtaattagatgttgccagaatgcaaatttcaagggaagcatgttggaagctcaagtcagactgataggctggggccagataatgatgccctttggagctttgctaagaagttcagattttatcctgtagatgatactctatgtggcagcagtgtggtgtatggatagattagaggaggtggaaacggactggagagataagtgagccatctattacacaagctagggaagagagggaagggtctatggggacttgtaggtttgggtttaggcaattgttgggaggaggcttgtgcattctagagatagggaatgtgtggtgcctttgagtcatcgaggtggagatgtcagt

SEQ ID NO: 69153 - DNA, 1026 bp, Homo sapiens
tttgccttgcttttcttgaaagtttacttgtccattagcacagtgccacctaacatcacgctgggacattgatttcgaattgattcacaaagaagtgccgggggtcacttagtgactatctagtcaatagcaggtgtcctctgcagatctttcatttcagagtctgtgctgtttagctgatgacacaatctttcagctttaccatcccgagcagaatttcccaatgccacaatgctcatcttaaacatgaagactggtgaagtgatatgttgccattattgatgcatctgttccagagattatgtcaccacaaaggagttaattggtcttgttttgagggtcatgtttaattgcataggtcagcaaaggaagataaatgactacttctttaagtctgtgcctcactttttctctaagacagctgaaacagtacaatcgatttccttatcgccacagctggcaccataagaatgacatacaagctgaaaaagattactggtatataaaaacctgagttaatgagtccagatagttaaatatagaatatgcttaaaccgacttgctcacagaaatcttcccacatccaacaggaagaaaggaggcactagatggcagtcttcaacaaacttgaaatgacatttcctcttaaaagaaatgcattacttaaaagcagtcatgtctgttctgaatgaatttaggcttgagctctgcatcataaaaattgcaactctacgggcattatgtactttaatgtcacattatcgaattttgtttttaaatgtaaaatgattccatatatactttaaaggtccattgctaaattaattactgagttattttaatacctgttttaactttacattttaagatgccatcagagagcttgtttcaggatgtaacagctagggaaaaatgatggtatatccattaagtgaaaaattatgcagctgtcaaaaaataaagatgtagagataaagtagtatgaaaggatattcaggacatatttaagtggaaaaggcagattat

SEQ ID NO: 69154 - DNA, 1006 bp, Homo sapiens
aaatgcatgctaaatctggaagacttagaatgaaaaaagaacgtaaaatatattattaataattttatattgatatgttcaaatcatattttaaatatttggggctaaacataaaggttattaaaattaatttaacttttttttttaacgtgactactagaaaatataaagttccagatgtggttcacattctgttttcattggatagtgctgttctcaactaggaagctagtggtctaaccattcttttaaaatacttttcaattaattctttattatttcaggcctacccctcacacattcgccctgtcagaggaacctggtgttttccattcctgggcctctcttgggttctatgtcatgaatgatttgttgcttatttactttcccactttgcaggcttaggttccaattccttggctctgttaaatagttatttccatctacttttcatattcaaaatttcatttccttgctgttttttttcttttcctttttttcttcttttacgtttatgcgttttcagaatttctcatagtcatttcaaaagatattgagaaaggagcagagataacgtatataatcatgtttagttaactggaagcacaaagttgaactttgataaaacagaaatttgttcatgtcactgactgcttaaactctttactgtctcctcattgcagaaagcataaagttcaaatgactctggtcagttatgaccacttctcttagtttgcttttgctgtagttatcctgcatgcaaaccaccaaatcttaatggcttggaacaataaaggtttatttattgctcatgtcatgttttggctgctaattggctatgggtctactccaacttggtatctgtatccatgttttttttttttatagactttttttattttatttttatttttatttttttgttttttttttttttttagaaatggagtctcactctgttgcccaggctggagtgcagtggtgcgatctcggctcactgcaagct

SEQ ID NO: 69155 - DNA, 1163 bp, Homo sapiens
tttcatttataggggaaaaagagcttttataaatacctttgaggtttgtcttttaccttgtaatttgacttagaaaagcatccacttttaaactcacaggatcaaagtaactccaaaatcataattacaggtgtgctttttttttctccatggtagatgtattttaaaacattgcctgtaaaatgaatatataaattcaactgtaaattcacagctcctattttaaagtgagaaatactgcattgctaacagacctgcttgaaatcaccaatcagctgaccatcccagtcttaacttactgtcaaccccactggggctacctccactcttgccaaaacatgctaccaccagagccaaagtcatcactataggtacagatgacaaacctgtaaatatttgaggctgcacagctataacagtagtaaagatgctggattatgtatttatgctcatgctgaccctacagtgtcagcagctctaaagatgcttttggctctagttctggtagtagtccttttggcacaagagacattggtagcagtcatgttatatgttgtggtgaagcagctttgatagagtgagggctccggtagtgatacttctaacaaactgtaagcttcataaggtcagggcctttgtcctcttatctatatctgcttctctagccaacaaagcaatgagtagatactgaacatttctttattaaacaactgagggaagtagcacaccctggagcaattgctgccttgacttaggcagtggccaacaagaaggtgatctagggtttagaagcagatttcattgcacaggtagcccagatccagagtgggatatgcctctaattaagtaccaggcagaggcattggccatggaagacacccctactgcagtggcaacctctataatggctacaagaagagaatatgaattagcgaatgggatggcactttgatcatgaatcataaatgagcccatgcagagcccattcagagtgcctaacattctccaatcctggaaaattgaggaccaggttgtgactcatgacctcttctagggctgtttatatgattctagatggatctgcctctatggattctggtgatgctaaactttaaaaataataaccatatttggagttggaaatatgcaactgtggccgaaag

SEQ ID NO: 69156 - DNA, 1029 bp, Homo sapiens
tgaaaatcagaacagttataaaattatatttgtttctaaagtttatggtgtgtactcccctaaactactttaaaaatctactcacatcattctttctcatcagatttcaccccggtgggaagagtttcctatttcctattcttggggagagcttatgtgagattactattatttcttaaaaaaaaatacatatatatattatatatatttcttagtaaacttcattttaatgggtctcaaaattctgtgacagatttttggtcaagttgtttccattaaaaagtactaattttaaaaactaatgacttaaaatggccacacacatataaaaaaaaagaaagaaaaagaaaaaagaaaacaacaacaaaaaccaaagtggtccacaaaacattctcctttccttctgaaggttttatgatgcattgttatcattaaccagtcatttactattaaacttaaatggccaattgaaacaaacagttctgagactgttcttccaccactgattaagacttgggtgacaggtattagggataatgttcatttagccttctgagctttctgggtagacttggtgaccttgccagctccagcagccttcttgtccattgcttcgatgacacccacagcaactgtctgtctcatatcacaaacagcaaagcgactcagaggtgggtagactgagaagctctcaacacacatgggcttgccaggaaccatatcaacgatggcagcatcaccagacttcaagaaagtagggccatcttccagctttttaccagaagtgctaccagtctttttcttcagcttagcaaacttgcatgcaatgtgagccatgtggcaatccagtacgggagcacagccagcactgatttggcctggatggttcaggataatcactgagcagtgaagccagctgcttccattggtgggtcgtttttgctgtcaccagcaacgttgccatgatgaacctccttgacagacacattcttgacatcgaagtccacattgtccccaggaagagcttca

SEQ ID NO: 69157 - DNA, 1121 bp, Homo sapiens
agtaagggactttagtaagctgttactaatgttggattcttggctttttttttttttaatagcagggaaagtgaaagtagggccatattatgcttattattttttttaaagctcttcaagtgtagctaggtttaactgaaagtgttgaatatcatcttaatacccatgttcattgcctcagtttgagattagaacaaaagcctttataactggcctttaaataaaagtggctaactatacctgatttaccctttgtttcagaggatgctaaaggcacactttcattgatgcctgaattcaaagtgcgtgagagagcattgttggaggcattgcaccgctttggcatgaccgaggaaggttgtatccaggcatggttctctttaccccattccatgcgcatattctatgttcacgcatataccagcaaaatttggaatgaggcagtatcttacagacttgaaacctatggagcaagagtagtgcagggtgatttggtctgtttggatgaagacattgatgacgagaatttcccaaatagtaaagtaagtatcattccatcagagttttccaagagtagttactataccagaacatgaatttttcaaaagccctgattatagaaacactttaaacatacatgtaatttatttatctatttgtacttatatttactcatctcctgcttcaagtctgctgtcagtttaggcttaacacatgttggtaaatggaaagataaaaatagtggtatggagtgaaagatatataggtagtaaagcttcctttaaaaaacccattttaaaaaagattacacaaataatgcacaaaacagcccataaaaataaaaatcaaggccaggcgtggtggctcacacctgtaatcccagcactttgggaagctgaggtgggcggatcacgaggtcaggagtttgagaccagcctgaccaacatggtgaagccccatctctactaaaatacaaaaattagccaggtgtggtagcgcacgcctgtaatcccagctactcaggaggctgaggcaggagaatctcttgaacctgggaggcggaggtcacagtgagccgagatcgtgccatggcgctccaggcagggtaacagaacgagact

SEQ ID NO: 69158 - DNA, 1090 bp, Homo sapiens
attctttaggtgttgggaagaattgaaagtttgagtaaggaagtggtcagagcagaatttcaggaaaatcctctggtgctagtgatttttcttggtaatgttgggtaaagagactgagaaggaaaggagcagagttggggacaggaagatcaggagaactgctaggagcttctgtcactcgagctaaggagaagtcagaaggcctacactggaagagtgataacattagtaatatatgttcaagtttttaaaatagttctgttaatgcaatcctataataatgggtattaagcacacatttggtgaaataacattaactttagaatattcttaaaaaattgtattagtattctcatataaggggttgcttggcaactgccacttaaaaccttattttaaagtaatttttaaatgtaaaatttaactgagtttatatgatttattacttacaggttgaaaaatattgaaaaagaaattgaaaagaaaagaatgaatgtctttaatattcggtctgtagatgattccctgagacttggtcagctcaaaggaaatcactttgatattgtcattagaaatttaaaaaaacaaataaatgattctgcaaacctgagggagagaattatggaagcaatagaaaatgttaaggtaagaaaacttaattttaaaaggcatccagggaaatcttcattgtctctttctctacactgaggcaagaggggaaacttctttttcttttgtacctttttatgggatttttaaaagtgattaattattttctaaagtgataattagggccatttggcttatattttattttcagcttaatacatttttgtatttaaacaaaacaaaatatgtaaacatgattttaaaaatgcaggatatggtgtcctccagagaagaggggacaatctacattcataagagagattttttttaagcatctgctatatagagtagtatttagtcaggggaatttattgtttggaaattttgatgtatacacattataaatcacacacactgtattagtccattctcacactgctagtaaggacatacctgagactggttgatttatgaaggaaag

SEQ ID NO: 69159 - DNA, 2147 bp, Homo sapiens
tcaagtgacccaagtgatgaaagggtcatgagtaaatgttccttgaataaatagtgtatcatagcaacttgagaatgtagtggtggcttctacttttaaacattatttaaactggagcactaagaaagaaccaagaaggaagtgaatgtagctgattatatattcaagtaactcatttagccccttcccccaaaagaagaaagtgaaactgtttacatatggtccttgattctgccttactggaaagggtattatttgtgagcattcatatacctgaaaaccagcttgttgcttgtattaggttttgaatgttgtgcttctaattttatcttttacagatcgagatagacaatggggatgagttgactgcagacttcctttatgaagaagtacatcccaagcagcatgcacacaagcaaagttttgcaaaaccaaaaggtcctgcaggaaaaagaggaattcgaagactaattaggggcccagcggaaactgaagctactactgattaaagtcatcacattaaacattgtaatactagttttttaaaagtccagcttttagtacaggagaactgaaatcattccatgttgatataaagtagggaaaaaaattgtactttttggaaaatagcacttttcacttctgtgtgtttttaaaattaatgttatagaagactcatgatttctatttttgagttaaagctagaaaagggttcaacataatgtttaattttgtcacactgttttcatagcgttgattccacacttcaaatacttcttaaaattttatacagttgggccagttctagaaagtctgatgtctcaaagggtaaacttactactttcttgtgggacagaaagaccttaaaatattcatattacttaatgaatatgttaaggaccaggctagagtattttctaagctggaaacttagtgtgccttggaaaaggccgcaagttgcttactccgagtagctgtgctagctctgtcagactgtaggatcatgtctgcaacttttagaaatagtgctttatattgcagcagtcttttatatttgacttttttttaatagcattaaaattgcagatcagctcactctgaaactttaagggtaccagatattttctatactgcaggatttctgatgacattgaaagactttaaacagccttagtaaattatctttctaatgctctgtgaggccaaacatttatgttcagattgaaatttaaattaatatcattcaaaaggaaacaaaaaatgttgagttttaaaaatcaggattgacttttttctccaaaaccatacatttatgggcaaattgtgttctttatcacttccgagcaaatactcagatttaaaattactttaaagtcctggtacttaacaggctaacgtagataaacaccttaataatctcagttaatactgtatttcaaaacacatttaactgttttctaatgctttgcattatcagttacaacctagagagattttgagcctcatatttctttgatacttgaaatagagggagctagaacacttaatgtttaatctgttaaacctgctgcaagagccataactttgaggcattttctaaatgaactgtggggatccaggatttgtaatttcttgatctaaactttatgctgcataaatcacttatcggaaatgcacatttcatagtgtgaagcactcatttctaaaccttattatctaaggtaatatatgcacctttcagaaatttgtgttcgagtaagtaaagcatattagaataattgtgggttgacagatttttaaaatagaatttagagtatttggggttttgtttgtttacaaataatcagactataatatttaaacatgcaaaataactgacaataatgttgcacttgtttactaaagatataagttgttccatgggtgtacacgtagacagacacacatacacccaaattattgcattaagaatcctggagcagaccatagctgaagctgttattttcagtcaggaagactacctgtcatgaaggtataaaataatttagaagtgaatgtttttctgtaccatctatgtgcaattatactctaaattccactacactacattaaagtaaatggacattccagaatatagatgtgattat

SEQ ID NO: 69160 - DNA, 1050 bp, Homo sapiens
ttatagaggttgggttttcttatgtttgccataggatactgctaactgctaaacttgtaaattaaatctgtcatacttaggtacagactgacgtgggtgtggacactaagcatcaaacactacaaggagtagcatttcccatttctcgagaagcctttcaggctttggaaaaattgaataatagacagctcaactatgtgcagttggtaagagatgtataatgattattaagtggctgctctttttggtagtttatgactcatatagggtttattattaatggattttacattttaaatagctttctgatttctaaaattcattttgtaaatgttcattgtgaaaaagtcaaaccatccagaactaagttcctcctttatctcttggtctttttattatatgttttaacttaatttccttatatctggttttaatgaacatattttgtttcttattggcaggaaatagatataaaaaatgaaattataattttggccaacacaacaaatacagaactgaaagatttgccaaagaggattcccaaggattcagctcgttaccatttctttctgtataaacattcccatgaaggagactatttagagtccataggtatatgatacattgtttttaacacattactttcagtttgtttattggtgtatcagccctatattcttacttatttcttgcccagagggcttagctgtagttttatgaagtttctgtacttgtttttatgaagtttatatatgtagttttatgaagtttatgtattgatatgctaattatatttgttattatttgaacttacagtttttatttattcaatgcctggatacacatgcagtataagagagcggatgctgtattctagctgcaagagccgtctgctagaaattgtagaaagacaactacaaatggatgtaattagaaaggtagcccacctattttaaaatcttcagtttttgctaaatttttcttttcatttctatgtagtttatgatgtactgtgatttataaatgaaaatatttatttttcttgttatc

SEQ ID NO: 69161 - DNA, 1327 bp, Homo sapiens
gagtttacataaactgcatgataccatcttactctgtatctttcctttttctgaaaatgttccatttgcaattagttttgatagctcaataattcattttaaatctgaacagaatgttatatgactatgccacacattatttttgcattgtcttattgatgaacattgaggctataacttcactgttactgtatagtgctgcagtgaacacctttgtatttatgtataagagattctgtatgcatagtagattaacagttttacttgattctgctgaataccatttcaaagtggctataccagtgtatacatctaggcaaatgtttaaatctgtagcattatggccaaataaaaaggagttaaacatggttttatttaatatttcttactgtacaattcattgttaatgtcagaaattatacttttgaatggtagtttaaatatattttgttgataacttaagctcagacattttggaaaatagaaatgtaatgactgttataggtcattacattatttgaccattcagttcaactgttatgatcatttttatatgtttctttcttaggctgtgtatattttaaacattttaaccatgttcataaaaagttaacagtttttataatactctatgtcataattactttctatgttaccacatttttcttttcaactttttgatgtgaataatagtaactgggaaatgactatatatttatttttctagtcttcatcacactaccacttgatatctcaaaccatttacctatctttctaaaaataatttttcatagagcaacttgtgattggatcatatagtcagccttcagattcctgggataaggattatgattcctttgttttacccctgttggaggacaaacaaccatgctatatattattcaggttagattctcagaatgcccagggatatgaatggatattcattgcatggtctccagatcattctcatgtaagtaacttttttatagtttgtttaacattaaatgctagaaaaatgtttttgaaatttctaggtcaaataaaggttaaaaaacaataattatttcccatagaagggaatgatcatgaggaaaatccttggattgataacggagaatcaggaataatgtgcttagattcgggagttttgcccttgaaatcaaaataattattactgatttaagatttaaaaatttgtggcaatggcaattttttctttcttttttaaggcagaatctcactctgtcacccagaccagcttgctgtggtgcagtttcggctcactgcaacctctgcctcccaggctcaagtgattttcccacct

SEQ ID NO: 69162 - DNA, 1053 bp, Homo sapiens
ttaatatgaagcaagttcaaatcttacggtaacttggattcctcatattttgtgcaggtccctatgggcccctaatttcattctgaattatgtgactatcagggaaacagaaagatgttttttgatgtgacttcttcctcttttactttttgtgtctcagtttctgcaccacagtccatttctaatgtcagtgcttccatctctggaatggaaatcactaaacaggtgattatcaaaaaaaaaaaatagttacttgtgaattattcaattaagtttgtttttaaatataaacaaaggatatcaaactcccattttctccatttgattgcaacctttgccacagaaatgatcatttccctttcttgttttgggaaagttctgagaatataacaaactacaaattgattctttaaaaataattctgtaaacagggaatctggttgagtgggagaatcttttaaatcaggcagatttgaatttgaacaattattgttataggtactcagtcataaatgaatatattaaaatattccagtggcctaatttcttaaatatctgaaaatattttgctttggaaaagtaacttgttctttcacaaactggaagtaaatctaatttgttttctattttctgcttatataaaaaataccagaatagtttgtaaaatatgcatttgtttacatacaacattcaataggaatatatgtatattgtaaaacagcatattttaaaaatactgagctaaaatttttaatgccatcacttcctaagtgactagttaaggaactaaaatggaaaagttaatctaactagcatctctacggaaggaaaatggcactacttcctaagttattattttctggttttacttttttgttttgtgaaaatttttaaataaggaaaattccaaagactaaaattgtatcataaatacctatatctcccctttattaataactgctaacattttatcttatttacttcaagcattttagaaaattcagtgtttttctggtataagagcatcccctttaaacaattttgcttctgacc

SEQ ID NO: 69163 - DNA, 1046 bp, Homo sapiens
agtcagaccttatggttgtcttcccttgttccataaaaatcactattattctgttctttttcaaggtgcactaatttcatattgttcaaacacacatgtttcacaatcaatttgtacagttaacgcaatgatcacagtggtcctgaggtgacatacatcctcagcttacgaagataacaggattaagagattaaagacgggcataagaattataaaagtattatttgagaactgataaatgtccatattaagatgaaatctttacaatttatgttcctctgccgcagctttagcccgtccctctgttcggagtccctgacttcctgtaacagtctgggaggagtgggcaggggcctaaagatttggatgaaactcaacagctgagatgggagtaagaaaggggaaaggatttgtgggtgtggtcacatgacatgttgtaacagaagtaaaccattctttagtagtgattcccaagtagggtgtggtctttagagagtgagtcctaaagtggagtggagagatggctcattgacacagagaatatttaggaactcagttggatcatccaccaaacattaaacaagcatcatgtcctacatagtaattatatggatagaagaggataagggtggatagcgaatgggagtgggtcattttccaaaaatggatggagagtgctggggagacaaaacagtagatacctgttacaagcaatggctggatgtatttggatcccattcaagaaattttctcagcataggaagctaaggcaaatttagaccaaaatatccagtttggagaaaagtcatctgtctatattgaagattgattgagaatcacaccattaagctaatggtattaattataaacaggacatttggttttgtaattgcaacattttgttaaattattctgttgcaaacttttatctcttatactaaaatcacatttcagttatggcttagattttaattctcctggtggtataagtaatcagccctgaaaaagcactttcgatttcaagtgatttattgagtacaaattat

SEQ ID NO: 69164 - DNA, 1470 bp, Homo sapiens
tgagtgggatgagagcttgggcttttatacagttgagagttgagatcagtcagctgacaatcttcccagcagcttggaaaatcagtcatttggtcttaaaaggggtatttgggaagtgccacccagtattcatgacatgttctataatatgtaactcataaaaaggagagaagtgacatttaatgtaggaatatagatttatttttagtgttctctttttgaagcagttataaaataaatagaaatttaatttttggtattttcctttcaaatgttaacaattctttttgcaacttctgggttaggttgacatcgtactttggtctggactgtaagaccgttagtgaaaatctgtcaataaatctcaccccatgcagtgtaaaagtaccttttctctcttcattcaaatgagaatcgtttagatgtcctgtcattctagatgggttttgaagacaaaagtagcatctttctttttcatcagattttagggctagagaaagaatttatccaagggatattttctcttcttttttgtttttttttgtttttgtttttgagacggagttttgctcgtcacccaggctggagtgtagtggtgcaatctcggctcactgcaacctccgcctcctgggttcaagggattctcctgtctcagcctcccgagtaactgggattacaggcatccgccaccacacccggctagtttttgtattttcagtagagacggggtttcaccatcttggccaggctggtcttgaactcctgacctcgtgatccaccagcctcagcctcccaaagtgctgggattacaggtgtgagccactgcgcccagccccaagggatattttcttatgaatacttttaaagaagacattgatttgtctcagttcacttagatgtcatgttatatatattctaaaagtattttaaaaattcatctgacttttttttttctaaagaggaaatctcggcagaaaaacagtacttatttttgttactttcttattgattcctaatgatttccccagaggtggtcatgcatgtggagggccatcctcctccacacccactagcttcttactttactgacagatatgatacaatcatctttgatgtgtctcaattctattcctccacatttcaggatttatctacttttaaaataatggcccttccttttcccttaccatttgacgagtatttgttgagtgcataccatgtgttaggtattcttcaaggtgcatggaatatgccagtgaacaaaacacacagaagtacctgtcctcattgagcttacagtcttaacttttccagattctgtttctgttcttaaggcatcttctaacatttcttttgggaaatacctcttgaatttttttttttttttttttttttgagatggagtctcaccctgtcacccaggctggagtgcagtggcgtgatctcagctcactgcaagctccgcctccc

SEQ ID NO: 69165 - DNA, 1024 bp, Homo sapiens
gacatttgggaagacgcaacatttgagttcagtctatagcaccttgtacagggtaggcaaccccatgtttttgaacattggattcattgtaacagtcacttctaggttgcctgaaataaacacatttttttttttgtggtccacacttcctatacatgcttttgacattttttctcaggccatggcctttgctggaggctttgttggccatggttatagcatgtgactcctccctcactacagttgactggataggaatgtgcacataatccaaggctggtgaactcaattgctgacccacagcttatcattttatcatattttctaatcagtttgcattaatatgaggaggtttcagtttatggtgggtgtttgccctataatttaatatatttttgtgtcaggcaaccgtattggtctgtgtgcaagaagaggaagctgctcaagagaacaaatagagaagatgagattcatcatataaacttcgagagaatgactagacctagttgcctgagtcaagtgcctataagacaactttttctttctctgtgagattgcctctctgattattaagtaaattctccctcacttgaactatattgagtgttcttttgcaaccccaaatgctttgaataaaacattgccacattcagtcttctcagtctacattttcctcagtctctcaccatattcttaaacttctgccgagagctgctttcttgaaatgtttccttggacttttgtggtactgaattatttcaattcttttcttacctatcagttccatctatactttccttttgtaaccattctttttttttttttttttgagacagagtctcacattgtcacctgggctggggtacaatggcatgatcttggctcactgcaacttccgcctcctgggttcaagtgattctcctgcctcagtctcctgagtagctgggactacaggcatgcaccaccatggcccagctaatttttgtatttttagtagagatggggtttcaccatgttggccagg

SEQ ID NO: 69166 - DNA, 1062 bp, Homo sapiens
atttacttggctctttctgcaaaacttctctagtcatcagaccatagaaagagggcttgattaaattgaatcaagtaactttttctatacccttcagtgatttgactttaagccacagttggaagagaacagtttcctgcctttgtcaggttctggaaagatttatttgtttcactacctatttcttcacttgacacagagtagtggcacgttattgttttttcttggagactgcagtgtctagagaaactctaattgtacttctctagttgaatcccaatattaaagtcttttaagtattttataaaggcttttaagtattataaaggctttagcattttaaaatctgactttattcagaaaacttttccttttataggagaatattaatattatttatttaaaatgaagggatatatagctgggaattatcctttagaaagtatgttttgtaaaggacttgttctatttctgagttcttgtttctttcacatgttttaagaaagtgctgaatgattgattaaataaactttagatcggttaacacctgatagtgagaagactgctccttggaatttctgttttaatttctctttatcctcttgtctaataactatgataggcaaaatttatgatctgtctctctatctcaacttaccttgttccagatgtacatttttgatgtctgttattccagttatcatgtatttaatataatttcctcatttgctacaacatggaaataggcttttttactaaaaattataaagtaattatgtcttctatgtttatattcttaataatattgacatatctgttaataatatgtaatgctaatgaataatttagtttccttagtgatagtttccatgatgttataactaacatccctacctatgaaaatgtagggagctgtctgaagcccaggaaggtcaggaaggtgttaagaaccaggacaatgtatttaacctatcacaatcaaaatgccattcagcctttgccctcaatatttgacagcaaatgaatttgtcattttctcacaaatatcctgccttgagctac

SEQ ID NO: 69167 - DNA, 1044 bp, Homo sapiens
ttaaagaaatatcaatgaaatgggagcatttccaatagaaatttgagctgaaataagttcctgtgtgatggctttatttgcaacttctctctttgagatttttttttgtacttacctaacatgcataaagattgcatattaataaactaggaatcatttgatagaaaacaatgggagggaaatgtccataagttcctacatatctctacatgcaaagaggtcaaacggttgcttgaaattctcaagaatgttttatagattgaatagagattttttttaaagccgttatcttctgtgctcaccaagtaaagtgtgggctagaaagttattttaaagtcattttattgcaagaaaaacagcaggatcctgccaaagcccaaaagccagtaaaattgcaatgaaacattgaaaattacaaggtcaaagctttatattcatatgaaagtaatatttgaaccaaaaaaggtgatatacttttaaaaaaatttggcctattccaaagaaacactgaaaaacaaaatagctgggttatttatcattgtatattttgattgttaccccaaatttaagaaattattagtgaagagcataactttttacatattaattatgatagttattcatttaaaaagtgcttgcaaaaaataattgtggatgattatttcttactgattttattttcaaatgtttgtgtatggaacattgttttggaaggaaagatttagcagcatcactcagcttataattagtgtcagatatgttaataaaaactaatcaagatgttggtaagcaaatgctagaaactgaaaatgaaggtgattaaaagaaagtaatttctgaaacaagctaggattaactgaggatggaatcccaacaggatttctgcttttgttcattggccttgcccgtcactgctaacataatatgtcatgctgaaagaacaaaccttcactgaggggtccagaggacatacttcaagttgaaagttctatgtttgttggttcaacaatgctgagttaattacattttataattctgctatac

SEQ ID NO: 69168 - DNA, 1033 bp, Homo sapiens
tgaagaaaatgactatgaagttattctgttcagttgtcttaacaaagatgaatgtgttttaattaatttttttgtgtaaatgtaaattgttaatgttaaaatgatagaggttaaaaaaatcaactgattacagaaatttttgaaaatacagaaaaatataaagaagaaataaaaatcatctacagttaatgtacttagaagtactcatgattaagtttttgatataaagtatttttcttttccttttgcattctcttttaaatgatagtataactggatataggattagaatttgactattattttccatcagcactttgaagacattactttgttgtcctatggcatctattattgctgatgtctttatgatttttttccttccattactgcttttaagatctccttgtatttgaagttctgcacttcactacagtacatctaaatgtggatttcttttcatttgtcttccttagaacttcgtggtattcctaaattttagaatcaatatctttcagactattggaaaattctcaaccattatctctttaactattacctctcacttctgtaacatcctttctggaatttcaatgagacataaattgaaccatctcatcctattctcagtttctcttaatcattctgtcttatccttcacctttctatttctctgtgcatattgatgttatccacaggtgttttccagttcactaattctcttttcagaactccaaactgaacttctgctgtttaacctaccaattagattttaaatttaaggctatatttttttatttccataagttttattttattcttttttaagtcatattttctcccttctatacagttatgggctaaagggctaaatcatgtccccatctcccaaattctttcgttgaagccccagcccccagtatctcagaatgtgattatatttggctacagggtctttaaagagatgattaaggtaaaatgaggtcatatggataggccccaatccaatatgacttgtgtctttataagaaga

SEQ ID NO: 69169 - DNA, 1091 bp, Homo sapiens
atcaacacctgacggatcctgtgacaatattcctcctgtgtagaaaacatatttatatctggtggccattttcttttctactgaatcctttttttcttattaacactttaggagttgtttaaatgctttgaatattaatctttttttcagtatgtgttgtgaatgttttctgcaaattgtggccatttcaaacacatgtaaaagtagatagaatagtggtacccactgctcagctacaacagtatccatttcatcaattcatggttactcttatttcatcaaacaggtactcacaattcaccacctccctgccaagcaaatgccagacatcatataattttactgtggcttgtttttcatttcttcagtgtttcttttgataaacaaaagtttgtaattttaatgcagttgaattcctaagtttctttcctctatggattgtgtgtttcttatttaagaaattcttctgcaaaagattgtggagatatttcctaagtttttgtctaactgttttaaagctttacctagacactagttataatagcctttccccattctttcacagatttcttatgctatctctggcatatcaattttacaaatctgtgagatctgtttctgggctctgtactcctgctaataccatattttattaatcactatacccttatagtaaattaatactatatattattgtatctatagtattcttatatattattgtatatataactatattaataattattagggcaggagttcccaactttgctcttcagaaactttgacaattcttgggcttttgttctttcatgtaaattttggaattagatgatgaagttctaccaaaaacttttgagattttgactggcaatccatgtatagataaatttgtgataaagttacagattttatgaaatgcaaaagtataacacattcacagattaaaattccccaaatttgaaatattttggggttttaatctgtgaatgcgttatacttttcaatttatttagctttattcctctttttatttaggtttttaattggctttttccttctcaatgaaatctttaccatccagactattt

SEQ ID NO: 69170 - DNA, 1034 bp, Homo sapiens
ctcaactgttcatttagccttactcatggacagtgatggttgaagtccagcttcctgtttgatcttttaattcctagccttgtgtctctggtcatgaattccactcacctacccctcccttcaggtccccacagtccagggacttagtcttggactgctgggacctaaagggtctttgaatccaggcctttgcagtcttctcatcacctttgcatcctcttagtgaatgcaggaacttctgggtcatctgcaggactttgtggcattggcagagagaaaaggagggcatccagagctttctcagtctcctgtgcctacctatatccatttacaaatgccctagactgtgataatcattcttttataggaaagacctgccatctcccttgggctacagtcagagaagccctgatgcaccttgagtgccttcatgtgaatcttgtcacttctacatatcaccactccctccttaaagtagatgctggtggtataggggaataagatccttgctgtctggctttctcactcttctatccctcttttgctgcctctaggtggaagggaagatttcctccattttcatgggcaggagtttcttttacattgtgtccatcctgcctattctctccacctctgtggtcaggtcagtcaggcctcttgatatagtagctctgagatgttagaaattaggaactaccaaggaataatgtattggcttaatagttccaaaacagaatccccattacatctctatagcaagtagtgctataatgccacaaactaggctttctagcaatataaatctttccagaatgctacattctctaaatcacatgttttggtggttatagatccaggaaggtgttgaaactatttaatagtaagtgtgaaccctgataaaaaagtcataaaccaagaattcaaaaacttttcctttttttttttttttagtgctagtcttcttcttttaacttttattttaagttgaggggtacaagtgcaggtttgttacataggtaaatttgtgtcatggg

SEQ ID NO: 69171 - DNA, 1033 bp, Homo sapiens
agctattagaaataatgtcttcaggatcattcttgcatacatgtctcttggatgatgggtatccccataactctagaatatgtatattcaggagtaaaggagagatacatattttcaccttcactagataatctctacagctttctggaatatcactttacacccccacaattagtgtatgaaagttatctttgttctacccgtttccttcacctaatgtttatagacttacattttagccaatccggtggttgttcagtaacatctcattatggcttcaatttgtattcccctgattattgtattgaccattaaaaatctttgtttctgaagtgcctgttcaagtttcttgcccatgtttccattggtttatatgtattttcataatagaagagtttttaaatattttctgcatgctaattccttgtcagttgtatatggtgctcatttggtacctggtctttttactcttcttatgggttaaagcataaactttgatgcaaaattgtctgattcaaataatggctctatctcccttaacaatttgaactttggtaagtcattaaacttctccatgcctcttctgtaaaaatgagaatagtagtagtcctacctcacatggttgttgcttaacctatataaagcagtaaaaagagtgcctgaaacctaggaagtattatgtaaataaacatttgctgttctttatttttattttttgatcatgatttcttaattataatatagtcaactttttaaactttagtaacttttagtgttttattaagaacaaaaaggttctaaagttattaagatattctttgtattattttccaagcttactgctttgctttttaagtctacaatccaactggtgttaagtggttgcagcagaagtaaacttttattttttcttatatagataaaccattgtcccacaaccatttatggaaaagtttattttttttccactggtctgcagtgctacctttgccatataatgtacatttatttgtgggtctattttttaattggc

SEQ ID NO: 69172 - DNA, 1063 bp, Homo sapiens
tttaaaaattaattagtgtgagctatgtctattagctagacctgttttttttcctttgagaagttctttttaaatacatgaaaagtttgtgtgtgtgtgtgtgtatgtgtgtgtgtgtgtgtgtgtgtgtaatagatcctgactagcaatcttctaaggctgtggtggttaaatttagctaagagaaattgcatttagatattaggtagcattttaatatgcctggatgggttttgaaggcattattctttctcgtgaaattttgggaaaagaggtagatacagccttccttgaacaattatttataaatttgaagacaagtagctggacaagattttctttcaatgctaatttttattttctaattcaatgatcattttcctgtgaatacatgtttttgcttaagccgaggtttattttccagtttgtataggtaatccttcttagttgatcttaattatagctgtcaagagctaaacatttcttttctacatctggactaggaaatgtttccaatgaacaatcattttaggatcccaagtatcctaaatttctaaagctgtattagttttctattactgcataacaaattacaagaattttgatatcttaaaaaaaaagacccatttattatttcacagttctgtaggtcaaaagtttgttgagacatggctgggtcttctgctttggcttcagtaaaattgtctgctgactattttaatacatttttatcttgagcttggggctctttacaaactcttttctattgttggctgaactcagttccttgcacttatagaactgaagtccccattttcttattgtctgtctcgtagggctgctgtcagctcccagagtcactctcaaatttaagccacatgatttccccccatttcagcaacagagaacttccctcccatgctgcatctactgccactagccagacaaaactctgagcttttttttttttttttttttttgacagagtcccactctgtcaccaaggctagagtgcagtggtgtgatctcggctcactgcaacctccaccttccgggttcaagc

SEQ ID NO: 69173 - DNA, 1035 bp, Homo sapiens
gttaatagctgagtgaactttcaattatgaaatttgtggagcttgacaaaatcacaaaaggaaaattactggggcaaaattagacctcaagtctgcctctactgtgtctcacatcaccatgtagaagaatgggcgtacagtatataccgtgacatcctgaaccctggatagaaagcctgagcccattggatctgtgaaagcctctagcttcactggtgcagaaaattttcctctagatcagaatcttcaagaatcagttaggttcctcactgcaagaaataaaatgtcaggcagtgaatgaattatattttcagaagtaaagcaaagaagctataacatgttatgtacagtacactctgaaaagaaatctgaaacaagttattgtaatgataaaaataatgcacaggcatggttacttaatattttctaacaggaaaagtcatccctatttccttgttttactgcacttaatattatttggttgaatttgttcagtataagctcgttcttgtgcaaaattaaataaatatttctcttaccttataacacatgtgagtctgagtatcttgtttaatatgttcctcttttccacagatgattctataaaaattgcattctagttctgctgatgataaactcctgctatgttatttctaaattgaaagttgctatttccaaatttccaaattgaaaatgatatgcctaagtaagggatgtgatggataacttagttcttcctctctagatcctcaatttcaccctttctaccctgctgtgcatcctggggtggctgacctatacagaccctaatagtgggttccttttcctcttgattcttgtctggtttcaattatactgcagcaggaaacacagctggcatattaggaagaggtcaagtttggatatttattccgctggctcccttcctgcctggccaccgccatgatttggtgtgtcaccttactgaaggttatatctcttgaaaggtactcctctctgtctcactgcctcaccaggttctgataacttctactg

SEQ ID NO: 69174 - DNA, 1041 bp, Homo sapiens
ttttaatcagaggtgttgatgtattctttttgtttaaaaatacatataattaaacaggtatataaaagtgtgtaaaattaacacattctcttcacctattgtactccatctaatatgatagtcttttggcaaaaacatttaaagtagaatgaggaagtatcattttactatcatgttatttttgtcttagtgtatgctttcagactggcactcctgccttcattcccctccaaccctagcagaactcaagtgtggcatagtgagtgttccacttacttacttgctgttataaacagactattcattcgtctattcattcagcatgtgtttatgaatctctaaccatgtgtctagttcttttctaagtgttagagatatggtgtaaaatataacaatttatggccatttgaaatttactcttagagataaacattaaattaatatttataaaaactattttcaaactactgtgatatgaaggaaattttggaggtgaaggaaatgcattatatcttggttatggtagtggctaaggtcaaaagccatgaaattattagtgattttcttcctatataaattttacctcaataaagtttatttaaaaaaagataaagtaataaaacatttaggaataagttcaggcaaaatatgcacaatacatacattcagaaatctgtaaaatattagagaaataggaaatatatcatatgtattgattaaaaggtacaataatataaagatttcaattctcccaaagtcgatatatagaatcaatgaaggcatcccccccgccaatttcttgtgtttgttttgttttgttttgttctgttttgttgtgttgtgttgctgagaagtccaccaactaataaatctgaaatttatttggaaggacaaaaagcccaaattaaaaatgcttttgaacaggggagaaaaacaggtaggaatttctcctgaattaaaattatattaattaagtcagtgtaatatttgtgcaagtttaggcaaaaagaaaaagcatagttatagatgctattacaagga

SEQ ID NO: 69175 - DNA, 1006 bp, Homo sapiens
aaagaaggagtttcgccatgttggccagggtggtctcgaactcctgacctcagatgatccgcctccctcagcctcccaaagttctgggattacaggtgtgagccactgcgcccagcctcttattttattagtggacatttcagttgttttcaatcttttactatttcaaatggtttcaatgcaaatcctcatatgtatattttttgtgcaaatgtgtaagcgtttctgtaaaactatttcctagaagtaaaattgcaaagttaaattgtatgaacattggatactgccaagcccttcataaaggatgtatgcaagttatattcccacaaactgtctatgagaatgataggaatattttcaatttttcaagtatgttttaataaaaattaatttaatgaaagcaaataaaattgtgctggatttcaagactgtttggacaaagtcacaaaggcctatcaagctggatcagaggacataataatggtcattagaaagtacaatgtgatgatcatggaactcattttgctccacaagcaatagcactgtgatgactaactcccatggcaggtatatccattgtctatattgttagggaaatttaccagagagctaatggattctggctgccttgttaacgtgatccagtctgtcatctgccttcacctaactgcttcgtaactgaagtaacagcagttgtccacagaatttatagcaacatggattttcagtaaggcagaggaaaaataaacctggaaacaagttgcctactgagataattagaaaagaaaccatgaataaatgaattctaagaatgagatatttggggactagaaatggaatcagtaaaacatgaattaaataatctcttttccctaaccttgccaaacagaacaactgcataaataaggctcaggtatataatataggaatgccacttaacccactacttttcttatgaaacagaaagagctggttgtaaaccatgatagatttgttggcacaaaga

SEQ ID NO: 69176 - DNA, 1041 bp, Homo sapiens
caagaaatagagatataagaaggcaagtagtggaaagagaagggaaagtaaagaaagttggcatcagaatcaatccccatttgttgtcattcagttgcttcttgttttattattatactttaagttctagggtacatgtgcaggatgtgcagttttgttacatgggtatacacgtgccatggtggtttgctgcactcatcaacccatcacctacgttagatatttctcctaatgctatccctcccctagcccccaccccctgacaagccctggtgtgtgatgttcccctccctgtgtccatgtgttctcattgttcaactctcactcatgagtgagaacatgcagtgtttggttttctgttcttgagttagtttgcagagaatgatggtttccagcttcatccagttgcttattaagctacacatcttctggtcttcgggtcacgtttctattcatgtctgagcaacagtctgattggaatcccagaggccaagggcataagtaaaaatggcaaacatcagaagaagggaagagttagcttgttggtgtgagaaaccaccagggaaagagaatgatgaattgacattaaagtatctcttaaactcccctgaaaacttttagtgattcctgggggcaagagctcccctctgtgaggcacagtgagagaagaattactgaagtttaaggaaccttatcaagtaaaagtgaatgattctgagtgagatttagaataaaatccattttaaattctttaaaaaaatatgatataaaagaagaggcactctaaccacattatcaaaagagaatatccttttgtattttagaaaagatgacttttggaataacaaaaaaaaagatttcactctatttctaaattgattcctgccactcgagcagaacaaaacacaggtgtaagttagccattacttgctacttaatatctatctatgtctagtgcatataaattatatacatacacacacatatatactatatattcacacacgtacccacatatatgcacacataaagaaatacagt

SEQ ID NO: 69177 - DNA, 1043 bp, Homo sapiens
ggtaggtagaataaaagccctccaaaaatgttcacatcctaatccccagatctgtgaataatatgctaccttacgtggcacaagggatttttcagatatgattaaggttaaggaccttgaaatgaggagcttatcctgggttatccaggtggtcccaatctaatcacatgagtccttagaagaaacttaagagggaaatgtgactatggaagactggtcagagacatgcaaccttactggatttgaaaatagataaggagtcatgagcaggaacatagacatcctctagcagctggaaaaggcaaggaaacagattcaccactagagcctccagggagaaacgcaggcctgtggacattgtgattttagcctggtagatgtatgttggacttctgacctatggaactttaaataaatatagttcaagttaccaggtttaatttgttatggcaacaatagaaaactaatgcactattactattagctaacactgttgacttgtccataactgtatttaaaaatgatttttagttcccatttttccctaatgattgaagaaaatacataattctggagcaagtttggtgtttgtagagagagttagagggatagtctgttgaggagaagaggattcagttcacatttatgcctaaattcctcactttaatgattgagttgctttttccatatttggtttttgctgtaaaaatgaggggtgctcaacatttttagaacattttcattgtctgtttccagtgaacacaaacacacaaacacaaaatcacacagaaatagactatacatttacccaacatataatatataaaataaatgtatagcacatgtctcatctgctctttttttaggagattctgaacttaataatgtggaggaagttcacagacagtaattttggaaactataaaaaatgtagatttacatggttattgggggtatcgttgttgtcacaatctccagaatgcaggattgttgagaatgaccttttaattcaggagtactctatgccagcaaggctatttctg

SEQ ID NO: 69178 - DNA, 1035 bp, Homo sapiens
gggtcaggaatctggttgtggaatagctgcattccaataggaactgacatcctgttacttttgctgtaaactattggttagaaacaaatcactaggtccagcccacactaaaccgaaggggattacacaaaggtatggctagcaggagatagatatcagaggggaccattttagagactgactaccacaaacgatgagtattatatgtagttaattaacccacttcagccaagtacagataaactgtatcaggttgaaggacaagagtagagagagttagagtagtaaaaatgtatggtgtaggaactgtgtgtgagtgattgtgaaaaacccataagctgtcacacatttcttttacttttctttacaccagagctttcatataggtacatggtaaggttattgtccaatttaatagatgggaatagtgtaaatcaatcattacagcacagtatggtacaatttgtagccaaaaaatgtgcagagagctgtggggagctcagagaaggcagtgagtcatctggctgaaacctgggtatggccacacatcaccaactaagtgacattgaaattgaggtttttaaggatgaacagacgtttcaagagagaaagaagtgagagaagacatttcaagaagcaggaagagtaggttgttgtataatagcaagtttagtgtgaatggaattgtaagagataaagccagaaagtcttacagaaaattctaagacacatttatggtttctgaaacatttctgacagtctatagacattctaattaagatgtgcaactttaagtgttaacgctttattttgtctttgttgtatgttatttttcttttttgccaaaaaattgtttgttaaattgatgagacttccaataatcaatgcaggcctagtattaaggtgatatagtattacattccaaagaaggcagaaggttttgttggtgttcttggaactccatgaaagcaaattttcagtgtggcttagtgagagctgattttagaatttttctcaaaaattcattaccattaa

SEQ ID NO: 69179 - DNA, 1077 bp, Homo sapiens
tgatatattttaatgatctttagaaaaatataaatctactgttaattagtcagctcatagcagagctgcaatgccagggaaatgtagggcagaatcacagagtgattacaatgtcacagtgacttagctgctgtgtcctgtatgctagtcctgggtagtgtaagtagtttaactctaccattctttcttcccaatcctagtacagtatttttaatgctttaattaaaaataatgcatgcatataataaatctgcaaaccatgcaaacagatataaaatgaaacataaacacctccctattctttctcctccaaacttctggtttttgtgtttccctccagatgacttttaatgtgtctactcacattgcctgtctaggctttttatatattgtaaatgatattaagcattttcctgaactttgtttttttgttaataacatatattggagatattttcatattaaataaaaatagttgcatattatcccactatatagtttattattttatttcttccctctctaaagatattttgattgtttctaactaatttatacatttgttatgagaaataatattgcaggaagccattaatgcataatcttggtgcagtcttatggcttttttctatagagtaagttgctaagggtggagttgctgggtcaaagactatgacacttttaatattgccagcttttgccaaattattctacaagaagatggtcccagatgttttcttcctttggcaagggagcaccaggtggaagtgctgagggaagcctgaaaacagcacgtctctccgggtttcagtaggtgtttagaaaaggcattggggggcttttgttctctttcccaggcaaccttgacaagaaaatggcaatttatgggagatcttttaatgagaaatagtcaatggaagcccaaacattcttattttaccacaaacaatgttgtctggtgcactcatataaaattgttgttaaattaattgctgctctgcatcttcaataaattccacagatggcataagaatgtattgacctccccttttgtctgatatgaaagtgggttttccg

SEQ ID NO: 69180 - DNA, 1856 bp, Homo sapiens
atgaattggttgtttttccttccttgttgatgccgagctcaatatttagacagagtaaatgcctaacaaatatggtttatgagatttgaaggtgtaaaatttcattttctgccaaattatggactttatttaatataaccaatcaatcagcaagtatttcctgcatgccatgttctcagtaggcatatattactgatgtattgattatgctcttgtgatttcttttattctaagattcggattatgaaattgacaaaaggtggccctttggccatgcatggaatttcgcattaccttggcaaggtctttgctaatagcatttggaaacttgttaagaagtcagttccgagtcttgctgcttcattgagatttcctttggctttagagagaaaaaaatatacagactgaagattttatagattctatttacagtgagttgagggtgctgcagatattttgtacggtatatacatatacactatacatagtcatagcaggaatagtaacaaattacaaaatccgtgagatgctctcaggtttcatatgaacctatcatataagtttctttgtgctatcagatatgttctaaatagatggaagagatttttggaccatcaaatttttcctgcagtaatgtaaccatcttcttctgtcttttagctttaaaataaagaaatctcaacatatactttcccagtgatttttgctcatttaatattgcttttccttgtgccagtttttctccttagtggattttgagatgcatgcaattcaataccttttgaaactcgtaaatttattattatctatacctaataaaaacaaatggaaatatattttaaagtcatatgttttaaaaataataatagcaactatagtatcactaaaatggttttgttgttgttgaaatttgatttatagttgttttggaaattcaagtaataagatgctaaattagattacaccttaataaatatggcttttgatctttgccaattaccataattttcaaaaaaggaatccaggcaattttctagtcatttctagctataatctgacttgcagccacaaaaatacacttattatgcttttaaaaattagaggagtgaatgtagacaataaaaagacctatgaaaggttataaagggttctactttctaaaatctaggaagtattccccaagataatgatcataataatgtttttttcctctctgtacatgagggatcaggaatgagagtatacagaagcaccattctaggactttctagcaatgttagcatgatttttagatctttgattttaacaattaatctggccaggttcccaaagtagataatttcctctgttggtttaatacaatttcttctgaagtgttaacagattttataatctcattaatccatagaagagaagtggataaaatcaaagcatgttttttttacaagttgttaagttgaaaataagcttagtagttatttgtaaaaaactttaaggttttaaagggaaaaaaaggtcgtacgtctcctcttatgccagtgttacgcagagtgaaataggcatttggtaatagaccatggactttagtaggcaaaggtaactgcattgaggaaatcgaggtggcactaatttgtcttcagtatgatggttggtgagcatctgtggactttgaagtgatggctgttggtgcccaaatagtgtggaataacacagtgtttaagagatgcacttagaaacaagatagactgaggtggaatttcattagttgttttactgtggtgaagttacttaatttctctaagctccagtaccctcaattataaaatgatcattgttatgacaattaagcgagttac

SEQ ID NO: 69181 - DNA, 1046 bp, Homo sapiens
acttgtcgcatattaagttatgatgcatataaagggagaatattctattgagaatgtttgaatcaccaaagaaactcttggtctttctacaagataagaaatcagttttatcccaacattctcaagttgtgaattgagcagcatgtatatatcttacatctttgatgttatctattatctaaatatatggatgcaaagaaggaatgcaaaatatttttcaataataggtaaaactgaagggtaaaattgagagttagaagcagggaagaataatttttataaattgttattacgtgttccataattgaacaaaaattatggatgagataatttatgatgttgacattgcacatctgtgagacatatcattgagttccttacagatctgatagaacgtttttactttttatcaaaagaagatgcatgcatgagaatagtggattcagcatccttttcaatttttgaaagataatataaacgtaatcatgactttacagaataaattgttgtagctggttaatgatgcaagattaaagatggagtttgaaaacacagcatcacttaccttgctttagataaaaatttaaaacaaatatcctgagcttgctgtcattttttttcttccatttctgtcaatttgcttaggtgagacaggtttctctattgttattgttaatagaacaaaacatagatgtatgttatcccctgagagtaacattgtcatcaagccaacctagataagttaacaagcaggaaaacaagctcaactattgatatacataatgttcattcaaagtgtgtgtaaagtaatttaatacagggacttgctatttgctttataactttttgttttttatgattatggatgactaaacttatgagcataattaacaattctccattttaatctcctaaatacaaactttcattgaacaatgtgtagaatttctctatttttttcctgttagatttgttctaagtagatgtgttgaaatgcagttttaggtctgttgagtttgtatgtctttttcgtttatttttctaga

SEQ ID NO: 69182 - DNA, 1048 bp, Homo sapiens
cgtgagccgccactcctggcccattaatagtcttttagcgtcagcatccactgctgtttggtgtgtgcagcctgtaaacctcagaacatccctggagccctttcctttcacggcctccagagggcagcctgccgcaacggtgctcccgatccccctagtggtcactaggaagctccaaccttcactcggagatcaacgttcccaggaacattctcaaagccccgcggatgttgcccagggaagcaagggtgtgtgacaccacctagagtcgccttcatagcttccctttaggtgctcctggggaatgtccattagcaccaccccaactcaagatgacttctcaaacctgccagttgtacagtgttggatactacagggtagattctgtcactaaatttcaggaagaatataacaggtatctagaggatgtggcagcaagtccaaactttatttttgtacgtccctcaaaatgcacagggtggcttatttaaattatctcccagaagcagctctggatgtcttatatttccccaaggtaaatatttaaataactcttgtaacaatcttaagttacgtgggatactgtatttgtaatttttctgggatctatttttttgttctatttatacggtatatttaaataacattggcaaaccctatgcagtctaatgcaggaatgctatcagcttttttcgtgatttaatataatcatgatgacatattacagcagttatttccttgttattcatatttttttattttattaattattattttttttgaaacggagtctcactctgtctcccaggctggagtgcagtggcgtgatatcagttcactgcagcctctgcctccagggttcaagtgattctcctgcctcagcctcccgagtagccgagattacaggcagccgccaccatgcctggctaatttttgtatttttagtagagatgaggtttcaccatgttggctagtctgctctcgaactcctgacctcgggtgatccacccacttcagcatcccaaagtgctgggattataggcatgag

SEQ ID NO: 69183 - DNA, 1056 bp, Homo sapiens
gcaattctccaaccttagcctcttgagtagctgggaccacaggccttgtgacaccatgcctggccaattttttttttttttttttttttggtagagacaaggtctcactgttgcccagactggtttcaaactcctgagcttaagtgattatcctacctcggcttcccaaagtgctgggattacaggtgtgagccaccatgcctggctgttcagtactttatgtcagtgttgcctcctagtttagaatgaactgatctggagaatcaaggatagtacatctcactatggatgtcttttccttgtttgtttaagttacagccagcagaaattatttccaaaggcgtgcttgtgtggcaacctgttggcattagagcatttttgcaataggccacttatttctaaagcagagccaacaaccaaccactgaagccacatccaggcagtagtagtgggaaatgtgtggtttgaagcccctgttgtgctggtggagatcacatattgttgcaagcccctgggagttaggttgtgtgctaccctgccaagtgtgcaaaagagtgtccttggctgcttttcgccccctcatcagcggattaaattcagcatctcttcttgttcatgtagaatgctataggaacagcttttgtagccagaatgcagaaatcagattagtatgctgctttattttgtttcttcaattctgttctctgtggtcaagctttgctgaaggaggaaaagtggttccaaaaaagactatcaggaactattcagactgttcagataatgaggttttgtttgtggatggttggttggttgctttgagttcctagtctgtttatggtagtttactgtctgatccccatcactaatggtcatgtatgtcattgaggggtagacagaggacatggtccattacctttgagagataatgatccagctattggctcccttttcaactgtcacatttttacatagacttatcttcccacacccacctctctttccttattacctacttcaggtttaatcacctataaatctgatactagccccagtctt

SEQ ID NO: 69184 - DNA, 1086 bp, Homo sapiens
attgtgatgaaactgttgtattttcacaagtcttccttagtcatattgtgctgtctgttctaagtagggctgtgaataagagtggggtacagtttcctgcaataagagatgggaggcttaacttcagcttggcacgtaagaaagatcaaatgtttactgcaatgtgggaaaaccacctcctgggcataatagaaatccaggcctggcagtaaacaattctattcaaaagcagcttctcagggctgaggaatgacctagttgagtggcatgacatctgagcagaactagcaaggaggcttggtggtatgccgccttttaactccagcacctgtggctcttgagcattctcctcattcttcagtatggaaaatggatattttctcagtcttgtgcaaaaacagcttcaagaaaagtcccctagtcaaaaattccagtatttggaagtgtaccaggagtccaaaaagttgagaactactcctggctttttccttccctccctcacactgacggcattcctgaactagcatgcctgtctgtctctacatttctgggtgactgcctcatcccaggtggccttcctccagctgtgagctgggtgtgttcccaggtatttaatccacccttggggcaagttcttccaggcagcctccagtgccccttccgggatcctggctggatcaggctgactgtccttggaagtgaaagaggctacatatgaaggggagaagggtcctctctgcctcaggagaaggaaattagttacaggtgcatgcataggcaaaatagccccaatcctgttgtgatataacagaatttagaagacatctggctcaaattttaattttcaaaaagtgataaattctgtgaagaggtaacctgtagagtttattgtcaaattaatggtagagctactgtatgtgccactgtcagttgttaattattattattatttttttaagttctagggtacatgtgcacaacatttaggtttgttacataggtatacatgtaccatgttggtttgctgcacctatcaactcatcatttacataaagtatttctcctgatgatatccctcctgcagcc

SEQ ID NO: 69185 - DNA, 1101 bp, Homo sapiens
tcttctaaagtattaaatgtgggaaatcatctgacatttctgtgtactaaaatataatttttagtattaataattgttaatataaatattggaggcataagacattttctatttttctgtcttaaaaaacaaaaaactgatttttttttttttttttgtggggagaccctcaatagactctctcctttccttgggttagtagtgtccatggctctttatagaaaatgtatttgcttgcctgaatctgctttttcactgttttacaggcatttttttttccatctatgtccggtagaaagcagtagaaaggggttattttctgatattagaatgcctgaattaaaatcattacttcactacttactggttgtacaaccttaactgttaaagctttctgagcctttgtttttctcattgtaaagttgaactgcaataatgcacttaaagggcttggtacagtgtgtggtgctagtagctgtttatagtagttaatggaaatcttatgatttcaagtaaaattattgtaatgtgtaaaataacttaattacaggcattcatgaatggtcccatggctgattactatgtctatagaatgaatctgttaattgtaattttgcgtagattctcttgggtaggattccacatgttagattgacattttagtcaaaaaaaaaaaaaaacccaagaacattattaagttgatggagatagcatatggtacattaatattactaataagcattacttatgttaccgaattagattctgaaaatatcaggagagaaattagcttaaagcactgaattgccaagtctgcctgagtgtaagtacatagtatgtctttaattgattttattcctctggtgactttattcagtttataccggggctcacttttcataatattataataggaatgaataaaaatgaatatattcatttaccttctatgataaatagttctgattagaatcattcataagccacagtttggagccaatgagtaaagactgaaacttggtgaaagtttatcttgcggtttttggttttcttgcacttcccagtgtaatcctttttgagttcttcaggatttttttaacc

SEQ ID NO: 69186 - DNA, 1063 bp, Homo sapiens
actgaggtggttcctggtcagtctactatcttagtcggctaggtctgccataacaatgtaccacagtctctacagcttaaacagaaattttctcatggttctggaggctgggagtctgggattagagtgctgccactgtggtcagtttatggtgagggcactcttcctggcttgcagatgaccactgtgtctctctgtttccacatgatggagagagagactgtgtgcatgactgtgtgaactcccctgtctcttatgagggaactaatccccttgtgagggccccaccctcttgacctcatctaatcccaatgaccttccaaaggccccatctctccataccattgtactgggggttagagcttcaacatatacatttggaaggacacagttcagttcatagcatctagttatagatataagcatgaacagatacaatatggatagtataaatatttgatttgctaatgtattgggaaattatgaattttataatctatattgtctcatttctatgagttttgtttcattcacttgaaaatcctgctaatatcaccacagataaaagactgacttggatataacaatgagttaatggaaggaaaaagtttcataaatagtactataaagttaatttcttttcctgacatgcatgtgtaacagtaatagcttcattttgtgtagctgtaacactttacagttaacaaagcacttgtgtctcacttgattcttacaagagtcatataaaaccacccattttatggataaggaaactgacatgcagagttagcctgtacttccattgccctgccccactactcagttaagctttctgccaagtagcacagctgaattttcttctgtgtgcataaggacaacagatgaggtagtaaagaaaatatattttataaaaagtagactttttttttttttttttttggtggggacagagttgctctctgtcgcccaggctggagtggagtggcatgatctcggttcattgcaacctccgcttcccaggttcaaacagttctcctgcctcagcctcctgagtagctaggat

SEQ ID NO: 69187 - DNA, 1054 bp, Homo sapiens
tgacagcacctaataatgtctgaagtctgtgggagtccagagcttgtttttctcatctctctccaagcccccgccactgatccagttgcagagaagagaaaatagaattcagaattcttaaatgtataaagttattcattgttttaaatagtttacaaaaggcatgttgatgccattaataacaatgaaatgtgaattcagggtctatggaagaagtacaggatttgaaatttttaaatatatctaaatctgcacatgactgtaaattagaagatacatgcaaacattaagaacctgggttcaaatgaacaacctcttacaacaaggatttaaggcctcaaaacatgaaaatgtgtaattgagttgttccaccgatgttacatgaatgtgcaggttactttgagtcagttattattttggttgtagatgatagccagtatcatagttcactatctgtaaaatgaggagtttaggcttagattacatccaaagttcttcccagcttgctgatgtcatgattgtgtattactaacccctataatgaggctagaagtgtttggtttacgctttaggtttgcaaaagctcctcagaactctccatgtaataattcaccattcatcaggaaagttcgccacggagtgtggtggctcatgcctgtaatcccagcactttgggaggccaaggtgggcggatcatgaggtcaagagatcgagaccatcctggccaacatggtgaaaccccgtctgtattaaaaatgcaaaaattagctgggcatggtggtgtgcgtctgtagtcccaactactcaggaggctgaggcagaagaatcgcttgaacccgggaggcggaggttgcagtgagccgagattgtgccactgcactccaacctagcaacagagcaagactccgtctcaaaaaaaaagttcgccattcttacgaatgaggaagtttgtggatgctggatggcacagagagaaggcagtagagaaagattatgaattgagttgcagggccaggggaagcttactccaggattctgaagcccagctttgtga

SEQ ID NO: 69188 - DNA, 1019 bp, Homo sapiens
tcagggtcctgagagctcatctcatccagtggttctcagccctggctgcagattagcatcatctggagagctcatgaaagaagcactgaggtcccaccacctgaaacgacctttcagaggaaggagccattctttttagaaggtgctcaggtgattttgatgcacagcaagagttaaggttaactgacatcttagccatcccatgttatagataaggaaaatgagagcaaaaatggtcaaatggcttgtacgaggtcaggtccttgttgttacagaggcaggtctgatgccgcctcctgctctgtctgcagcctaacaccatcccttatattggcctgttgtatttattgatgcctcctcatccttcaggtgatgttcctgcctccaggaggccttttctgactcctcatactcacctcccatccagcctgggtaagatccccttcctttgtatttgaacagcatccttccttctttttcccctccgactgtcagttccgggagaacaggcctgtctttcctgttatttctgtaacagtagtggggtttcagataatatttgttgaattgaagttctgtaactttttattcctcagtccacatggattgctgaaaataatccattcctatatgcatgcttcagaaaagaacttcagaaagcaaaagttattttttttttgagacagtctcactccgtcacccatgctggagtgcagtggtgcaatctcagctcactgcaacctctgcttcccaagtagctggaattacaggtgcatgccaccacacccagctaatttttgtatttttagtagagacagggttttgctatgttgacctggctggtcttgaactcctgacctcaagtgatccacccacctcggcctcccaaagtgtggggattacaggtgtgggccaccatgcccggctgcaaaagttatttcttacctgtctatggctcactgtactatgggccaggatcttaaaagcaagaaggacttcccaccctgccttccaggaga

SEQ ID NO: 69189 - DNA, 1040 bp, Homo sapiens
cctttcactatggcaagccccacccaattcatttttttaagttaaaaaaattattatatgtattttttagagatagggtcttgctctgttgcccaggctggagtaggtggcacaatcatagctcattccaccctcaaactcctagctcaagctatcctccccgctcaaaccaccctccacctcgtagctaagactatatgcatgcaccacacctggctaatttttaaatttttttgtagagacagggtctctctgtgttgcccaggctggtctggaactctaggccttaagtgatcctccccaccttagcccccagagtgctgggattacaggtgtgagccaccgtgcccaacccccaactccattttttaaaggaaaaaagtgtccttcagtttgttttcagtcgtgggagaaaggtgttctttaattcctaatccttttcaatttggggaaatttctttgacagttacttgccttccattttgtctaatccatgaatacgtctgttatttggatattggctatcctgaattggttctccaattttccatgtttcctatttttcacctctttttgcttaactttattgaacatttcctgaattttatctttcaagccttctgtatcattttaatttccaaaagctcttttttttattctttgactatttctctctttctccctctctccctttggtaacatcttgtccttatttcatggatgcacttttctcaatctctgatgatgcaagagttttttgttgtttgttttaagcgtctttttcatgtgatttctccctcttcaccaagttgctttgctgtttctctgttagatgccctctcagtgtctgggaagtcttgtcccttctaatttttgagtagctgtctagaaagatggctggaagttctgtagtagtggatggcatttggcaattatgcacttcactttagggtgacctgtttggctgtttgtttaggaaactctgttagtaattttaggccgtccctccacccacccctccaagttaatcagaccaagag

SEQ ID NO: 69190 - DNA, 1019 bp, Homo sapiens
tttttaattctgaaaaattctgaattctgaaacactaggttttggcatcacaggttttggataaggtcatgtgaacctatagcggctttttttttcctttcatttttatgttctcattccttctaggcagcaaaaactggttttgaaatcaggcctactctgataggttaagcatgaagttatgactcaaatgtacttggagctgaaagacaataggaatttaaaagtggtgtcttctttcatccccaggccatgtgcaatcactataatctgggaactgacaggtcagcgactagaaccaagtttcagctaagccacaaccagttgcaaacccaggataatgttgaactgagagcctgagggtcttaggagacctgaaccagttagactgtgaagcaatagtagtagtgttccaagatgttattggaacatatttctacaattaatactgtttgccatttatagaatatcagctgtctaaaccaggcttttaaaataccaaattggcaaaattaaataatattactcttcagctatctatttttaatggtaaatctaagtttttaaaagtctgtttattaaatgctaaaagttgcagaaatgaaaaagcagatccacaatttcatatgagatggcaagttgtccaaataccaaaacaattctgaaaaagaataaagtcagaggattcatgggttctgatttcaaaacttaatgacaaagctacagtgatcaaaatagtgtggtcttgggtacagatagatatatagactaatggaatagaatcaagagtccagaaataaacccacatgtcaatggcccaactggtttttgaaaagcgtgccagatacactcaatgaggaaagaagagtctcttcaacaaatggtgctgcagcaactggatttccacatgcgaaaagagcaacgttcaatcccacctcacatcacagacaaaaattaactcaaaatggattaacccacgtgcaagagctaaattcatgaagaaaacataagggaataac

SEQ ID NO: 69191 - DNA, 1009 bp, Homo sapiens
ttcattagaaacaagtaaccaacattgcccagaacgttgtagttattcgaaaatgattgctgaattaatgttatccctttctatgcttaaatttattttaatatttaaaaaggaaatgaaggacagggattgtcaagatagaagtcagaaggaaaaattggtgcctaatgaggcaaaggatgataaaacgtattaaaaattgaagtgaaaaattatgatagccaatatttatatagtacttaagagtcttcacgtcagtttcatatatatgtcagcttattctccacagtaaccttctgatgtaggcattataatctgcattttattgatgaggaaacagactaagcgttaagtgaggtgcctgagcctcagggctaaaccatgtagcgctcttatgattcaagtccattgtcctgtgtagcaatacatagccatcatgctcttgaaagctacgcttttggctttgtattttatgttttattactaacattctttgcattaataatgactgagtggctctattttaaaatctcgttgtaatatcacaaggcctatactctgcaagcctacaacctcttgctaatataggaagtagaatttctctcacctcattgttcaccaaaatatggcaaatcctgttaaactgaggccagagaaagagatgttggaaccccttagaacaattatgactaccagagaatgatgcaggagcagcggggcggggatagactcagctgaagtgatgtggggagtgagactgggcaggcccagcaatctggaaagcatgaagcgacgggaaatggtgggccctgtatgtggctgcttttactctcttttttatttgtttattttgttttgtttttgagacagagtcttactcggttgcccaggctggagtgcaggggtacaggggcccaatttcggctcactgcaacctctgcttcctgggtcaagcaattctcctgcctcagcctccagagtagctagcgttacaggcatgtaccactat

SEQ ID NO: 69192 - DNA, 1926 bp, Homo sapiens
aaagcagttagttcaaggaggatgtagtcaggaaaatggtggcatagccagatgttctggaactatgtgaatggtgactatcatttggggacatggatgaaaatagattaggtgcatgatgactctggggaagggaatcagttaaagtgaggctgggaactgaggaccagagactcagataaccttgtagagttccgtcttaaaagtagagacttcagaaataggccatgtgattgaaactgaggatggggaggcgtccacatggtgatggagcagataaatgttgttctgcatgtggttgcatgcaggatatcccacacttcccttagtttgcccaatcccaggtctggttaagagcaaaggagatctaaggggcagtcatggcgggcccattagaccccaggttgattccaagccccaaggagttgaaaaaaaaataactggaggtgcagggggagcagtaatggtcaaggctatttctagaaactctgactctgttgacattgacccaggaactcagatgggccagttgcctgagtacacatgagctgagggatggggtgtgggaaaggattctgatctagcagtagtgaatctgcttgcagcaagctggaagatactgccatggatagaaatcaggctgtggtcaacatgaaaacacaaggaaagagaaggccaaggaattacgttttatgatctgagactgacattttccagcctttctagaactcgaggttatatataaccctactgacttttgagaagctggaagattcttcttgcctctgatctcatgccaaccgaggatgtttttcattgcttagtctctacgaaatttggaataaataataagaaagaatttgggatggcaaaagagtattaggtttataataggataaatcagggaagatgatgagaaaccataggatttagaaaggctaaatagaaaaataggctcaggaagatgaagattaaaggagaacaaatatatgtcccattaattaagtgtcacagatacacagagaaggaagtctgaagagtaattatccccctgagattttgtgtaactgactccctttttgaaggaagatactactttatagaaaaatatttttgattccctgaaattcaatttttgattatcttcaaccatatgaaaacacatgtgatcccaaggaagagttaaaatattaatttactaaaatattcattcgatatctactattttaggtgaagaaacaggaaaaaaaaaatccctgcacttgtgaagctaacattttgatgggggagacataaaacacaaacgtcagataatcctgtagagaaaaagtagggattatttgtgtgtatgtgttgggggggtggtgacagttttaaatagggtgtttagggaatatctcactgagaagttccaagtgaaaaaacctcaaggtgctgctggagcaagttctttggaaatctggaggaagagcattcccagcagaaggagtagcataaacaggtttcgaggtaggtgagtttgttagatacatttaaggaaatggaagaccactgtggctggagtagaatgaaagatcgagagaataatagatatgaggacttcataggccattgtaaagactttggttttactctgagttgggaagtcatttgagggtgagcctttggagggtaaactggcagattttgagcagaggagcaacctgaactgccctgttttcataggatcccttgggctgtcctgagaatagattatggaggagcagagcaggggcagagagacctattagactttctcaggaatccaaatgagagatggtggtgggttggtcctgagtgttagttatggtgatagagagacatactcaaattctgaatacattctgagggtagaagcaatagaatttgttgacagatcaaatgtga

SEQ ID NO: 69193 - DNA, 1086 bp, Homo sapiens
cagtgttcattctacctggttttattccactatttccagaaatcctttgctgtaaaatgtctcatgaattcccaccccacaaagtatcacatttgaaattcagcaagctatttgttatctggggaatgtcaaaattaatttgacaaaaacatgggtgaggaaagcagggagccctggacattctgaacaaagatgtgatatcagtatttaccatggaactcatttgattataagtcatctagaagcataatcacaataatggccaggaaagccacagaagcaaaataattgagttaaagttgagagtttgctggcaaataacctcatcgtatcatgacctaaaaagcagcatggatgtaaaatgttgtaataaaaatttaaagagaaagacagaacttggtgggcatgtacacacaatgtgaattcacaagattcccagaaaattgaaaaggagagaccagtgggatttcagcttctgccatccctcctgtattttgaactcttaattaatttggaaggctgaagggctttggaaagatgatttgaaatctttttatttctgaggtcccattagttaactgtagttttccttattttaacaaataataataaaaagtacatctttactataagtctcaaatgtattcctcaagtatgtctctagtaagaaactataaatatgcttttacccagaaaactcttaatggcttcttcaaaaggaaaaagtgtttacagctccttctcccaagtcactctttgaaatgtagaataatgtgacctgacagattataataactaccaaacagcatctccattaattgtaatgggcaaaccaataatatggatctttatgatgttaacatgtattataatatatcaagtcaagaccatacttgtagctggaataaaatttgattgcaaatttgtgtgttttgtaaaatgcaggatgtgtggaaaaattgtagattttttcctgacttccttaaaataaaaacaaataatgaaaattttgacaggtcattcagtgatgctaatggtatcactaccatgtcatgtactttcatctaccttaagtgtttttaaaaa

SEQ ID NO: 69194 - DNA, 1044 bp, Homo sapiens
gcagatggtaatgcagttagaaaggcaaataacatctagtattattatgaaaatggttttgatcttgcaggttccccagaggtctgtggagcacacatccattggcacagagggtgatacgagaagagagaaagaaacatgaacccaagttggtaggaaggcttggaagttcttccaaggaagaactgagctggaccttaaaggagagttaagatttggataggtggttaggagagcaggagaggatttcaggacagagaaaccatgggagcaaaggagtagagagaggaaggaccatgacatagtcaaaagactaatgagaaagatagttgggttggaaggttgggaatggggagtaatggtttataaaatgtggcctataatcagattataaggcatttgaaaagtttggacttcctctagaggttgctgagagtaactaatggtttttgaccccttctgtgacttgctgagcatattggtttaggaacatctttctggtggcagtgtaaaaggtaagttggtgaacaggagaactggatgcaaggagaccagtgggttgttaattgtaacctcattagtagcggtcaagagcacagactagaacgatggcaatagatggaacagattgaaagctaaagtaactgcctcagaggtagaggcaatatgagaactaaagatgaaaaagtcaaaggtcacctatattttatattgcataaccccaactgcttgccaaggacattgtctattagggaaatgtaaaaaaaattgggtgcttttatatatggtcccacatatgactttatcctcccaaaaaatcagaatgcttccttttttccaatagcaggactatatcattgaacgtattttccttttgccctgctgccaagaggctttgtgccagttttcatgttaagatcacgacaactacaattgtctcaatggttagtacattttcttcctcctaccttctctggctctggttctgtttataattctttaatggtattgtatttattcttcttgacaccagatgtcttacgt

SEQ ID NO: 69195 - DNA, 1050 bp, Homo sapiens
gacattcattttttaaaattgtgttttggaaacatctgtgcatccctatttccacaccacaaagaacagccattcttgtaaactgctttttgagttaaaggaagaaaagtaatatctatataaaacatgaatcaactggtaggaatcgtcacaatcctttgctttgctgggcactaggtactctgatttgtttttcttcctctagctttgaatgaagttgcaaacgttgatttccagagcagtcgtctgagattatggcccaggggtacatgtgacataagcggttgactagggaattacagattatgacagcactcttgagtagctgaaaagctaaaaatagcccagggcagttctaagactggaaatggaaacctactgtaaaagatgagttcaccaaagaaattgtaccaggaaaaacccttagatgactttcaaacatgtgtcactatgggagtgacagattgtaacattaagggaagctgcagaagaattatctgagaacctagtaaagaacccaagacttcctactttggttatgcccccacttacaccttacttatcttcttcatctcagcttaagtctaaatagctatagcttaaaatttgagggactgctaacctgacacaggtgtctactaacttgacacagtcacatgtgacacaggtgacttagaaaaggtgggcaattcacagctatcgatttggtgactgatttggtatttgtgagtcgtgaccagttttgtggtctaagaaccaaacataggtaagctaaagatagttgaagtatataattaagaagaatcagaggatgagcagaggggaacatacagttacgaagtcaagctacatttgttgttccataaaactaaggatcttaaagtttgtggatagaatattgtgaaagttcactaaatcataaagaatctggttgtagcaatattattttggttccaactgattccagaatataagattggagctatttctttaaaagtttagaaatgtaatttaggacaactctcttgtctaagtggaaaacctacagat

SEQ ID NO: 69196 - DNA, 1044 bp, Homo sapiens
catttcctattttgtttttcatgaccacaaccccagattgtgctgggacaccatccactcccagcagctgctgccccttctgaagctgtcttattcagccacctgttcaaatggataccagggttcacagtggctgtaaatcacaccatttctgggtttggattgcttggtgcaagcaccatccagggatgcataggaacctctcataaccagtctctccataactcaggttgagtgcttacctttgaagagatatttggtgccctcccccacttagcagtcttctcttagcagacagaagtcccatactgaaccacatggaatcatataggcctagtctgtattgccctttaccccacttactcagttacctgtgtggttttcaggatttcatcagtaagaagacccaagacaatctactgaaaagtgtttaaataataagattgttcaaataagtgaaagatagtaataagcactccacaaaaaaaaagagtatttcatttgggcagtatccatagcaaagttagagctctctagttaaaaggtgtacatgaaaaaaacaaaatacatattttgactatcatattgggaaaagtagaaaacactgaagtcaaatgagggtggagcaaagcactcataccctctggtggatacgttgattttataaatattttggatgacagtttagcaaccagtgtatcaaaagcttttaaaaaggctgtgccacttaaaatctgcttctggaatttagtaattgaacatgtgcacagatacatatgtacaaagatgctcattgcagcagtgtttataaaggcagaaaattggagactacttctgtgctcatcagtggaggaactgttttactaaattatattgcagctattacacatgttgtaaagctttctataaagctagcaagtgtctataatagatgtttataaaacagtatgtataatatggtatcattttggttagtgtgtttgtgtgctcttgcatgcatgtatgtccatctaagcctgaaaggatgtactccaaaattttaag

SEQ ID NO: 69197 - DNA, 1601 bp, Homo sapiens
tctttgtaaagaactaaaatagaataaattagtacaacctttctggagggcagtacagcaatacatattaaagaacttaaaattgaatacactctttaacaattttacttttaggaccttatcctgaggaaacaataatggatgcacaagatttttcataatagcaaaaaggtagaaaccacctaaatatccagccatttgaaattggttaaataaataatggtacatctctctgagagaatattatcaagctcttaaaatgagattgaagggaagtatttctagtgttttctgcgtctatgatattcatatgtgctatacattctcatcagtgacctaccttataatagacatgaggcaaaagagaagagacaaaaagatatgttcacatccttcagagaaggaaaagatagatatccatcagatatcaaagaaggtagcctgaagatcaggatagccaagtggtgtagaagagtcaagggggagtctaggtgactctcatagtgttcctgtaaaatgacgtactggtgtcccactgcagggacgaagggtcattgggtgcatggtgtagaggcagagtgagtggggttgcctgttttgtcagatatttggtatttaaaacagagatgagcctctaagccctgcagaacagagagaatttctttttttttaaggaataagggaagtcgagcatgttaaaaggcagagagaaggtaatggtgatggctgacatatctacagcgcttatcatatgccaagcatcatgccgagtgctttatgcccatgatcatgcttaatccttaaaacaatcccaaaatgaagctgttttttccctctatcttttagatgaaactgctgatgattatagagttgattatttgcccaaacatcacagagctagtaaatggcagagtcaggatttccattttgactctgaatctagccactatgcccaggagtaacaggaaaaccaaaactgcaagagctacaggggctgtttgttggaacaaaatccgagaagagagagtcccttgaaggtgatgagttgtagcctcagtttagaaactccatcaagaaggtacatgtctgacttgcactattcagcatgttgcattcatagctgatacagctgatacaaccaagacagaaatattttgtgtttggtatgtttgacagaactgccctcgtgtggggctggctcattctgggctgtctaagcctcattccttttgtcatctggtaattcaaattctgaagcgtccaggaatcacttcatgctgtggatgcccctatgctctctatctggtgttggtgtacttcagaattaaactgcatctctctttctacaccatgtcctgtaatagccataagtaaaagtacatggaaaatttggggggctcagaaaatttggggggctgcagttgctgcactgcagccatttacactccttagttcattccggcttaacaggcagtcatcgatccactattcactcagtttattcattcatcagacatttattgtgtgcttactctgttataggcttgttttaagtgttaatgatatcaagattaaaagacaccactgaagtaagggcagta

SEQ ID NO: 69198 - DNA, 1050 bp, Homo sapiens
attacctacctcctagagttgttaagaggattaaattaatccattaaattaatccaaatgttagtccctagcatataataaatactattataagtgttagctgttttcataattactaacagatgttattatcaaccagaaaagattagttctttgtcagcaaaatacatgttagaccttctcatttatcattttctgcaacatagacttttcttcctcatttggaatacgattttcaaactgtcccctggaatatccctgggcttttaaaaaggcatctgtcagggttgttgtgacaatggcagtaccccagatggttgacatttttttaaggactacattctgagaccacagcaacccctcaaattcaagagtacttctctagccgagaacatctctcgtgaaatgaaatttttaaaatgtgaccactgtaaatgcagggacattataactaaagctgtttaaactctgtcattgaaataaattaaatactatattatattgcattattactttgttatattcactatcaatttatctgactgtgtaagaccaaagaaagtaaagactgagattggtaattgctactgtgtagtacatgtatttgtggatagagacgatattgaaatgtactgaataacataataaaactaggacactaaacagcagcttgatacacatggaaaagtagagaacagggagctgggtgaggtaaatactgatcctaagagacccaatgtagccatccagcctgagagtccatgtgttttacttttgtgccccactgaatttagctaattgcgaataacaggacatgaattttgaggccacttgcaaatagctgtcacgaatattaatttgggatgccagggttctctaacagttgacatttgcttttggccatgtcttttccactaaagcctcttctaattgcagtggtcctgtattcaggctaacaaatggtcccatgtggtatttgagagggaggtgtgtgaaggtcagggcctgtgccctgatttggctgggtggtaatctggttctagtgccaga

SEQ ID NO: 69199 - DNA, 1040 bp, Homo sapiens
cgagataaacctcagctttgtacgtctcttaacaggaaaaacaggaattctgaaacttaccctctgaccagggtgggatgatgataaaatgtaaatcatatatctaaaagttgcttagggatcattgtatttgtagatccatactgcttcctcaaatccattatgacagctcataagaggctgttattcaagcccaatggaggctttaaacacagtggaattctaggaactatacctgtttccttattgggatatgcagagtttcactggaaaatacactggttaatacagcaaagactttgctttgaaaagaatcaaatttcatctataagtatgtagtggatacattgaatgatgtatgatcatagatgattgttaaactaggcatcacctttgaaaagaacttcaagactgtagaatagacaaagcatttcatatttactgaatcctaataagtggaggatatgactcatttatatgtcatttatattttccagaaattgtgcatcttcgacagttttggaaccctggtctttgcagtatttatgggagtatggggtaagttttttttttttttttcatgcactcaatttgatagtattacacagttttatgtaggctatcaaagtaacccacttttaggatcttgtattgcccaggcttcaactcccctagaattccatttataactgagggcatttatcagttaacttttactatattaaaatctgcatcaaaatatagtggcttaaaacaacaaactttatttctcatgtttattatttctcatcattctctgggtcagctgagagttcttcaggcatgggttggctcagctgactctccagtaagctggcagctccactggggatagatgatcttgcaactagaaacccggtttggtctgtggggctcggctgggaaggcttctctgctccacatggtgtctcatcttcaagtaggctagcccaggagtcttggtttcagggttccaaagagaagagaggacaagcttcagtgcatatgcatttttaagccta

SEQ ID NO: 69200 - DNA, 1047 bp, Homo sapiens
ttacattggcattcagccatttagcatgttttggctggagaccaaactctgactaatatttgacccatagaagaataaagattgaatgtatgtattaagatcctctgtgctcctccattgtaatacacctttctccgccctccccttccgcccagtaagagcttaggtgctgaacacatgggtcagcattttaactattaaccgtactctcagcgttgaatcataatgtataacattctaacacatctactaaactgcatatactaatggatgctgatagccccaattaaagaagacatttgaaataaagcaaaaaatgttaattttgacactagaaagacaagcctcaaatttactagctaaccttcctttctctgatcattaactacaccatggttatagaactgacttacacattagctgctgattttatctgatttttgaatgcagaaagtatttcagcactgcctatagcatcgtatgtatatttttaaggatatgtatgataaactttaagtgctttgtgtggctttccttgttacttctgctttgagaactactgctgtgaaccactttacagaaagtttgaaattgcagaaccaaacaggctacagcctcttgtgaagttattcatatcaccaccattatgttcctgcagcatcttttttgtgcccagacgcatatggcacttatttttctgctccctagaaattatgaaagttgagagtagaaaaccttttgtaatcaatataatataaatcatatacgtaccttaaaaatgtccatcctttcaggacaaggcagcccacctgttcatactgattcatagagtcctaaacaccaacccatggttgaagtaaaggttctaaacacatcctgcccactcccttccttgttgcatcttgcctacttacacctgattctccctggatcagacttggctgcatgactgcaatgtttaattttcacctttgaggggtgagttctaaactaggcctacttatttccagaaaaccaccagtcatctggctcactaaggatctgggg

SEQ ID NO: 69201 - DNA, 1044 bp, Homo sapiens
tccaagcaccttgggaggccaaggtgggtggatcacctgaggtcaggagtcaagaccagcctggccaacatgatgaaaccccgtcactactgaaaatacaaaaattagccaggcaaggtgtcacacacctgtagtcccagctactcgggaggctgaggcacgagagtcacttgaacccaggagacggaggttgcagtgagtgaaaatcacaccactgcactcgactgggtaacagagcaagactccatctcaaaaaaaaaataaataaaatgtctaggaatacccttaacaaaaagataataggaactatcaaagaaaacataaaaactcttgaaagttgtaaaggatctgaatgaatgataattaaatgaatgattctagatagaaacacattttctgtaaaatatcagtacttactaagttagttttaggcttattgatggaatcatattagtgatgtaataatttagtgtgagttttaatggctcaagaagagccagattcaagaatagcacatgaagcctagaaatagcccctgatagcaataaaaatgtaatatgtcagaaaagaggcattataaatccatcagacaagtggagattattcaataaatagtaatggaatacttgttagctatttggggggacaataaatgttaaagtcttactttaaaccatatactataataaatttcaaaaacattaaaaaaaaaattaaaggccaggcatggtggctcacgcctgtaatcccagcactttgggaggccaaggcagcagatcacctgaggtcaggagttcgagatcagcctggccaacatggcgaaaccctgtctttactaaaaatacaaaaattagccaggtgttcacctgtgatctcagctgcttgggagactgaggcaggcgaattgcttgagtctaggaggtggaggttgcagggagccgagactgcaccactgcactccagcctgggtgacagagtgagactctgtctcaaaaaaaatgttaaaaaggaagttgccaagatggccaaataggaacagctccc

SEQ ID NO: 69202 - DNA, 1053 bp, Homo sapiens
tccaggctagtctcaaactcctgggctcaaatgatccacccaccttagccttccaaagtgctgggattacacgcataagccactgggcccggccatctttaccacgaattcttaaagcattctaatcatgttgtctgagaatgaactcagcaactgtaattagatgtgattcagcttggcctggagtccgtgcaggcacagctgttggccgatacagttctgaactgagtcagttaagcaagcctgcaggagcatgcagcttcgtggcaggaatggtcccgggatgcccactttcacatctcatgcctgcctttgacagcctatttcttctggccagtggtttctgcctggttccttgagtgacttcatggctcataactggcctgaatttggaaccattgtgctggtctggaattaagatttagcacaggtcctctctttcctaaatgccttggtccatttttatattatttgcttggactcttaattcttttcagtagaacttgattttgacctctcagttgcctttaaacggaagcatctcaaaatagatttccataggaaacaccaccttttgtattatgcatgacacgcttatatctaatagatggctaacaatttacatggtttttatctgtgccctttcagctaaccattgcattcaattacagttttttttaagcttaggagaatagaaaaagaaacacatcatttttgttgacaggctttgcatttatgcacagggctttgcatgttggcaaagacacccctttgtggttcctgtttacaagtctgcagttagaaggtggtttttattaaatcacattctatatataaaataattgcttttaaaaatatacattatacatggaaacacatctgcttccttcaatgagtaaaaggttcatcttgtggcttctttagtcaacagtactttgcagcagcctggagcctgttttgaatttcatttttgctttgttatgttttgtgaccaggttttattaagggtgtagctgcagtacatatgtagaagctgtccttagttagttatta

SEQ ID NO: 69203 - DNA, 1429 bp, Homo sapiens
gaacccaccgatgcctctgctgcactctccaggactcaggccttcttcccttcatgctctcatctctgcttggttcgagcccatcacctgccatgaagtctcctaacctttgcaggatgagctttccaaaagggcaactaggtaattgggaggatttgcagtcctccagctcttcatttgttcattcattcattcactcattcatccattaaacatttattaagcacttgctgtgccaaacactctcagttgctggggataccagggcacttggtccctcccctcacggagctcagcgcttggtgcatggttaaggagaatgctaatcagacttccttgagcaggtgatatttgaactggattttgaagggtgaatggaagttagttatctaaagtatggtgaagagaatggacattttgtgtggagaggtggacatatttaaaagtacaatagcttgatcaaagaatggcaagtgaacaaaggactcacaggtgggaatatcaggtaggcaggggccatatcatgatgggtctggtgtgcttagcctgaggacttgaactttattcttaaagaaattaggatccactggaatatttgtaaacaagataactgcataacatttatgtggaataagatcaatcacgcagcagaatggaagataatattttggatgagattcgtggtgggagggagatgatttaggaggctacagcaggtaacccagacaacaagtgataggtgcctaaatagtgggcataggagtagagagagggagatggatttggtaagtgttaaagcggtgaattgcatagcagatgaggaataaaattaagataacttccaggagaccatatatgcagggcagaacataaggagaggagctgttctctaggaaatgcctaagtgttggatatttttagcatgaaaacatctgaaaggcaatgtccattagaaagttggacacaacagtcaggagctcagaggagccatgggtgaggccacgagggtgaatcaggcatgcctagcaggaatatcaagagagatggacagagaattgatgatgaggcccgggggtaaagggacatttgaagagtgaagagtgagggaggctcacaaagaaaaagaagagcagagcagtgggaagaagtctagcagagttgtgtcaacacagagaaggcttgggagatgataacgttgcttcagaggaatttggacatgatggaaaaggggcataatgggaaatacagagggggaagaaaggaagagccagcacctacacaagtcctaattgctagacctgggttgggaagtggaagcagtgctatagctaggtagggcttttttagtttttttgtttttcaatatatattttgactttttaaaactaagtaaaaaagaaatcaaggggaaacaaatattccacagcag

SEQ ID NO: 69204 - DNA, 1027 bp, Homo sapiens
ctgagactacaggctcgtaccaccatgcccagctaatttttgtattttttgtagagacagggtatgttgcctaggctggtctcaaactcctgggctcaaataatcctcccgcctcagcctcccaaagtgctgggattacagagattagctgccatgcctggctgacctgtcagcttttttttcttaaatccatttgggattactaacagaatttacattagaattctaaattattttgtggaaaaaaaatttgatatgtccctgaattcaagtttgcccaatcaagagtttggcacatcctaccactcattcattcatcattatttgttttttcttaagtcaattatcatagtggtcttagttttctcattaatttatttctaaatagtttatgcttttgttgtcattataaatggtatcttttctcttttggatttttaacaaggtttactgataacataatcctaatctctggcttctcttgaacaatcaggagatctggcaacatggagccctcattccaacatggcaactatgagctgtccctttccataggacacacgcttgctagtttaccacagttgacgggctgactccacacatggctattacttgcatgccctgcgggctgatgagttatttagggttgggtgagtcatagggaagttgacatcactgcttattgctgctgctcatgactctgtagcatcaccaactctggtccttgcctggctgacttctctgcatgagtgttcctgcctggcctgtgggacttactggatccttctagccctgtctgctcttctgcaacatgccctttggctctctgaccagaagcaaatgccagctctgcttgcctcgccacaccctccacagccttgcccttcctgacagagtcatccctgccccttgtctgagcatgaggcctaatggaactctatgttttcctcccatccacagttttagttacatatctgtagatgtttcctctgaaggtctgccagttaggagggcagggtctaaaact

SEQ ID NO: 69205 - DNA, 1032 bp, Homo sapiens
aaaaaaaaatcctaaaccacaaatcttctttcaacattctatttcaacactgagaatgaataatatgcttatgatgtctcaagtttattaccagcgaataattctggttgactaaagatgtctaaatatattgttcctattaagtgtatacatgtgaaagaaacaggctataattaatcttctttccagagattttatatttgtgttttgtttgaattctttcactgttgaacactaaattattatttaccacagatgtgttttctctctgggatttagttcgtttgcctttctctttcaagagtaaaggaaaatatgttgtccttccatccaccaccactccatgatgtgtgtccattccattgacagttattcagtttgggttcgtcaccttatttgtggcctcttttccactggcccctctgttggctctcgtgaacaatatattggaaataagagtggacgcatggaaactgaccacccagtttagacgcctggtaccagagaaagcccaagacattggagcatggcagcccatcatgcaaggaatagcaattctggctgtggtgaccaatgtgagtagacctaagctttacagagtaaagaccttgaagatgcattagatttgctacctaaggaatcaaatgtttagtgttttttaaaatgagaggaagatgctaagtctgtcatccacataaatgatatagttgctatatataaccacttgttaaatgtattttcattttgtatataattatttttaactgtcaagacctcctatacaggtactgttattgctcatttgctaaagtttttattcagtatgaaatatggtaatgataagaagtactaacacttttaatcctcacataactataaaaggagttatcagaaaatgttttttttataatgtgggtagaaatctgttcatttagagtttgagggccctaaaataagatcattctaccatattttactactacatattccaaagcatcaccctaaaatattgactctgatggtgaagtataa

SEQ ID NO: 69206 - DNA, 1083 bp, Homo sapiens
ttcaagaccagcctggccaacatgacaaaaccctgtctctactaaaagtacaaaaattagccaggcgtggtggcacgtgcctgtaatcccagctactcaggaggctgaggcaggagaattttttgaacccaagaggtggaggttgcagtgagccgagatcgtgccatgcagcctgggcagcaagagcgagactccgtctcaaaaacaaaaaactataacttcattttcgctttgtttttctcccaaaataggccatgatcatagctttcacgtcggacatgatcccccgcctagtgtactactggtccttctccgtccctccctacggggaccacacttcctacaccatggaagggtacatcaacaacactctctccatcttcaaagtcgcagacttcaaaaacaaaagcaagggaaacccgtactctgacctgggtaaccataccacatgcaggcaagttctgctttacttgtttaaaaatgcacttcatctttaaaagggtttttcttgtgacttaattctgtttggtgtcatttttaaaatttttatttctttataacttcaggatcaatcaggtgctttggtgtcatttaaatcaagctgctagagacattttttccccatagctttctcttgagtgaaactcagaaaatgtatatatatgtatatttattaaaaagttaatgaagactaggggtaaaactttcagaccaggggtaaaactttcagaccaaaccataaagatttaaagttgagagtttcaaacgattacagggagattgattccaaagaaaagtcatagaaatagagaaacttcaagaggtccaagaaccaagataattcagttgttaatactattgtgttattcaagcacaatctgaagatattgaatgatggcaaactagcacctcacataacagggacatacaaagataagagatgtgaaatctcagctgaacagtattatctaaaaatattccaaagttctctgcatcgattttaatggctggtgagttcaacagtggacagtatgtaccaggtaaattaccaattgataaagtttgtgaactgtaggtcatcaa

SEQ ID NO: 69207 - DNA, 1075 bp, Homo sapiens
agagcacccctctcctgaactccacccatgaatccaacggcctacctgacctttctgcttggatccctaatagatgtctcacatctgctgccccacatgcctatattttcctccattcactccaaatgttctcctcccaacccagcccaaaatctctcccatccacagtatttccctcttgattatggcaactccatctcaacactgctcaggccagaatccttggaaccctaatgctatatccaatctggttggcttttcctttatcagtgagcacttcagaccaattgtgctgctaccaccaggtcagagccactatcattttttgcctggattagggccagagtctcctagctgggcttgcccttcctctctcactcagagtcagagccagagtcctcacagtggcacacaaggcctcatggatccagccacgccccagtgcccctcagacatcacttctcttctcgtcacctgctccgcaccatccttgccttttctcgaatgcattctgaggctcctccaaaccagctctgcattggctattccctttacctagaatgtcttttcttctgatatctgtagggcttgttccctcacctccttaaagtgtttgctcacttaggcatatccagactaatctacagaagaatctcttcaaagtactcatcactttttaacaccatgaataatttgtttttaattatgcttatattatctctctccccttgctaggtcagagatttttgattgataaattaaaaaatgaaaaggtgtttaacctcattggtaatcaggaaaatgcagagtaagaccaaagggaaagtccatttcataatcactaagttggtttaaaaaaaaaaaaaaaagcctgatccagcctgggcaacatggcaaaacccaaaattagccgggcatggtggcaggtacctgtaatccagctactcaggtggctgaggcaggagaatcgcttgaacccggaagatggaggttgcagtgggccaagatcgcaccactgcattcaagcctgagtgacagcaagactctgcctcaaaaaaaaaaaaaaaaaaaaagg

SEQ ID NO: 69208 - DNA, 1096 bp, Homo sapiens
ctggtctcttgttaatcgtccgccacagctcactagaatgtaagctctagaagagttgagatcttgtcttatttacttctgattcacctgcacctacaaggcctagaacagtgcctggtatatgaacaggtgctcagtaaatttgtgttgcatggataaacttgtttccaagagatttccagcagcgtgtgaaatgaattctggctgtcctcagagaggaacctaacctactattgcagcagtttaggtgaaagtttatagggactatttcaggccccactcaaatgcagaattgaaagatacacacgaggaagattcaacagatatgagcaactgatggcacaaaacagggaaagggaggaggaggagaaaagagattctgacccaaaattatatggctggggtgtgatagtactatcactaacaacaaatggaaataggaagatgagggggattatgggttctgtttttgacatattaggacaggatactagcagggaattcgaaatgaagaatgtgacccaggagagagggtcacctctggagatgcgctttggggactgtctgcatcaaattgctaattaaacccatggggtgctaggaaactgctaaaggcaagagcccagagagaaaagggcctgacagactgaggaggcaagtctggagaagggctgctcagggaggggctggtccagcatccagcgccgccccagggctgctgagcacaaggcgggtcaggggcatgggaggttgtctttgagtcacttcattctctgcttttcaaaactcaagcttttctctactgtaaaagttgttgatgttttctttctagtccatcagcctacagaaactttacctaaacaaacaaacgaaaaaactcagcttttttctacctctctagttcatgtcacattctaatgatcacttttccttgggttttccccttctctcaagttgagtctttttcatagtttcattctgtctatttgtcttttggtgatctgtccactataaaataggtatatgccctcctgacttgcaggaaaaacatgttttctttcttttatttttaaatggcacaagtgataaataaatt

SEQ ID NO: 69209 - DNA, 1033 bp, Homo sapiens
tattttatagtggacagatcaccaaaagacaaatagacagaatgaaactatgaaaaagactcaacttgagagaaggggaaaacccaaggaaaagtgatcattagaatgtgacatgaactagagaggtagaaaaaagctgagttttttcgtttgtttgtttaggtaaagtttctgtaggctgatggactagaaagaaaacatcaacaacttttacagtagagaaaagcttgagttttgaaaagcagagaatgaagtgactcaaagacaacctcccatgcccctgacccgccttgtgctcagcagccctggggcggcgctggatgctggaccagcccctccctgagcagcccttctccagacttgcctcctcagtctgtcaggcccttttctctctgggctcttgcctttagcagtttcctagcaccccatgggtttaattagcaatttgatgcagacagtccccaaagcgcatctccagaggtgaccctctctcctgggtcacattcttcatttcgaattccctgctagtatcctgtcctaatatgtcaaaaacagaacccataatccccctcatcttcctatttccatttgttgttagtgatagtactatcacaccccagccatataattttgggtcagaatctcttttctcctcctcctccctttccctgttttgtgccatcagttgctcatatctgttgaatcttcctcgtgtgtatctttcaattctgcatttgagtggggcctgaaatagtccctataaactttcacctaaactgctgcaatagtaggttaggttcctctctgaggacagccagaattcatttcacacgctgctggaaatctcttggaaacaagtttatccatgcaacacaaatttactgagcacctgttcatataccaggcactgttctaggccttgtaggtgcaggtgaatcagaagtaaataagacaagatctcaactcttctagagcttacattctagtgagctgtggcggacgattaacaagagaccagagaggtaaataaaac

SEQ ID NO: 69210 - DNA, 1045 bp, Homo sapiens
tctcatccctaaagtcagcatcttacttaatcgagaaatacctgccaaattcaggaataagacaaggatggacaatgtcatcattactatttaaaaccagtttgaaattatcatccagtgccagtagacagaggcatatgaattagagaaaaatagatacaattatttctgtttacagattatattatatatcaggaaaactaaaaaaaaaaaaatcattggaaaaactgccaaaacacttaacagaatttagtaaagtgcaggttataaaatcaatatatagaaagccatagctttaaaaaaaaatagagatggagtcttgcccaggctggtcttaaattcctggcctcaagcgatcctgccttggcctcccagagttctgggattacaggtgtgagccaccatgcccagccagcaatagcttccgtatataaaaatagcaactggttggaagatttaaagactccttttataattgcagcaaaaccaacaaaagtacctaggcataaataataagaaatgaccaaaacatatatgaataaaacactcctgaaagacacaaaaatagatatgaacagatagtaggccgtaagtttagataggaagactcaatattataaagatatctaggccgggcgcgatggctcacacctgtaatcccagcactttgggaggccgaggcgggtggatcacgaggtcaggagatcgagaccatcctggctaacacggtgaagccccgtctctactaaaaatacaaaaaaaaaattagctgggtgtggtggcgggcgcctgtagtcccagctactccggagtctgaggcaggacaatggcgtgaacccgagaggcggagcttgcagtgagccgagatcgcaccactgcactccagcctgggcggtagagcgagactcagtctcacaaaaaaaaaaaaaaaaaaagatatctattgtgataaatattatcagttttttttcttgaagctaaacaaattgattatatgtttcatttggaaaagcaactaaacagaaatagcctggaaaactctaaa

SEQ ID NO: 69211 - DNA, 1034 bp, Homo sapiens
cagccatcacatctacattccaggcagcaagaaaggggaatgaacaaagaagaaggagcaaggggattaaccaattacctttattttgtgtatgtgtgataaaacatacatagcaaaatttatcattttaaccatttttaagtgtatggttagttcagtggcattaagtacattcgcactgtataaccatcaccaccattcatgtccaaacattttcattctcccaaacagaaactccatactcattaaacattaactctccattctcccctctcttccatccctggcaaccaccattttacttgctgtctttatgaatttgacaactccagatacctcgtatgagtggaatcatacaattgtttgtccttttgtgattggtttatttcacttagcagaacgtggtcaaagttcatctacattgtagcatatatcagaattcccttcccttttaaggccaaataatgtttcattgtatgtatataccatattttgtttatccatttatttgttgatggacactgggtggcttccaccttttggctatcgtgaatgatgctgctgtgaacatgggtgtaccagtatctgtttcagtccttttcaaatctttttttttgagacagggtccaggctagaatgtagtggtacaaacttagctcactgcagcctcaacctcccaggctgaagtgatcctcccacctcagcctcctgagtagcttggaccaaaagtgtgccaccacacctggctaatttttaaattttttgtagaggcagggtttttccatattgccaggctggtctctaactcctgggttcaagtgatcctcctgcctgggcattctaaagtgccagggttacaggcatgagccactgtggctggcagctttcaagtcttttgagtgtatagccagaagtagaattggtgggtcatatggtaattctgtctttaatattttggggaatggccctgctgtcttccatagcggctgcaccattttatacttccggcaatgcacaagggttccaatttcacc

SEQ ID NO: 69212 - DNA, 1035 bp, Homo sapiens
ataaaatggctggcatagagttagaagctcagtaaattgttgttatctttacaatttataaatgacttaacactaaggattttgcatttcataagaattctgccactttttctcttttaactaaaatttggaaattaatttttttttaatttccaacttttaagttcaggggtacatgtgtaagatgtgcagatttgttacataggtaaacttgtgccatgttggtttgctgcttacatcatcccatcactcaggtattaagccagtatccactagctatccttcctgatcctctccctcctcccacctgccaccctctaagaggccccagtatgtgctgttgtcccccatgtgttcatgtgttctcatcatttaattaaattatttgtgacatctactgacagcataacaagataggtatttttggctcttccagagctaaatgccaaggtactggataaaacacaatatacagacatacttttcaatgtattgtggagcttgcaggaaaataaggaaaacccccaagatttccagccaccctcaacaaaaataaacaaaatttaaaaaaacaccaaactgaaatcagagaagtagctaagtgaagaactgtggctgctttaggcatatatgccaagatcgggaacctagagtcctaggaagcatatggaggtgcaggaaaccaggtcccaaggcacatatacattggaggagttaattctgagacatcttccaccctcgctaaataaacagatactagaggaggctacagcctcagtgaatatgtgatattaaaataataactaatgtagacattaaaatagtggatactaggcttaatacatgggtgataaaataacctgtacaacaaacccccgtgacacaagtttacctacgtaacaaacctgcacttgtacccctgaacttaaaaaaatgttaaaaagacaaaaatcgcatatatatatatatatatatatatataattacggtacatatatggcataaatctttcaaaattgaggaaaacaatatttg

SEQ ID NO: 69213 - DNA, 1002 bp, Homo sapiens
gatttggtatctagctgtaatcacctctggattctatcatggcatctgggtgtctgagcagaagaaatcctggatcatgtgacttatccataaagaatagattctacatttagatctgatcacgtgcacagagtacctaccctgtgccaggcacatttgtgtatggtatttcatctagtcactcacagattattaaatcagctataaaaagataaaatgcttttacttgaaataagattaatgttccctgagaccctgcactataaaataattgttttttccagcatagtcatttattacagttaaaggaaaatgttataaaacatttggatatttctcatatgctccttgcataaagtaagcagatttatatttatttcaatatgatcaaaccctagagcttaaatgctttcttttgtatataatttatactatataaatatttaaatatacaacagtaatagttaatatttaagaatagtaaatatttaaatatacaagagttgtccaaaacaaaaataagagttctggatcttactagctccaatactactttactttgaaatattgaatgagtgatttcatatttctaatattatttatctttaaaattgggaaaaaatatcctactgaatatgattaattgagaaccctaggtacaaagtattccttaaatttgaagtgataactactgaaagtgtatcccagagggaaatggtctaggttggaagatatacatatggtggtcataaagaacattcagcctcattggacttctaaaaatatttttttgctgtgagtgatagcctttttttttttaattaatttttttaactgctccttacagagcagggctactacacaggcagtgtgcccagagtatccaccaagcctttatttaagagctacatttttaaaagcaaatattggtctttagggttctttgcgaggaaataataccgcgtggaggtatttgtgattcttatatattgactccacaat

SEQ ID NO: 69214 - DNA, 1060 bp, Homo sapiens
ttgaggagcatcagtcatttatgacttttcagaagttaaagtatcatctcaggtgaggacagcactttctgccacctaggaagaatatggagaaagcaaaattttttactactttgtcttaagaacagactgcatgtctagaagccaatttggtttttttctccaagctgccagttccctcttcaatattatacagtgttttgttttggtcatagcaccaattactaatttaaatgagatttaacgaaactctttcaataataaataatacataacaaaatacgtgtgtgaccatatatttgcaagaaaggggttgtgccatgaatctttttttctcagtttaacaaataaatttgcaaaggcaactttcaggaatcagaatgttattttaaatattattaacaagacaacaaattattcagacaactaatcagaattatagactttaaacttacgttatttttcacagaatatagcaacactgaaatccaggcgtccaggaagactattttacttgaaataatatttttaaacccagttttatgatatagaatagaattctatttgcttttctgcagctttagggaagaggggacattttccccttttgatattgctggttttttttttttattttaagaaaacagcaattagaagtgtctaaatatcagatttccattagctagcatcaagagagaagagtaggtacaaacttaaaattcagaaaaggacagaaagggccaggcatactggctcatccctgtaatcccaaacttggggaggctgaggtaggaggattgcttgaggccaggagttcaagaccagcctgagtgacgaagcaagatcccgatctctacggaaagatcagccattcctggtggctcgcagctgtagtcccagctactcagtagactgaggcgggaggattgcttgagcccaggagttcagggctacagtgagctgtgatggcaccactgcactccagcttggatgacacagcaaggccctgtatcagaaaataaagagaaaaaggacagaaagataatgctaacaaatggaa

SEQ ID NO: 69215 - DNA, 1127 bp, Homo sapiens
aacattctttctgtcttgctaaaaaaatccaattttcagaatcaagttagttgctaagcaaatatgcataaaaccatacatttatctgaattgtttctaatttaaggagtagtatataaaagtttcaacagaaatcattgattagtaaaagtgatggaaaatcagcaaaataaaaatagaattagagtaggctaaaaggcccttctttagggtaatcggaaaactgagttcaaatatagggtctgggacttctcaggtgatattttatcttaaattagaatctgcatgaggtagggtggggccactcatgcctataatctcagcactttgagaggccgaggcaggagcgtcccttgagaccaggagttcgagaccagcctgagcaacatagcaagaccttctctctatttttaaaaaactaaaattggatttaaataaagaatctgcatgaactttcttgtcacttattcttacatattatttgccagtgtgcgatacttaataaccaagtaagacacttgaaatgagtcttttaaggctacaacttaggtaacattttataaatattactgctacatacataatacagtaactttttttagcctcacaataataccttgtacaatttataactgctaaagggcctatagaaggctacccacctatgtaaaaaaaaaaaaaaaaaaaaaaaggtcctagctctgtctggtgtagcttggcaaattatttttgatatgaattgccaggaatataggggtatcattccttgctgataagagcacatacccttcctttgctggctaagctatgtgattctgtaggaccttagtgtcatggccatcctttcagtagtaagcagatttagagaagttgtcccattgttaccttatttcaatagtttttggtctttctatattgtgcataacctcacttaatcagattgttatgactgtttccccccaggaagtataggaagataaaaaaaaaaaaaagccaggccagatatatatgactgaacgtgagctcagcaaatgatataggtgtcttaaacatactttcttttttttttttttaaagggaggggttctggctctgtcacccaggctggagtccagtggctcaatcat

SEQ ID NO: 69216 - DNA, 2105 bp, Homo sapiens
ttcagtagatattggagattatgctttgtacattaaatccagtttgatttttaagtgataattttcaattaaagactttttaataagacaactaaaaaattaaattttagtcaattacaataatattttttggagaagcattcccagatgtgcttttgacggggagttgatttcattagttgtttgggttgtttaatccagaatttttaaaactgttatgggtttaatttgctacatttgtccattcttattcatttcatctgttttgatcactgaaaagttgtctaaaaactgtgctcattatacacagtttatagtattttaatactttgtttatagtatttaatagcttctgaaaactttaagagaacatactaaaccaaggaactatttattaatggtaatctatatttagtaataaatatatttgtaacttactaaatgtaagtttactaaatgtagattactaaatcactgagtaaatatttcttgaatatttggacaagagatggggggagggagaatgacttgaccctcaagaaacttaactgctacctttaaaaggttataatgaagctgggcacagtggtacacacctgtagtcccagctactcaggaggctgaggcaggaggaccccttgagccgaggagttcgaggctctgtctcttaaaacaaaaaaagttataaaaatattcagactggagggttcctaacttttaatacttaagcagggtctttaccacagagttaaatttaaaattctgtttagaatggtaacaaatttaattatgtacaaaacagcatcactttagtgttaggatcagtgttactcaaagtgttgtaatgttaataacaagcatttaaatcacattgtttgaaaactgggatctacaaaaaatatgattccaataattaactttttaattatgggaaaggcaagggaatgttcagtgaatgtaaaaaaaatatactactgagcaaacaaattgttttaatgaattttgattttctgttttaattttttggtacattgactcttcttgacatggcactttgctattaattaaaaaaaattaaaccccaaagacaaattaattctgtatttaatgcagatttaattcttgactagctgtaatgcttaaggagttggcagtcttgttggcaaaacaataaaataggaattaagctgaaatgtaaaattgtgtaataattaggtttcattaaagtatatatagtttccttaataactacatgagtcagtagtgttgacttaataataagttatttagcttttgcttttctctgaaaacatatcaaactcttcatatatagcatcgaaatagatattcaacctgagccactgtaaattgttgaagcttattgctatacattaagggaaattctatccaacagttcagtgtaaacaattttttaaaggtgctatgattctttaacatgatttgtagtatgtagaactcaagtattctagaataatctttgcatgataatgtatgagaaacatttataaacagtccttcaggtgtacaaaataactgacataatattttgcatttaactacactgcctccaagtattttaaacaaagatgaaatttttagagtattgtgctatatttttataactgaatttccctcttattaacaatactcataacatttagccattaatgattactgatagcttaaataagagtgtagtttctgtttctaatgtctattaattttaaccccatttaaagatatttcctacttatcatactcaaagttaatcagaagttaaataaatgatggtccttctggttctctggaaactgaaaagaagcttctgtttctttagggtatgcaggaattttttttcttcccagtgagctgaatccatcctttacgctgctatttgctaacctcagttgtttttctgctccattaaagttgaggccaccaaaaatagtagtaatatcacaactacaaaaccctgggtggatttgtacccattgcacatacacttcttgctgccaattcctaagagacttttgaaataatagtatattcccagctggacaatatattctacttgtggcctatgt

SEQ ID NO: 69217 - DNA, 1592 bp, Homo sapiens
acttaagatagcaggttaatattgtctcaggcgagacttagaacgtcttttctggtatcccagtctgcagtgggcaaatctattgtctttatttctcatttaagggcagaatggagggatgacatatttttacttttcaagaggcggttgccacttttaagtcactgttgtgtgtgtgtgtgtacatacacaaacatacgatagtgtgttttcagagcaagtatcaaaggctaaagacttggagtgatactagtgtttaaaagcctttttaaaaaaattaagatgtgatgagaaactggagaattgacttttaaaaatttcttttctgtagaagaggctatcttcaaaatggagtcctaaagtatatctgatggatagaatttaaattcttaacactgtatataccctgtggtcaaaagcatcaacgtaaaacttgatgtttatcagattacttatgtttcaattttcctgtggttagaaaaattaagacagaagtaagctattaacggtatttgcttgtaagagtaacgttaaaggtttaaggaaaggtttgttgaaatcgatatgcatcacacgaatcatttattttcaatgttgttttccagttgcagcaatcatttgtgtttacatgactttgaaaaagggtttagtttatgttgattttgaccctcttatttaatctctagtgcagaagtgcagctttctgcaggctgcgcctcaatcgctaagttccactctccatcctctgccgcgctactcctggcatgtggatcaccaagatacaatttctggtcctgtctgttcttattgatgtcctttacagttaataaatttgattgccactaatcagtctgtatctcttgcaaaaacaccacatttagcatccaagtagagtcagagtatgttttttatgagattgtactaaagtaaccttctattacatttcttattaccatattgcatttcctatagtgggcagcatagagcaggtggatcctgacaaagtaatgttagagatgtgctgacagctttacaatagatattctccaactaatttgacaagatataaaataaaatgtagttcgtagttttcaagcattaatggaaagtgttcctattaaaaaattaccaataacagtggaaattgttgcaatccaatttgtatagtttactgttttgatgacaaagcgcttatgatgggaaaaatgtagtgttgcttttgtaactgcaaacgctgcacgccgtaattagaggtttatgttattttatttgaatttttcattcttaccatcagttttcatattagtcaggaaattgtgataaattaaaaattccctcattcaactaaaccttaaaaaactgtacccagtttcaaatcaagcattatcaggtgtatgattacaacagctgaaataaattgaggaattggtatgccaactcagtggagaaattttgggattttaggtcactctaagatttaaaaaaatagtttgattcgttaaacaaggctattgaagttaaattgatatttccttaaagatgattttagagaaaaattccttggcgagcttcgagaatgcgttcatggcttc

SEQ ID NO: 69218 - DNA, 1274 bp, Homo sapiens
cccgctcgcgcgcccccggcagcagcaccatgttgaatcgcgtccccgggctgagctgcctcagccggcggcgctgagaggcgggcgagagccgggccacggggagggagggaaggaaggggtgggggccgcgctcgccccgcggcttcgcgcggatccggcagtcgcctgcccttctagtttcgctccgatttctttaaacttttttagaaattcccctccctccttccctcctctccccctggcctcctgctccctccttcccctcctcctcctcctccccctccctccctccctccctgcgccgccgccgccgccgccgccgccgccgccgccgccaccgccggcccatgactgagccccgccgccgccggccgaggaatgggctccgggctctggtaggaagcgctgggagcggggggcgcttttaaaacaccgatctgggttttttaaaaacctcctttgaaaaaataatggcaaactcgacggggaaggcgcctccggacgagcggagaaagggactcgctttcctggacgagctgcggcagttccaccacagcagagggtgagagcagaaccgggggggcagcgccggggcgagccggggcgaacggggctctcccgcccgggccgggcacggggtcccggctgacaagtgcggggctttttctctcccgcaggtcgccttttaaaaaaatccctgcggtgggtgggaaggagctggatcttcacggtctctacaccagagtcactactttaggcggattcgcgaaggtgagtggaagttttaatttgtatttccctctcgctggcctcctccaaaaagtctcctttgaccccggagtgggcgcttggggctgggggggtggcccgcgggggcaaaaggcgttcttttcgctcccagccggtggcacggaggcggacggcggcggggctgtttttggcctggtggctcgcgtgcgcgcggcgggcgcggggctccggcgggcgggcggcccggcgccggctcgcgccctgcccggtgcccggtcgggccggcggggtctgagcgccgcggcggggaatgcgggcgtgcggggcgccagcctgagccccgcgcccgccccgctcccgcgccgcccgcccgctcgctcgcgagtcagctctgccgccgctgccgctctagcacaggcggagacacacagagacacacagactctgagagcagttttcgtgcaactcaaaattagcgcgggcaggtttaacatcgataatcggctgcgaaataatcccgg

SEQ ID NO: 69219 - DNA, 1139 bp, Homo sapiens
ccatcttaggcttcaaggctaggcagaagctgtaggcctcaaagaagggcctatggagatggatagatctgggagagggatcggaatcggccccagccccggccccccccccaacccgcggacgtcgctgtccggaactgtattgatccttttgaacttttttttttttttttttttttagtgtaaacggaccgcgttgagatttaaaagggggcgacagagggacttgcgattggttattgtccgggcttcaaaaacaaaacaaacccaccaaacccccccacccccaaacaaaacaagtggtattaaatacagggctctctggtgaaaacacagtgattcaagaagcccttgcttagtaactcttaccgatcgatccgaaacacccactgatgccttaggtatctacagatctctgtagaatgggtatttatttcatagttaggttaagattttcttagattgttcacgttcagacaactgtgcctgtgttttaccaggtttctgagaagaatcagtggggagaaattgttgaagagttcaactttcccagaagttgttctaacgctgcctttgctttaaaacagtattacttgcggtgagtagtagtgacttttccatagtatttggaaataagggacttatggagagatttgtttttagcaaaaacaaaagcaaaccttgcacaccaaacagttcttaagctcttgttcatttcagactgagacacatttaatataaataaagtgagattgtaggaaggtgaaagtcttcctcaccaatttcaggatcgtttacatttttcatacaaaatcattacaggtgacaccccagccccaatcttggtaaacattcttttgtgacattgttattcatcgcttgatacccactgaggggcagaaaggtgatgcttagtaaaagacttaagatagttaatgaaactttgtaacctttgggaaaatttttttctttgttttggaaactcctttagttttaaaaattctggctttaagaattttttttttttaatgaaacttcttgtttggaacagtgtcattgaataggtttttcagtagaatattcctacatggcataacatgttggtggcttaggtgaccaggattgttttgataattact

SEQ ID NO: 69220 - DNA, 3885 bp, Homo sapiens
aataggaaatgcagtaatcgcacaggtgtactttctattggctatcttagattgacttcaggcttgaagctggagttcgcagaactttgtggagtagttattgagttacacaggaagtctagaaaatattaaatatggttgtcatctattgtgtgtgtgtgatggcatttgtgtcagagtacattttaaattaaagggctaaatcaaaaagcaaaattaacctccaaaaccgttgagttagtagtggggtgagaaacaagagagttttatattcatcgtgacattcatttgctcatttctatttatgatattgagaggaacatgttaatacatattctggttttatgtttttatcagtttaaagcatttgaattttggactgtttgaaatacatatttttgaagttttgcttcatatttgttagattgattgacttaagttttataaccagaaagtactatagaatatacatgattcatgagatgtatatttttctgaagagtttacattcatactaatagttttagcataatcaaattaatatctaggcttccaattttttttaacaaaagttaattataaatattgtttttccagttgtcatttttatcttgggaggatatcattaattataggtactgtttttaactatatagtttcaacattgtaagtatttacatggtcttcagatcaaattgggctttttgctcttattagaagctgctttttgaactatgtccttagttaaacttgtttttcctccatatgtcactctctaggtttgtttttgcagggttgtagctaggctactaggaaaaaagttgaagcatttgttttggaaaataaaaccatgtgaagatttgcatggcttgtaaagaaatacaaaagaaatatgctggtcaaaacttaggtactaccaaccttgaaagaattttttcctggtggtctaatattgcacagtaagaggatatatatgatgctagcttttacaccttcctctgaaaaatcttaattggcagacaagatgccaagtaacagcaattctattacctacccataagattggctcttcatagtaagaaatagtaatcgagtgacttgataagttacctctttgctacgtcagattgaatatcatcattactgatgagcagataatgcagtgtgttttttaaattacaagtggaataattttttaatatgaactgctttttcatttgacctattgtaagactgtcattatatgtgttattcctcctttacaagtttaatatttgctcacattcccctgtaagtttgctattaattggatggatggctgttagcctagtgttttatgatatatcttcataatattacagataatttaaattaggaagagcaagctagtatgctggccatgtatattttaatagtgttttgttatttttgatacaaatattgacagtcattaaatatagacttgagtattaatggtctgccagacattaacttaattttctcaaatatacatttattcagttatagcttgtctacaaaaatttcttagagtctaaaattgaaaatgcaattgattattttaacattggcatttaatttttacaaatataagtgcctgcctgtatcaaagtttctcacctactccagaaatatatacacgtactgtgtacccacaaaaattaaaaattaaaaaaaagtaaagtgcttacagataatgtgtaaaagcagtctatttaaaaattggaggccaggtgcggtggctcacgcctgtaatctcagcactttgggaggccgaggcagacggattacctgaggtcaggagtttgagaccagcctggccaacatggtgaaaccccgtgtctaccaaaaatagaaaaattagcctggcatggtggctcatgcctgtaatcccagctacttgggaggctgatgcaggagaactgcttgagcccgggagtcggaggttgcagtgagcggagatcgtgctactgcactctagtctggccgacagagtgagactctttctcaaaaaaataaaataaaataaaataaataaattaaaaattggatactaatcatctgtgatgtttatgcactttattttcatgtagttccttttcttggcatgtacatctcaatgtgttccaccaatgtttattattaggatattcctatagtatgaaaggataaggtatagtttcccacattttgtagatggagatattaaagtgcaaaaaaaaaaaaaattaaatggcttagggaacatttcattaattggaccaaaatgttgtgttcatgacgtgttcaataatatttggaaattacttatggttaaatttatgcccaagtatctctttgcctaatgtgttccatatttacttggtggattttaattttttgttctgttttgttgttgaaattgggggacagtttgctggtcttatctgggttaagaatttgaagttttggtatgaagatttaggtaaatatttcaaatattttaaaattttgtttttgcttactgatgccaatattacagctatagtcaaggttaacttgatgtttcctttataaaacttgatttttttggaaagggggtgaaatatcttggacattaaaaatttattgtacaaaactatatgttactagttttctggcactgaaatattcatttctatttatatgtacctacctttagaatagtcagaaacttaattgtagagttatgtttaccatagtacattttcaatcgcattgtgaatttattctattttttttttcttggtgggtaaagctctttcttaaattacaccatttgagggagtttacatttgttagttaaattgaatgaatacactcatgtgttctctagttagtgtccaccatatagatcaattcttttaagagaaagccttaggtatataagcactgagtttgtaaattgctaaacggaactgaataaactgattgcccttcttattcaaggaaggaaaataaaagtatatggagattggaagacaaatatatcaataagttattcatgcatgtatttcaaatttaactttataaactgtatcgtgtgtgtgtgtgtgtgtgtgtgtgtgtgtgtgtgtgtgtgtagacaggggtcttgctttgttgcccatgcttgtcttgaatgcctggcttcaaggtatcctcccgcctcagccttccaaagtgctgggatacaaaagtgagccactgtgcctcagccttccaaagtgctcggatacaaaagtgagccactgagcctggcagtgtatccattttaaaaaacaaaaaacctgattttgatattttctgatattctgttacgtttttaaaggacatgcagacttgttgaaaggaagagcagaaagtggagaaagttgaaagacttatcaaagctcagctaggttagtgttatgtcttagaatccatgtttttagagcttaaattgcccaaagtagaaataaattgagttctttctaagacagatagttttcactgaggttacaaattttcctgaggatacaaaatgagaacattataattcccaaaaatgtttatatgctttttttttgcagttaaattttctaccttagctgttaactaaaaatgtccctgaatagaagcactctttcataatcctatctctgctttgttgtggattcagtattttcatagttgatcgtgtgaaatctataacgtctttgatagacaagtatattgtggccgggcgtggtggctcacgccctgtaatcccaacactttgggaggccaaggcaggcgaatcacaaggtcaggagaccaagaccagtctggctaacacagtgaaaccctgtctctactaaaaatacaaaaaattagctaggcgtggtggca

SEQ ID NO: 69221 - DNA, 1064 bp, Homo sapiens
cactccagcctgggtgacagagcgagactccgtctgaaaaaaaaaaaaaaagtatattgctactagatattttatattctcaaactgaatgaaattagaagttggaaaggaaggaaaaacacagttttaactgcatttcattagtcagtgagcaggtacttaatatatatttttaggtaaagtatttaaaagttttaattatattgtgaaggtgcttattgggtgttttccagacctactaaagtttaatgataaaaatggattttgtctgaattgggaaggacatagaggataaatggagcagacggatggggttgaggggattctccttttgctgctttgatcaccacagtctttggtattcagggccaactagagtttgtactctagaaacactagttttccagaaatgttaatatatttccatgaaaagaagacgaaatgaacttgagcaaaaggctaaacttgggttactttattgcaggacttcttagagactttattttgctaatgtgtattgtggatctctagacattttggggaaacattactacttctcttcccttccccatagtaaatagtgtttcaccagtgtttcaccccacagtaaatagtgtaacaccatcgccaaaactgcaattacttgtgcaccaacctaagagatgcacaactatacattttctactgtttaaactataatgtgataaaagaaataacaaacttttttctgttttaaaacataaatttcacttgtgcttggatactttctgtgtattcattatgttgtgaattgataattcatttgactaaatacattgcaataaactattgctggaatggaagtctcttagtgatgtccaggaatagctatcacattctgaattgttgaccaaaaatgatagacccatattccatgaatatctaagtcagcgtttacagggcttcactcccatcttactgccatagaaatttttggtggagccccagggagaatgtgctggttttgatgttttggctgctgccttccctctccccccgccctttttttccccattataccattg

SEQ ID NO: 69222 - DNA, 1413 bp, Homo sapiens
atgaagtactaagatttgtgatgcttctggctatatctgatgtcatttctaaagcaactactaaaaagttatttttaactaatagtatcattgaaatacatttatgatttcaacaaggtgattacttggaaaataatgttcattggaatgaatacattctggtttagttgtttcaaaaaacaaactgttgaatcttatagaagcatttcattcacttgaatgcataagtaatagtatcaggcaaaaaaataataaaaaaagagggctgagtgatgcaggtaagtgcttacatttcttcagtggctctctattgctaaagaagaaagtccaaatatattagtaggtcgtaaaaggcccttcattacttttccattcttaatctccttgccatacccttgcacatcttttgaagacagatactatgtctttttttctgttttaaagcttggttaatgaacagtcagtacacgttggtagaattagttagtagaattagatccagccatgctgatccatttatagttctccaagcatgccaagtttttctcacctttctgcctttgcatgtgccattttccctgtctggaattcctttccttttttcattgcctgacatactcctacctatctttgaaattgaacacaaatgtcaccttttctaaaaagccttttcttatctcatcaagcagcttgaagtagatccttctttataatcccactttcctcctcatttatatctctattacaaacactactataacaacttttttattgtctgtttcttctgtgaactgtgagcctgaggaggtagggacttagtattgtgtattttagtagccctaacatcataacacaatactaattagtgcataggagttacctaatgtgtggctaatagaatcaatgaatgaatgcttgcaaggataattggaaataagaaaagtaggaaatcacttttgtttgagatagagaggggcctatggaagagccctcaagcttgacattgaaagactggttggattcagatagaaacaataaaaaggaagatgggggactttttagatatgaggaaaatggaaaatgagagtctgtacagtgtattttaaacatgtaaatgaactctgctgcatcggaggcgttaacgcatgtgattggtggaatataagacctggaccaaaaattggttttagactgtggaggattttgaaaatcaaattaacatatttgagctttattctgcatatagtgaggatgtgagatttgggggaggttttgtagttgttatttgtttgttttttagcagaacactgttttgatgaaagtgatgttttgggaacattaatcttacattggtatgtgggataggtttgagataggaggaagtagtggcaggaatggcaaacacacctgccc

SEQ ID NO: 69223 - DNA, 1037 bp, Homo sapiens
aacttccctacctgtaacattcaaggcatgggtttgcttttgcttagaagagtggaggaggctgggcacagtggctcatgcctgtaatgccagcattttggcaggctgaggcgggaggattgcttgagctatgtgtggtggcatgcgcctttagtcctagctacttgagaggctgaggtgggaggatccctggagcctgggaggttgaggctgcagtaagctggcatagtgccactgcactccagcctggtcaacagaatgagactctgcctctaaaaaaagaaaaaaaagagcagaggcggttgtaatataaacaaaatgtggagctcttttcatggtattcacagcaagttcaggaatagtctccttgcaatgcaaggagtattcatctttgtaaactgcagcctgaattaagggaaaaatctcagcttgttcctttctctgaatcattattataaggaaaaggagtttaagctcctaatgaagtatcaaatcccctttcattgtacaattttggatgattgactaaggactggttttctttgcaaagatccctaggccagcattcccaaactgttaagtaggtggactgtggaaaatgtgttctgtacttaaatactatttggaaaaacagttaaacatcgttcttttctgcaacacttctcaaactaatatgcttataatgtatcttctgactgtccacagaatttcccaaacacatttgagcacatattgtcccatctcttcccactcctgacctcaccagcccctagcatacgtatcactcacagggtaaatgtgaagttttaggaaatgttgccgtcagtacacaaacttgctagataaaatggacccaactgggatagtcttgaaaaatgtttaacttactgagacagatgtgaaagcccattgcccttctagttctgggatgattgatcatgatcacagagagcttgattgagaaaaaaggagaagccaagttttagtggaatttatttagaatgcactagaagagtaaaaacagttaacattcatta

SEQ ID NO: 69224 - DNA, 1064 bp, Homo sapiens
cgatagggtctggctctgttgcctgggctggagtgcagtggtgcgatcatagctcactggagcccgaatctcctggatttaagcagtccttccatgttggccccacaaagcactgggattacagatgtgagccattgttcctggcctggattgttgttttacacttaaactgagaatatgtcttctgagtttaacctattagaatttaatgtgattatttctatgttagaacttagctctgccattttatatcatatcccttcagtgtccaagttgaatctttctcttctcccttccttgcccaacaaattccaagaagtttagcatactctccacactgcacccctactttcttgaaatagggtgatgtgatgttttaattatttattcttatgaatacacttgttttaagataacaatacatcttctaaaattttttccttcccatattttgttgttttcttctggatatatttcttttttgactagattacatttttcaaatgttctttgaaagaaggtcttttttttgtggtaaacattgaggcattgtctgcctataatatgtttaccattcacaattaagtgataatttaccttgatttaaaattctaagcatggatttgtttttctacctcaatattttgaggatagggtaatgttttattgtcctcttcctgtcctggtggtgttctgaaatctggtatcagtttgaccctgctcttttttaggtgatgttgcccctgctcctcttgctagaagcttttaaaattttgtctttgaaaggcttacattttactccagtacatttaggtatggacttttttttttccttatcttttctccttagcactttaagccatttcaatctgagatttcatattgtgaattctgcaaaattctgtcattttttcaaattcttcttcgtttattttctttgcttatagaattccttttgggtagatatttacactaatactactttccccaccatattttaactagcgctttattcatctttttgtcgctttctgagaccctttggaacatttcctagattaatt

SEQ ID NO: 69225 - DNA, 1097 bp, Homo sapiens
catgtgctctgtgcatccctaaagatgccctaccattatcaatgtcttcaagtgttgttgaactggtttttgagatccagcaatgtttatattacctcagcgtcatctgtagagtgggattcataggaataagccagcataccagcagatggtgctagtctcttaacttttcagaaaccaaaacctatatcttacttctaaaggtaatagctataaatgattaaatttctttggaattctcagaacatcttagggtattaaagtggttttatgaagagataagagaacaagtttatctttaacaatttctgtctctttcctcatgcatcaaattgtgctattctggttacagtatatttaaaaaaccttttgtgatagaaatataactgacttttaaagtattgtgatctataacagctactatttattgggtgcttattgtgtcttggatactgtgctaagtgttttatgtatgtaatgttgggataagaccaggattatttctccaatgagaagttttaacttaataggtttataagaattgtgtattactattcttcaaaacaaaaattatgttcaatatagtttagtaatagtaaattccattaaagtcataaaatgtgaggcaaggtgcggtggctcacgcctgtaatcccagcactttgggaggccaaggcgggtggatcatgaggtcaggagtttgaggccagcctggccaacatagtgaaaccccgtctctactaaaaatacaaaaaattagccgggcgtggaggcaggcacctgtaatcccagctaccggggaggtggaggcaggagaatcacttgaacccaggaggcggaggttgcagtgagccaagaccgctccattccattccagcccaggtgacaatgtgagactcagactcaaaaaaaaaaaaggtcataaaatgttttgcctgtggaagagggaaataattggaggagattgttactgttgttattgttttcagacacaaagtctctgtcacccaggctgcagccttgaactctgctcaagggatcatcccacctcagcctcctgaatagctgggactacaaaaaaaaaaaaatttttttta

SEQ ID NO: 69226 - DNA, 1118 bp, Homo sapiens
tcaggaggctgaggtgggaggatcacttgagcttgggagattgaggctgcagtgagctatgaaagcgacattgcactccatcctgggcaacagagccagacatgtctcagaaaataaaaaaagtgcagctaggtcaattaaaatactgattcaaaaatattttggcaatgatggccaaatggtatgtacattttggtattttaataccttttcaagaatgtaattttaattagtaaacctaagaagttttaaaagttgaacgttttgaacctctaatcagtttatattttatatatatatatatttatattatattttatatatattatatatatatatttaaagctgtgttctgtattcaagggatattcaccataaaggtatctgatctttgatatacttaaggtattttttttctttgttagattatctgcgtcaaagttatgggctgtccatggactttaattcgccaaatgattataataaattggtgctttcactgttatctggactcccaaatgaagtggactttgctattaacgtatgcactctcctatcaaatgaaagcaagcacgtcatgcaacttgaaaaagatcctaaaatcatcactttactacttgctaatgccggggtgtttgacgacagtaagttttaagctgaatgtattatataattcttctgtaaaagttttttttttaaggtttttaaggagaaagtactttttgtttgtcaacataatagcattctttattttctgtttttatattatgcattatttaagataatgaatgtttggggggttttaaccttaaatatttgaatagtaattttgtctcagtgtttttgaagtaaaagtcctggtttttaagttggagtaatatatagatttcctgagttgagacgattgcttgctacaagattttgacaaagaaaactaggatctggaagaaattgttttctgaagtctattactgctaatgtgtggctataatttttaactaaaacattttaggtcaatgcatttgaaaatttgtcttctaaatcatcaacgtaaggcttatcaaaggcttcatatcatttttacttgtagggtttgctagttgtgggttttgataaat

SEQ ID NO: 69227 - DNA, 1080 bp, Homo sapiens
tttccttaaaggagatttatgggaattgtgggaattatttccatggagtgccttgctctctatgttttttgaagtgtgaattatgcaagtatttctgaaattaatatgaagattttaaatgataacctggaaatttaatagcaataacctcagtttgcttttttaagatttttcttctgtataaatgaaagccagtgtggagtaactcttaagtactcttcacttctttattatctgtataattattatgaaaaagagtctatattattaatttgtaggaacacaaattttctttaaatctaaaaacaatgtatttcaaaagaaattatcatgactatcatttactataaaataatttttagtacacaagatatattaagatgtagttttgttgtttttccaagcctattattaaataattaattgaaagaatttattgcattttattgaatgtactatttatttatttgttttttagctttaggatccttttccactgtatttggagaagaatggaaagagaagactgatagagacttcgttaaggtaaatcattttaattaaaatgttgattcattgagttacatgcagctaagccaacaatagatcagtggttgcttatttaatatacataatactacctatacttttatctttacctaatacatatgccatacacaacgattttaaagttgtgattgagttgagtgaaaaatcttttagaatacccacgaacagacataaaattttcattgatttctgtgaatagtaacaacaatagcagtaaacaattgaatgaccctcttctcaactgggattctgagaatgggtttcaggaagttttcgtttttatgtgtgttctgaaactatgcaattcagaaaggaatgaagggccagacctgccatcaaatcctcaaaaagaataggtgtaaaagattagtaagtgtccatctagaggaaaatttctgggaatatatttctgaaacaaaatatagttgtgaatttcaagtgagaaactacaaaaagacttgaacaaattgttttctcacttaacacttgtctaactttgctggctttcaa

SEQ ID NO: 69228 - DNA, 1186 bp, Homo sapiens
ataattttctgcccttacattgtcacatattctgtctgcccattctttctcttcttcaggaactccaattatttgtatgttagaacttttcactgtgtgccttatgtctcatacactttttttctcttcatccttttgtctctttatacttcaaacttatttacttgccctctcttcttgctcataaattcactcttgggttgtatctaatcagttcttaaacatatccactgaattcttaattttagttatgtttttcagttgtagaatttctttttagttctttcatatagttttaattcctttgccaaaatttttagttttttatttctttgaacttactattcattgtcattttaagttttgtgtctgatatctttaatatctgaattcttgtggcccttctttcttggttattgaacattgtcttttaaaaaaatgtgcctacttcttttttattgctaccaaacattgtttgtcatagattttttgtgcaatggatttctttgatgatcacatgaagccagtaagcctttttccaactaatggttttaaatgcctaagaactttgattccaaaaaaaaaacccagttgttttgaaatatacacataatgtcacagatactgctaatattactatagttcattgcttaatattcagagttgaagaaattctaaagaaatgtcagatttccaggccgggcgctgtggctcatgcctgtaatcccagcactttgggaggcagaggcaggcggatcacaaggtcaagagattgagaccatcctggccaacatggtgaaaccccatctctactaaaaatacaaaaattagttgggcgtggtggcgcgtgcctataattccagctactcgggaggctgaggtaggggaatcacttgaacccgggaggtggaggttgcagtgagccgagatggtgccattgcactccagcctgggtgaaaagagcgaaactccatctcaaaaaaaaaaacaaaaacaaaaaagaaatgtcaaatttccagtagtgtttaatgtacatagagatgtcatttttcccccatccaagttcacagatttctgatttctttcacagtccctttagtcgtctgtggccctcaggttaaaaagccctaaacataaaaagatgcctttttatataagtatctgaaactatagacaatcaaatatt

SEQ ID NO: 69229 - DNA, 1381 bp, Homo sapiens
agattgcagtgattttgagaaatctttcctttgaggagggcaatgttaagctcttggcagctaatcgtacctgtcttcgtttcctattactttctgcacatagtcattttatttctttaaggcaattaggccttgacacattaggaaatattgcagctgaggtaagcatgtgactgtaccttaaactagtttttatagttagcaacatttatgttacaattttaggatgtggcattttatagttgccatatttatagactattaaatgcttacatgtattagttgctaaaaatggtgatgtagaagtatcacatacttttatggaaaaaagtatttgaaatgatgctttaaattcagaaatggctatttttacaataacattttttaacgttatgcaacattgtcctgtttattttttatttttattaaatttgaagtatacaactctggaagaagcatagctcaataatagtgttgtttctttttccagcttttactggaccctgttgatttcaaaactactcatctgatgtttcatactgttacaaaatgtctaatgtcaagggatagatttttaaagatgagaggtgagttttcactgaagtatttactttctaaagtaaacaaactatcatttcttagtaatacatatttgtatgtttttcaggcatggaaattttgggaaatctttgcaaagcagaagataatggtgttttaatttgtgaatatgtggatcaggattcctacagagagatcatttgtcatctcactttacctgatgtgctgcttgtaatctcaacactcgaggtgctatacatgctcacggaaatgggagatgttgcttgcacaaaaattgcaaaagtagaaaagagcataggtaagactggaccaaaaaacacttattttctttattgagtaaaagtgtttaatatggtactgtacaaaaccctcaatttatatttgaggtttagtgttttattttgaagagtcattacctcctcaggcatacttgtttccattattctttattatgctttaaattcagtgatggctatttttacaataattacattctttaacgttatgcaacattgtcttgtttattttttatttttattaaatttgaaatatacaactctggaagaagcgtagctcaatgagcaagaagcatctataatttagaaaccaggattacatggctatcagtaattcctatttcttctcttaatttctgttgttacgtattaaatttgaaatggacaaaactgctatatctaacttatctgagagcaggtctttctgtttcatatggccagctactactgttaaacaattaaagctaagtgaaatatgtttccttctgttcctagaagttgctggt

SEQ ID NO: 69230 - DNA, 1050 bp, Homo sapiens
tcagtcttcagagattgagcctaaaaatgttttgtttttttttttttttgagacagaatctcactctgtcgcccaggctggagtgcagtggcctgatcttggctcactgcaagctccgcctcctgggttcatgccattctcctgcctcagccttccgagtagctgggactacaggcaccatgcccggctaattttttttttttgtatttttagtagagatggggcttcaccatgttagccaggatgatctcaatctcctgatctcatgatccgcccgcctccgcctcccaaagtgctgggattacaggtgtgagccgccacgcccagcctaaaaatctttttttttaaagatgcacaggtaattctgatgtactgtgattcatggactagcatttattcacattgataagtattctgtacaacatgtgttcaccagtgatggcattcatttataatattattgactaataactattgctttttatttattttagacatgttagtgtgtctggtttctatggatattcagatgtttggccctgatgcactagctgcggtaaaactcattgaacacccaagttccagtcatcaaatgttatctgaaattaggccacaagctatagagcaagtccaaacccagactcatgtagcatctgccccaggttagtgttttcacatattctttttcagtgtggttacgagtgtataagatttgatcctaagaataaatttcaatgtgcagtatagagaactgatattttacagtatagtaggccaaagtggaatttggatatgtactctaatttcttagatattatacattccaggagtagcaggatcaaggtgagctcataggaagaatagtataataggaaaattaagttcggcaggatttagagtaatgtgatgaattagatattcataattacgatagctataagtgccccaataggcatattatttgtgattttggtcatgggaaattgacatgccaggaatagattattcatatattaccttatgattttctcaggtgatcatcaggacgcg

SEQ ID NO: 69231 - DNA, 1057 bp, Homo sapiens
tcctctaagacagtgcctggtatgatatgtgctccattatatattaggtttgttctcaaatgtgtatactttcatatgtttatacaccttttaaaaaggtattcattgtgttaatgggttcaatatccataaaaaaaagtatggcaaatagtgactaacttttaagaaatgatgtagctaatgtatttttttctttagcttccagagcagttgtagcgcagcatgttgctccacctccaggaatagtggaaatagatagtgagaagtttgcttgtcagtggtaagtggtttatttctattaaggatttatccttgggaggagtaaagcaaagaaaaaaaggaaatgtattctacagacatccagaatgttttgttctgtattcctttttagttagagtagaatatcatttacacaaagaaaggacactttaaaatccccttgtatattggaataatttgaaagaaaaatattcatcagaattttcagaattaaaatagtatgactagaatgtcattaaattacaccatttaacttttttcagagtaaaatttgtgttaaaaagttatctttcactttgtagaaagtacagtttgtcaggttacaaaatttgttcttctaaaattaacattttgttaaaactgaattggactgaccttaagaaaataaaagcaggtgttttaaaatgtctcttctcttccatctaaaacaaaacttcttattctttaataatttttgggtttgtaatagtagacggacattaatcaaatgatagaacagaaataagcagcttgacaataatatttccttgaaaagattgtgtagtcctatctgcaccactttctgaaaaaaagcaaatgaagagttttaaaaatttcacttgttatggatagttgcctcaacattagtatgaagttcggcttaaattctttagaagattaacagattgaattacacaatcactttccaatgatatatcactttaaaaatttcttgatcacttttctgccattcactaacattatttgtctcccatttcatgctcctgtcactctttgt

SEQ ID NO: 69232 - DNA, 1053 bp, Homo sapiens
cagattgttctgtttctcgagcagaaatgtattctgaatacctctcgacttgcagtaaattagctcgtggtggaatcctaacatcaactggattttataaatgtcttaggtaggatccatagttctttaaataaagtccatttacgtcacttacaacatctcttgctctttaaagaaaataccaaatatcttatctagttttaaatatttctactactagaagtttcgtatggataggttatagtgtggtggaggtttaaataaaaagcagtttcagaaatcacatctagtgtttgtgttggaacattatgagatttatcaaagaaatgaagtttactttctttttcctacctacttttacatgttaaagacatgactgtatctttttaatcttgaataatagaatataatattattatcttcaaatacaaagactttttgatattttgcaaagtacataaaaataggtatcttttattagttatatgtgggtggaattgtttaaaacccagcgacattgttaataaataatgatgttttaaatgggatgattaatcttttatatttctttgctttccatccttgcagaatataactgtgagtcatactggttcatacataagcaacagtaaacatactgctgttgttcatgtaaacataatgttagaagtcaatgtgatagttatcaaaacttactgattatgtatgtactttacagaacggtctttccaaatcatacagtgaagagagtggaggattccagtagcaatgggcaggcacatattcatgtggtaggagtaaaacggagggctataccacttcccattcagatgtactatcagcagcaaccagtttctacttctgttgttcgtgttgattctgttcctgatgtatctcctgctccttcacctgcaggtgttaatttttattgtatttttaaagtattactgatttaataataaaactgaatgaaaaatatatattctatgcattttaaatgtataacttttgtgtctccagtagcattttcttacttggtctattaccatattc

SEQ ID NO: 69233 - DNA, 2573 bp, Homo sapiens
tttcagaggactcctgttgccaaccaatcttcaaatctgactgcaacacaaatgtcttttcctgtacaaggtgttcatactgtggcacaaactgtttcaagaattccacaaaatccttcacctcatacccaccagcaacaaaatgctccagtgactgtcattcaaagtaaagctccaattccttgtgaagttgttaaggctacagttatccagaattccataccccagacaggagttcctgttagtattgctgttggaggaggacctccacagagttctgttgttcagaatcatagtacagggccacaacctgttacagttgtgaattctcagacattgcttcaccatccatctgtaattccacagcagtctccattacacacagtggtaccaggacagatcccttcaggcactcctgttacagtaattcaacaagctgtcccacagagtcatatgtttggcagagtacagaacataccagcatgtacttctacagtttcacagggtcaacagttaatcaccacatcaccccaacctgtgcaaacttcatctcaacagacatcagctggtagccagtcacaagatactgttatcatagcacccccacagtatgtaacaacttctgcatccaatattgtctcagcaacttcagtacagaattttcaggtagctacaggacaaatggttactattgctggtgtcccaagtccacaagcctcaagggtagggtttcagaacattgcaccaaaacctctcccttctcagcaagtttcatctacagtggtacagcagcctattcaacaaccacagcagccaacccaacaaagcgtagtgattgtaagccagccagctcaacaaggtcaaacttatgcaccagccattcaccaaattgttcttgctaatccagcagctcttccagctggtcagacagttcagctaactggacaacctaacataactccatcttcttcaccatcacctgtcccagctactaataaccaagtccctactgccatgtcgtcgtcctctacccctcaatcacagggaccacctcctactgtcagtcaaatgttatctgtgaaaaggcagcaacagcagcaacattcaccagcacccccaccacagcaggtacaagtacaagttcagcagccccaacaagtacagatgcaagttcaacctcaacagtcgaatgcaggagttggtcagcctgcctctggtgagtcgagtctgattaaacagcttctgcttccgaaacgtggtccttcaacaccaggtggtaagcttattctcccagctccacagattcctccccctaataatgcaagagctcctagccctcaggtggtctatcaggtggccagtaaccaagccgcaggttttggagtgcaggggcaaactccagctcagcagctattggttgggcagcaaaatgttcagttggtcccaagtgcaatgccaccctcagggggagtacaaactgtgcccatttcgaacttacaaatattgccaggtccactgatctcaaatagcccagcaaccattttccaagggacttctggcaaccaggtaaccataacagttgtgccaaatacgagttttgcacctgcaactgtgagtcagggaaatgcaactcagctcattgctccagcaggaattaccatgagcggaacgcagacaggagttggacttccagtacaaacgcttccagccactcaagcatctcctgctggacaatcatcatgtactactgctactcccccattcaaaggtgataaaataatttgccaaaaggaggaggaagcaaaggaagcaacaggtttacatgttcatgaacgtaaaattgaagtcatggagaacccgtcctgccgacgaggagccacaaacaccagcaatggggatacaaaggaaaatgaaatgcatgtgggaagtcttttaaatgggagaaagtacagtgactcaagtctacctccttcaaactcagggaaaattcaaagtgagactaatcagtgctcactaatcagtaatgggccatcattggaattaggtgagaatggagcatctgggaaacagaactcagaacaaatagacatgcaagatatcaaaagtgatttgagaaaaccgctagttaatggaatctgtgattttgataaaggagatggttctcatttaagcaaaaacattccaaatcataaaacttccaatcatgtaggaaatggtgagatatctccaatggaaccacaagggactttagatatcactcagcaagatactgccaaaggtgatcaactagaaagaatttctaatggacctgtattaactttgggtggttcatctgtgagcagtatacaggaggcttcaaatgcggcaacacagcaatttagtggtactgatttgcttaatggacctctagcttcaagtttgaattcagatgtgcctcagcaacgcccaagtgtagttgtctcaccacattctacaacctctgttatacagggacatcaaatcatagcagttcccgactcaggatcaaaagtatcccattctcctgccctatcatctgacgttcggtctacaaa

SEQ ID NO: 69234 - DNA, 1141 bp, Homo sapiens
aagccctatcgtgaactgtgcatgcgaaggatctaggttgcacgctccttaggagaatctaacgcctgatgatcggtcactgtctcccattccccagatgggactgtcaagttgcaggaaaacaagctcagagcccccaatgattctacattatggcaagttgtataattatttcattatatattacagtgtaataatagaaataaagtgcttaataaatgtaatgcgcttgtatcaccccaaaaccatctcctcactccctggtctgtggaaaaattgtcctccatgaaaccggtccctggtgccaaaaagattggagacttctgctttgagggatgttatatacatggcaataattaatcctgagttattgatggaaaatactgtatcatttttattcaagcttccacatgttgagctttccacttaaacacaattttttaattagtgcaatgtggagtatatagtagatattccatagttaggttttttctcttatatttaataatttcccacttcaccttgattatgtgcctgttactcctcttagagacctttacaatcctaaatagttataacagaccaagccaaattagagaaaaactccatctccatcattatggaattgtttcaccaacactcattttttgtacccttaatcttccaatgtggttgtagtcagtaatatcacaattacaaagaatgaacaataatactagctaagacgaggacatgtcatagggactttatactaaagcagtttctcatttaatcctcacacaaccttattaggtaaaatttattataaagatgaggactcaagatggctagtaacttgcccaaggttaccaactaatatgaggtggtaccaggacagaaacctgggtttgtctgaaaccaaaactcatgctcttaacccattaacctttcttctttccactgttctagaagatttctctataaagctctagagagcctttttttaatctaacatattgattatttgagctgttgtgttagaggatgttctattaaatgatcattttaggacattattgctaaaactcattggttatttgagctgtggtgttatgagatgttctactaaatgataattttaggacattaatgctaaaatgct

SEQ ID NO: 69235 - DNA, 1062 bp, Homo sapiens
tttgctgacttagcctgttggcatcttgcattttcaattgtcaggataacaagttgtcgtcatcttgctgtttctaggttgataaaatattttgtgtgagagcgctaaaatactagatattttgctaatattactatccttataatttgaactaatgagccttcataaatgtgagattaatttcatttaataatttatttttggtaacatcagtttgagaaatatgtgttccttaggccttaactactgatttgccataaataatttttttaactaggaaataccctgatttctaccacacatagtagtagaatttttaccttgctctattattttaaacattgaataccaaagaatttgattacttaaagatgttatcaaatgccaaaaggttacataacaatgagaagaatttgccaaatcatgttgaagacatttttgttatcaaatatttacaatagttgggaaaagaatttcctagggtgagaatctagtatgtacttcagcaaaaacaaaaacaaagaaacaaaccttatttattccttggaaacttgtgcgtaaaataaggagaattatataccaatgctaacctcttatctagtatgctttcagaatttatttgccagtatgatatcacagatactgtatataaaaatatacccccatttttacctagtaatacatctatgtgtagtatttgagtaaacaattatgtagtatcacatagaaggagaaaatcaggtcttttatgttagacataccaggtttcaaatcccagttctgttacttagctgtataactctggaaaagttactttttgaaagcccacttcctcagcagtaaagggataattttatgttcaaagagcagtcatgggaatcaaataagatgatatatgtgaatatgccagatacatagtaagttctgagcaaacagaagttcaagtggagacgtactttgcgctatgtgcagctttgtcaagaacagtgtgaactgatgtgctagcatatctttcaaagagaagaatgaatgaataagctagaatttaaaagtttaaaatta

SEQ ID NO: 69236 - DNA, 1027 bp, Homo sapiens
ggaaataaattaatttctctttaatagtgtagttagtactttttttctattttgaacttttgcaactagataaaataaagttgggttagcctctcaccaaggttgttggtatattttttccccagaattttagcagcttgttactaagtcttatttgaatatataataatgcttgcccttgatatttcttttgtcatagaatatatatatctaaaacagatgccaagggttgaggtacaagttcatggttctgcaaccaataatagagccttttttaaaactaaaatatgtttgcagtatgaattttttggatgtatagtctcacatatacatttatgtgcatttattaacatttatgtgccatctttttaactagaatattcctgcaaaaaaaaaaaatcccttgcattttaagtcaggtgagtttgtttgtttgtttgtttcagtaggaaggctataaagaaggatatggaatactctttggccaccaaagaaaaatagcctgccaagaccttgagtaaataagaaaactccaaatgaaactatctgtattgtccattcttatgctgctataaagaactgccagagactgggtaatttgcaaaggaaagaggtttaattgactcacacttctgcagggctgggcaggcctcaggaaacttgcaatcatggcagaaggagaagcaaacatgtccttcttcacatggcagcaggagagagaagtgctgagcaaacagggataagccctttataaaaccatcagatctcatgagaactcactcagtatcacaagaacagcataggggtaaccccatgattcagttacctcctactgggtccctcctatgacaagtaaggattatgggaactacaattcaaggtgagatttgggtgggtacacagccaaaccgtatcattctgccctggcccctcccaaatctcatgtcctcacatttcaaaacacaatcatgcctttccaggagtcccccagagtctgagctcattccatcattaaccaaaaagtcca

SEQ ID NO: 69237 - DNA, 1045 bp, Homo sapiens
aactgttggattggatatgcttgagttattatatgtaatatgaaatctagtaaatgcttgagaaatttatgaaagtacagtagagtatggtatttgtttataagataatgttctatggtgtttttaatgatatttcattcacttttaagagatttttagtcagccttcattgaaggtagggaattatgaataagggatgttaaaacaatttaccaaaagtgttcagtacaactgatgattccacttggaaatataagcagagaaatttttgaaatagtttcaaaatatacttgaatacatccaagtgtctactacttttattttttataggtggtttcagacaccctcacaggttttctaccatgcagcaactgaacatggaggaaaagatgtatatccagggcagtgtctttgggaaggttgtgagccttttcagcgacagcggttttcttttattacccacttgcaggtacactttttaaatactatttgatcagtaactcatttgactgcattaaagattttgacgtgccattctcttgcttcctcttcctcaaaaaggataagcactgttcaaaggatgccctacttgcaggattaaaacaagatgaaccaggacaagcaggaagtcagaagtcttctaccaagtaaggaaaatgagtttacttcctgttgtacatacaaaaagaaactaggcaaaacacaagaaaatgaaacgcaacttagcatattaggagaccagaaacctgggttctagtccagctctgccatgaaccagcaatgtgaccctgttcaaattgcttagattctcttggcatcacttttccttttggctggacaatgtggtctgtaagttacctttcagctctaacactgattctgttttgtagactagtcagtcattggaagtaatgacagatgatatatgagaaatgctttgtaaactaaaagtactgtgtatggttcttttttctgtaaaagtaatcatctatttgataatggcaaagagatttcatatcttgtcattatcatatatatatatata

SEQ ID NO: 69238 - DNA, 1185 bp, Homo sapiens
agattggaaaataaaagacttgaaactttaccttgatactaagcgcccctttgcctaggctgtcacagagcataaacgttaatgctagaccattggacctttagtcaccctgtaaacacgattttaaaataaccagcttaaaggggttggcagggtggtcatagttgtcagtctgtctgcagtatcacgttaattctctctctctctctctctctgatcaatttaggcagccaactgtagggggcacaagctcaactcctagagcacaaaaggccattgtgaatcatcccagtgctgcacttatggctctgaggagaggatcaagaaaccttgtctttcgagattttacagtaagcatgccttgaaacccttatctgtaaaagtctgagtcctgtatgatttagatctttattcttttttttcctttctttttaaggatgaaaaagagggaccaataactaaacacatccgactaacagctgccttaatattaaaaaatattggtaaatattcagaatgtggtcgcaggtgagtaatatgttttctgtagccaaagtgaatttagtttattttatttttacatataagttaataaaattagataactgtattttcttcattgtttttctcatcaattttgcaaatacatccaaaagtttatgcctaggtcaggccatgatgagctcttaaaagtcaaaaataaatagaagttaaaacaaccaaaaggtggtctcttaagttgttttattaagttaatttgtcttactgaccatataatttagaacaaaaagcagctgtactaaagaggaaacttaggagtttattggggaaaacaaaggaatttgatcatttgaatcacgtggagtccaaatgaaattcagtttgacacctggcattttcatgtacccatcaatggcataaataatgttaaggtatgtgtataatactctgaagttttaaaacttaactttccaatggatttaagcaaaagaaaacccaggattttgtagatctacagaaactaggagggataactcattaattcgtgagagagcaaatatagaatattctgtcaataccttgtcttccttagttacttttctagaattcctcctacatcttcaattgaccagtcttgggccgcctctctgcgaaattgtcctcagatgcatcttgtgttcctga

SEQ ID NO: 69239 - DNA, 1002 bp, Homo sapiens
taatcaagtataaatgaacaggaaaatttttaacacttgagccaagttttttttagaaaaaaaagaaatataaaggtttagtaaccatatgagaataccagtatcttcatgatttagttcataacatttctttttacttttcttactttatttcccttctaacctcttttttgtttcatagcctacatttcagtgaaactaagccacatgcaagttcctaatcacattgggctctctcaagtcacacttggtacctttgttccaatgctcatactattctccctgcctagaatgccctcctccctgcgttgcccacctattgaatatctgcttatccttcatgattcagttcagacatgagtttctttgtgtagcttttcctttgctctattccccttccctactgagcttgttctcctctatttttataacatgtctgtcttaaaacttttaatctcattgttttgaaaatgtttttttatgtggctttttcccttacagaactatgtgcagagacttcctctgattaatctttgtagcttgaacacttagcacagtgcccaacacattataacctctacctcctattcatcctttaagattcaactcagtggttactgcttcctttcctgatgtcttccttactaccttaaccctgacctggagcacagtacatattccctaatgccccatgtgttgcatgttaccaccttagatgatgagctctttgaaggtagggattcagtattttgatctttgtatctttagtgcctagcatagtgttggcaatatgatagtcattcagtaagtatttgattgatagacaggtggtgggaaattcattttctcctagagttctgatctggaattttttgagacagagtctcgctctatcgcccaggctggagtgcagtggcacgatctcggctcactgcaacctctgcctcctgggtttgagcgattctcctgcctcagcctctcgagtagctgggattatcggct

SEQ ID NO: 69240 - DNA, 2385 bp, Homo sapiens
aatcccagcactttgggaggccaaggcgggtggatcacaaggtcaagagatcgagaccgtcctggccaacatggtgaaaccccgtctctactaaaaatacaaaaattagctgggcgtggtggcacacgcctgttgtcccagctacttgggaggctgaggcaggagaatcacttgaacccgggaggtggaggttgcagtgagctaagattgcgccattacactccagcctggcaatagagtgagactccttctcaaaaaaaaaaaaaaaaaaaaaaaaaggtactatgcagaaaaggcaaacagtaatagtcagcctcagtttatccttctagttgtttcccagatgcttccctctcttcctgcaatactatattaacatttacggggtgtggagctatgtattgtttctattttagtttttaaacttgcaaaattcatgataaagagtcatcgctgtgaccttggagactgacaatcttctatatgtttttttgcagattgttaaagagacatgaaaataacttatcagtgctagccattagtaacatggaagcttcctccacccttgccaaatgcctttatgaacttaattttacagttcagagtaaggaacaagaaaaagactcagaaatgctgcagtgaaaaataattccacttacacagtgggggactcaaagtcagccacatttcacatactgttactgaagaaagcaccaagtcttaatggaacaaagaccatagaatgaattattttatctcctcccatgatgctgagaggaagcttcgtattctgatctctgagtgaatccctttgttctctgtttaaaaaaatctaaaaagaaaaaggaaaaaaaaaaaagaactgctgtgggattgtcaaccagcttatctgcaggatgtttcagatctgataaatcctgatggaaactggtatgatcagaattcagtaccatccacattggaatatacatggaatattgtaaaacctacatgagcagatgaaatagaagcattaaatatttttatctatatccaaaaaggagcacatttttatatttacaaaaccgtttaagctggtttgaataatttaaaaaagtttcagcacacctatacccccgatctcagagggggccaccaatatctagctatggatcgtgtgttttgtttagaaatcagtagcttggttttcttacttgagccaatatattttcacttatttattatcataaaaatttaccagtctgaatagatcttgtaaatatttgtgaatagaatgaatacctttcatgccactgcagccactggaaatacattctgtggtgtcctagaagcattattggtaggttctaaagttttctagactttcctgtcaattgtaagtaattgtgatatattctatgcagtggatgaatgttctttaaatttgtgtaaatacttctgcaaaggtactgatgctgtaaagtcaaaacagttttgtggaactgtgatttttttttcttttttctttttttttttctttttttttttgtattatacaccttgtagaactcattttgctggctgaaagagtatggaataatatatctcatgtcattttttagaagaaaaactatttgaaggtattttttggttttccttaacatgtatccactgtaaacgtttgtcgtgtacaagctcagagcttggacagaattttttgtatttgtaaattggtttaaatacatggaattttatacaggttttctcctgtgttatatatgcattatgtgcaggtatgatattttcttcactactttttctatcttaatatagtgtggaattttattgtattattcttccattcttaatactgtaccacattcctgctcagaaactgctcacttccttaaattgtcttttttcccccagcgtgaaatgtatccatttataactgcctattgcctgttctattagcatccaaaaatgtggaaggcctcccaaccaccatttctgctgtgtccttaggatgtgcagtaaaaaatatagacctaacagtttatgttatagaatggctttatttactttggtgactgtttatagtttttaaataaaagactgaacattttcttgagtccttcatttctgagtatgcttaagacatcttaaaaatatagagagaattctaaattcagctgaaggcaaggtataacggtcacctacctatttgattatatgttgattgataacatattaaatagagaacaaataagagaggtcctttacatgacaaatttgcatgaaataagcagattaaccaagtatttatttttcatcttgttataatgcagagcaaatgtagagaacagcaaatgattgatgcagttaaagctcaatatgccttttttt

SEQ ID NO: 69241 - DNA, 1331 bp, Homo sapiens
ctggcgctgtcctgccatgtctcaaaggaatgtttgagaaacttcatctaatattagttataaggttgtggaatttatgcttggcccaccttccaagactggcactgcccaacagacaccgctgaaatcatgtgggtatccctaggatggccttcagagccctcaaacttacaagcacctggtagttgacatcatatggggaattttctattcaccgtacttatccaaaaatctcttttaaaaagtaaatttgtgcaacaacgtttatttgaaagataatgtcttctcaaaatcagaaactgcagtggtaattaaattaatagaaaagagaacaaactgcaggtttagaaaaatggttttcatattcaccattcttccacctcattgaattgcatgctgtagttctagcttttctgctataatatgtaaatatgactgtagccttttaagcttcagtctcagcagagaatttcctaaatgcgtttgacctaatgaaactgatcatggcttcccacttaggtttttcttcttatagctttatagaactatataataatatggacttgctgtgtaatggaattaaagtgcttttgcacaataagttctgcaaaaccctctcattcatgaaaaggtgctccttgctagacagaaacttgctgatttacagtattgttatttttgtctaaagttctgtaaatacatgctttaatgttatctttgagaaatctatgtaaataatatagtctacaacatagagactgtataattctgtgttatatatgtgcctagtgctctgttggcactcaataaattttaagtaacaaaattgataatcatatagcgaaggcatatttttcttccaagctcaagtcaggattgtgactatatattaatgagactcagtaatccaacccacacctgagaactcgtctcattactttatagtcatgtcatgtatgtttttttaaccatgaaatgacaataaaatgatttttaaaatgagaatgttttggataagtgacttctgtcctgatcttaaccactgctgttaaataccaaacagaggaaacatgatgcaaagcagaagctgctaaagagcagaagtggagctatggggttaaccacgtgggacacctggcactgtcactgttaccaaatagtaagttaaatgagaacaaaatccagtatctattaggaaattttagccgatcactttcatactgcttgactcttctcagactcatacagcagtcagtcatacgacaactacactagccttctccagaggcaacaaaacaaatgaagacagtaccactgtctaattacattac

SEQ ID NO: 69242 - DNA, 1013 bp, Homo sapiens
gctatataattgaaatgaaagagttacaaataccagtgtagtaatgtaattagacagtggtactgtcttcatttgttttgttgcctctggagaaggctagtgtagttgtcgtatgactgactgctgtatgagtctgagaagagtcaagcagtatgaaagtgatcggctaaaatttcctaatagatactggattttgttctcatttaacttactatttggtaacagtgacagtgccaggtgtcccacgtggttaaccccatagctccacttctgctctttagcagcttctgctttgcatcatgtttcctctgtttggtatttaacagcagtggttaagatcaggacagaagtcacttatccaaaacattctcattttaaaaatcattttattgtcatttcatggttaaaaaaacatacatgacatgactataaagtaatgagacgagttctcaggtgtgggttggattactgagtctcattaatatatagtcacaatcctgacttgagcttggaagaaaaatatgccttcgctatatgattatcaattttgttacttaaaatttattgagtgccaacagagcactaggcacatatataacacagaattatacagtctctatgttgtagactatattatttacatagatttctcaaagataacattaaagcatgtatttacagaactttagacaaaaataacaatactgtaaatcagcaagtttctgtctagcaaggagcaccttttcatgaatgagagggttttgcagaacttattgtgcaaaagcactttaattccattacacagcaagtccatattattatatagttctataaagctataagaagaaaaacctaagtgggaagccatgatcagtttcattaggtcaaacgcatttaggaaattctctgctgagactgaagcttaaaaggctacagtcatatttacatattatagcagaaaagctagaactacagcatgcaattcaatgaggtggaagaatggtgaatatgaa

SEQ ID NO: 69243 - DNA, 1779 bp, Homo sapiens
atgcctgtaatcccagcactttgggaggccaaggcgggcaggtcacctgaggtcaggagttccagatcagcctgaccaacatggataaatcccgtttctattaaaaatacaaaattagccgggcgtagtggcgcatgcctgtaatcctagctacttgggaggctgaggcacgagaatcacttgaacctgggaggcagaggttgtggtgagccaagatcgcgccattgcattccagcctgggcaacaagagcgaaattctgtcgtctcaaaaacaaaaaaacttacttaagaagtgttcaagcaaaaacattaaacaacagtgttttaagttttgtcgaattgataatttccaattatggcaagagtgccacgatcaaacactactgtgggcagaggggtgcaaatatgtacaatttttctgaaaggcaatttgaaaatatgtataaagaaacttaaagggattatatattcttttcataatataaacatcctggtccacatatttctttccagtattagtggaaaactggagagggatggttaacataaactatggttcattcatatgaaagtattttacagctattttaaatgtttccggggggcgggaaatggaagaatgtactcctttaatactaaatggagaaaaaataataggacacaaattatataccattatcctaactttctttaaaaactttaaggcaaaaaaatacatattattaatagaagttgtttctgggtaatagaggattttttcccctgtatgcttttgtctcccaaatttcacacagttaataaaaattgcatgatcagaaaaactatcttcaaaattgcaggcctcactgcttgtggtatgagggtgagagacggggtgaaggctttgctctaggctgaagagctgaaagtttcccacaccagaactggtctgagttctcagatgcttgagcatctgactgtgatgggcaagtgtctggtggctcctcacactcagctcctcagggaggagcttaacttccctggcaactgatgagttctagtctaagtagtcagcacgcactggctttgtggggtgagaaatgctttagtcatgaagcagtggacttcccaaaccataactagctgagcatactgcccaccaatcctgtgagtaccacagaagataatccatttctggtgataagcaggggtatcacagagggccccagtatgctatctctgaacctgaattgcctataaaaaggggtgctgcctatctaccttgcagggttactgaggattgagataatagatgggaatgtcttgaaatttcctccacatttacttggggaaattcctgcctatataaccaggactgttttctcactgctttcatccctgttgcatccctgaaatgcaacttaacttctagctgcctacttagggtcatatagagagttttataaaaggccatgcacaagcacaggcccaccccagaccaattatatctgtctctggggatggggtattttaaaatctcccaggtggagtctaatgtgcagccaagaagcaaaccatgtaacttttttagatcccctgcagatcacagctgtttggttagaataacataattaattagattacaacttgttctctttttgagacagtcttgctctatcgctgaggctggagtgcaggggcatgatcacagctcactgtaggctcaacctcgtgggtttaagtgatcctcccacctcagtctcccaaatagctggaactacaggcatgtgctatcatgct

SEQ ID NO: 69244 - DNA, 2007 bp, Homo sapiens
aggagatacatgcctcagtgagataaactgacctttttactagctaaactatttagccagagcaatactctgtagaactgtgcttttctaaagtaaagattatctgtttctcaattttatgtgcataatacttttcctggtgctagctttgataggcaaaatattttgaaatgttggtcccataatgattgtgctagttcataagctttgttgttatgagtgtaatcataaaaatatttccaagcagtttttgacctttattctacatttctgggcatttgtaatatggtattctactggtatatatttttaaagtttgcgtttagattatggtaaagaaatttcaagcatatttcttctaataaagtattaagacagtgtttcagaatatcaaggcacacctccttagttgttttagattagaactctagaaacaattttgtgaacattgaaagtattttgagttaagcctaagctgattaatcacacaatacatacttttcctgcattttctttcagtgacatttgagaattgggtgacattttaaaatgtgttttataccatttagcttttgcaaacaagttctaaagttttggagaaaaagtgatgtggtcaagagttgaagtctcatatatctttagtagcactcccatgaattatttccgtgacagtaacaagtgtgtgttccatgtctgatttggggcactggttagactgcattaatagctacttgattagaattcgaacttttaaaattttgaaatgtttaagaatgtattagaaaatgcatgctttatgttgaaaaaatacattgctttaatattcctcattcttgagttaagaaatttatgttaattttgcatgggcacaaacttaatcagaaacattttgtggagttacatttcctcttattatttatcaaggttcagtattgatctttgaaaccttggtcccgttaacttactagtcacattgaccaatgttttatagaaatgcctagaattttgagactaatagtagttatccattaacattccaaaagttttgtgctttttaaaatttgttttggtaattatcacatttttttctcttaccttcctttaaatggccacagtgtgtactgctggaatgttccatccaaaagatgtagcttcagaagcacagtgattgccccagggtccatgagatattgtttgtattatgaagttggagtgctgtctactgaaattatactcttaaataaatatgtatgtagtgtgtaatattttctaataaattcttttgataaactaatgtctttaacattttattattaaggttccaggggaatggtgacttttcaattataatcccttacaaacgtattgaagtgttacttggatttgtaccagtcattcgcatcatggttacgtaatacccaagctctaaagcaagcttagagttagctataagcatatattttaatggcattttcccctgattacataattattgtaagaaattagaaaaactttagtaaatgtgtaaaagaagagactgaaaaaggagaaaaatcacctgtaatcctaccaaaggtaataactaatgccaagcaaactgcacataatatgttgtaacctttcattttcacttgacgtactgagaactttccattttagtaaaaattacagcatgatttatactggctgtataatattctctttttttttctttttttgagatggagtctcgctctgttgcccaggctggaatgcagtggcgccatctcagctcactgcaccctccaccttccgggttcaagcaattctcctgccttggcctcttgagtagctgggattacaggcacctgacaccacgcctggctaatttttgtatttttagtggagacgaggtttcaccatgttggtctcgaattcctgacctcaagtgatctgcctgcccagcctcccaaagtgcttgatttacaggtgtgagccaccacacctggcccagtggctgtatagtag

SEQ ID NO: 69245 - DNA, 2277 bp, Homo sapiens
ccctttagatataattacctgaaatatgcatttttctttagtactaaggttggtttgctttgtgttttttaatgttatttctaatgcatcactaaaagacttctatcgagtacaagtaattcattaactgatgataactctttaaaacagggtattcctagttcttctcatgtaagtaataacatgagtacaccagttttgcctgctccgacagcagccccaggaaatacgggaatggttcagggaccaagttctggtaatacttcgtcatcaagtcacagcaaagcctctaatgctgctgtaaaattggcagaaagcaaagtaagtgttgcagtggaagccagcgcagatagctcgaagacagacaaggcaagttcaaggttgagagcaaccttcataattctgtatatgataaaggagaaaaaatatcagctttttattgtatgagtggtgaagggaatttcttattggctgtctaaatgccattattatttgaaggattctctctagatgtgttgatgtccagtaaattactggtaatattttataattgtttttagaaatgtttgatatgttttagtaaataaactgttttatatttgtcacgttaatagttggagagtctcttattgtaaatatgaagtattttcaatttcttgtttgggattttgtgagagcagtatgactggcaaataataaattatacattttcttctcatcagaaattgcaaattcaagaaaaagcagcacaagaggtaaaattggccatcaagccattttaccaaaataaagatatcaccaaggaagaatataaagaaattgtacggaaagcagtagataaagtaagttatggctttagtggagtatgtgcacgttgttttgaaccacctctgttttaataaatgaatgctgaagtttaattaaaataataaaagctagctcctactaattcctgtctacttttttgccttttgattagtttgtgtgagataatgaaacatgaaaataagtctggttatctctttggggttgtttttcacaaagctttctattttggctttaatccctttaagcatgaaaaaagtttaccccccaccccttttttcttaggtttgtcatagtaagagtggagaagtaaattctactaaagtggcaaatctggttaaagcctatgtagacaaatacaaatattcacggaaggggagccaaaagaaaactctggaagaacctgtgtctactgaaaaaaacataggctgaaatggggaacgctgtcaaggacattatcaggatatctgcaaagtgcaatttcaacatgtaccattaactgaaaatcatacataactgtgattgaaatttggttttgataaaattatttttttaacataggatatgatgttttgttctaaataaatataggtctgcactgcaacttctgtatccttccttcccctccaccctcccccacaaaattcaagggaaagtaaagggtttaaaggaatgtgcatctttactaggactgtgttatagtgtggatactggaaaatgtatagctttttgattagggcaatggagtgcataaattagaaacttctaagtgcactggttttcaaagagatatatataatgcatttattctgtcaggttaaaatgtaaagtatgatctttatgattttttccctctaattatagaaagttaaataatgtattaccatgaaaaatgtttctaatattaaatagaacatatcagttgcaaagttcctaatgtgtatttttaaagcacatatctgaataaattgcctagatagaaaaaaaattatcacgagtaaaatttagtgttcaaaacattgagacactcttcacctattgtatgaccaaataaaggttatgctgcttgtttttcttttgtgcctttgtttacccctaattgagataagcagtttgacttactagattacaactttggcagttcaaagtctttgttgaagactttgaggaaaaagatttggaaaaattgttgactttcggccgggcatgatggctcacgcctgtaatcccagcactttgggaggccgaggtggcggatcacctgaggtcaggagttcgagaccagcctggccaacatggtgaaatcccgtctctactaaaaatacaaaaattagccaggcgtggtggtgggcgcctgtaatcccagctatgcgagaggctgaggcaggagaatcagttgaacccgggaggcggggattgcagtgagccgagaccatgccattgcactccagc

SEQ ID NO: 69246 - DNA, 1105 bp, Homo sapiens
ttcatcctcagctacccttgcatctccacacaggagtgcccctcatgcaggtagccactcctaccagtgtatctcagggactaccaccaccaccaccccctcccccaccatcccaacaagtcaactacattgcttcacaaccagatggaaagcaattgcaggtatgtttttagcaactcaagtttaatcaatatagccattgtaaacatttagctgttcatgacagatgttcaaaaaaaggcatcctggcattcaaaaacaattgtttatttgatttcagttatggtaaaccttcataatccctctttcactatccttctcaaaaccccccaactcccaaattagaaaattaattaaatacttattaccaaatccaagctacatatatgctgttacttatatctgaacaggatttttttattcatattaagtaaaccaaattataagccaaattagaatcgagtggtgggtgctttacatttttcccctgttttgcactgtttagggggtatatggggacggtgggaactagtgattaagtactgtgatgaagcttttattgtcttgttcagacaaacactggataaagctgtttattatccattaccatctgtgtttcattttcatgaatttatcatgctaaaaagaaaggagaagtgcctctgtgagacatagaaaatttgaataatttgcaaacaatttgttgcttataattttatgactgccttttaaaaattttagaatcctaggccgggcatggtggctcacgcctgttatcccagcaccttgtgaggcccaggtgggtgaatcacgaggtcaggatcagcctggccaacatggtgaaaccctgcctctactaaaaatacaaaaattagccgggtgtggtggcaagcgcctgtaatcccagctactaaggaggttgaggcaggagaattgcttgaacccaggaggcggaggttgcagtgagccgagattgcaccactgcactccagcctgggtgacagagcaagactctgtctagaaaaaaaaaaatacaaaaattagccaggcgcggtgatgcattcctgtaatcccagctactcggaggctgaggctcaagaatcac

SEQ ID NO: 69247 - DNA, 3435 bp, Homo sapiens
atattactcagatgttagtagctatgcatttattaatagttttatttataagtatttagtttcactctgttgcagactattttatgctaaaattagctaaagccaaattactatttcttaaaacatattttttactttttttttttttttaaatattattaggtacttcttgcaagggatatgcattagcacatactcaagaaggggaagaaaagaagcaaacttctggtacatcaaataccagaggatcaagacgaaaacctgcaatgacaactcctacaaggaggtctacacgtaacacaagagctgaaacagccagtcagtctcagagatccccaatatcagacaattctgggtgtgatgccccaggtaacagtaatccatctttaagtgttccctcttcagctgagtcagaaaagcaaacaagacaggctccaaaacggaagtctgtaagaagaggaagaaaaccacctttactgaaaaagaaacttcggagctctgtagctgcccctgaaaaatcatcttccaatgattcagtagatgaagaaacagcagaatctgacacatcacctgtgttagaaaaagagcaccaaccagatgtagacagtagtaacatttgtactgtgcagactcatgtagaaaaccagtctgctaattgcttgaaaagttgcaatgagcaaatagaagaaagtgagaagcatactgcaaattatgatacagaggaaagagtaggatcttcatcttctgagtcttgtgctcaagatcttcctgtgctagttggtgaggaaggggaagttaaaaaactcgagaatacaggtatagaggctaatgttttgtgtttggaaagtgagatttctgaaaatattcttgaaaaaggaggtgatccattggaaaagcaagaccagatatctggactttcacaatcagaggtaaagacagatgtatgtacagttcatcttccaaatgattttcctacatgtttaacatctgaaagcaaagtgtaccaacctgtatcttgtcccctaagtgacttatctgagaatgtagagtcagtggttaatgaagaaaaaataacagagagttccctagtagaaattactgaacataaagattttacactaaaaacagaggagcttatagagagccccaagttagaatcttctgagggtgaaattatacagacagtggacagacaatctgttaagagcccagaggttcaattgcttgggcatgttgaaactgaagatgtagaaataattgcaacatgtgatacttttgggaatgaagatttcaataatattcaagactctgaaaataacttactaaaaaataatcttctgaacaccaaattggaaaaatctttagaagaaaagaatgaatcgctgaccgaacatcctagatctacagagttgcctaaaacacacattgaacagattcagaagcattttagtgaggacaacaatgaaatgatacctatggagtgtgattcattttgcagtgaccaaaatgaatctgaagttgaaccatctgtaaatgctgatcttaaacaaatgaatgaaaattctgtgacacactgttctgaaaataatatgccgtcttctgatcttgcggatgaaaaggttgaaactgtttctcaaccatctgaaagcccaaaagataccatagataaaaccaaaaagcctcgtactcgaagatctagatttcattctccatctacaacttggtcacccaacaaagacactccacaagaaaagaagcggccccagtctccatctcccagaagagaaactgggaaagaaagcaggaagtctcaatcaccatctcctaagaatgagtcagccagaggccggaaaaaatcccgttctcagtccccaaaaaaggatattgcaagagaaaggaggcaatctcagtctcggtctccaaaaagggatactactagggaaagcagaagatctgaatcactgtccccaagaagagaaacttctagagagaacaaaagatctcagccaagagtgaaagattcttccccaggagaaaaatccaggtcccagagcagagaacgagaaagtgatagagatgggcagaggagagagagagaaaggagaaccagaaagtggtctaggtccagatctcattctaggtccccctcaagatgtagaacaaaaagtaagagttcatcatttggtagaattgacagagatagttactctccccggtggaagggaagatgggcaaatgatggttggagatgtccacgaggaaatgatcggtacagaaagaatgacccagagaaacagaatgaaaatacaagaaaagaaaaaaatgacatccatctagatgctgatgatccaaattctgctgacaaacatagaaatgactgtcccaattggataacagaaaaaataaactctgggcctgatccaagaaccagaaatccagaaaagttgaaagagtctcattgggaagaaaatagaaatgaaaattcaggaaattcttggaataaaaactttggttctggttgggtatctaaccgtggtagaggcagaggcaaccgtggcagaggcacttacagaagtagttttgcctataaagatcagaatgaaaatcggtggcaaaatcgaaaacccctctcagggaattcaaacagttcagggagtgaatctttcaagtttgtggaacagcaatcctataagcgaaaaagtgaacaggagttctcatttgatacaccagcagatagatctggatggacatctgcatccagctgggccgtgagaaagactttgccagcagatgtacaaaactactactcacgacgaggcagaaattcttcaggtccacagtctggatggatgaaacaagaggaggaaacatctggacagggtaatgtattcttgttggtttattgatactgttttatttgaagaattataaatttaatatgttatttgtatgagttgaaatgatccttatttgtagtttttataataagctgaaccttagttgtttacaagtcacttagcattatataaatatatatacacgtacgtttatctacataagtatattattaatgctacctctgctccaaaccttgccaaagacttaaatattttcagcactgtttgctacaatagaagagtttgggatattcctatgcaggatttaacctctaatttgtttatttcagatatgtacacttttaatttttttgataattgttctcatacaaataaaataagccattgttttaatagtaaagatttatatttccttgttttttttcttgttaagaacattgcaagataaaggctgttgaagatgtaaaaattgaataaccttataatttagtagttaaattttatgtgatttttttttttaactagtcagtttcttgagctactgattgttgatgtatgttttgcatgaacttattct

SEQ ID NO: 69248 - DNA, 1047 bp, Homo sapiens
tctaaaatttatcttttagtacagaatttatagaagccagtgaaatcagtgcattgattaggcagaagagacatgaactggaattgtcatggtttcctgatacattacctggaattggaaggtaaaaataaaaaattatttactcaggtgtttacatgctaacatgaacaagatagcattagtacttaagtacaagggtaccttattcaattgttattttcctaaggaagttttgtgcaaattaaactttggtgtttcaaatgcccaataaagattgctatataaaggaccccttagaaagtaaagaatccttaatttatctgtttaacaagtatagctgtgtatatgctagatttatttaaaagggagagaacccgaatattaagatttattgttagtaatacatctgtcatcattcctctactcttctcccattccagtcttacctgcgtgctgtccgctgaatcacgcttttaccatattcctctcctcaaaaatgtttttctaaataactatttgatcaagtgcctactctaccctgacactcatgactttctgtaatctagttttttatttcttagtttattcttgaagctactaagatggtgctagataaataatatatacttaaatcaagctcctaagtaaagattagggtcgctgcctgagttttatattaattcctataacatattatgactttattttatatgtcactataatatagttctgtatagggcattcaccctctaagaatgatggcagaacataatagaagtcagatgaagaattccagatgtatgtactatgaaacccttccttatagttacatatttttatacatgtacaagttacattttttttcccatgcttctcctactccagaatcttaccttatattgaatcagatagtcttttgttaggagacctaaatgaataagaaaaagaaagccaagaagtggtttgggtttgaatggagaaaatttgaaggagggggtcttaacaggtctctagggacactgagaactttgaagagccatcaccagg

SEQ ID NO: 69249 - DNA, 1053 bp, Homo sapiens
cacccagtttctgtattgtggccttttatattttacttgtagtaatagcttaacaaggtaagatgaaatcagcatttgggaaaattgtgtaaaaaattgtgtattatttgaaatacagcttttctacgtatttcaacccttgccaatgtgctggtatcgatgctggtttacagcctttttaataaaaattaatacaaggtaaccaagtccttttatgtctttgtacaggaaactctttatacagtgaaacaggaggaaagaaaaatgcagcaataaagataaataaggtttgttgaaaccaagaaaaatctttttcttagatgataacactttagggttatttagtccataaataaccagtgcttcaggtgtatcaaaatatttaagtataactattatttacctgttatttatttgctgtttcactaactactttttacttttctagcctcagagatcaaattggagtacaaatcagtgcttcagaaattttttctccaatatgttttcttctgttagccactctggagaatcttcctttacctatagagcttattggttagtattttctacttttaatttatgctgtttatacttgatgtttaataattattaacttttgctagaaatttaaactctgggcccaataaaaactgaaaggcccacctggttgttttgctttagtttttttttgggcgggggggaaggtaaactagctctagcaaagagaaaacctgttaattttgggagcttctctattgtgcagtgattgcctatgccagtgtgctttgttttcattaataagttgttctatataagctgtttatatgattgagaagtagcttatttattagcttgtggggatgttacctaaagaagaacccttttacagctgatccattcatctttgaatcctagtgactggcatgtagatactaagttgatatttatggaatttgaagattaaattgaggttttaaaatcacgtacagttagttgagccagcagcacagaatacgattgtgtgatttaattttagaacttggcaaggta

SEQ ID NO: 69250 - DNA, 1035 bp, Homo sapiens
tagagaagctcccaaaattaacaggttttctctttgctagagctagtttaccttcccccccgcccaaaaaaaaactaaagcaaaacaaccaggtgggcctttcagtttttattgggcccagagtttaaatttctagcaaaagttaataattattaaacatcaagtataaacagcataaattaaaagtagaaaatactaaccaataagctctataggtaaaggaagattctccagagtggctaacagaagaaaacatattggagaaaaaatttctgaagcactgatttgtactccaatttgatctctgaggctagaaaagtaaaaagtagttagtgaaacagcaaataaataacaggtaaataatagttatacttaaatattttgatacacctgaagcactggttatttatggactaaataaccctaaagtgttatcatctaagaaaaagatttttcttggtttcaacaaaccttatttatctttattgctgcatttttctttcctcctgtttcactgtataaagagtttcctgtacaaagacataaaaggacttggttaccttgtattaatttttattaaaaaggctgtaaaccagcatcgataccagcacattggcaagggttgaaatacgtagaaaagctgtatttcaaataatacacaattttttacacaattttcccaaatgctgatttcatcttaccttgttaagctattactacaagtaaaatataaaaggccacaatacagaaactgggtgaagtatgtcaaacctgctatgtttacaacatatgagttaaaattctaatcaacattttctgctaccttatgcaaacttaaagtatcttgtaacaaaaggtatacacaagaagtcaagctatttaatatcaataatacacttaacatttcttttccagctatcatctagaaaacaggtagctatctcaagcaggggctgactaggtggcctggggccatcagctcttgttaaccataaattaccatttagccactggcacccacttcaggtatgttct

SEQ ID NO: 69251 - DNA, 1041 bp, Homo sapiens
gaaacagccaaaggatttgatgagtgctttggggaagcagaaatcaagagtgggtatttccataatttttctttataagtttggaagtactgtttgacatcttaaagtatgtacatgcattactttgataaaaattaaatgaaaaggcgtatcactgcccaccaaaaacagacaagtagggtggatttgtgaaacgatcttcaggaaaccacaatttagacaaattcaccagtatcgaatactttagagattgccattgaagctgttgagtaattacctgagaattacccagaaatatgtgaaacagcttttgaactggattttcacatgtagcattgctcagagaaaactaacagttctttcagtagagagcattttatctaatgatggctttctgagataggtttccaaatgaaagaatgctatgtaaacactacatactcgttaagtgttgagtgaatgcaacctgaaacaaaacaactcagcatccttagggcataaaagacactatgtaggtatagcacagcaattctatgtctagctgaaggaacatggttatttctaagagtgttatctgtgtacctaccacacatttttacttcttgcctcttaagccattttaaaaaatcagcgtatcatcttttagatacagattttcaaaggggtaaggcagtaagttccggaactcagcctgttcgtcttccactaacattgaaattacatttgttacagtagttctgagagggacttgtgcaaaaccaaacagctgttgtataataactaaaaaggaaattagtatgctattaagtagaaagtaggctattaccaactgaactaacagaagtaaaccaaaatacatatgatcttgcagtgcaggaaacaagcctcctagttagtgtgatttattttgaacaatgtcaataggccctttgtgaggcaagcaagggggaaaattaaaaggcagttgtcatatgcactgtggacaagtcataagcaatgcagccaccaacgttgtaacagaaagctgtttcagtcagcaca

SEQ ID NO: 69252 - DNA, 1049 bp, Homo sapiens
tgaaggagtacttcattttcttcatatctttcaaatgtttttattgctggcacaactgcctatttaatgtaactaatttggggggaaaatattaagtcatagaatattaaaatttgtgaggaacctttcggagccatttggagtggcccaagtttagtgtaacagccagctttacatcacagaactactgctgtcagcccaactcatctttcactatactagtagttctcaaccgggcagcatatcttaatgggattttaataacagattctgtctcgttcatcattgtattccaactatctagcatacaggaggtattcagtaaatgtttgaatgaatgaaacaaatttaaggtataaaaatatttttttctttcgaagatagagataaaaataattttatggaaaatttataattgtatttataattttgatctaaagaaacatttgtaaagatataatttgttaatcacttttcagacactggcttcatgtcctattgaccgtaaaccttttcaggcagtgtttaaattcagtgcattggaaggttatgttaaggtaagtctttttattctgcaacatgaattatataaaaattaattgaagctgtttgactttgatttccagtttgtgtatatttgaaaattgttcaacttaaggtttaatatgttattttaatcctccttagcatgataaatttatacctttcaactaatatacttaaattctgaaccttttattcatttgccccctaaagagggcatatccataatgatcaccttgtagtataccacaaaatgtattagatctctgataatctgaaggacgttttgtactaaggcttaattataaaatacttaacattttagaatatcttgaatgcgaggacttcttcccatatttcaaagaatttaattggctagcactttgaatacatgttttccattgaaaaaatgtttgaaatgaagtattagattcaaagaccaactcccacaaaaccttaagtccaaaataactgaaaactgtgttttcctgaaaaacaataatttt

SEQ ID NO: 69253 - DNA, 1043 bp, Homo sapiens
aggaattatttattcccataaaaaccttagaggtaagttattttttctcattttcacaaataaggttactgaggcacagagagactgtaacttgctcgagtttattaaaaagatacgaaagtagcacagtaaattcatggcctctatacatcttagtttttacgaaaaaacaaattttcatttattaccacataacctttttttaatgtttctctaaatttacctttaaaataggaataaaaaacattttgaagcttttgtaaaaataggaagcactagaaatattacacttttaattttatttatctatgtttcagagatgggatctcactctgttgcctaggctgcagtacagtggtgtgatcatggcttactacagcctcgaactcctaggctcaagggatcctcctgccttggcctctcaaagtgttggcattacaggcatgcaccaccatgctcagccagatttcaacttttaaatatttttgaaaaccataaatgtagcattaatataatctcttaagaaatttcatacagggtatgccactgggataaacagcaatggttatgatgttaagttcttcgaactagacaatgcattattaaaaaatatatgaacttctttgttgctgaagcaaaccttcttaaggtcaagttttctatagggaaagtaatagcctcctaaatccatagtacttaaaagtaggctgaactggcttcttccagtctgaaccaatttaatatagtaaggtcacatttcctaattcagatgtggtaaagcttttttcccattgaagcccacttaaaagagaaagaaaatagtaactcagcccatattttggctgctcccaaagtgacttgtgagctttgtgaaaatgtgttaaatgatcaaggaccatacacaatctgctctacttttacttgtataagcatgtcttgatacgtggtaaaacccagaaaggcaaagatcacattttttacataggaataatatatctagtttccattactatctttgctctttgagactattgctattagat

SEQ ID NO: 69254 - DNA, 1028 bp, Homo sapiens
tctttttttcatcattataaattaagctccatcctctcatttccctcagtcttcttccatctaaaagcaaagtttacagtttacttcggatttcaggatcaggaataagtgtcttcagccttctaacaggccatgccttatgcctaggctgtcatacacattctaacatttaatttcatttaattcactatgttaatatttatttgctatacaagacaaggattctaaacttacgatttttaagtacgtcaagggatagcctgacgttaaaatctttttaaaaaattggtttgtggtgtacaattttatgcatgttcacttctttttttttttttatttgagacagagtctcagtctgtcacccaggctctagtgcagtggaaccatctcggctcactgcaacttctgcctcccaggccaagcgattcttgtgccacagctcctgagaaatctgcataagagaacagtacaatttgcagttaggatcatctttctagatttctgtatctttcaaaatttctgtgctttctgagatttgtacccaaggttcactgaaatatgattcagaaggaatatcaagcaccaaaaaaggactcatttatttactttcaccttaatattttaggcattgaacacattcttaaaaacactggtctgtaagaaactggtgttttgaaaaattaaagtgtgtcgtagtctagtatatttattttggccacatagatcaaagttagtttcagtcttttcaagctctaaaattttggttctgtggttatttaaacaaaagctatgtaaggactttaaagtgattaagtaaaaagtctttgggtatgtcagaatcctctttacttagggcaaaatgtttcagggtgaacctgtggtagccttcatggcccatagcctaattgcctgcccttagggacactagaacaaattgaaattaatcatgtccactatgattatatttagtttcaaggaattcatagatggtaaacctgttgatttataaaataatgatgattatatag

SEQ ID NO: 69255 - DNA, 2296 bp, Homo sapiens
tgggagtttaaagtagtacaaatcctaaggagaataatttgttaatacctattcataatacaaatgtatacacacattactctagcagttccatttttaggaacttacactacagatatacttttaaaaatgtgaaataactaaatttttattgcaacattgtcatagccaaaagttgaaaacatgtgaatgtccatcaatagatttgaataaagaaaaaagcagactagtgtgtatagtattcttgcatttgtgtaaagaaaggaatgtggaagagtttgtattagcatttgtttttctgtacattaaaaattcctaggaagaacacaaaagaaatttaacagttgttacttattggattggttggaactggatggggataaatttgaatgagaaatttgctcttaaatttttgatccgtgtgaatattactcactttaaatttaattaatgaaaagtttgtttcagtcccccgttaaaaaaatttaagaaagtaaatgttgggcacgttgggctcaagcagtatgtttgctataatttatctaagatctatttgctttatagtaggagggtcctttagagtatctaatccactatactcctagaaacacaagatttttggtctggagaacttgaaagcacatatggctgttttactttaacaggtgaagaaaacggagataatactatttccactggtctgttgtacagtgaggctgacagatgcccaatatgtcttaattgtctattagaaaaggaagttggttttccagaaagctgtaatcatgtcttctgtatgacttgtattcttaaatgggcagaggtaagtctgacacattaatgtattttaatttcctagcatgatttcatttcacctaaagagttgatactgcctttcataaattatttcacagtaatgtattttcttcctactttggacaaatttccttgtattattcaaattctgtcagtcattttcttctaattttcttttatcaggctttgattttgcaaataatattttaaatgcatacttttttaaaaaaagttaataaccttataggaagaacagatcaaactttttttctggtagaaatgcagtaattaatttttcagtgtacttgactctgtgcttaataggataatatctgtttaccactaataacaccttctgtctgctttttgttttatatttttcagggacttttcacataggttatttgatttcttctttatatcagccttgtggaataaccagagcagatacgatagtgtccttccattttacagatgaggaaacttggattttatgttctatgacttggtcaagatctcatagtttaagaggcagaagtgaatttagaactgattttctaattcctgtttttaatttagtgtggactaatttcagagtctgaattagagatattaccgtcatagacagtgaataagaaacaagacattcgtgacttttaatgtattatgttgactcaatttgggccaaatactttgaagtaaatattaatttaatataagccttattgttatgaaatgttaagtaaaaaattattgttcatattatgctatattttctaagttaatatttgtcagtctgtaaaaattagtaaagaagataatatcttaaaaatattttaacattagctgcattccaattgttaatgttcttaaatatgttggaattaattgcatattacataattggggttttcaaagcgctatgttttgcttaaattttcattaatagtgtggaaaggagaatgtaactgtatagtgactctggctgagttctcaaaagaaggaagagaagatttgttatacaaattgaattaataatagtatacatataaactattttaatttagtaaaacctaaactggtctttaacaagaagtgacaggataggtgaaaatgtattttggggaaaagtattttgagttttgctgaattaatatggttggtaaatctctctctgtgtaggatcactgtttaatgaaataatgcatattttttttctgccacccaaataaagatttttatctgtgttgaatttagtgcacatggttgctttgtggttaaatttttttagagattttgctttgggtaaagaaataatattgttggatgggtggaaggtttcaatacagtgcttttttataagattgtatttggtgaccacataattgtgaatttcaacaacttaatcggagtatatgttttgctctaagaaaattataatgtgtatgtaataagtagataatggttctccatcctttct

SEQ ID NO: 69256 - DNA, 1053 bp, Homo sapiens
tctcactgtgtcccccaggctggagtgcagtggcgcgatctgggctcactgcaagctttgcctcccaggttcacgccattctcctgcctcaacctcccgagcagctgggactacaggcacctgccaccacgcccggctaattttttgtgtttttagtagagacagggtttcaccgtgttagccaggatggtctcgatctcctgaacttgtgatccgcccgcctcggcctcccaaagtgctgggattacaggcgtgagccaccgtgcacggccaaggcttttccgttcaataagactgtgcattttgatagcaaggagtataaaagagtactggattatccacaaactggcttggctcgtactgtgttcttttatgtgtaaaataatttcttacagtttaggatttttttttaattgatattattgggagaaggcaaacataaaattctctattataatttatcttataggaaacccttttccaaagagaaatgaagaagaaaactgtatgtaccctaaatatgggagataagaagtatgaagacatggaaggtaacttttcatttttataaagtttgtttgttgaaagcaaaacagttgtttccaaactgtccacttgtatacatttcagaatacacaggagttttttgttattgttgttcttaaattccaaaataagctgcctaagtatacacatttttttcttcccatatcttattttcgactgatcaagttttttgatttgttaaattgtttacttttcccttttttcttaaaggtttactctctactggtttaggaattactgtttatgtttttgtccctgtctttttaaaaaagaaaaaaagttagcgttggtactgtcctctgcttctaaagctaatttaattttcactaccaacagaagaagaacccaagaatgctttaactctgatcatcctaatctcaatgtataggttatagttccattatttgagttcttttatttcagacaccaccagttagatgatgttttatgcaatgtttgcttgagtttatttcctcttcatttatt

SEQ ID NO: 69257 - DNA, 1036 bp, Homo sapiens
tctttctttaaaatccagtttgataatctcttttaattggtgtgcacgattatttacattatttacatttaatataataatgtttgttcctctattttcttccttttttgggaggtatggggagagacaaggtctcactctgtcccctggctggaatgctatgggatggccatagttccctgcaaccttaacctcctgggctcaagtaatcctcctgccttagcctccagagtacctagtactacaggcatgccaccacactcggctaattttttaaatttttgttagagataggtgaacagtctagagttaatctgtaactagaataacttggggaaatgagataaaaaacaaaaacgtatttattcaaggatgacggattatatttattcctcagaaaatgggagaatgatgtttcggtttttggatctttttgggagacaggaatctcagagctgtaaggggctatttgtttagagattattttgatacaactttaagggacttggattaatatcagggttatttctttggcatggatttgtaagactgttctctacatcatcacatcatttagaatagtttgttttagggatgagttcattcatcgtttttgactcttcatccctgtttcctttctcattaacatgtcttactgatatacttttatggtgtcgaacaaatcatatcctgtgttagtcatggtgaacatagcagaagactggccagttagaaatttcacttgaaaaggtagttggcagtttgtagcatttataataagattacatttaggtgataatccgaatatcactcaatctctaacagcattattttggtctgagttgtctcttccaaaaaccaactatatatactctttgacaatatttctttattttgttaatttataaatcacctgccctgtttccctaaaacaaactattctaaatgatgtgatatattaggttatgtcctaagacattgataactagtatcttactaatatcagtttagtttttcctattagtgtattttggga

SEQ ID NO: 69258 - DNA, 1011 bp, Homo sapiens
cggtgttttaattttttaaatgtatcgtgttctggtattttgaggattaaatgtggaaaggcatgccagaatgtgtagttcattacgtagtatattgtaggcattcactctacccatagttctgaactccaggtttgttgatatctatgtgtctattaggtctgtgccctaggggagcttagtcctaatcaggccttcttttttgatatctagtcttctttccattttctcctaactagtttctcgtactttccatctctccaccactgccacctttctgctactacattaagctcaaaatccccaatttaaacatcttataaaccactttcaaaacaaataaatgggagagagatagacttgaagtccacctaaggaaacacaacgtaagtcctaattggacttaagaacattaactttttgcactttattatcattatttttctttacttgcctcagtcgttagttactcccccactggtacatttaaaaaaatgtcttagaaactctttgcctatttctcacatttggcacttggcatatgctatcttgttcatcttctgtatcctatgtctccaagtctactccttgtaccgggaagtgatacagtatcttaatccgtctttatattccaataccaggctcagtaccctgaccacagtagttatttagcagcttaaagtaaaccaaaacagaagtacaaacatgaaagacagcggccaaaacaacactgttataaaaattctctgggatcaatgaaacagtctacaaatgataggttttgtttggtttgttttgagacacagtctcattctgtcacccaggctggagtgcagtggtacaatctcggttcactgtaacctttgcttcccaagttcaagcaattctcctgcctcagtctcctgagtagctaggattacaggcgtgtaccactacacccggctaatttttgtatttttagtagaaacggtttcaccatgttggtcaggctgatctcgaactcctgacctc

SEQ ID NO: 69259 - DNA, 1063 bp, Homo sapiens
gtcatggagaaaattttacggataattttttaattttttctgttaataccttcatgtggtaatagggctagtgtgttaagatcgaaacttttcaggagttacttagctctctatcgtcctttggcaccaactagagcttagacagttttctggaaaacctgtgcttttattcagcagagataggatgaatcagtgcagttacatgatactgttgattcatcatcagtaacatcttttagtaatcagaaaatacagtactatactacccatcaacttaatactgaacttttaaagtatatcagagatagttgtagcaccttaattaaagagagtagcaggcataaaagtaataaaaagaaagtcaactgtagaataattttcattgtaacttccctttagcaagccctgctatcacctgcttttgtcttttaagatgtaaattgtaccttgacttaccttgcccagtgaaataaacttaaaatccagatttttaattatactctgtcccccaaaataagttaataaccttgcaccttgtcttgcttctgagcagtaataactgttagtagtgctgagtagagcccagagttaaaatatccagtatcattctcttgctattcccaaaactcatctttgcattgtatttttttaagttgtgtctatgaacttaatgtatgaaatcctagtacatagacacataaaaattcaatacataacgtaaaaacacaaccactattttgctttcaaaaatatcttcctaaaaagtcactgtgacctttgctgatctacagtctttaacactccatagccagagtgatcctgataaaatgtcaggtcatgtaacttcttttctcaaatggcttcccttctcagtcatagtaaattccatactcctatggtctacaaggctctatgatttaagtctcttcttcctctctgacttcatctcctcaccctttctccaatctcctttcccctacgctgttgtggtcttctctaactactgtgtataaaacaacagccttcccccgatattttgtatctgtttttatgctagattttt

SEQ ID NO: 69260 - DNA, 1049 bp, Homo sapiens
acacatataccagagcacaagagcttgcttattctaagtattttaacgcctaagaaaggggtctctatagatgtttgattgtaggagaatgacagtaagcttgacaaggcaggagatttctgaacccttctactacttatttacttatatgtgctgattgtgggtaaaatgagttaggagaaaacttggcttcagatctcttttttattttaaaccgtatacctacattacctacatctaaatgtacagtagcagattcctttaagtacccctgaaaatttgaaaataatactacctaattttcaaatgaggagtaattaggcaatcacatgactgaattaatatttcagtttatgttttctttgtatttggcaaaacaaagctggttttttttgtgtatgcagatttatgttttctttccctttggtactcttttattaccttgaaaaagaagactcatactgtatatttgtggaaaaaatatttttaaacttggaaccttagtcctttcctttttttattttgctcctatcggtctgttaagtgatttaattcttatacttatcactggactgaatccaaagtactgggcctggcctgggaaattgctttcatgattgaagaggtataagttattgtataaaataagcaacctacaaaaaggaagaagtaatttttttacataccaaagaggagttctgacttcgtatcagaggcggggcagagaatggtcccctttaagaatgtcaccatcattatcccccgttgctttctacaggcaatgacatgtgaccatcaggacaatgcatccttggcgatatctattcaggattctagtttgaaagagaactgacacaactagcaactcacggatctggtaggaaagacacctaagcagatgtggaatggactgaaacaagaaagctaacaaaatcaaggatttcattcaggcttaagagttcttcccagtgtgagagtggtggtctcattaatattcatgccaaatcttgattgtactaagctcccaccacttataaggacactcaaac

SEQ ID NO: 69261 - DNA, 1045 bp, Homo sapiens
aacaaatgaaacaatacaaagcatttaattaaacaatataaggcattcattacctccccccacccccttcctccatgcccacttccccaaggaacagctgaacagcctggttaaatgatgtaaaaaatattttgctaacatttctcattactttatggctaaattggcttttattagctggtttggagcttaactatatttccttccacactttctccatcaaacacagaacacccacaagggttttatttgcttacttttcatttgcttcactttggtaaatatggaatcattctactcacattattcagcaactttctttttttttttaatttagccatctacccaaagatatctctcttgctcaatgaatatagatctgatacatttttaaataactgcataatattgcatatagtggaattcattcgatcatttccctattgtagaacattcagtttgtttttattccttttttccctcccaatacaaacaatgctttaatgaccactttcttgtgtgtatcctgaattttgtgtgtgtttatttttatgggacagacttctaagtaagtatttgttgagtcaattactatgtggactttaaatcttaatagacaatgttaattttatttcaaaaagctcctagtaattcatacaccagtaatgcatgacagcatgtatttcagtcagatttattttttaaatatatctatctttctctttagacagtgaatcccttgaaagcttctctgacattaaatgccatcactttttaaaggctttgctaatctgatggctgaaagatgatacaatttaaattttcccggatatctgggaaattaaataacatttcttatgtttgttggactttttgagttcctgttctgtcaattttctcttcatatactttgcccatcttcctatcagattttttatttgtcttactattttgtagaagccctttatttctcaaatgtaatataaatattttttccagtctataatttttatttttattttgtttcattttcatgtagtcaagt

SEQ ID NO: 69262 - DNA, 6823 bp, Homo sapiens
tctattttgcttttgtatgttttttttccactttttcaaacagaaatgtttgcttgccagtgataagctaagttggtaggtaatgaataacaaaatgacctggatattttctaaggcctttattcccccttggttgtaatcttagtttgagagaagccataaggatacccagttatttgtagaatggatacatacacttgaggtgaccatgaagtcaaagaatgggacatagaggactactctgcttagctagttttttttttttcctattttcccatccttgcagaatcagattcataaaattttagaaagattctcacagttcagccatggttgtgacaaactctgaataccagaggacacaaagggagaggaaaaactgttctattttttttccccaggtacatgtggaaaaattttgctgcactgaaaataacccttgcctttctcttgctccaggctgcccttttcttgggcctgggggtgttgttctccttggtcagcattcccttggtcatctatgactgggcctgctcatcgagtagtgacgaaggccactgaaacccgccgagaaaaagaaacatccctgttgtctgctcagtcaagtccccacacatcagcaatctctcaccacttcttttgcaagtttacagaagcaaacagaaatgtacaggatacttaaaatggaataactttttggttgcaaaacagagacatggttctataatgcttcatgtccctccaagatttgagatcaatttagggattgtgaaatttttttttcaaatttcatacaatcatatttcccagtacttttcacaatcattttttacccatctaactctatgttttgtggcttcccggtctcttagaactttgaaaacatgatatacaataatgtttatttattatacatccagattctgaaataattttcctactgatgttcagctcacactatctgtacctttttagaagagaaaagaatcttgaattgtatatatttattttgctttacagaaaaaaatggtttcgtaaataatttgcctattttggttaacatagcacatggagataatcatctgaaagttatagggcactgccactgctgaatcagagcatgcccaatatttgaggtggctctgatttcctggcagctgaactcgggtagtccagtggcctagctggtaccacatctattcccatccagagacattctctggcaagtgttctcagctgaaaagtggttggggatgattcttaccttggtaattaaatgaagctacacatttgggtaatctagcaaatgaagtattttttccctcttggcaacttgtgtcagagttactctggtctgagtcaactttcgctggggaaaacctatggaacctactgcaaaaagattgtccaaaatgcctaagaaaatactcctctgatgcatttagccttcaaccctacctgtcttgctgaagggagaaaaatgttttagtacattataggcccagcagcttttattcatgtccaccagctagttgcacagagaatcatgtgtacctaactaaggatgatctaggataagtaactcctgttttatattgagtattttagggaagtctttaaaagacttgttttatatctataaatctaggttattacaaatacaagaattttgtaccttaaataagcctcatttctatttcttcttcattaattctccatctagtcttgtgaaaaaaaaaaaaaaaaaaccctcagagatagtctttgtgaagagcttctgacagaatcactgagtaccttccttcccccagatgaggaagacaagggggtctcagtgtctgtgctgtctcctcttctcttccccaaccaaggactgtgccattactgcccgtctcaactgtccatgcaggaggacagagttgcctggtactcttacccttgtccctctcctaaagggagcacaaggaaactgaagagactgaaaaagaagagagtttgtagctgaaaaagaatagggatagcaaggaaacccagaactgcattcccctaagtggggccatcccatgtgattgaattgtccatagcttgcctatggtgagaaatgtgcatgctccgtgagctggtctcttgaaacaggacttatgcttcctctatattctggttaaattttccaaacacataagttcactgagcacagatttcttatccagagacaagtagaatctaaccgcagactgttggcagagtttccaggcacttagccatgttcccttcctgactcaaatccccaaaggccttcactctcactgagaatcacactactgtcccatagataaggcaggcattgaagcacctgtcgtgatcctctaggggggagaatgaaaggttatttcctgcattgcatcatcatagcttttaatataatgctacagaatcatatccacattaggttagagttcagatatttggatatgaatacctaacctagccatatccatggccatctctgttcttttcagcaatgttttccatattatattagcaatgacagaaacagaacaagccaagatccagtcagttcttgggagcttgtctagagcaccaagtaatgaaatagccaggtagtgggatgactgtacctttaaaaatacataatttagtttgcaagctatattatgctactttctattttccttgttactttatagcaattcattttaccctcacaaagtcaatttagaaccttatcattaactgggatgtgtagtgatatttttgggcctctgggtttcatgtgtcaatacaaggaatatttatttaaaatagatttatttagaggaggcacagtgttgttgatctgtgtgacaccacccatatttttaaaaacctttgtatgtttctctaaatttgttgttgactgaatataatagaccctaccataattcgtcaaatatcactgattagttacatcctttgtgtgagattagctgtaaagtatactgctcttattcttattcagaatagttaattggtagccaaaaatacatgtatcacagatgttaggtcgaatttaaacagcacagtcaagtgctatggaagtttttctgctaaattagtagattaaagaatactataccctaggcatggggagcagcacgttttcctttggtaggtaggatctctatactagtgaacagtgccagttccacactttggacttagaactgttctctagttattgtaacacagaatactgtcaatccctaatttacttaatgttacttattggaagtggggctgatgaaatacgcacaggagggaaatctactgtgtttaggcacaggcagccccagtgtataaggagatcatattccaaaaggttgtcagttggttgtttgcaacctggaatgtattttcctttagagaccaggttatccatggtggttaggcccctagagcagctggaaaagatgatcaaaccaataggttagctgacatcgaataatgtaataggtttgctaaagaatctaaccatcaaatataatattgtttccagggagggtgtttgttcagagttgcctgttagtagaatctggactgtccatcccagccacatcccacctactggacagtaggggtagagatgccaccagactacaggtgaccagattggcctgaaacatggtgtccagtaaaaacggggaggaataagtccatgactgctggagagcttggtggtaggaggagggtgaaggagggtgagggggcctctcatgggtcagaaacctccagggacatccctcagctggtaactctgctgttgtccggagggttcaggcttggtgtgccttcttctgtttgtctgacttttggctcctatggttcatctcctgccctgcccaccacagaaaaggatgctgctgcatagcttctccaatgtaccagtcattgaggccagcgcgcagcacttttaatgtttttagtgctagtaactgtgttttaactctccaggaataagctgggaggttagaaaacaagaaaaaagggggaaaaaaaaacctctccacccactttccttttttacagttacagaccctgttgagaaaaagaagcacccagatgggtgatggtgatagggcttgtggtggacacagggttgtggtaagattcctcagtgcttcggcgagcacctaagactattaccctggaactgactgctttctagagcttgattcatgcctctaagccagtggttctcaaagtgtggcccctagaccagtagcatcagcatcatcggggacctcattagaatgcagattctcagccccctcccagacatggtgaagtcagaagctctcagggagggactcagcaaatgattctaaagcgcatcaagtttgagaaccaccctaagccaatgagtctcccttttacttcccattagtcctccctcaccagatgattcctaggactcatggtgcaacatacaggagccaggctttagggaggggaggaaaggagcctggcggcaggggtctctgcaatggcaagaaagtgagtgaatccagcgctgccacctggttatccccttctcgttgaaaatagcagcgcaggtgcaaattcctaaacacaggctgcctgcactcggtgttacctcgggctgaggcatgataatattttattttttaaagctgtgaggaaatgaaagtgaggctttggttggggcgaggcagttgtgaaagaaattaaaataaaagaccctttgtaaatgcagacttagaagaaatactgaatttgtgtcagaagttctccagtgtttgtgttaatcgtgtggtgataatcctgtcctccttttaaagcgaattctctactgaaaggtctgctctgcttaaggagctacaaactgctctcaaaagaatgaaatactgagttccaattcagtgaggcacagtgttggactatggcacatttagttggagtcggggggaggtcaggaatatgatcagataatggattttataccttagagcaaaatctattagtctctctcagtttatcaatttaaatggctttaggcttatagggggtgtaaactttaagaatataattctcccattcaagtttacagcaaacatctagccaccttcaaaacaaagaatatacagaccatcatttagcaatactaatacatgattttccttggggatggcaggtttgagaatcctttagcaacaggacatacttcccctaaattacagtgaattatttataacgagataaagctttcaggtacaagctgaaggtggggtgtctaacaactaaaaactatcactaaatctcaaagagaaagttcttgcaaaatatgtaaagttcacaaggtgcagacattttccttctttaggcttttatctaaggaagggctatgaaactgggcccatctgtatacaggctcaaatttacgtttttaaaggaagaatctatgcagctgaggcttattgcaggaaatacttcatttgtatgtaaatattattgtaaataaataggaggctgtatatttttgaagttgttgatctgcactgaaatagaagtctctaggatctgcatataaacaataaatgtttcctagaaattagtggttttgtttgggaattagaaaaatttacattctctcccaggtaacatagttctctcaatgtaaacttggaacctgaaaccctacttaatttagagaaagaaatgtctgagaaatagttcccttgatttcttatgctggcattaagatcaattatttaacagatagtcctctgagatacaagtaaggaatatttagacacaaatccttgtcctatagaaacagatatacccaaatgacaaattgtttcttcataatgatcttccatttttaacactgataccactacacagtacatatgaaaacagaagctggggagaagaatgtttttttcacaattgaattgctgcatttctcaaactttgggatctatgaaagcggggagagggaacctgaatattaattatgagcacaaatttgaaggaaagaaaacaaagaaccattatctaatcaagctttgaaagtcctgcatgtttgccttttattttagtgttgacgccaacatagactgtctaaggtatttttttccccaaacacttgaatcttggtcgttggtatgtaatccactctctagagtccagtgtactttagacttcatctgagtccaatacatgtaccacactactgttttattaatgtaaaaaccttgtaaatgaatttcagatgggtgatttaagtgagtcacaagtcacaaaactttgctattcatagttaatcaaatagaactgggttttttttttcagagtgtggtgtaaataaagaaatataagaagttctgttctataactgctctgttaacatagtttttaaacattaaaaaatgtgaactaaaagtatttaaaaatgttgtgtttgttcttttgcaatgcaatactaaaatggggcagttgtgtactatatacactattcaggattgctggagaagggttatacatatttgtcagtgttctagatcatagaaggttatatatttaagcaccctaacgtaaatatttttaaaaatacttctgatagaaatctatctggtctgaaacatataccacatttctccattcttcataatcagagtagattcaccataatattttcttttttaagtcaagtttacctttataagtattaatttctgccctgtgttgtaggaaggagttgagtcttcctctacccacattgctgccacctataaaagaa

SEQ ID NO: 69263 - DNA, 2265 bp, Homo sapiens
atgaagagagaatataaaaagaacagaaatgaacattcaagtcttagataaaccaaagacagaaattacaccccccaacaagaaaactctactactcataaataaaaatactttccctcttaagtcaagcccccgtacttccaaaactgttaagctatctataaattcactaggcattacaaaacatttcatgaattcctgtgcaccaataaatcagttactctgcagagaaatgtcaatgttggcatgctgtaggcacttacagaatctttgttttcttttcttgcaggttcgttcatctttatttgaactggctaagaaaacaaagtttaatttatgtcgtcataccgtggttacctgcatactcttggttgttatcaacttgttggtgatcttcataccctccatgaaggatatttttggagtcgtaggtatggcttcatgactttgtgcttgtcattctacagtagctgtttgcagggaaattttcacaatagcaatgctaaactttctcttttgtcttattttacaggagttacatctgctaacatgcttattttcattcttccttcatctctttatttaaaaatcacagaccaggatggagataaaggaactcaaagaatttgggtatgtctcttgccagccactctaacttttctgattagttttccatttaaatttacaaaataaatagtccacctctctatcaagactactttcagttgccttgaaaggaggcagaagccctgtagctttgctacttgggagatatttaaaatatcatatcagaatcttctcccatccctccaaatatcttttctggttttactctttttttttgagatggagtctcactctgtcgcccaggctggagtgcagtggccagatctcagctcactgtaagctccgcctcccgggttcatgccattcttctgcctcagagagtagctgggactacaggcgcccgccaccatgcctggctaattttttttcttttttcttttttcttttttgtatttttagtagagacggggtttcaccatgttagccaggatggtctgtatctcctgacctcatgatccgtctgcctcggcctcccacagtgctgggattacaggcatgagccatcgcgcccggccctctggttttactgttattgtgcctcagcttttgttctgatccagggcatggccagtcagaagaatggacattcatcctcctgtgtctctataggacagtgtctagtcttcagcaagagaggaagtgacgagggactcacagatgttatgcagtccactgtttccatatgatttctagtcatgtaactcctccctacagcccagggaacatgcaatgccttaattaaaatgtctgagttagcttaaatagtcttttttattatttgacagatatgctttggaacaacagacctggattcaaaaactacctttctatattgggattcttgtttccaggtctggtgaagttcaagggcatcttgaacgtggtgcacttggagacagtgagggaagcaggggtgaagtggctgctacctgagtcccttctggagctccattttgcttggtcttggagaaggcttctcagctgccctcccagctagtgtaagcactgcaattgtacctgttacctgagtcaacagatccagatgagaggtgtaggcaggagggtcatctctgtgcatttaggaaaagcagcactgatgctagtagagcatccagttccccaacatgatcacccctgaagccttaattcccaaatccttccaagccttatctgtaggggcttaatgaggacagagaggaagaaacagtcactctggcacaacaggacaatatattcagattaaatctgaaaatggtggaggcctgctgcccatgaattctgagcctctccaaccctggtcccataatgaaactagtagtagggtcttccaaatggcattagacaagggttccatctgtgtaaggaccactgggagttagactggacccaggatggtatgccatgtgcagccatgtcaacccccaatttgctcctctccttccttagctctttctcttcctccagtttccagtccagccctgttggctctcagaatgcatcatccttctccctgcagcgctctcactgaacatgctcaagcgcaaggaacttataatcttgtgttctctggattctggatttagtaatctgtattagtctgttctcacactgctaataaagaaatacctgaggttgctt

SEQ ID NO: 69264 - DNA, 1123 bp, Homo sapiens
tcagcttttagttttagtttttaattttctcaagcgtatacttctcaatttttctttatttatttttttttttttgagacagagtctccctctgtcacccaggctgtagtgctatggtgtgatctcagctcactgcagtctcaacttcccagggtcaagcaatcctcccacctcagcctctcaggtagctggaactacaggcacatgccccatgcccagctaacttttgtattttctgtagacacagagtttcaccatgttgcccaggctggtcttgaactcctgagctcaggtgatctgcctgcctcagcctcccaaagtgctgggattataggcgtgagccaccgcgcggggcctacttctccgtttttcttgttttccatacttctatggcatcctagattccttgacataaccaaatgttatgactatctgtggtctgttatttattgaatacaagtgttgcagattaattgtttgggcagttaaagaaacttagagggtcatcccaaccccagagtgaacttgacctgagagatggagcccttcatcattccagctgtgatctcttgggcacttgctgcgctggagacctacagacttccaggtgcatccctgaggccacccaatgggaaaatcagaacctgaaacagcagctttagagacagaacacctgaggtcaagttccagctctgccactaatctctggagctaggagaacagcattgatttttttctgccttttttcctttgcccagctagtgtggagataatatcaagcacaaatattaaaaaaatgctgtctgcccttccgatgagaactcgatattcttttaaaagaatggggaagaacgctaacgggagtgtagttccacagatctcaccctcaataccaattcagtataagagaggttattttcaactggcataactgccaggggtaatttcagctgttcagatcttccctaacctgacagaagcaaagttaaattagtattcttcaatgttaacactggtgcttaaattcagtcatatgatttttaatttttaacatttatttgtttttagccgatcacagaaaaaaatgcagatggtttcaaacatctcctttttcgccatgttt

SEQ ID NO: 69265 - DNA, 1166 bp, Homo sapiens
cctggcatagtgcatcagcagagttagggcataagataggttagttttcacttctttttgcataggaagttagattgagtgtgagagtttcaaagagccttatctaagaaaactaaatagatcgcgatctttctccttctctctgattgtaaggatatagccaaagtagtgcaatatggaacagattttcttttcagagggtatcttttaagtccgattccatgcacctgatgtagagcgaagagcagtaaactagaggtgggagtgctgggccagtcgcctgacctgttggagggagccaggagaacagccacagtctgcctactgcttgggattgctgtggggacccagcgagctatcctaggaagagtgccatgtaactggctcatgctgtataaacagggggtgttgtatacctggagtatataaaatacaccataggtgagccaaatccgaagtccctctgtgacaagtggctaatggctcgagctagacaagctgtcttagaaaagctgcttctactttagagatcaaaacctccctaataaccgaataatccagggattctgaagagctgtcagataaaaagacagctcagaaatactggagctatgtcctttttatggtaaaagtgtttttcctaatgtctattcttttctctcaaatagaccgtgtatgctttacccaccattgcatttgcatttgtttgccacccgtcagtcctgccaatttacagtgagcttaaagagtaagaaatttgtttaattttttatcttaatcgttttacatcccctcattaataggcaagtatgcaattaaaataaacggacttgtctaatgaacgtcagcggattcatcacccagcttcaacatttactcacattgtgccattcttaaacaagcattgtattttaagaaacaagaaagcaagaaaaatcagaaacttgcagtattttggggggccataaacataaaaagtagccaaccatgtgggctttttcattaatttggtttttcaaatattgtatcaccgaggaaagtttaagtatttgtgttgctttccattacgtatgcgtattttgcaagtgggtgataatcttcagatttatctgtaaactgctaaatacatcgtctctgatttgcctgtgggtttgggtgaaaaggct

SEQ ID NO: 69266 - DNA, 1311 bp, Homo sapiens
ttggagatctcccaggcattctaaggggagctactaaagagccccagatactcaatttaccactagaaattcgcttcatctactctctgtcatctggggagaaaagtattataactgacattcagtatgcacacaataagtgcataataaagagctattgaggggatcaaggagtaaatgggtttgcccataggactccatcagggtccaccaacacagacttacagcaaaaattggaaggctcttttctgctggattctgggaatctgtgttctctagtgtgccagggagagttggaatcaaaacacgtaatataatgtttctattcagagccccatttttttgccaaataaagtagcactgtcaaataataaatcttgtattcacttgggcatgtatgtttattattggatctctaaaatatgcttcaaataatgcactgaaataagtgaggtgatgaattttgaaataataacagtttatgatgggtagctccaaaatttttaaaaatggaaaaaaatgaaataatttattttttacttttttttaaagggtatcttggctatactagtggattttccttgagctgtatggtttttttcctaattgtggtaagtgctgattgcaatggttggtttggttttgtgatagtacaatggcatgtaataattattcattggctttactaaagtccatattgcttctactatacttcttaataccaggttatttacaagaaatttcaaattccctgcattgttccagagctaaattcaacaataagtgctaattcaacaaatgctgacacgtgtacgccaaaatatgttaccttcaattcaaaggtaagtttcctgatcctttgcagatgaaacaagcatttttattaaggacattctatttctcatgcttgtaattgcactggtttgaatgtattagttctcaaaagaacacatgataccattgcttccagattacacatctatgtagagatccttgagaaatatacaaatattatattttacactctctcttaccattaagcattctctgtgaaaatcccattctggataattgtctcagctttttctgtgtagagtgctaggtgatacttcaaaaacagactaacaacatccttagctcccttcttctggcgatgacagaaaggaatactgcagacttcctcaggttgcacagttgaaatatagatgccaccacaaactggcacttaaaaaactctcatactattaaaatattgttgatacaatgggaaacagaggattatggagtcagtcaggcttggatttgaatcct

SEQ ID NO: 69267 - DNA, 2259 bp, Homo sapiens
ttgctaaaatggcacagggaaagtaaagcagagacagcagtcacttatttaaagccacaaatcctgctagagtagctgaagttgcctttgtgtcttactgacagttggtctaagaacgggctgataactttttatgtagcttgcaacataagccttcgtatcttctttctaaaaatgttctcattttccttcagcaatgctgagctacctcttcatcgtaaaaaatgaactaccctctgccataaagtttctaatgggaaaggaagagacattttcgtaagttatagaccatttttttatgatataactaaaatgtttttaatttaaatatgggccaatcaaaattcttgcttgtgaatattgcagaaagtttttcctaggctgcgttttgtttgtttgttgtttcaacaataaatttctttggggctatataaaggaaaaaagcaggagagccatttgcatatgcacatttgaaaagtagatttgtctgtcatgctatgagcggtagatactgcattttccccagagcctgaaatctatatctagtttctgtgaaatagaacagatatgcagtatttttaacacaaaagtggaacgtgcaacaaaaattaagaccctagcctcttacttaaagaagggacatagcattttgggggcgaaatttacatgagccaacctcattaaagatgtagataaccctggaaaatgttgcagctacatttggcacaattgtgttttgactccctcttgtttaacagttcttgtcagtcttagtttctctgttttctttcaagggagaatcgtagaagccagagtctctagtgttctcaggattcaaggtcaaatccaagggatcagggagagagaaatgtctacctgtagtgacttgtttctcactgatactagcccagcaaaacaaaaaggagctttctctttaaataattgataggacaagttgtaatctgacagaatgaaatgtgtgcattcagctttgaaaccatgtaaataattcaaaagaatgccacatttagccaatgggaaaaaaaaaaaccaatattccctcttccattacaggggagtgaagctgtagtatataagtaggggctgggttaaagtgtttggataagacctgaataatgattttaaaaattaatgcatatagtaaaaattaataaaaatatatatcatgatatcatgaaattttacattggaggggaaaaaagtcactttctaaaaaaatataacctaatcacttaaatgcctttcagagcctggtacgtggatggccgcgttctggtggtgatagttacctttggcataattctccctctgtgtctcttgaagaacttaggtaaggacagattttgcttttatcatattctgcagtgcccaagtgaatcagaaactgaataaaaatggacagtgttgccctctgcttcccctctgcatgcactcaaagattaagtacatgataaattgcaagtattaatcggtcccaactttaatatgggataaaaataacagtcagtatgtgacctcctaaacaatccctctactgagctgtggaggggagaagggaggtcctggggccaggacagacagggctattttcagtagtacaacttatatgctactctaagaaaagtccagaaaatgcaattctcttcatacgaagtcttaaataccctcattatttagataaatacattttcaaatctaatatggagacagaaagctgcctagatttatacccacaagtattataaatttagagagtctgaccagcctcaattatttctcttcgaagtgggagagagaaatcaaaagtcagaaatggcggataatctccaagtcatatccatttggctttgatctactacttgtttttatgcttgtatttggagacaaggatgcctgatgttaagggaatttcatacattgaataatgtgaccagactgccatctagtcaaaaacctataaaatgtatttactttaattctgggctaattcaaacagaagtttggataaaagctctccaaacaataattatgagccttagttttttgttttgttttggatacaaaacaaaacagctctgtagttgttctgtgaggtttataaatagatttttttaactacttaattttctggtttctgcctctgtgttttctgtacctatagaggtagctcttttcagttaagtagagaaaagctcttcccctgggttgaaaataatgcagtcccgagaggctacttaa

SEQ ID NO: 69268 - DNA, 1492 bp, Homo sapiens
aggttccaaaatttggatactattaacaaatagtgttaaccatacaaataaacctttgcccttctaaactgtaatgccagaatatattcttttctagatattacaataagatttattttctttgctttagggtacttttgacttcagtgacattgctgtctatatattcaataaacctcctattgatctgttcaaaagaaacaggtaagctgaggacgtgtttgattttgttaaaaccagggtgaattatttttatggtagcattgtggaacaatgatgttctctctgtacagcaatttgattattaaaaagaaagactattttgacctagagtgattggaagacctatagtagtatttatctagagaaacagttgcagcaaaatataaattaaattgtcatggacaatgagaaaataatgttgtcacttaaagtgaaccctcaattatacctgtttttctggtttaaaatgacttcattttaaaagcttgtttttccttaggtctttataaatccagaacaaagatcccatgtttttatattataacttccaaggttttaaaagtaaacagacctgtcattctcttgtgcatattccaaggagaaagtgttactcctgaggcaatgtgggagtgagcaagctatgaagagacttcaagtactctgggcagtgtaatacctgaagtgtttattttctatttctgggacactggattatgtttgtaattctttgacttttacattaactaaaaccacattggtcaactattattgtatatacatgactccatttaactggaacattttataataaattgaggagctaaccattgtctagtttaaacaccagtcttatgagagattaaacaaaggtttaattatagcctgtcccatattgctctccgtgaaccttttgaaaacatgaactgaacagttataaagaaatataaacactttttaaaaagtgaatgctttagagtttcagtatttattgagatgagctagtcgaacactttcaaattttgctacagacaaattatgcttttgacagattagtcttctgctctcttttgtgagttgcatgtatttgaactacattttatgaataattaggttttgtatgtcgtggctattaaaatgtttctaagcttgttattacatttagaacgtggaggcattgatgggatgttattaagataattccttgtttgcctaatcagttcaggtcattaattcaaaaggaatctttttgtttcaactattaggatctttttaaatcaaatatgtattttaatggtgtacaccagacctgaagaaaaagatcacagaaggaatttcccctttgtaagatagaggtagttaaaaataagccttatgacctaataggttaattgtaatgctctggtagccaacttgaaaaaggagaaatgatggttgcatctcacattttaaaatgttaagaatttgttttgtaatgaggataccttaaccc

SEQ ID NO: 69269 - DNA, 1043 bp, Homo sapiens
gtgtttgttttgcctctgctgagctctgcccctcttttgtttgctggccagtttctggcagttcatctgttctgctgttgaccattctgtactcctggtttatctcctcatggttgccccgtatgcaggagaaacaaaacactgtaggatcatagacagctgaggagcagtcattctgcctggggccagggaaggcaactgaggagttggcatctgagctggggcctagagcagccttcaacaggtgtgctgggagggggaagggccaggaggaagcagcccacgcagagcgaacggcatgatgtgccaagtgcctctcaacagcacttggtggaaaaataattgcctttcatgactcaaacatagagtcaattgcagttatgtattgttctagggatatattttcccacatcaggaagtgagcggtttcatctggggactggattttttttcttcttttttaataaataggctttattttcaattatcatgtctgttttaaccaaatgtttcagaaatcatctatataatctcccacatcattttaactgcactttttcttgagaagggtgtgataatgacccagatgtactaaaacaaaaacatgagttcatcattcaaaaaagtcttttcattatacttgattgtcaaattttcccactggttaccaagtggtgcttattcatctaagaggaaccaggtgcaaaaaaagtgaattacattagtagcccaatatatagattttaaaatagccatgaagtaatagatgaaaagaaccctagacatcatttggcttgtatctttatattatgggcaaggaatccagagatgggaatgttaagcaagttgcccaaagtcaggtggtcattctcctaaggtcactgccagcctttccctccgcccctcccaccccattctcacactttctcacccggatgtaacagagagtgcaacatagactacaaaagccttctttcataatgttgttttaaagtcatctcaaccgaaatgctcccagagagctatttgggcttcgaattaca

SEQ ID NO: 69270 - DNA, 1024 bp, Homo sapiens
tgagttaaagagcacaatcttaaaatgagcaccctcaggactgttaggtaggagaggtgttagatttcaagtagatacaaataggtccagaaggtaaaatgaggacccaaggatagaagtagcgacagtgatttcagctgagcctcagttccaagcacagaacttttcagaaacagaatgggttgcataatatgtccccttttaaaagacactttgcagacctggatgcctgtgtgttggcatggagcatagaggtttcctgtcctgggtaaacatgctgtgctggactaggttctctctgaaagtctctccctgcttcaggagtctagaattctaagtttcttctcaggagactccaaaatttactagaatgtcctgaaccacatctttcataatgttgctgactcaaagactcttgaaggctcctgaccacattattcgcaattctaactctcttgccaccccttccccatgacccatgtacaattacatgctctagatcttctcctcaaagatgaacataagtctgaaatatcaacaccttggcagccctattatcaattgctgatctgtagtccccatgtaagtacgccttttttagcaaccagtttttgtcccagccatattaatacttgtggtcagtggttaacaatgttgaagcttaaattatatccagatgaaattttaaaaaggaatcacttgtgttcctctgtgttaacacaggaatcccagcatgtgtttctcttccaggaaaccataattatatgtacaaatatctacccggacaattaggggcataatcatgctctaaatagaagtgttcaaacaagtcaacaccttctctccagttattcctctttcttctttctcttagatgtcatggtttctgtgtctcaagacatttatgatttgatttttctaaccctttctaggttctattagagtcaattagacaacatattccttctttctaagaatctgaacaaggaggtatacttttctaaattttaatcctattaatgcc

SEQ ID NO: 69271 - DNA, 1075 bp, Homo sapiens
tcccactcattgtttttagaagttgagcagctattgctagtttatgagtcgtctgtgatgcatctgataagggggttctaagaattcaattctcttagccccagaaaggtaggggtgtgtgtgcgtgtgtgtgtgcgcgcacatgcgctagagtgtataccctgagttcactcagtcctatttatgctgagttgcctcaggtgccttggtcctatccaaggacagcagtgtgatctctgttttggtacagtgtatttttcttagcctgcaacagacaacttaactatactggctatggttttacagcattatttacctccatgattggtagaatgccttctctgctcactcatctggtttacagtaggccaggttggagttatcacagtagagcaggttaagtgtggtgcagagagttggattttcaaggttagcttgaacttttattactcacagagtggtagttggtttaattagaaaactactcctttgtgggccagttagttttgctttgttctctggccacagactttaccttatgtcaggcacatgatttcaaagatctgcatctatatcaggggtcagcaagggacagcctgcagaccaaagccacccgcagcctccttttgtgtggctggctaggtaagattgacttttaattttataaaggactttaaaaaagaaaagatagttgtaaagtgtacattgttccatgagatctttataacaaccctgttaattacccccattttatagataaagaaactgaaactgcctttgcaaaattataaccaaggaaattatgacagtgaaagaaatcagacctaaccaactctatcttgcttctaacccttaagctgtccttgttcattcctgggcataggccgaactaactttgggaaggaattcagttcatggtttgactgaaacaaaattggtaacagcccttttccaaaaagacccccttcttgcctggggtccagtctgcctttgcaggactaacaaattaactacacgattagaaattacagtttaggggtcatgcagcctctggctccaagagtctgaacctccc

SEQ ID NO: 69272 - DNA, 1036 bp, Homo sapiens
attttacaggaaattaatctctagaacacatctcatagtactaggtaagtatgatgtttattacactacacagaatctgataaagcaataaatgctttttatttttccataacttcttaacatgtattattatttttattttaataatgtagtccttaagttgaaaaccatgaaaaacaaaagtagaattcacgacacttctgagatatcagtttattattaacactgagtttgtgaacaatctctttgaaatgttaattgtgaaacaaaagtacaatgtgtgtaaaacaatagtttaaattttatttggttgattataataccagaccttttggattctttttttccattttctatctcatttgtgttgtggttgtgggagtgaaaaagataatttatctaaaaacagactttgaaaagtggcatgcaaggagacttttattagtaccaacgcatagagctactaggaagaataaatgagtggggtgtgtgtgtgtgtgtgtgtgtgtgtgaatgtgagagagaaagagagatggagagagtgatagtagtgcgtggtgcatagtacacactgtagatatttgttaaaatactacagttagtattaggtagtcactaaataatggctaacatttactgaacagtatctatatatgctacactatcttaatccccaccaacaacattatgaggtaggtattagccccattttacagataaagtaactgaggcttaataacttacctgtgatcacacattagaaagtaggggagccagcgtcccatccaggcttgcttgactctagagccagcgtgatctaaaacaccataccgcctttggtgatgccttcttcagacaccaaagttgcattattactctacaacttgagaaaaactttatttttatcaacggatgcttgcaagttagtacttaccttttactttccaatataatgtacctttaaaatcaccttataaaatcagccagtgttcctgaattatcttgctagtgttccaccaataaccatcccctttac

SEQ ID NO: 69273 - DNA, 2376 bp, Homo sapiens
agctgggtgtaggggcgggcacctgtaatcccagctactcaggaggctgaggcaggagaatcgattgaacccgggaggcagaggttgcagtgagccgagattgtgtccaacctgggggacagagcaagattccgtctcaaaaaaaaaaaaaaaaaaaaaaaaaggaaatccatgaccttcagtttgggaaatttttttacattattgtgttgatgaattcctattacccccagattttggaccttctagactagtcctctaatttttttaatctttcctttattttcatttctataacgtttcactgtaatttttgggatatgtcctcaatttttcccctctttattgaattttttatttctgttactatatttataggagcttaaaaactctaagaatgtttctttttaatattattttggttctgtttcatgatttcaatatcttctctgaggattctaatgatagttttttttctgcattatgaaaaatttaaaacatgaagtagagagaatagtagaaaaagatttgtatgtttccttccttctatggatggttgttttagtcagtcccccaccaagattgtcttgaagcaaatctcagctattttattatttcatccctaaatattttagtatatatctctaaaacataaggactcttttaactcaatatgtcatacctagaaacaagtcaacaacagttccctaatatcatcaaatatacaatcagtatttaaattgctttgattatgttatgtttttaaacatatgggttgttcaaatcagtactcagataaggttcacacagtgcaattggttgatatgtattttaagtcttttttaatttatattttcccatttctttccttttattctgtgccacttatttaagaaacagggccatttgtgtaaagttttccacaatctggattttgctgtttgtatccctgaggtacaagctgatttttgtttgttttggggtctttcaccttagactctttgcccagatgtcagatagttcctctttatctgctgtcttcaagaatggggggaaaacaaggctgatttgagcctggcgcacatgagtggggcttgttcgcaatagcttcacttaagatgctatttacttaagatgttcctttacttgggaaccaccagggtcatttgtctaagaccctcttctttggctgttcagatcacccagagaacagctcccaatcccctgttctgggggcctagacctcaccgccatctttctgggaaccaagtagggggaaagggctggaatgattatcccagcaggcatgtgttcactcagttcccaattttcattagagtatgcctcttgcccacaaattgtgcctagtctctcacctagaaacatatattgtatactttccagagaacatatattcagattgttgccaggataggggaggaccaaccagtcagctttatggagtaggacctggtctggggaatctagctatttcttgaaaaaagttcaacagatcctcactattttagctcaccccttccattatccccaactttcagtcatgccagcagtgccttttagagattctctgaggtaaactgagttggtcttggctttttccactgccgatttatggttcaggtctgtctgctttccagctttcaaaatttcattattgtctactattatattttatcctagcagctttacgccttaaaaaaaatctttttactgggatatcaagggagagggagtaagtccttgtattcaatctactattcctagaattcaattgatttttaactatactggctgagggataattgacctcctatctcatgacactttagtgtctgattaaagcggggaagtggaaaaatttacttttgtagttgaaggaagatttttcctggatgaaactattatagatcatttagttatttgtaagattcatggataacaagcgcaacacaccaagtcttcagctaaatctcatgaaggtagttgtacaaaggctcaaactttaagtttctcactaaacttaggactctcctacctcaggacaaggattcactctgtgactcttgtaaaaccagctgctcctacaactgctcaaagccaagaagcagttggcaggatcaagatatttcatctggtacagggctccattccagactcacattggccaacacaggaaaggagtccaagactgtccaggcttctttggaccagcagctgggaaggctccttagtgtctccctgaggctgggtgtggagccttctctgcagtcatctggaaacttgttggtgcgatttctttttcttggatgagtttgcagctcatttttttttaacctatccataatggctgtcatc

SEQ ID NO: 69274 - DNA, 2223 bp, Homo sapiens
gtgacttgcatatagcaggcgctgaaggaatgtctgacggtgaaacagttcttttcttttctgcaagggagagggaatttctatttaacaattttgtagtccaagaacctgagctcaaaagaaaacttgcctctagtatccttttaaataccaggtttatagtagtcttgatattatctaattttccacttagggaaaaactatacaaaaattaatttatgttgcatatagtgtttaaatttattattaaaatgattcaaaatgtatagctgtttttgacttacggttgtctttcatttcatctcaagatgagcacctgttattggcattgttttgtacaaggtagagtgcaggatataaaaatgaatgaggcaaagtgcctgcccttggggcacttatagtttatttggtaaaacgagaatatagacaactcataatggcaaaagaaaaaaaggtggggggagttggtggttgaatagggctgtaaactcttagagagctgattggtaactgttcatgtatgttttgatgagtaacatatcatttagtaaagatgtcaagcttcaaatcattatcataaggttaaatatattacgcatgtctttacagcaagtttatttctgatcgtgaaagtagaagaagtctcacaaacagccatttggaaaaaaagaagtgtgatgagtatgtaagtatcattataatgaagtatgcttatttttttaatcatataaattgggacaaatctttttaattcaagtagcatagtaccaaaagcataactacctgtattcaccaggatattcctcataccttatgtattttctcttgaaatccattcaaggaaataactagataactaagaatggattttcttgaattttacttccatattggttcctgagagtgcattaaaggctttggcttgatgaactttcttggggattattttgcttagtgtcaatgtttgtttctttgttcagattccaggtacaacctccttaggcatgtctgtttttaacctaagcaacgccattatgggcagtgggattttgggactcgcctttgccctggcaaacactggaatcctactttttctgtgagtattgacgtgccggtactttccattttaaaactgaactttttgtatgtttctgttattacatagaagaaatgtgaaatatttataaatagtttttttattaacttggctaagttacaagtacatactttgatatttattgcttgagtgattttccaaactgtacctaatgcttacaacaaagaggaaggagaaaatctttttattaatcaaaaatactgaaataagcatttgtgaaaaggattaaaacatttgaaaataactttttttggtatttttggagtctacctgtgactttaaatctcagttaaaatattaagaggtgtttaaccccagccagtcaccactttggcatttggattgctgtgaagcgtgtactacatcaaagggcaattacaaatttgtttgtaataaatattcaagaagcatagaaattttcagtgttttgaagatgagaaattagcatgtactttcccactgagattcaatgaaaagaaaatgggcaattttctttttaaataactttatctcaaactgttgaatgggactttctgcaaatgtatggagggcttatttttagttggaacaagattaagagagatgatagaatttgtactaagaaaattctcgcccagcctgattccctctcaaatgtcacacgagtgtcagtggtgaggtgagggagaaagcacttctccgaggatcttgccttttgttccctgacttgaaactcacgcttttcattggcctggctagatagtccttgttgccatgtccttttgacaggagcatcatttccttacaagcagtgaccgaaatggttactaatcctacaaactgtggatatcctttcaaaaaagacatcaaaaactgagataaaagaatattactgcccattccattactccaggaacagaaatgcccatccatgctgccctgtgttaggcattaattttgtgtgtgtgtaaattaacatgtcctttctaaaattaaaagactgtgtaagatggtgaattcgatacattgtcttccatattgtcagcctaattcagtgaacctaactctagcctcctctcttgatcactctgaatgcatctttctaagttgcctttccgcttgagctg

SEQ ID NO: 69275 - DNA, 2082 bp, Homo sapiens
tctgagcctcaatcccatccctttaagatggggataataataatacctttcctcatgggattgttggggaatgtttaatgcactattatctgtaggttaagaacataggctctgcacttagcctgcttatattcaaatcctgccacaacaggttagttagcccatttatgcctagtgttccattattggaacgctaagcttgtgggacttatttatatcctactgctcaaggtcattgccaaggtctaatttttcacacataaaaaattgcaacccctggcataaatgggttaatagtaatgtaacttaggtcaagttacttaatttttccaaactggggctaaaaataataccaaccacatataattattgtgaaaataaatgaggaaattcatgtaaagtacttggcacagtgtctggcaatagtaagcctcttagtatgagaaaagtctatcggtaaaaatgcagtcccctttctttggcaagcacttctttcttcttcacctcaagaagcaatgacattgctctaggttttggatgattgctggttattgccaccttaaatttggtgaaacattagtagattattctaggtgtacccagacaaatatgcttgtattttaatatttatctgctattgttctttctgtatacttattgctattatgacccaggaactatttaacaaaatttgagattttttcattaagatttgtttttaaaagaattcgaggcaactcttgtcactacaccctgaacccacttgtctttatatatcttttggagtttgtgggctaaatttttatcacttgagagcacccttgaaaagttatccctcttcttctatgttttctataccttagggaagaagattccataacttctttctgtattcaattttcatgtcagaaaattcttctcttgctttcatttctcctgttacaattaaagtctttttttcctattttcagtggaatttgtccatcaaataaggctttgcttacctctcagtcttctcttctctttagattcctgtttcttcaattctcccttttcatgttttccaatatctttgttacttgcttcttccctttcattttattctcctttttaatacaatgttagcatttcagagaaaggagtaggaaaggtcatttaagttcaaccactcatctcttttatgttatgaattctcagaggaaacagtataatctagtaagaacctgattaaaataggaagattatctttctgttgtacaactcatccttaattagattgttactgttgatttgtttctggttttaaataacagaacctctctgtttcttgcctctctgtttcttgcctctcttcacaatgtaccttagtataacagcttacatcattttttaaggctttgtctgttcagggtcacccaatcacccattgtggagtttgttttgttttgtttgttcacagagcaattggctacctaatggttaattaaattctgttttatgggtacagacacacccaatgagaactctttttttaataatattttatcatcctgagataacatgtcaaaggcaccttcttccatagcatatttaaagtcaataaagagaaatattacatcaactattttgccagaggtcgtgttttttaacaagcaagtgcatcttttaaatggtgagacagcagaaacttgtgatacgctgcttgacccagttattttgaatggaattttccattacaaaaagttagttagttttatgtattttttaaatgtatagaaatacaaagcaaacactttgggaggccgaggcgggcggatcacgaggtcaggagatcgataccatcctggctaacacggtgaaaccccgtctctactaaaaatacaaaaaattagccgggtacggtggcgggcgcctgtggtcccagctactcgggaggctgaggcaggagaatggcgtgaacccaggaggcggagcttgcagtgagccgagatagcgccactgcagtccggcctgggcgaaagacagagactccgtctcaacaaaaaaaaaaaaaaaagaaagaaagaaaaaaagaaatacaaa

SEQ ID NO: 69276 - DNA, 1086 bp, Homo sapiens
gataaagtatgtgattaaaagcccagcataggatttagctaccatcatttattaacacagatgttctccttttttcctcctttaaatgttcttaagaggttaagtccccaactcagacacttttcctcattattatccaagtacggtcaactgtgctaggtgatgtttcttactatggggctcaagtgtacttacttctttcatcttttttgagtaattcttaataataatacccatttcttgagtgccaggtattttacataagctaccacatatccttaataactgccatgcacaagtattcttctgcaagtgagaaaaatgtaaagtttccgtttacaaataaggaaactaaggttcagaggaagaaaataacttatccaagggtacacacaggtctgtctaaaatttgtgtatttttactctaccctcctccctctggttataatgcttgggcattggtaaaaagctagtctttaatagttctattaaatgctaccagggccattttatgtgctgtactcctggacagttcagtagtccctgctgacctccactgaacagtggaaggaattctcaccacaagtaggacattgtggttttataaaattatcaaagcaatccattatcaaagcaatccaaacctcaagggccttaaaggtgggagtcatttataatagtcagtttagaatctgaacttgatttttaaaagtgtcacttactaaaaatgtcaagtttttagatgattaccacttgcagtagatgggagaaacatctattctcacccgcaacttaggcaccttgcctggatgagctcacttccctataggctccaaccagggcaagcgttggtacagagggaggtctgttggcttttggttcctgtattgcaaatgcagtgtgatgagtttttgtttgtttgtttgtttttctttatttcccctccttctctgactcagttcatgactcttgcttcatttctcgctctaacacaattaaaaacaacatgttatagcatgaagctaataaagaaaaagacccttgccaattttattgaaggtccctactgggttatctggcttactg

SEQ ID NO: 69277 - DNA, 1549 bp, Homo sapiens
ggctgaggcaggagaatcgcttgaaccagggaagcagaggttgcagtgagccgagactgtgccattacactccagcctgggcaacaagagcgagactccatctcaaagaacaacaacaacactgcttcatatcataaaagggggtctctgttacctacagctaacatgatattcttataaacctgatcagtaagattatggggcatgattcactgtatagttaaaaatggaaggaaatctataaaaggcataaaatttagatacacctccataacttgatagacaaagattgctttaatgcatctagtagcaacatgtaaaattgtataatcagtaaattaactacttgtttatttgtggtaatttatttttaatcagtagcgtttcatatgtttagttatttttttattttgctatattttaggggtgtcaagcttccattttggtatctacttctaaatacactcagaacaggagaaatttggactaattttcaaactacagacactttctaatcatgatgcatttcaaaagtggactcgaattaactgagttgcaaaacatgacagtgcccgaggatgataacattagcaatgactccaatgatttcaccgaagtagaaaatggtcagataaataggtgagtatttttccactaacatttctatccagtgaaagaaatggctcgtggctcacacctgtaatcccatcactttgggaggccgaggtgggtggatcatttgaggtcaggaattcgagaccagcctgaccaacatggtgaaacccaccaacatggtgaaaccccgtctctactaaaaatacaaaaaattagccaggcatgtggtgcatgcctgtagtcccagctacttgggaggctgaggcaggagaatcgcttgaacctgagaggcggaggttgcagtgagccgagatcatgccactgcactacagcctggatgacagagtgaaactctgtctcagaaaaaaaaaaaaaaagtaaagaaaaagaaatggttttaaaaattattctggtttttagttattctgttgaattattcattactaaagttatgttccatttgaagatataatttgaatttcttatgtgacatctgttgggcatagtctgcaatagcaaatgaagcaaataggaaagtaatttattcatcttttaaaatctttcaattgagactaataaaaatgtatgaatacattgaaccccaaccaagctctgtgttatgaattaaacagactactggaatttcactgcatcccatatccaaatgtgtactacagtcatctgtacatattttaatcaagaaatggtcaaagttgcatttgctaatgaatctgtgttaaactacaagtgtgtcatccttataagcatcatttgtagtatggattttaaataataataatggttgagcccaaatgactctgtgaggaactataatagagacatagtacataaaagaaaaagagaaggaaagcgaccacaactgaggagagaagcaatggggaagaagtagagggtcagggtaggaagagtgctg

SEQ ID NO: 69278 - DNA, 1783 bp, Homo sapiens
tgaatatattgtctgcaggcaggtgatcatagctttctttttaaatttagtcctcatttttattgttaacatgtgtttactgtcaccatatactagacctttgagatgtatggtccttgtccccaaggaattgaaattgtaaataaaaagattactgaaatatgagcccccttgctataagccagtgagtaatctacacgaaactgctgtaagaattcatcacaggtaaacagtcaagcaggttctcaactggaacaattatgtccctctccctgcccccaggaggtatttggcaatgcctgcgttggtcattggagaaaggcatcacagaagagttggcttgaattttttaaaaaagcaagcaagctgggctttgaaagaaaggtcatacttaagttagcataggcttcatgggaaggtggagagggtgtgtccaggatcagggggatggtgtgaacaaagcagaaaactgcataagagtagacccattgcaggaatggaaaattagaaggaatatagtgggagcataaattaaagagaaagctgtctgaggttctagagattagacctcatcctgtagagggaacagttatgattggcaaggcagaaagaggaatgtgcaagactgtcttttcaggaagaatctgcctctataggtgggagagggcaagaagcaggaggtagcgtggcggagagtgactgtggcaaagttcaggctgtgaaactgtaaggaataagggaaaggaaaaggattttgtgaaggaatgttggcaggacttggcaactgattagatatgaggttgtatgaaagccatactcaagtttcaagtctgagtgacaaggagaaggtgcattatatctttaacagaaatagaatgctggcatgtgaggtcaggtgatgcgttctgcttcaggcatgtggaatctgaggtaatgataaacatcctaatggagcagtccagaaggcagcaggagtctgaaaagaatttatggaaatgtttctgagaaggaaagaacctgagagataacctctctttcatgccctctcattttacagatgaagaaacatgtgacatgttaagtggcatgatcatgatcaagttgtatttatgagggagatcctatttcataacgcaaaggaattctagttttataaagtgaaaaagactgggaagaaagatctgaaagatgcctttgtagaatgaaacttgacactacagccctgaagccctaaaaaggaaagaatttggaatatgtggagcaagaagagtcgaggcccaaagagctacttctacacagaaagttgggaggaggagggatctggcagaggagaccaagaaggtcttgggaggatgcagtgtggagttatttgggagaagtcagaaaacaggaacaatggtcacaataatttacaaaacccgggccagacgctgttctaagtgctgcacatggaccaagtcatggaatctttatgactgtatcagatgggtattgctttaagtccattttacagatgaggaaactaaggcaaagagaagttaaccttctttcctggggctacacagcttctaagtggtggagccagaatttcctaatcaggcatgatttcaggggagtggtggcaggagcaagtagtttagagactgctagcagtaaagagaggggtgtgatgatagttcaaggttctagacagagttatgttccagataaagagctctgaggatgatggatgtcaagaagggaaggcagagagaggaagtagagaaacaaggtcctagcagaa

SEQ ID NO: 69279 - DNA, 2185 bp, Homo sapiens
gattgggtacaatgtgtactactcagatgacaagtgcactaaagtctcagatttcatcactttcaattcatttatataaccaccaaaaatcactgataccccaaaatctattgaaataaaaaaattttaagtaaaattaaaagattaacttcaataacctaaaaaaagacactgaccctagatttaaaataagattttaaatttaaaaatattgttgtacttatttctgaaaattgatcacatatttgttttctagtgataaccttactaataacagaggagttcccctaaccatgttaccttcccaatcactgaattcctctactattagtaagtaactctgtttcaagtgaggttacaatgtgtctttggcaataactagctgggtacccttgagcaactcatttcacatttttatgcctcattttctcatctgtccaatgctaataatagtatcagtgctgcgtacctcagagttgtgaagatacaatgagagcagagctgagaaagtccttgaacaagtttaaaaaaactattcaagatgatagtcatctggcattaagcatgctgctaatcttcagggtcaggtgatggttttagattagtgagtctcagagcagacttcacattagactcatctagggtgttttaaaagctgtcagtgccaagacttcaactccagagattcagatttagttggcctgggatggagcccaaatatgggagcttagaaaatatcaggggtgattttgatatgcattggtttagatttaaagcaaggaaaacaaaacaaacatcagaaattaaatgaggacctccatatgttgcttgacaaagtcttagtcttagtagtgtgaaattatgagcttgactgacttttccccctgattttactaaaccaaccatttgttgacatcatggagccacagcctcaggttacagtttataacctgaattttcccaggcatagacgcctgtccagtgatacagccagagccacatgaagatttaatgtgtagatctcagtttccatctcttaggaatggcgaaggttggaaaagaaagcgacaatggaaaggaaaaagaaagggataggctatggaccaaggtataggagaaagaggctctgagcaggagacagacaggtcagagcacagagaaaacactgtgtttaatttattgaaccggttttgtttaggttgcaaactggtggctagagagccaaattaagcttgtgggcatattttatgtgacttacgctttcttttaaaattatttgaaattagttgccaactcttaaatatcagaatttcacttagaattttgatttctggcatttattgaaaaacataaaaataaaaagaccaggctcattcctgccactagttggagggaaatagatgggacatgtgttctctagttccttatgcccagtctgctttgcccatttatcttacctacctgagcactagcttcttttgttttaacttttattctcaatctggggatcttaacattggctgcacataagaatgctctcctctggagagcgtttaaaataaccatgcttggatcctgtcctataccaattaagtcagagactgttgtgtgtgtagtgtccccttatcacttttatttttttaaagctccccagtttgttccaatgtcctgttagaactgaggcctattggcctacaaaggcaactattcaagagatttgtctacaagtccaccttcttatctttggaagtgattcattaagaaatagtgtatagaatcattaattcagagaactgggagaggtctttgagagagcagccattaatccaatcttcttattttaaggtgaggagacagagacccagagaggagaaaggaattgttctgagactgtaaccatcatctggtattgaattatatagtgtcttttattacattttctcttttcaaataaaagtctatttttaagatttctttttataaatgatcctctttatatgcagcactttgtgatgctttaaagttcttattatttctgtttttccttgagtattttgttaggagtcataacttagctagggcttaaaaacaaacacacaaaactgtatccatcttttttagtacaatagcaatccttgatcagaaatatctttagaacaaaaaacatatatgcaaataaagagat

SEQ ID NO: 69280 - DNA, 2352 bp, Homo sapiens
ggtgtaatttgtcaccttgataaaagaaactgtgcagcaactcgtgctttttctgacgtcagaaggacaacggaaataaaacctgagctcggtgcatggctggcctcgttgtcaaatgtctcatgccaatttggtactcccgaaatcttgcaaaacagccaattccggggtactgacctggtgtggaccccctggattttggttcgaccccagcctcaaaatggcctttctcttgagagtcactcgatttctcagtatgtcgctgtaagcaattggaaactggaatagtttggtttgaggtcttaatcttgaggtttattcgctttttaaaaaaatgtggccaataaacattttctacagagggcttactgtgcgactggcagcaactaacaagatttgtttcaccttctatgaagcttccgttctcagggggaaatagactatataaatgtaggcatatacatttcaggtattcttagtgcaatgaagaaataaaacaggatcatgtgatgggggaggatgcttgaaatagagtgactcaccgggaggggcggtgtgagggtataacatttgtcctcagacccgaatgatgaaaagggatcagctatttccataattgagggaagaaggccagcggaaggaacaggaagaaggaacagcaagtacttattgcactcttctttgactgtaatataattgaacagatagatgaatagattttaaaggtgttttggagctttaaacctatatgtatgttgtttatgtatattttttatgatgcttcatgaattaaggccatttaatgaaaggagcaccatgtttctgatatctgactattgctactcttttctttactctgggtgatgcttgtggacaaaaaccgattttactcattgttcctctaatgtccagcacatagtacctgcttaataaatacttgttggatcgagaccttgagaccttgatcaggccatcttgttcatctctttgtgatattattggccatcccttccgttctatatctcatctgttccccttctcctaagtttgaaaatgagagtctttttcttctctgcttctccttctcgtactgcccttcccactttgagcagtgaccaggcccttgaaaatacccctcacacttgtcctcttgtctccatttccactgcccaagttcaggtccctgtcaccttacctagacttggagacatatgaaacagatatagaggtgccttgaacaacctaggggcagtgggagtgggcggtggagaaaaatgcaagcacaacatatggttaagagtgaaacagccagttactgaggtggaacagctttcctgttggtctctcctccatatcaagttatgctcccctaattaaatctccattctttcatgaggtttatatttctaaaattcagttcacattttgttaaaggaccttgcttttaaaaacctctgagggtttccattgcacacaaatacagtctaaattccttagccatacacttaggacccttcacaatctgccttctcatctctttccaattttttctcttgatattttctttctcacagttcaccctattccctccctatcacttttctgcttcaatatctgtgtggattggattccagtccagaatgcctactgaaatcctgtgtacttgtgatggcctatccctgatgccacttttccacctcttgggagaagtgttcactgatcacctcactggcattttcataagtatttgtttatccttcacattttggactgttgttactccaggtgatggaaggtggtgaataggggcttaggctctgagtcaaatataaatatcaggcctcagcttactcacccaggaatcttgggcaaggtgtttggcatctctaagcctcagttttttcttttgctaaatgggaatgatgatgctggtggtagtgttggtggtacccactttactgagtgatggtaaagatttaatgaagataatgaatgtgaagtatttggtatagtgttagcattccatatgtattgaattaaacatatctaccagaggagggagagaaagttgatcagtaaagttccctttacctctgaaattctgtgactatgtaatcttttaaaaatacttttctgaaaatatatcttgatggaaactacctggatctttttagtctctgggagaatatacatctatgaaaggtggtgaggaggtaggagaagtatgtgcacagaagtactttgaagaatgtgtgacagacttcgaaaaagacatcttgtatgcaaaggcacacagagtaatataatggactgtggagactcagaagccagaggttggaagggaggatgcca

SEQ ID NO: 69281 - DNA, 8441 bp, Homo sapiens
aataagggatactcaacatgtgccagaaaatgtttgggcatgctatagaaaccattttcttctagcaaagttactcatcccagtgaactcacaggtatttatctaaagtaaacatggggaaggataatttacttcccaccctatgtgcagctcattacgtcaaaatagagaagtgctgttatctcagatgtggctttagaaatttaattttttaagctgatctttaagtgttggtgttctgcagagtgcttactgctgaagtgaacagaattcatgaggcaattagaatttgaaaatagtgatttagaagacagtgcaattcatgatttacctaaaaagaaaaaggcttagaggatatacataatgttttctaaagttcaaaagggatatttttggctgtctttggagttaaaggtgggtcaagatgtcacaacatactctgataacctggaataagtcctggtttgggggactgagttttataattttttttatggggggggcagtttgcctgtgcattttatgaaaacgtttcctcattgaaatatttaataatatttgctaacgcatctggaaaaaaacttgttttaaaattttttagtttccagcattagaaattacatgctaaagctgtaccaaagttggtgtacaatttttctgaaagtgcttaaagataagattactggcttaacaaacaagctttgttccctgcattagtatcaagtctttgagaagcattttgtgttatgaatcagctggcagccttcccagagcaagtagtgggacaaaagttacactgttttatacccgacttctaacctgagtaaatgttcatctagcacacaaaattaaaaagttattcctatcttgaacaggggaaactttttccaaacatgtcttttttgtgtgtttgttttcatggtattcctatgaaatgagtcctgttagaagatgtgtatatttttcagaggatatttgtgactgttttgaccttgtttctgttttctttagattgtggtatctgaacgggaactatttggttctgttggtgtcattggtggtcattcttcctttgtcgctgtttagaaatttaggtgagcaaactcatctctaaagagaattgaaatgagcctctcaccagttagttgggctttctctgaatagaaattaatcagaatgaaaaagccctagaaagtagaaaggtatatctttgggacttacagcatgcaaaatttaggagccaaaatatttaattgacactatatgttgtgctttgtaagaaataatgcaaatgatagtttttattagcttgggttatgacaagtatatttaaataaatctataatttagtatcataagaattagaaatttagtgctatacacatactttagtgcctaaagtcttcccagcagaattgagttattcagtgggaaaaagatatttgccttaaatctgtttcattaaactaatactgattcctgccacccctccttataggatatttgggatataccagtggcctttccttgttgtgtatggtgttctttctgattgtggtgggtatgattttttttttagaaaaaattttttataagccctgccatgtcacttagtttaacacatgcaaaataatatatttttaggtcatttgcaagaaatttcaggttccgtgtcctgtggaagctgctttgataattaacgaaacaataaacaccaccttaacacagccaacagctcttgtacctgctttgtcacataacgtgactgaaaatgactcttgcagacctcactattttattttcaactcacaggtaactaaatatgcttattttctcaaaagaagagtttagggaagaaaagagggaagctattcactcccagggtaaagggaggaggataataggtgctttatagaaaacatgtgattagctaattattgaggactgtgaagaaagttttggtttacatctgaaaatagattgagaattgagataatcatatggtgctaataattgacacattcagaagtgaggatattgatcatacttcatgaacagattagaagaatggaagctaattacacaaaggaaacttaggctttgattctaagattgtttacataaaatatatgctgcggaaatgtgacagcatgagttcgttacatcagattaagtagatttttacgttttctttcagactgtctatgctgtgccaattctgatcttttcatttgtctgtcatcctgctgttcttcccatctatgaagaactgaaagagtgagtatttcatttttacataaatttgagaaaatattagacaattgctgtaactgctgctgaaatatatatttgaattttctcttgaattacatagccgcagccgtagaagaatgatgaatgtgtccaagatttcattttttgctatgtttctcatgtatctgcttgccgccctctttggatacctaacattttacggtaagtaacgcctcctttaccaaaacaaaaacaaaaacaaaaaaaaacgcttattgaaatgaagctgctagttttctatgtgtagttccatcactttaaaaatagtctgttttaatatatttcatatttgtgatgagaaattaaatttagagcttagaattttctgtagtgtatttaatcagtaatttctagaatccaggtttgaaaatatcattaatcatttgatggcatatttgtatgatatgccagcctctgagttcatattgcctgtctcctctcccatcaccttcagactatgtaacacaaacacaaattgcaagccaagccaggagatttagctgcttaactcctgttgtttttaatgggagtcatgtggctaaatctctgtggtatttagaaaaattttccttcaatgttactttaattgcattaactataattccaaacaaatcttattagcctcttagtttatagtcgttttgtgagtagctaaataactggtgcacattttgctgttaaattttctacttggtgtccaatgaaaacagccaatcaaagtttttttggtctttccctgtagaacatgttgagtcagaattgcttcatacctactcttctatcttgggaactgatattcttcttctcattgtccgtctggctgtgttaatggctgtgaccctgacagtaccagtagttattttcccagtaagtaatcacttgctctgctttcagtaggaaggagtttttagacatgtgaatattggtgagattttcatcttctggaagaagggaaacaccagtagaacaatactaagttggtggtggttttgaaggggctttttaaaaatacagtgtatattttcaaaataccctggggacatttttttcaccataagatataaaatgatctttaagtgttcagatgttcaggaaacagcagagaaagaggcacagttttatttagaaatagttactattttggatagattccttgttacttgggcattcttttcattcattgaagctggatttttaaattttatattgctgctatttttaaaatacattttatttattttttttgcagatccggagttctgtaactcacttgttgtgtgcatcaaaagatttcagttggtggcgtcatagtctcattacagtgtctatcttggcatttaccaatttacttgtcatctttgtcccaactattagggatatctttggttttattggtaagttttagaaagtatccaagtggattcaaacatcagggattttaagatttaaagaatgaatgacgagtggttcattgaatcctcaagaaacataaatgttgttttacaggtgcatctgcagcttctatgttgatttttattcttccttctgccttctatatcaagttggtgaagaaagaacctatgaaatctgtacaaaagattggggtgagtgaaagattataaccatagaaacagtaataatatcataaatttccccaactgattttaattttattctcatagctgttatttgttatggtttcacttttaagtttccagcaaacatttctgtaatggtatacttcacagatggaagattgcagagggaaggggaaagatagtttgccatctaatgaacacttaaattaattgcaataaagttattagatactttggagataggaatagggatgaagactagatgagatactcagctttcaacatttgttcaaccagttttcactggactgcctactgtgtgacaggcacttaaatgggcattgaatatataaaagagaaggaagggctgtttagttgaatgagactgaccatcttcagagcgaagctctcagggaggccgtctcttcatggtgtttactattatgtatctactctaaagtgtagtaccagttggtgacagagaatgatgtgctaaccacaaatgatgtggttcctagaaccagaatcctggtggtgatatttaggaaaaagactgctttttagtcattattttctccttcattctgctctgattaaagtactagaattgtttataaaccaacaactgtcatcttgttttactctaaattacatagtggcagtattgaagggtaggatttaggaattagtatttcctggaaagacctctggctttgacttttgctgcattttaggatgatttgggtttgattttgtgacttgactttcattctaaaaaattgcaaaaaaaaatccagtccagttctatatgaagcagtttgtttagcaagaaaattccctgtcacttgagacaaaggaatgaaaaagtgaaaaagttcagaaggcctcaaaggtagttattgtgtactgcagataacatactgatcacttaggagtttatatttagcaagttaaatattctttctatagattatatagtggatagattttagtaattaaagcacatttcaaaaaatagaagaaatgtttagcatatatgttttattacttgctgatcaattttctctatgctctttgcaggctttgttcttcctgttaagtggtgtactggtgatgaccggaagcatggccttgattgttttggattgggtacacaatgcacctggaggtggccattaattggcaccactcaaactcaaactcagtccatctgatgccagtgttgagtaaactcaactactatgaaatttcacctaatgttttcagtttcacttccttttgaagtgcagattcctcgctggttcttctgagtgcagaataagtgaacttttttgttttgttttgtttttttaagaaacttatctgtatgttagaaatggatatgaacaacaaaaccacgagtctcgggttaagggaagtgacaattttattccattccagagaatggacaaactcttaacttttatcaagccacatgcttggctgtgtcattgtttaacttggatattttatgattttacttgaatgtgcctaatggaaccatttgatgtgagaaacaattctttttaatttacagcaaaatattgaataaccattgacaaaaacactattattttttgtaccaaaaatacttaaagacctcagaagcactcttttacttttaagaaattgcttttttgaactttattcagaagcagttatcaataaattccataaaataatgtcattggtatttaaaaatgaatattaatataatgaaatggtttgcctttttgtaggcataataagccaaatacttttttacccaaaataatttttagagaaaatgatgtaatgaaaaattgtaccatgaattaggagcatagttttttccatttaaacgtcaccattacttaaaagatgattgattattgctataccaaatcagatgaactctgttcatcacttttcttctctgtccccaaacaatttggttcattcagactgaaatgtttgtgtcttcaacttattagaatggaagataatgcagatatttctgtgggaaataaaataactaattttgaggtaccaaatagtgcaattgggtaaaacagggtttattcagttgcatctgtctccagtgttgtattgacagctctgggtctttttttgggccagcccttttttgacattgcttccagcagtggaaaatgggcatttgatggcaataggccaaaattattgtgtccagagagtacactttttcaaaatgctcacctactggaagtgtgaattacttgacaatgtatggcttagttgtgttcatgttttgtctacagtagaggtctaatccacaggttacacctatgtttgatatgatataagttctctttgcgtaggccactgggtttctcatgcagtaagctttataaaaactcatttgcactggactgtcatctcattcttgtacaacgtagaattacttgtttacatccaacaaatggttagctagggaaaacagtgcaaactgagtgttagtagtcattttggtccaactgcatgtcaacccttccatttcaatcccagttagaaatgaaaataattactttgaaacttggctttaagagcacatttatcgtacgtcacagtgtatggtgaatatattattaaataatgtggtacttcgctcatcaggcataatgtctaaaatctaatatacataattccattaagtggttgaaggaagcaaataatggaattgtcaattggtcatctggctgtaaggtttgcccttgaactaaaaatgttgtttggggcaagggccagaaatgtggagacatggtttttgttacgcattcttgtattatatgtgactaaatttacaaacaagatacatgtgtaattaaagacccttatggaactggaagacgtcttgtagtgctacattgggtgaaaccgttggtccatttttgtctgtttctatgaagataaaataattgggggccatctagaaatagaaaggcagtgggaagacagattctacggcactgctttcatttaattgggctttaggcactccattcgaatgcagaacctcacctctagttgagaccaagaattggcaaatttgcatgagctcctggaaagagttgctgactttgtatctaagacctgccagggaataccaagagttgtttctacagacttttttttttttttttgtatgggagaagatactgtggcaaccaggaaggaatggaaaaaaaattcttttctctacagcaaattaatgtgaggaagctcctccaatcctctggctatttaaggttcaaaatcaagtgcctagggaaaattccaatggatgattttctgggagctatcttgtctaccttgaggttcctgaacaatgaattcccattaatgagcagtcttcagtattaaaaccactgtcttgtcacctcattttgcattactgtcttccgtggatgtttcagttacaactgtaatgttatttatagaacaacattaatccattaaagctaacctatttttcaatatttatgataatctatgtacatatattgtctgtccatatgtatttgtaaataggttgtatataatgtcaggtttgggtcttgggttcaagtgtatatattcctgtaagtttcttaactgcattttgatgaattcacattatgtaactataagaattgtcccaaaagtacctgtacagaaaattgaatattgaaaaattgacaaattgtgtacaaacactaaaaaaaacttgtttaaattgtatttgcaataaacaacatcaaattttttcatgaaatcttggtacaaattcagatctcttatttaaaatttaaataaggaatacattttcaaaatgcagtaatcaaaatgtgatctagtgtaatgaaataaaatgtgatctagtgtaatggaagacctttgagaacctgggtgtattaactttgtgtatatagtgtaaatatccccactgtactgttagaggccaacaattctagtatggcttgttggcaaagagtgctacaccgtttcaatgaaacaatgtatgtttgttttaactgaactaaaataaatacatgcttaatcctgagtagcagtgttttttgttttgttttgttttgtttttttcaggtaatgggataggcagtgtctaatgcaaattgcattgtaactgcagtacctagcacctagtaggtgtccatatgtttgtgatgaatggtcaggaaaaaaagtttaggttcccagagattctaagtttccaaagtgagaaggaatggaaagtcttggagagttgggggaagatgctaaaatgcatcataagagcccaggctcagccctgctgatggaaataaataggtcaataatgtatcagaatcaactggagagccttttaaaaccacagctttctgaaacgtgcctagtttgtctgattgcaaaggtccagctgtagggtagcccaggatctggttttttacttaagaaggccactcgggtgataatgatgcacaaactccagga

SEQ ID NO: 69282 - DNA, 5434 bp, Homo sapiens
atgctagaaacggaaagccgtgcgcctaggttgcatgcacacgagccagggtcggggctggatgtgtgccctgagtgcctgtgcaagtttggagcgactgggaaaaagcaaaacagaaccccccctcgccccctccactccgacgagggacaatagagagggtgaaatactgaaatctgccggagtagggggcctcgacggccgcaacacagcggtggcatcatctttgttctccccgcggctccgccgtctgtacttttccgcccctcggcgcgcccccgcccctcgcgcgcggctggtacttttccactcgcctggcctgggatgaatcagccgcgctgcgcctccgggcggcgtcacgtgaccgcggcgggctggcgctgcggtcctgacgcgccgcctctactttcgcaggccgactcgcgggccgctgcacccaccgccaaggacaaaaggagcccagcgctactagctgcacccgattcctcccagtgcttagcatgaagaaggccgaaatgggacgattcagtatttccccggatgaagacagcagcagctacagttccaacagcgacttcaactactcctaccccaccaagcaagctgctctgaaaaggtgggagaagttgtgacacttttgaaaaaacggcttgcatgggttgggttcagggagttacctaggactctgcttccattgctttaatttgctatagcatttagagaaggtgcgtaatctctgaaagagtatccgattatcttgttgtaatgacaagatagctggtgtgaaagtcaactcctagttaatatttatacattaagtaaagatgttgtatcagagctatgctgttggagggtattttatgttaaagcagtcttgtgtgtaatgatagatatttcaatccagtttacaattatatatgtctatattttttgcagccattatgcagatgtagatcctgaaaaccagaactttttacttgaatcgaatttggggaagaagaagtatgaaacagaatttgtaagttaaaaatagtaatttgtctgtcagtggctttatggagtaaaagaatagttttacttttagaattcaaatctaacttgcccaaagctggttttctccatttaattattgttatatgtttggttatcgttttccctctatgtagcatccaggtactacttcctttggaatgtcagtatttaatctgagcaatgcgattgtgggcagtggaatccttgggctttcttatgccatggctaatactggaattgctctttttatgtaagtatgtgtaagtagtgagtctgccatgcagggcagttactatggtaaaacatattttggctccagaaactgaatttacagttggagtagctgactcaaaagttacttgcttaaaattaaaagtatgagaaaccccaaaaaatctctttattctactacatactgcacaatatcaagaaagccaactagaaaaaaatagggcagtccttaaaactgacaaattaagccagaagtcttctaagtcagtgggaatagttaaaacaaaattgtaacagatggtagatattaaaaaaactatggctaaagccagggtaggtataaattttgttttggcaaatcagaagctgaaaatcctaataagctccaaatcattttggtaaatcgacacagttcttaaggacctgtggccccttacgtgaataaggaaaagaaaatttctctaaacatacaaggtgtggtggtatttacccagcctggaacatgtttgttttaagacgaggaggtcataattttctggaccctgaaaagcaatccatacatgtttttttaatgtttgcttttgtcagacctgttcgattgccacatgttgtggcaaaaaatgaatactttagtaagtacttatttttaaatggttccccccacagttgcacagttagacttaattacttctgtgctttccagcataaatacgtggatagactcttggaggtacagaagacttcagagcagtggttcttagccatttttgcgtcactgactcttggagaatatgatagaaaaatgtggatcttatttccagggaaaaagcacaaaacaaaaatacatgcaatcttaagcatgtatttttcagtgatgtttgtgtcatagcccttaagtttaagtacccgtggacccctggctaaggcaatttctgtggaggattgtgtaacttaataccttcattgtacagataaggaaaccatatgtatatagcatggaattgtccctttgtgacagatgtgttttacttagctgattggtgccttctactcaagttattttctccagcacgatagaatgttcatgaaaagaaaagcagacctttgcaaatctctgctttgtgaaattccacactgaggttaagcctggctttgagtactagatgctaggattcactctggcttgcttcaattaggatgaggctttttgagagaactcttactaaggtgaaggaccagcgatttacgtagaatcctagaatctcaggagttcttagtggagaacctgaatggcatcactgtcgaatatttgaaatccttgttagcacttggtataaaaactggaggcagttttagagtgcagccagtgtagttaaagtaagaattgaaatgatactaaatggcacctctgtttcataagtgaaggtcaaattctgatgtaacccttgtactcttggaattatactttaataggtgcttatgtcattgatttaccattttgcttaatggctaaataagattgctaaagtgtgattttattcatcagtacttactttatatttagaggtatagaggaaaatgggccaaaaaccacatggctgccacggtgcacttcagcaaccctgtagctaacctgtttaagtagaatcaatctgaaggttgaaagtgacctcaaaggttataaagtctattcatcccttgtcatttcagtataagacatggaaggacttaatttggtttgtttttaattaaaccaacatattttctccagttagaagtgaggttgatagtgtcacttcagactaggtcctgtaaaacttctggcatttagaatggtagtgtaaagccacttcctctgtttaactaatagacatcagtttctttgtcagcaccttacatggtactgcgtgcagtttgttcatacggaattaaaaaacatgtaactcttctcctttgcaaggttttctatgagtttccctgttttgttatttaatttctttaaaaaattagtctgtatctctgggctctcctaggtggaaggaaagtaaagctggaatgagggagaacccttaccctaaaggaaaattaggtgacattagggtccctttagtcactctatgttaccttatttatttattttttttctgttgctcaatccaagtgaaagggtcaagggaggaaaggcttagagacagtcaagctgatagcctacttgttctagcacagacattgtttaactgtgacaatagtgggcctgtattccttgccatggggtgcaatgtagtatgtcatcacaatggttagttctctgatttgtgcccagttgttagtaaagcttgtagtgcctcttaaaatgttagtatcatgttagtgtcatttcccccttaccattcttttccttttctttcttttttttttaaaaagacagtatttcattttgtcctccaggctgagtgcagtggcaaactgctgggctcaagtgatacccccacctcagcctgagtagctgagactataggtgtacaccaccacagctggctttttgtttttccttcggtagagatgtggcttccctatgttatgttgtccaagctgatctcgaactcctggcctcaagcagtcatcctgccccagcctcctagagtgctgggattacaggcatgagccactgcacctggcctgtcattcctgtttttgtgtatacggtccatgtggtcttaaaacctttcctgaacgtgtctcagttgaatttcccaagaaccttgtgggctgggtttagtggcggatattactaatattttacagataaggggaactactgaaatgcagaaaggtggcaagcatacagctcattattgtggtgccagaatcaaaatacaagtttcaaactccatcactgggaagttgagctttccagtgtctcatgctatgtttggctcagtgggtagacatccttgttcctaaccaatgctgtagaactatcacctgagaaatgatgcaagtttttactgccagccaagagacagtgttgccattccagttagtaggagaggaaatgccagttcttcagggcattttgacacaaataggacaagttgcacacataatgttatttaaacatccagaaagagttgtctttaaatatagccatgcttatttataaccctatgccttttccttctctcaccagaattctcttgacatttgtgtcaatattttccctgtattctgttcatctccttttgaagactgccaatgaaggaggtatgatagcattcttgatttttctaaaacaatgtatacctatcattttatttctcttttaaaatccttggcttcatgcttctgtcttcaaattgtagggtctttattatatgaacaattgggatataaggcatttggattagttggaaagcttgcagcatctggatcaattacaatgcagaacattggaggtaagaatttttcaaaagattatttgggtagactttatgctcattgtggagcacagaatggtgacacatgcgttttagtgtcacgtgccgcgttttgcacttgtaatggtataattttgttttcctccagctatgtcaagctacctcttcatagtgaaatatgagttgcctttggtgatccaggcattaacgaacattgaagataaaactgggtaggtgctaagtaaggttactcataagaaacaattatagtcaaaagtggttagatacatttttatcaaagttgtatacaaaatgattagttaattatccataaatgttccttttgaaactgaccaagaaggccccccatccccgtaaactgattcgaactttggagaaggaaaggccgaaagatagtagctagccctacaattttggatatcttaatttctaaaacaggttttctagaacttgctttctgtctttatgttcatacttaaagaagttataggtgtttttaatatatatcctaagtgaggactgaagctttgaattacattaaaaattaatccgtcttatttttgtaagtttggaattcttaagacttaatctgttcaatgcaaaatacaggctggacatccctaatctgaaatccaaaactttttgagtgccaacatgacactacaagtggaaaatccacacctgatctcgtgacaggtgtgcaaaattaatta

SEQ ID NO: 69283 - DNA, 1003 bp, Homo sapiens
ttgagcaccaaccctggctgaaaaggataggcaggggaagcatctgggggtctttccagactatctagaaagctggagagagtgggcttgggctttgcgggagagtcttgggggcgcctgcgggcggggctgggccgcgggcgcgggccgcagagggaggggcagggaggcggggcctaggtctgggcgggtcggaggcggggcccaggtggtgttgatacacaaagagaaggcgcccgggcggccgcggtcccgcccactgacgcgtccccggggtgccgctataacccgccgctcgcagggctgctccacagccgcgcgacgccgccgccttagaacgcctttccagtactgctagcagcagcccgaccacgcgttaccgcacgctcgcgcctttcccttgacacggcggacgccggaggattggggcggcaatttgtcttttccttttttattaaaattatttttcctgcctgttgttggatttggggaaattttttgtttgttttttatgatttgtatttgactgagagaaacccactgaagacgtctgcgtgagaatagagaccaccgaggtaacgcgtgcgggggggcgtctgtgggaagggcgcggggcccgggcgagagtgggggaggggcttccgggaggggccgcgcgggaaggcggccgcggggtccgtttcctttcgaggcgggcgttgtcggttgggctggccagccttccaccctggcccgccgcgcgggtgtcgcgcccgcgacgtgggtaggagagcgggcgctgggcgggggccgcgtgcctgcacggtgcggagccgcatcttcccattagggggaggggagctagcccggccagcggctctgctgcggcaagtcttgtgactgatttgcatttaataaaaaaaaaaaattaagtccagggagccaggaatctgggggcggcggaggtgggcttgggcatgtattacaggagaggccaagattggggaagacgagttgggaacat

SEQ ID NO: 69284 - DNA, 1009 bp, Homo sapiens
gaaaaagttgaaagtactaaatcaacaagcacttattgaacactttttatgtatcaggcactgttttaggcactgaagattcatttaataatgagccaaaccagtcttttcctcatggagttaatgttgcagaagatcataagcaaacaaacaaataatgtgttttcacacattgcactaaaaaataaaataggacagtggggaatggagcttgagtccaaggagcaacttttgctggaatggccaaagaagatttttttgagtcagtaacatttaagataagatctaaatgataagaagggagctgcataaagatacagtagttctcccttatctgcttgaaatacatttcaagaccctcagtggatgcctaaaactgcggatagtaccaaaccctttatgtactgttttttcaatccgattaccaatatggctactaaatgactcacagagaatggactgtgtgtgagcaccacgaatggaaacccacacatgagttaggctatgattcaggagatgtcttgagagagatgatagtctcactagggccagagcaatgcagatggtgagaagcaacagaattctgaatatatgtggaggcagagccctcatgacttggtgatgggttggttatttgaggaaaaggaggactcaacatggttccttggtttggggcctgagctcccttatgaatcatggtgttattctgacttggaaaggttcgaggaaaaatagttttgatagagaaatcaagagttctgctttaggcagtaagggataggatagatgccctttaaacataacatataataggtttctcttggttcttgagaaactcaaaactatttaccctgtatttattcattcagcacatgtattgtcaggagctatttcaggtgctggaactagcagtgatcaaagctgattaaatccctgcccttgtgcacttacgttctagtgagggagacaaacaatgaaaaagtaaataaataaacatatttaacataat

SEQ ID NO: 69285 - DNA, 2996 bp, Homo sapiens
tccttatatatgtgtgtgtatattatatgtatgcacacacacacacacacatatatacactttttgttgcaacatctattaagcttttggttttgtttgctttataaaattagaatcatatcatatatgctattcttttttaacctgctctttttcacctaaaagattgtaagcattctctagattattgaatctttttctgtcccttgatttttaataatcacagggtattccatcatcttggtgtactaaatcaattaactattactccattgttgaacctgtaggttgtatctctccactgtattcctcttctttcttcaactaggattctaaattgactgataggttaggcctgggcatctgagatattaagaataatatggctcaatatatagatcagattgccatattatgtaaacaactaaaaaacaaattgtactaagtatggtttctgtgctcctaacagagtctctctgaattacaggctttaattttccttgtggttggaatattcttcatgattggaagcatggcactcattataattgactggatttatgatcctccaaattccaagcatcactaacacaaggaaaaatactttctttttctattggaaatggttacaagttatactccaaaagatatttgaattatcttgattggaatgttattcataggaaataacaggaagattccaaagacgtttaccagtaatatcaccaggcacctgcagaagaggaaaatcactgtttttgtcaaggatggttgtgtatgtgtttaaaataaaacctgtggtgcacatttctacccaggttttgctagagcagtgtgagatgatgaaggtgtatttttgctgctttacgagcagaataagggtaactgcatgtaacaatcatcagatagtactctttcccctgccgtctcctcatcctgcaccccctaaaaaagtaccaaacatttgcattctcagaacatcaaacaaaaatgccctggtggcaaagctatcaccatttaatgtcttctctcagtcttgcaccaaagtctctggtctgtttactaacagaggcaaaaggcatgtcttaggaactgtttctgtttctgtaaggtacatgaatggtcaaacaccagtctagagcatcttattgtcaacagcaaaataatattttgcccaccctgtttgtgacattgagttgtgacttctatattcaatagatttttgtaaatgttaaaacatctatatttaaatgttaaaacactaaatatagagaggggctttatttcaatcatagagcaacaacaaaaataatgcttatagctaaactgcctgttctagaaagcatctgctttttcatgttattcctaaatcctcttgtcatacttttgtcattgaacaatgctctccctctcgtcttccatcctcattcagaatttttagaagaccacaatcgtggagatacactacccagtattgtttgatacatttttatttgataaacattcagtgcaggaaactgtgatttgctatatgtttatgtatataatcttattctgtagtcatcagaatgttaatgtaaggtacatttgatttttattttttacatgtgtagttttctttcttcacagtcaaagcatttatattattgggggtgggggcagggaattaagttggtgggctcgaaaatccattcatatgtatctgtctacaaatgtctggggataatttaaatttgaaacctaagttatatatagtttggcaatgctcttcttcaatatttacaataataggatgatctacaagaaaataagtttctttttgcaaatttttatcatactaaagttgttcttttaatttagcatatctaaaataggatttagttcagtttagctcacacaggtgtttgctgacattcattggccatttaatacagtgttgagtggttctctgtaaaagtataagtgctaacactacgaagaaatgcacacgatcattcttgctcacttctataacaaacttacataaaatggatttaaaaattcctactcacagcctaaaacttctggagttcactacctttttttcaaatcatagtaagatcacttgtgtattttatattttagtaaagccaattatgaagtacaagtatcatacacgtacttttgagctactattatttgaaaaaaatctgccaaatagcatctttaggatatatttacattttcactcatctaaaaagtatacaaaaataaaaagtggaaaaaggtatcttctgaatgttcaagagcatcctatagtgccaaataataaagcaccatttttttcttcataaccaggattaaaattcatatatactgcagggcagacatacatatgatagcttgtgctgattaatttaaccccatttgtaaacagatgaaaattttattttcttatttcatttataagatggctcaatgtattgggaggcttcttttttattacagaaagtgtatattggtatataataaatgaacttttcaaatgactatgatgtgatttttgatctattgttaaagaatgttgtgttatttgtccatgaaacaaaatttaaaatccaaatactgtctttcttatattggtttatgttccattttcattgttacctttgacacataactaacatctatagccatcatcctgaaaataattgccatcttattttggcaaaatagatatttaatcctaaattattatgatgattataattttggcatcacatatataccacctagaatgaatgtggaagaaatgagtcttttatggttagtttgaaagaatccattgaagatagaaaatgagagaatagaagaaacctgagaatagtaaaataaagagcagagaaaatatgggggcagggaaaacatgtgagtgctaaggattgattatgaatgaacgattagggggattgacggatcacagggtaagtatatgcttaactttataagaaacttcc

SEQ ID NO: 69286 - DNA, 2017 bp, Homo sapiens
cctaattggtggagcctactatacactaaggctatatggcatagcctagtactcctaggctacaaacctgtacagcatgttactgtactgaatagtggaggtacctgtaacataatggtaagtatttgtgtctccaaacgtagaaaagctactgtaaaaatacagtattacaaccttagggtatcactgtcttatatgtggtctgttgttgaccgaaatgactatgcttaataccactgaactgtacacttaaaaatggttaagatggtaaattctatgttatgtatgttttataataataaaaaaattgaaaaaagcatcaacatcttttctgggaaaaaagaaaaggaaagaaaatgcattagagtgatgagaatatttgaagtaatagataaagtcaaaaacaaagaaatgatcttgcctttgaactttcttgtttaagattcgtacatcagtgatcacactgttatttcccaaacgacccttcagctggatacgacatttcctgattgcagctgtgcttattgcacttaataatgttctggtcatccttgtgccaactataaaatacatcttcggattcataggtgagtttcagaaaggcttcaatttggtcaacccaaactcacgcctcattaaatgatggacagggaaccagtgctgggtcatccagatccccgttctttctcaggctcatggattccctttatccctgagaggctctggtgattgagctgctcactgtctcttcctcctaactgacattgggagccaccttataggtcatttagtcaagctgctttttctgatagatgaggaaactgacccctataaaagtcaagtcatataccttggtgtggacccaggatttggacttaggtattagctccaccatcaggaaaagaggaagatagattttacctgccagaagctctctgatactacgagtatcagctgaacattgaaaggtatcttcagaggaataggaggttgattatataaagtgtattattagtatttccccataactgcatggtctattaattttcattctactcattgagggtttacttaaactttaaacacaatctaaaactttaaaagaaccatgggtaggtcacttgcaaagtaagaggtggatagggtgtgtcatgagttcagccaccttagtatgtatttatattactaatcccctgtaaatttgtgttaaattcagccttttgttgcttattatatgttgcatatacttatgcagctttgatgttaggtacattttaattgtctctataaacatatcttctatgaataaataaccaagatgagcttatgtgacttaagtgtgtgtttttagtgctaagtataggatagctttatatttggtttatttaaagtgtgtgctggcatctcctttgctaggaactgctgggtaagacattgaccttgccctgtgtttgtcttctcaggggcttcttctgccactatgctgatttttattcttccagcagttttttatcttaaacttgtcaagaaagaaacttttaggtcaccccaaaaggtcggggtaagtaaaccttgcaatttcccccattattagttgttcttccaactacttagaataaactagaaaatacacatagttcagaaaaatgaatcaatgtacaagaaccaaaaatcaaaactgggctagaactttctggtagcagagaaaggggacatatttctgaaactcaaatgattctacttcaaatatcaaatatcctgtgttgagtctgtcatacatgtcaaatagtagtagcctttcccacagacacatatgcttcaggcaaatagcagtgtccaataccaagctgctgttgtgctatccgtggaaaatcatgcaagaaggaattaggctccctagcggtgttatggaataatttaaatattttggtcatggttgttaggtttgcaaagccaaaggaaagatgttgcttttgttttcccttccatagtacctgttgtccctggtgtggactaa

SEQ ID NO: 69287 - DNA, 1116 bp, Homo sapiens
aatgcacctttttaacaagtgactaaaaaacaaactgtgactattctctgaaaatgagcctatatctcatacttatttattctgtttaacactgtgaaacaaattaagtcctctggcactatgtatataccataaaaagcttattcgtaagcctactaattggaccagttttgacaatattgaataagcactaattgcagatcataatgtagaattataggctgctgaggaaaacaatatcacaccatttgctttcctcagtttccttttcagaatgagtttcataatgttcactaatccaatttttaaaatcctttacaaagttattcttaaactatttccagagactatctggtttgtcattctagaaatgaaattgccttttcagcctaaacagatggccttaatttttggtggagtggtatgaaaggaatgtcacatgagaaactgcaagctatttagcttgaattttttgtcattcatacatgtttcaaaatatattttacattttctctcttttaaatgagttcccatctctgcaccttaagtgacttcagaactaaaattttaaagtgaacatcaatcacagcatttccaaaaatgtgaactcctagcttaaccgaagtattcacttattggaaagctgatagagtaattccactaagtccaaaaagtgtcctctaaaagattccaaagataagagtgttttcaactttgtcaagctgtacaaacacaaatgtcactccctccctctgcccacagggatctttatccagttacagcagcgtaacttgagcagctgctgcaaactgaggctctcttgacccttcgcctacttatttcagctgctaaaatagggctgaaatctgtcaaggatcctgaagggaaggataagattcctactattcaatttaatttaagcttttattcagtgcctgctgtgtgcacaacactaagctagaaagtctgaggaatgtttagattattaggtcctgttccttgcctttcatagatttacaatctattgatagggagagctaaaaaggagagaaagaggaaggagcaaacacaaaaacgtcaaaattttaaaataccattttaaaattttattttaaa

SEQ ID NO: 69288 - DNA, 1140 bp, Homo sapiens
aatatctgttttagtgtggtgatggagtcatagttgttgagcttgaaaaaatggtagcaatcattcatcctagagtttacacactgggtttgtaacctgcatcaggagtggctgcgcaggtagggacaggggaggtggtaggctgggagagacaatatgtggggcttgggtctctcatccccttcaacaagagcaccttggtctctgtctgatttgtaattgcttctgtacagcggagatagatttatcacaatgtaaatgagcttgagaggctctttattttgtattataccttctgcaacgttatcagcttcaggacctctttgttcatttgaatgaaggttgcatagctaatgagctcagaggcaagaccagaggtgcctggattcccaggcctaggtcttttcctctgttctgtgttctctctataaaatgttgccataagtgacctgtgctgatttgacaacaccaagcggtttcattctctttttcctgttgtaggagaagttgaagatgaattacttcatgcctacagcaaagtgtatacattagacatcccccttctcatggttcgcctggcagtccttgtggcagtaacactaactgtgcccattgtcctcttcccagtaagtacataagactttgatgaaagaaacctacttgaccccataaattagtacatgtgttctaccttcattttgatttaattatagggtgagtttgcaattgcaatgcctgaggatattattttcctatagcattttgagtcacttaaaattggccatttaatgtgtagatagagcaagtagtttcaggtggtatttttatagtgtaggaaaaaaatcataaaacttatttttaaactcaaagttgaaaagtggagctggagcttctgtcttgtggattagtaaaactgagtaggagttcatataactttggaaccttgaaagccaaaaccatattaactttcaaatcttattaaatttcatcacagttttgaaggcatttcattttttttccagtttgttgtgctgcaataatatacaaaagttgccttttttaacctgatgccttgaaggctaatgaaaaggggattcatgttaagtaaattatataccagaaaaaaatttttcaaaaaac

SEQ ID NO: 69289 - DNA, 2379 bp, Homo sapiens
tgtactcctcagataggtcccggaggactagattggtgcccatctgcagaaaaccagaggggatatattgactctgcagatctgccctttgattctgccatctctcagctggcccatgccttttgttgccagactactgcccaagttatagacactaacacaggcacactgagtatgggctatgttgatttataactaatgagggcagaaccttagaactgcagcttcactgtaaactttggagcaggatttaacacagaatcagccctgatactgttaacaaaggtccacctgaaagagctggaaggtcaaatgtctatcttggaagagaacttggaagcagtgccaaatacacaatgacttttttttccatttgggggattagatgttcatcttacatatcccaaatgtcataacttgcttgcatgtgacttcagtactgtccacaccattaagctgtcacattttccattttagcaatgtcaagctacctctttatcattaaatatgaactacctgaagtaatcagagcattcatgggacttgaagaaaatactgggtatgtcttatgctccctctgtgacatcaagtgactcattctacttggtcttttctgattctaatatccttgtctctcacttctagagaatggtacctcaatggcaactacctcatcatatttgtgtctgttggaattattcttccactttcgctccttaaaaatttaggtaaagatattttctaactggaaatatttttatttttatttcacatttaaataggttagctaattgtagatgccatattcaccttccaaaatgcttcttctaacttctaggttatcttggctataccagtggattttctcttacctgcatggtgttttttgttagtgtggtaagtgatgtgatgacatgatccttgcaggttggttagcatgagtttttttgtgcctaaattagtgtcctcattttgttcaagcacttcactaatatgaaatagttcttgtatcacaagtgattttcttgtagactaatttagagcaaaaaaagagcagctacgatttaaagatagttgaggtagaatatcaaagctactactaatggtttggtctaggcacactggttatatatggggaaaaaaggaaaacttcaagcaggaacatgacaataatctggcatttagaacagcagaggagagtcccagatgagaaacaagaaggctatacccatattcacatgaatcagccattctctcttacacattccacccattaagagaggacaagaacagtgggattaaagaagaaatcctcctctctaggcccctgacaaaagagggaatttcttgcactatcatgaatgccaaaatttataaagcatttccccaaagaggtaaaggagaaggaaaaaaagttttgaagacccatgtcaccttagtttgaagaaataaggaaatgatcatctttctcatggaagggcatgaaagagggtgggaaggattcttgcaaaatattgtcctgttaactctaagaggcagggctgccaatcacagctccaactcttcccttagaacagaggctagaggaagtttactttgtccattagtctaaaaggaatccctaactgagttccctcaccccccaccctataagccacacatatggattcttatttcattgttttttctcaaaaagctgatttttttttcttttttaatgactgagtctaggtgatttacaagaaattccaaataccctgccctctacctgttttggatcacagtgttggaaatctgtcattcaacaacacgcttccaatgcatgtggtaatgttacccaacaactctgagagttctgatgtgaacttcatgatggattacacccaccgcaatcctgcagggctggatgagaaccaggccaagggctctcttcatgacagtggagtagaatatgaagctcatagtgatgacaagtgtgaacccaaatactttgtattcaactcccgggtaagtgagcggtccgggcttctaatgagtacagttatgtgttttctaagtttttattcaataaactgagatggcctgagatcaccatctatgttggaatgctaaacacgtggtgttgtctttgtttttcagacggcctatgcaattcctatcctagtatttgcttttgtatgccaccctgaggtccttcccatctacagtgaacttaaagagtaaggcagccatcattttagcattctaatttgctttgaaattctgctcatatgttcaaagattctttaacaggaaacacagtttatagcttcctcttcagagaaaatatgtactccatccactcctcagtaacatgctttaatcagaaaggtgggaatc

SEQ ID NO: 69290 - DNA, 1050 bp, Homo sapiens
agcacctcagctgtggttcaaagcatagccactactacgcttctaaacaatggaataaagtataaagcggtctctcagtcaagcctcacacaggtaagaggcgtgactttaagggagtaagatgaaatatcgtaacatcaccccagaaataatgctctcactttggttactttatttgattagttgatatttggcataagagaaatcacttgtatttctctatttaacaactctacatttagaacacttaattttctcaatcccctaaaaaattaacatttactgcagatgttttcacattaacagattaatgtctggatcattctgaatttttgaagaccaaacatgttaacatcactgacatcactgaaaaccagcaattaatagctgtaacattgaatggtacctcaccaagccagctaatcagaaatatctcctgtgttcacactctgtaagatttagctttagccaaggtctttgcaaagattaaccaaataatgtgtacagaaggtacatccgctattgtaaaaatcatttcactttgacagtacagaagaagcaccagcccttctgttttagatgtagtccgtccttttcaagctgtatgattgtggacatgtcaacttaacatctcggagtttttatatcttcatcagtggaatgagaataacaacatatatcttgtcatctcacagggtttttcagatgatcaaatgaagtaatgtgcagaactaaccaatgtggggaattattatcatcactgttactttcatatgaagtgaagaaaatatttttaaactcagtagtttaatttacaatttaagtatgtgttttaaagtgcctgttagcaaaaattcactagaaggatgtaggacacacttaaagttttcatgtaaaatttgtgagttctatttttaactgaatcttttggccatgtgtcaacaaattaacgttatccttcaccaaatgggtgggcttgaaaaaggcgtgatgcataaatatttacagttgtaggcaaaattgtaatgttatgtatatgaatacatattc

SEQ ID NO: 69291 - DNA, 1591 bp, Homo sapiens
ttacaaagtacttcgtaatctaatgcacaggatcagcagtaatgcagctcagactgcatgctttcgcctttggattcctagatttcagattaaggtttagtcaggctattgaatagcccttcaattctaagtgttgatgtgaatatcatgcaaatatgatgtacatattcccatgtgctgagtaagtagatgtagcatttgctaatgttgctatacatttagcatctaagttatgaaccagattctaccactgggtaacattaaaaaagttagggacttcaggtatgtaaaatatagcaaattctatttctacgactttaaagggtatgtgtagagttctgaaaagaatttctcagcctcccccaaatccacatacttttggaaagctgatgattgaaaagattaatgtgatcctttattgtaacatctaacataattacattttatttattgtagaaactttattacctactctctc[450 bp omitted]gatgtttatttacatgtttgagactccagcatggaattatatgacaaaaatattttagtcattaaaacaatctctttaacaaggctattttatctttgattgtagggtctttgatttatgaaaaattaggagaaaaggcatttggatggccgggaaaaattggagcttttgtttccattacaatgcagaacattggaggtaaggggatatacttttcaatggatcccataaactttctatagcgtgttcaataaataagaaaacttatggcaataaacaggcactttagatacagaaaaattgctacttatagttcttaaattttaaaatgatagtttcttaaataggtttgtgtcctgctttaattaaaaacagcaatatctaagaatgaaataacatataaaaccctgccaattgaattctagaattaaaatataaaataaaagctttcttgatttttaatgttattacagcatgaattattactcttaaaaattgaagaatttgtgcttatatctgtcattgacaaaacagttgacgttttctatgtgtgactgagttcgatttactaaactgaaaagtggttgtctgggggaacatagccaaatgctgtggtccttgaaacgcagcctgcactgagccagcccactagacagtgtctct

SEQ ID NO: 69292 - DNA, 1545 bp, Homo sapiens
ctgggcttgtcctatgccatggccaacacagggatcatactttttatgtaagtgaatgtatatgtctacatttggtgatgaagtccatgcatacctggtggctttttcaattaacaatctcaagtttgatctttgtgaacgtgaagactcagaggaggctaatcatggcacttggtcacccaaccatccctaacccaacggcagaaagtgtatgtgctcaatcaaccaaagtgctggagcagcctcgccagaagaattttgttattcagtaaatacttgaaataatttggtgtttagcaaccaaaaagatctttcccagaagcaaatctgattttatctcattcttaggaaagaagcaaccaagcctaagagccctgcatgcccttgcctaccttatgtcccattccctgtacccctgtgcgacagatacactgggcacaatagccttctctccatcctatgaagatgccacattccctctcaccattggacctttgcacatggtcttggaaccctcttctcttccttcttcatctagttaactcctcatatgtcagttcagtctcacctgaatactgcgcgccctgatctccatgactggggcaaatcaccttatcataacactcaccacaattttaatgttttagtgccatttgtctgattcatttggttaatatctgtccctcttgctggactataagctctagaaagttgagcccatgtctgtttttactcaccaatgtctctacctccaaacctagagcagtgcctggtacaggcaatatttgttgagtgaccaaaccttattcctaaacctacgtactttcaccaaacttgttcaaatgctgcctaagggtagcagcatctggtagttgacctgtagggtggatactgcactgtctatgacagacaacaacagacgtttatgtgcatcatgtacagcctggcattttccaggatatagttggcagcagtggaattcttcacaagaataaagtctgatgttaggcaccactgtggacacagatcctaatcccaaatgcaacgctagagagttaaataactgtctaagaatgcaacatttatatcacaaatatgtgctgtttatgttctgaatatcacatatgattagtaatcacacagctatttgagggctaagcatcaggactataaatatttgtattgtgttagtgctttgattgaactcttttatgtataatattcttcagctgaatgggtttttatatcaactttacttttatataagccatgttttgaaataaactaggattttaataatctgaattttaatagctatgtatgtagtcatatatttgtatgcttttgtaatgtgcttacctctaagacaaaaaaagctgcctttccttattaattatacataccattaaaatgaattaggaagttacagatcactgatgaatagaaataggaaaaacttcccccaatcccacagtcatagatcatcttcatgagagaagaatgttccactttttaaaatgagggcctcattttaggcttataaac

SEQ ID NO: 69293 - DNA, 1407 bp, Homo sapiens
gagctgaccagcacagctctataaccaagttgtacatcttctagcctgtgtccaagaaaaccagaatcacaacgctctgtggatagtgacatcttaaagttttctttccctcccaactcttttgccagttcattgaattgctttaataatttccttagtttcattcattatctgttaataatccatgtacattttgagagtaattaaaacacatacgcacacacagaaacaaccaacacaacacacagctaccactgaattactttccagtaagagatgtatgtataaatgattgtaccaaaaaaaaaaaaagaaagaaaataccagctacagggccctgcctgggactgcttgatgccagggggagaatggggtctccccctgggtatgggtgggtatgggcctgctgcttcacctttctgagccacagttccctatagggatattttgaacatcagatgagataaggatcacagtgcctaggcatttaataaatattcgttgaattaataaaatcatctgattatggtatggtagtagttcagaaaattctgtcataaccctgtactctttctttggaagggctctaaatgggaacacaattagttgtagtctcttgcatagctaatgtgagaaagagggaatgtggtataaacaattttttaactaaaaataatatttccttcctttataacatccttcttccatcccaaagtatagttgtaaatggaactcaaaattgttggtctggaatgaccgttagtgtgaaggaggaaaagaaaattggggtgtcttatttcccctcctctgattcagttacttagatcacctgaaacatacatatgattcagagcatatatttagatgttttcactttcttatttgtgtgtgtgtgtgttcagtcaatttgctaatgaagacactgaaagtcagaaattcctgacaaatggatttttggggaaaaagaagctggcagattatgctgatgaacacgtaagtgaatctatgctttcaggcaataaacgggactgagggtgtctgatctacctaggtctctgtgggaaaacaatgtgactgaaattttccaagccttgatcagcacattctgtgtttattcaggctcttactggaataagggcttgttttttcctgttcgccatatggctgcatgaatcatttatgaaacttatgtgttttggggggaaatcattctaacccaaaggtaatctacaatcatacatgttttcccttctttatgtgactccccttgtaatttgtatttttactgaggcctctgctgaaaccaagcactgcattccgttgaaaattacatgcttttattgatgttgagtaatggctttactcctgtaatgttatcttagtcttcaattttggactgtaatctgc

SEQ ID NO: 69294 - DNA, 1011 bp, Homo sapiens
ttttatctcctggcttaaacataggacatcattttgcagtttttaaaatcagtttaaagagatgggttttatctatgtgtggtttggattgaacccttaaatgtaaatttttgagaaattcaacataatgtatttatttgtgatcattatacttgtgttttcaatacatgctgggtttggtatcaaaacatttaacatactggggacatttctcatctattttatacaatcttggcatgttaaatgactacaactcatctcatgccaaaataagaacatgcaaatgcctcaaagaaagaaaatctgtttactttcaaattctcaattttaaaaactactatggaatacagattttagtttattgattaaaataaagattccagagtttaaattctaggtggcacttttgtttttatagtcctcaggcccattttaggcttcattttatcctgtcatctcagtctccaactgtgaacattatgtaccagtcttcacatagcaggtacattaattacagaccattaatgtaaaccacaaaagagtggtgggcagtgggtggggggtgaatggaaatggaaagaggcaacaactgagggcattgtgctttctgtgagaaatatggggagaaggctaggaaatgttcttaacttgtgtactcagagctatttatgccttgagttctagaaaagcacatacaactttgtggtttcgtgtgctgtttctatctacatctcatactgttttctattctcaaaaagtaaccctgtcatcctctttcctctccagattattttcaggattagcttctgttataaaaaatagcttgtacagatctcctacaataattattttctattttatttctaaggtttatttatttatttattgagacagacagagtttcactcttgtggcccatgctggagtgcaatggtgcaatctcggctcactgcaacctctgcctcccaggttcaagcgattctcctgcttcagcctcctgagtagctggga

SEQ ID NO: 69295 - DNA, 1322 bp, Homo sapiens
gattctgccttggtagaccttcctctgtcaacaatttacttttgtcttcctttcttttaaaacatgtatcccactcacaaatacctaaatttccttgaagactgctgccatgtcttaagatttctttttttttccatagtgactagtaaaacctgccattttcattatacataggcactctataaatatctgctaatttagcaattattagtaatttcctttcttctcttccatttcttcctttcttgtattgggtaaaggaacatttcaggattttcttatgtaaagttttcaggagtttctttccttcctcccttttacagagagcatacaaaatgtagatgattcatattcacttatttcatttaaataaaattataatgatgtatgttgtgttctgtttgcagaacagagtgttctgaacatcaacacaaagtggaagaaccttaagctgaaggtacagtatattatttacactgaaggggcttgtgtgtggacaagaaagcgctgacagctcaaatggatcccatggaactgagaaatgtcaacatcgaaccagatgatgagagcagcagtggagaaagtgctccagatagctacatcgggataggaaattcagaaaaggcagcaatgagcaggtatggggttaaaaattactatgttccatggaaaaataagacaggatgtggacatggaaaacagggtcttgatgggaagaactggatttattacaggtaaatttgtgataacaatgatattgatgctagcacatcaattccctggtcctgaaatacagtgataatgtcaatctcttttgtgactgatttagaattgaggttacaatgtctttgtctccattaataatgtgtaataattttaattattttagcctattgctcctcttatctttctcagattcctctttgaatgttgctacacctcctggtttctgtagggattcttttctctctaaaagtatcctctgggcaagctcactcacaactactatggcctcaccctccaaatatatgccatatacccagcctgttaagtttctctactgaatttcagataattatatctgaatgtctactgcacgtctctactggaccattactgtgtctaaattgcctcatttataaagttaaacctgtaatgtctaatactgaactcctatctttccctccaaaacctgctcctcctctagtaatccccatcctagtgaaaatcactgctatcatgtagcaactcactcaaaagcccctaggtgtaaactttgacccacatagccaacggtcagtcatatccagttggtttgacct

SEQ ID NO: 69296 - DNA, 1895 bp, Homo sapiens
atctgtacaatgggaataagaaaaaaaattgtactcacctcagaggaccgctctgaagaattgatagatgtaaggccttaaaacagtggctggcatgtggtaagtgccatatgagtgtttgatatatcttttctaaaaaaattctgggattagcatggcttaatgcaaatgaaatgaatgaggttcctattaatatacaaagtagaacagactttaactgaagcttttggactgcagacatgtatacttacagcagcaaagatctcagccctgctgctccttcttcagagaagccttccctgatcccccagactaagttggatactatgaaagacactgctatggccccctagaggggctggataaattaaggatggagtggaggagggaggggagcatgccagtcactgtgacccacatgtgcaaatgacctgagatgtagagaacacggtggatttctggaatggaaagactagtgtagctagaacactaaggtgaggagagtgtggacggagatgagaccagagaggtgggtggaccaggcagaatcttaccaggcatgttgagaattttggactttatcctcagagtaaagggaagacattaaagggttttaagcaaataaatgatatgatctgtgttgttgctgttatgtttcaaagatcactctgggtattgggtaaagaatgaatggtgggggtggttaggggaggcaaaagagaattgaagatcaattaggagatttttacagtagacatgatggtagcttggacaagagtgaaggtgaaagaaatgaagagaaaaagactaacttgagaaatacttcagtttattgtaaaagtcaaccagactttgtaaagaactggatgtggagggtaagaaagaaaaatttataatagaaggctcttatgcttttgacttgaataattggataaatggtgacaacattctttggaatggaaacattggaagaagagggcctatcacaagttagactttgaacacattgaatttaaactgcctttgagatatatagatgacatttaggcccctggacacatggaacttgagttcccaggagaagcctaggctgatgtaacttgaggagtctttggtatatgtattcatcagagttctccagagaaacagaaccaactggagataaatagacagacaggtatagatgtatatagatataagatgacatttataatgggaattggctttcatgattatggagccaagagatctcaaagtacagcatctgcaagctggagaaccaggaaagctggtggtataatttaatctgaggccaaaggctgagaaacaggatgttgctggtataagtatcagaattacgaggtctgggaagcaggagctccaatgttcaagggcaggagaaggcagcagaagatggatgtcctagctcaagcagagacagtaaatttgcccttcctctgcctttttgttctatgtggaacctggagtgtttggaggatgctcaccttcagtggtgagagtggaccttttttactcagtctattgattcaaatggtaatcttttccagaaacaccctcacagacacaccccaaaataaagttttacttgctatcttcccatcctttaatgcagccacaatgacatataaaattaaccatcacgttatatgaagtcttgggagtggactggaagaatggggcttaggatctagctttaaggaagtcaagcaatgaaatgtcacatatttttaaaaggacaaaccacaaaaactgtgaaaagcaatagtggtgtcatcagcaaatagaaatttttgagaattcctagaaggcagaaagaagatagggttggaaaatctaagagaaaaggaaccaagataagtgtgcttttcccatag

SEQ ID NO: 69297 - DNA, 1076 bp, Homo sapiens
tgacacccttacaccctgaacttcttaggtacccatccaaagaacaagacattacaatgtttaataattagaatttggatataaagaattagctactcagaacacttagataccttttaattaatatgatagaaatgaaattattctaatataataatattctaaatacttggtttcaagttttgactttgtattttcatgaagagtcaattgaattaacaacgcagttgagcactgctgtgctagaaaatccagtctgtttctgcgagacctctttgtattagagagaaacttaactttaatgaggagaaaggctagactatagaaaattctgttgaactaaatttgacttttcttttagaagcattttgaacattccctgtgcaacaaagcgattttttctcctgacaatcagaggagagaattttcatttcattttgaagcattatcctataaaactataatcaaaaagcatacctctatctattactataacacagatcatatcaaattgcatttatcttagtggaatgtaacactaggcactgtgctagatgctaggaatatgtagaatccacaaccccagcagcattcctattctcatgaagcttctgcctaagacagttaattatcaaataggcaactaaaagagtaagtaagaagtgtgataaatactacgcaggagaggagagcatatagtggcagatctagtgtaatgtgggaatgtggggtcagagcaggacactctgaccaattggcctttaaagattttcaggttgttttagttaacattgggagggacctgggctaagaatgtggggaatggcagtccaagcagagggaacagtgccttaagaggtcctgcagtggcagtggggaaatgaaagaagcctaatatattcagtgagtgaggggtgatcggcttcagtatgagactaaagagctatgtctgggtcaaagtatatagaccttccagtgtattaggaaatttgactttagtctaaaagtgatgacaaaatcacagtagggccttcagtagcgcagtcgtttggaataacatagtggtcatggagata

SEQ ID NO: 69298 - DNA, 1122 bp, Homo sapiens
aattttgctatgtagagtaggtttaaaagaaacatgattaaactcttcaatagaagtctcttgtgtgtgcttttaatttttatccaatgctaatttactataattatttactatacttgaagatcagaattacaacaaagccaaagcttacaattttaggaagagtaaaactttaacgatctatacatttatctccacccgattttaaatgatattataatttaatatcaaattaacatattggagtgcattcattcttgtttgattgacccactattaaatgaaattttacaagaatagatttgattttctaacaattattgcaatttttgcatggttaatcttttatttatctggtaactttgcaaacagaaagaaatcttaaattggaaacatcactattaaatgatggaaatagaaattttaaaaggaatttttttgagatttccctaccgttaaaattagtacatttgttattatcattgttcccctagaccacaatacttctcgtctgataaaagacaaaactatggggtaactctaaaaaatagacaatgagctaagagacaagtaaaagtaagtttgcaatactatacagttaatagaccaaacgggcacatttggaaaggaaaaaaaattgttaactacacattttgtttaatgtttaatgtcttgcatcgacttaagaatatcttactcgaggagcaatgtttagttttcttttatagaaataggaattgacacatctgttgtaatctagcattgcttctgattggttattagattgttcattcatgtcataaatacttaaaaggcaaagaaccctcaattcttgattcgtttgtgatttgtttttctttcctcactttcagaatagtttctagttgatacattttaatagcagaataaataaatgatttgccaacatataaaatatggcagagttaaaaaccctacctctgacatgttgagagccaagtagattttttttttaatgcagaaaatacctacttaaaaattcttttaaaatgccaaacagccttttgcctactcagcacactgccgttggtgtaggagtggtggctgatattggcctgtgatttccaacttcatggcatcttg

SEQ ID NO: 69299 - DNA, 1021 bp, Homo sapiens
tcagctgaggctaaaagcaattttctatttaggtctgtggcaaagtcaataaatttgtcaacctgaaccaaacttgtttgctaattttgcaacatagtagttgactattcaaacatttccagaatgctccattatataactgaaaaggtggtttaggttgggttgaagagaggggcgtgcgatcagctaagcaatttcctcaaaacttgtgggtcattgcatttcacttggtggggtttcttagaatggaaaatcagagcctctcccaggggcctgggctgaaagctctttggggcttcatatttgggagggtctcaaatttagattttttgaaggtatcatcaaatgatcctaatcatgtagtcatttgtattgtatgtgtgttaagatgttgttttgttaaatagaaatgtttaaaatgcactacattttagtaatcccattttggattaaaacaatgcaaagatatatatgtatatttggtgtcttaaaaaaatagaagtggctcaagcttccacggaaatctgagaggctttgccaaagcaaattagaaaattattgatctttacttctttgtttgcaattaattttatatgtggctttgggggggggggtaacatttaattatctcttcttttctttccaattttttattttgtaagttgaggttaataattacagaaccatgtaaagagatgcctatagtgtacctaagttttcattactttacaagtgatacaaataatatgacagctcaggtatagaagtgcttgactcccctttatcatggcagagaattctgctatttgaataatttaggaagatttctgtaacatttttctatggattttctctatttttctttttttgcaagtatctatattaaaagagaaataaaatgaagaatttgaagtgccaaaacaatgacatcaaaaaagatcacaaattctctttaacactgtaagtctgaaaacgaaaaggcagacagcaaatccatattaaagagaagtaatcaaaatat

SEQ ID NO: 69300 - DNA, 1054 bp, Homo sapiens
atttgacaccacagccttttagtcttcagctcaaattctaagcaatcttagccaggttaacctcaaattaatgagaagtagcatgtatgcatgcttgcaagactgccttgaatttaagagatgtaaagatgggagattcccatgtatcttgtccaagacaagcatgttgtcttgtttgatcaagaaactgcctcaaagagagccagtcatccattcttgctgccagctaatccatgcactgattcataatgattaaaaacgtcttatatttgattctactgaatgtgattagaccaaaactgtgtggctgttttggcaattagtactaaaatgctcagcaacatcaaatggtacagtgtgagtgaaatgtaggtcacttactttagcatttggaaagtgtgtcgtggtacatctttgggtcttcatgttttatcaatctcacaaaaaagattaacccaaagcaaagccaaccaaccccccaaatctgccagtacacttgcatgtttaaacactggcgctgatgacaggttcaggggtaaatatgtaccatggggctgttcagcttcacaggttggttaatattaaacaaacacatattgcaaactgtgccttgttatgaggttgttttctgagattccaggggtcagggtcaaatcctcacatttttcaccttttccccagtgccaaccaatagtataacaagtgaaataatagtctaatacacagtaacaatacactttcaaagcaaaaagtgttgaagctaatttaattctataatctattttgctaatgtcatttcacttttataaaaaagaacaatagaaataccttgtatgtttataatgctgtatatccaatacatcatttaaccctcacaataaccttgtctaagttttcattagacccagtattaaagagaaaactgagttccggaatatttgcatgactttacttattcaaaaaagacttattaaatcggtatcatattaggtattgaagtcagagacaattctttaaatatgcatgtataacaaatgctcacaaatgttcacta

SEQ ID NO: 69301 - DNA, 1104 bp, Homo sapiens
ccaaatattaccctttaagattccttttgtaaagtaataataataagtaacttagaaattttctaagggtttagaagtattctatggtctcatattaaaatattgctgctatacacatttccattttgcagaatatctcattggtgcctatcactaacatatttttgtatgtttctttaaaagaaaaagttttctttatcttagaaacacgtatactctttgtgttgcagacattgctatggcaagtccatatattttattaaatgtcagactacagttaacagatgttgcagcagtgctggaggaattaagaccatgtcagcatttctctttaaatatatattttttcagggctttctatgtatgaaacgttaactccttaacaagttaacacaagacaaggaatgctaatgcccaagtggctggatattttaagggacctactaaagaaagccatctctcctggggacctgttaatattattaataacaaaagttgggaaccattcctgaaatgtttgcctggaggcctacgaattaaatttgtcatctgatttttagccaagaaatacagaattaaatttttgaattggagtttagttatttaatatttgatcgttattctgaattcaaaataatctactgcttatgaatagattcccttaaaatattgtgtgcctaggcgattttatggagtccactgatttaaaaatatacagccaacaacaacagcaactaatatttatttagctcttactctatcccaggccatattctaaggttgtaaattatctcattgaagaaaagtaaataaactagacacatgccttctttactaagttactgctctgtgcaaaaataaaaaaggaagaaagggaaggatggaagagaggaagggaagagttgaataacgagcaaaaagtggtcttaatttaccagtctactcaagagataaaaggaaggccatctcaatatgattcatattctcaatctctgtgtgtgtgtgtgtgtgtgtgtgtatatatatatatatatatatatatatatatatatatatatatatcctttagccatttataatccttgaaaagtcattttgcccaaa

SEQ ID NO: 69302 - DNA, 1055 bp, Homo sapiens
gctgtcctcatcaaaatcccaatggcattttttacagaaataggaaaaataatcataaaatttatatggaaccatgaaagactcaaaatagccaaagtgattttattaaagaacaaagctggagccatcatacttcctgatttcaaaatatattacaaagctatagtaactgaaaaaatatggtaccaaaaaacaaacaagacaacaaaagctgtatggtattggcataaagagagtgatagatcaatagaatggcatagagagcccagaagtaagcccacacatatatggccaactgatcttcaacaagggtcccaagaacacacaatagggaaaacatagcctcttcaacaaatggtgttgggaaaactgtatatccacatgcaaaagaatgaaattggacctttatcttacatcataaacaacaaaaaactaaaaatggattaaaaacttgaatgtaagacttgaaactgtaaaactcctaggataaaacatagggaaaaactttttaacattggtcttagcagtgatttattggatatgacaccaaaagcacaggcaaaaaagcaaaaatagacacgcagtactacatcaaactaaaaggcttctgcacagcgaaggaaataatcaatagaatgaaaaggcaacctgcggaatgggagaaagtatttgcaaaccatgtatctgatgaaattaatatccaaaatatataaggaacacctacataacaaataacatgatttaaaaaaggatcgaaggacttgaatagacatttattcaaaaagacatacgaatggccaacaggtatatgaaaagatgctcaacatcagtaatcatcaggacatgcaaattaaaatcacaatgaaatatcaccacacacacattaggacggctattatcaaaaacacaaaagataacaaatgttagcaaacatatggagaaaagggaacacttgtacactgttggtgcggatataaattagtacaggcaatatggaaaacagtatggaggttcctaaaaaatgaaaaatagaactactatatgatcctacaatc

SEQ ID NO: 69303 - DNA, 3349 bp, Homo sapiens
gataaaatttacacaaacatacaacaaaatccaaacaaatgttcttctatgcttttatgaggggagaggtggaggggatttctcttctgattttagtttttaatggctatatttttcattttagtatattatagcagagtcaggaagtacaaatgtatttttaaaaggtgatgtagggaattgaatgacagtaacaaatgctatccttttatctttttagtagatgtttatgccagtcaagatcctgggttttcataacagactttgacaacttttgttttgtaaggatctattattccaggtttttattccaagctcagaggtctgcatacctctttaccatatccatgcttgtaaaatactcttggtcataatgttattaggaagggaattcaattacttctaccacccaaagcattatttgaaatgttagcaaatgtccatacgaaatgtttttcgatagcgtgatttcctctatcataactaaaacaaaggaaaaaggagaggagatggaaaaaagaactaaataatactcatgccagacagtccagcccagagaatgtcattccctgtatatgattatttcttgttggctatttctgcctattgttcccaataaatctaatgtgtattcatgattaaaatgactattatctcagttcccttgtttcccctcaattttgtctcttttgttcactactgtcaccctgatgcctaacacagtgcctggtataaacagacactggtacatgtttgttgaatgaatgaaggaagaaagaaaacatgtttctttctgttttttgacagaaaatattcttcaaataaacatttttttcatggacctactaaaggcctttgcaaaatgattttgtgcattgtttatagtcaatacaaatacttttaaattgtttacttaatttgcatgattgcacatgattaagagtataagcttggtaggcaaggtaatgtggatatgaatcctaatgccatcataaagttgggcttcctgggctcagatcttgactctaccatccaacttcctgggttccaattttggctctcccactttttgcctgagttaccttgagcaagtcagtccactttattgcttcactcatctctgaaatggggaaaataatagttccaacctcacagggattttaggaggatcaaattagtgaatatttgtaaaacatttagaatcatatctggcactttttaaaacaacagctatggtatagaattattgtgatgatgatactgcatggcacgtaaacactcaataaaataggattgctactatagatattatcgcaattcttcatttctataatctgctatgaagatttggggccctaacagcctttccatgttttggtccagtgaaagtcttattgtttctaccttccctttcactcgtaactctttctacccaccctgtgtttgtcctgtcattttgccttgcgtcatttattcattttacactgcatactcctaagggcagggactttgctctttgttttggcataatttaataacactgggtacactcgcggtactataaagatgttgaagaaaaagaaaaaagacgcaatttaccaacaggcaactttggcttacggcgggataggtcgctgttctgtctgcaatgttggtactcctgcaggccgcccagcagcatctaggggcgtggctgggggctctccagtgaccgcacgtcctgggcggccactggggtgtgcgcagcgcctggagcatgagccgggtggtggcgtgcacggaggatcgcgggaggctgccgcctcgggacaccccactcacacaggtttgcttgctgcttttgcgtggcaacttggttagagggtccaggagagtgggtgagacgaacgtggaaggggaaagagaaaaagacatactgcaaagcactgaaaaacgaggtgggtgggagggattcattaagaagagaggctgtggcagtccttgcttttaagaagcgtttcgtgcatgctagatagtgctattcaggctatagtcttgtttctggaatttttccaaatgggaggaatgtgtttcaaggatgcagagtattctttaaaaccgtatgaccaaactgacctctattgttaaagggatctaactaaaagggttcgtgtttcccactttgctttgtgaatgcctgaaaagcaatccaaaggttgagaacactggaaaacagagctattttattgcagtcctgagaatgcagtcattactgttttattccttcttatcttttgaagcaatactttagtaattctttagtaacagtatgctttaaagaaggtatctgacacatttttggcatgtgccactatgctatatttcattattctttctgtacagaggcatctgtaaggaatatatatatatatataaactttgtatattaaagtaattataaatttgcatccagttgcacagagaggccacctaaacctttcacctggtttcctccaggggttacatctgacacactttagtacaatattaaacccaggaagctgacatttaaacttcgtatattaaagtaattataggttcgcatccagttgcacagagaggccacctaaacctttcacctggtttcctccagtggttacacctgacacactttagtacaatattaaacccaggaagctgacatttaaactttgtatattaaagtaattatatatttgcatccagttgcacagagaggccacctaaacctttcacctggtttcctccagtggttacatctgacacactttagtataatattaaacccaggaagctgacattggaataatgtgtgtatagtttctatgccattttgccacatgtgtagatttgtgcaatctgacccactataggcctgtcaagatgcagaacttccacctgtatcttgcataagatctcccttgttccacctctttatcattatctccacctgctcctcgctaccccggcaaccacttgttttccatctctatattttcatcgttctgaaactattatataaatggaatcatactgcatgtgatctttttgagactgagtttttttctttttacactcaacttgatgctcttgagatccatgcaagttattgagtagatggatagtttggtcgtttttcatgctaagtagcattccagttgtttgactctatctagtgctgcacattttcctttgctttttaaatcagtgaaacttggaacttcagtgggattaaggaggtacttgagggcacttgaagaggtgaaaagtgtgaggacgaaatgtgaatatttttattttcaaaatgacatttgtttgtgttagggcaaaa

SEQ ID NO: 69304 - DNA, 1050 bp, Homo sapiens
tcctatttttagaaccttaaccctccttttttttttttttactttttacatatccaaagcaaatatttctataaaaatcaaaggctgttatatattttatatacatcaaaacaataatatatcaaaatgattacacagttttaaaaaatgtgcttccacctatcaattgaaatcatcttgcaagccactactgccctgatgatgttctgcaggaaggataagaggtagaagtaggggagggacaagtgaaaggaaaggtgctttaagagccagtctttatactaagccctttaatgtgaatctcatttaatcttcacatgatactctattctataggtatttgttatctctgttttacagacaggaaattgaagaggttaaggaaagagccaagagtcacaaagctagtaagtaacaatgctgatattagaataaaattcatcctatgcaaaagctcctgcttgttgcaataaagacagcagtaaaataaagacaaccagagggaggagaacaaaaacttaaggaaacaagggtgttagaaatgtgttacataacacagtatggtgtgagagataggagaaatggaaaaacagaatcactttcatgtctcttagttctttcttccactgtgtatataatgacctaatttcactcattcattccataaataattatcaagtgttactatcttcaaagaactatattagggagtttcttttattcctatcttcctagcacctagcacagtgctgggcaaataccaggtgctcaagaaatatttgtggaacaatgaatgagtctactggaggaaagaatagataaggaaacatttgcaatacagcatgattaaaaaccagggaaaaggctgggcaccgtggctcatgcctgtaatcccagctctttgggaggctgaggagagtggatcacctgaggtcaggagttccagaccagcctgaccaatatggtgaaacaccatctctactaaaaattacaaaaattagctggatgtggtgacgtgcgcctgtagtcccagatactcgagaggctaag

SEQ ID NO: 69305 - DNA, 1477 bp, Homo sapiens
tttctttatgtaaagttcacgtttgtcacctccataccaggaggaaatttagtgagtcatctaccctgaacactcttttacagactttaaaataaagatccacatgtacttcagcttataggacagatccaataaatgcaaccttgactcatggaagaaatctaaccgtcgaaaaataaacccacaccaggatcttctcggttatcccggacccaggaaagagggagcagggaccgggcttccaggcttcactcctgaaggacagctggacatctcagccccacctgggaggatgctttggtctacttctcaggttgccgcctgacgattggtggctggcctggaagggagggtccgcaggaaacgcgacactggggatgttgcccctatcacatgatggaaatttccactctttagaaaggcgaaaagaaaagaaagaagggtctctccatccatccctttctgatactttccctgaatcccagtctggaaagggtagtaaaagaggcgggtgagtgaatttttttttgtatttcctgttagacttgagacttgtcagtgtccaaacttgcagctggatcccagcctatcggatgggtgcttgtgtgtatgcacgggggacatccacacgtgtgtagcccggtctctcaatcatctggggcttatgtctggggctcttcatgacatgctcatagttcctaattcttattattttccaaacattcacgctttgggtgggttattgcaggctaatgattcggttgactagaaataacgtaaactagggcacatggagggaagagactgattgggcgggctcatgtgtgacttcttttcaaggagaagcggttgtgccaaggtagcctattccaggagggctggggtatggggcacctccgcctcccgcactgggattccctgggctgttggatttcgagttggttgtattgggactgcgttccgtggccgcgccgcctgcctggctgagaggcccgacttcccccgcgggagctggctccgcgaccgcccgggatcctgctggcaaggtgttacccgagtccctggacccgcgcccgcgtcctcaggtcggggacactgggtggaaggcttaaaatagaactgtcgtctctgatagctgggtcgccccagagaccagcatgattccccgggcggggtactctgacctggggagcccccaaggagtctctttcaagggagaaggcgagagcagagctggatgtgggcccctggtctctgggcggtgggcgagtctgaaaactgcgccagcggttccgagggcggcttaccgcgcggtcggattgcccggcctgctgcgcgctggagtgaagggcagggcggtgcagaaatgcgaacggggacggatagtggggtcgcggcaaccgagctaagagaagcctagggaggaggggcagaaggcgggaattgattacaggttagagctgatggaggaaaaatt

SEQ ID NO: 69306 - DNA, 2249 bp, Homo sapiens
aaggataagttcatatcctttgcagggacttggatgcagctggaaaccatcactctcagcaaactaatacaggaacagaaaaccagacaccacatgttctcactcataagtaggagttggacaatgagaacacatggacacagggagggcaacatcacacaccgggacctgtcagggggtggggggctagggaagggatagcattaggagaaatgcctaatatagatgacgggttgatgggcgcagcaaaccaccatggcatatgaatacctgtgtaacaaacctgcacattctgcacatgtatcacagaacttaaagtatatatatagcatcattgagtattttcatattgcaatgtatgctatttgtttgtttgttttaatttcaaaatagaaatctaagcaatgtctttcagagatcagctactaaggaaaatgcaacatcatcttatgcctgctcctttgtatttattttaaaacaagttaatctatgaaaacatctattttgaagagaactttagagaacttaggctattttttaaactatctagcctataaattccccaagagtgaacacttgtctgcctctgaccactcagttattcagctatccagttctcagcatggaaattggcaaaacattttcccatcttagcagcttctcatcactgtagccttttctagacattagcaaaatatgttgtaaaatctttttaaaatataaagcatgttacacttaagtataaattgctaatatcttaaaatattgttccaacccaagatatttaaaaatctttaccaggagaaaagtttcaacctaaagagatagtgtaggaagaaaacaaaacattggcctgacttggaacccacaagggcccagtggtccagtcctgacactgcagttactagccgtgggacattaggctacttgtgtcagcattctgagcctcattctcttctttcagagaaaggggtctgcgtggagctttgagacatcttcaatttcatatattgaagtagacattccagatggaggggaggttggagaactctgggaccttaaagaacaggtgtagtgggaataagacaggctggaagtatgagaggctgtcagagcatgagatactagaattcaagattcaacattagaatagttactgagggtaaggccaagggagtgagaggctacagtgaggtggtagcaaagtctattgcaggtggggtcaggaaatgtggctaggatttgatggagatctccctgggtaataagagggattttggtgagaagaaagactgtgagctggagcccaatatctttagtgaatataatacacgacctggaaattagtagagcatagtaacttggtgcagccatgtaagtgccagacagactttagttcaaatcacagctccaccgtggaccactgctagtttttgggcatgttgcttaccatgtcgaatcacagtacactcaactataaactgtgagaaataaatacgtctatcccacagagctgttatgtgtagcagatgctagtataataattacctacccaacaaccatttgcatcttcttttttactaacaaaacaaaatcctttatgaagctaaatgctcaagctaagttggtcccagccttagacccactgggtagatcttgattcgtcttagccagtcatggtgatcccttcttcctttccaatgattgacttatgaaagactcaatactggacagtgtgatgtaggataagctaagatgacttctgggaaatatttcctatctttttactttggtgtgtgaagatgtgatgccaagagcttctgcagctatcctgaggaaaactagcagataagctaagcttaatgaaagaaacccttagttacctatcaaaggcagtatttgaaagactaatgacaaaatttctgaaaacagtttggaacttgagaatttggattgaaatataatctaaacattgttccttcttagcaacatagaaattgcattattatctttaaaaggagaatagagagagagaccttgaaatgagaagctaacagatctgtcttttaaaaccagcagtgactggaacttaatgaataaattattggatgttctacccttctacccctgtagttattatgtgccttaggaggtagattaatgttggttcaagaagtataaagtgagtcataagaagagaatctgattcaatgatcttgacatttattaaatgccaaagatgataattt

SEQ ID NO: 69307 - DNA, 1700 bp, Homo sapiens
atgaccttagacttgtaagctcttgtcttagttcatttgggctactataacaaattatcattaactgagtagcttataaacaacatttatttctcacagttctggaggctggaaagtctaagatcaaggtgccagcagattcagtgtctggtgagggcccattttctcattcacagatgatgatgccttcttgctgcatcctcccatggtggaaggggctagctagctctctggggcctcttttcttaaacgcaccattcacatgcatgagggatctgtcctcataatctaatcacctccccaaagccccatctctcaatactatcccattggaggtttggttccaacatataaattttgggagacaccagcatgatgtggatgatagcagctctgaaactcatcgtaacccaacattctttggacttaaagatgagacctttagctaacaaaacttaccatgaggtagaaacacagaattccagtgtattagattttaaagggaaatgtgactgtcaaggagatctcacatttaggtcagtctgatcagtgcaaagtacctgagacatttactttggggaatcaggagagttggttatgtgaaaagaatgtgcaacaaacatcaactctggcagtgtgatgtatccatcactataataagaatatgctggccagggagcctgggtaaatccacttcttgttgcatgacttggacacacacaattcaagtttgcttgcaatcttaatgtgactttaaatatctctctttactccaaattatgctggacttacgtcatagcttaactctcaaagagcattctcactttccttatttctaggttttaaggaccatccctgtctcacctccatggactgtctacaatatgcatggtcaaaaagtagacccgttctgcaaccggacagcagagaaatgtgtctgtgatacccacacagtcaagaggcacacttaaaatagcatcagaccctaaaaaaagataggaaatgaccacagaccagtgggccagacagcacatgtatcctctgtccaggacccatggccactgttggcaggcctaccactgaggcaaatcctactaggaggtggaagtcatgaaaagagtttttccacattcctttctgtgatctacagtaaaaacctcagggagatattgaatcatctgctgttttttacaaccccaattaaacaaaattttctgcacctccttctccttccgcattcttccccccacccagtttccttcttcccccttttcgtcaatggagtggtgtggaggagggtaactgaagctaggttggggatttgttcccagaccacaggaattagaaacaatttaaacaaatgtttaaattatcaggatcctctttgtttctagcttaactaagaattgcaaacggtatctatgaaatttctctttttcacttcccatgtgctgtttccaatgcagtttcatgaagacacatacacaaaatcttctaaaatccttgtcttttcacatcacaccaaacagtaatactgttgattacacaggtaaaacttgcctcaaaagatgttttgtagtcgatatacattaaaccaaagcagagtattttggggacccttaacacctaatttttttttttttgttaatcaacactttcatgttttcttgaagctaatatcagtttaggtgcttatcact

SEQ ID NO: 69308 - DNA, 1041 bp, Homo sapiens
cagcttggctatttttataagccatgtcaaccagttgtttgaatggatcagcccattccatcataggaattgacctggttactccataggcacaaggagatgagaagggagggggaatgggtgagaaaaggaacctaagctgagcaatgcagaagccattgaattgtgacttccaagaacttaaaaatcactgattagtcagccactcgttggaggaaaaaagtaagataagactttaatccctgaggacttatttctagtatttgttctataggaagaaatagaagtgccatagttttcagtctctctttcagtcatcccttttctctcttattcctctatttattcatgccaatcacggtgttgagagctaatgaagagttgaggtggggcagaggtgagggtgattcaaacgtaaatgaacataagtcctgctcttcaggacattccccacctgtaaaggaatgaaacacacacaaatataaattgccatgatgggcaggttaccactgtccttactgccagcactgccccagccctggttgtccctctgttccatgagccctttttctgtaaaatgcttgaagatcccatgtctcccacagttctggacacacagcaaatgagcaaaagagctgcttgtgtttcattggtttagtaacactccatttcttttctctgattattaaatgaatttgcatatatttagttggcctatgagatattagacctggaaatgttacaaagtaattttacctgaatttagtagatttaatattttaaaaaatgtccccatcttccacccccaaattaatcattttagtagtcagggacaactgttatataacacagtcttcttagctgctcaaaggtcaacagttaatgattgatagatcaggagcatctctgaattttgaaatcatggagtgtgatccacatgggtgctatgattcagatgacctgcacccctaggcctctttattttaaaaatatacttttacttcaaataaacatactgctcttttaagttctttgtcttat

SEQ ID NO: 69309 - DNA, 1047 bp, Homo sapiens
attaagagactggacctgagttataacagaattgggcttctggattctgagtggattccagtatcgtttgcaaagctgaacaccctaattcttcgtcataacaacatcaccagcatttccacgggcagtttttccacaactccaaatttgaagtgtcttgacttatcgtccaataagctgaagacggtgaaaaatgctgtattccaagagttgaaggttctggaagtgcttctgctttacaacaatcacatatcctatctcgatccttcagcgtttggagggctctcccagttgcagaaactctacttaagtggaaattttctcacacagtttccgatggatttgtatgttggaaggttcaagctggcagaactgatgtttttagatgtttcttataaccgaattccttccatgccaatgcaccacataaatttagtgccaggaaaacagctgagaggcatctaccttcatggaaacccatttgtctgtgactgttccctgtactccttgctggtcttttggtatcgtaggcactttagctcagtgatggattttaagaacgattacacctgtcgcctgtggtctgactccaggcactcgcgtcaggtacttctgctccaggatagctttatgaattgctctgacagcatcatcaatggttcctttcgtgcgcttggctttattcatgaggctcaggtcggggaaagactgatggtccactgtgacagcaagacaggtaatgcaaatacggatttcatctgggtgggtccagataacagactgctagagccggataaagagatggaaaacttttacgtgtttcacaatggaagtctggttatagaaagccctcgttttgaggatgctggagtgtattcttgtatcgcaatgaataagcaacgcctgttaaatgaaactgtggacgtcacaataaatgtgagcaatttcactgtaagcagatcccatgctcatgaggcatttaacacagcttttaccactcttgctgcttgcgtggccagtatcgttttggtacttttgtacctctat

SEQ ID NO: 69310 - DNA, 1034 bp, Homo sapiens
tggagacaccctgtaaaattaacatgtcttacatcttcctataattattttatgtgtaaattatttaatatgcacaatgaaaaataattgtatacgacaaagtgaactgctatgccaggctctgatccaaagatattgtatggattggtttttggcatctaagggcactttagcttttacttcacattagtgaaactatattcttttaaattagctcactagaaatctatgctagttagaataatgaaaacttgaaataaataaggtatatagaacaagaaaatattcctgattcaattgtttcatgatttctattagcatatcacattaatgttttgtttcaaaatatgatggttactttctcaacatgtttctattttaaaatgacctttactatcaacgtatctacatggtgtcaagtaattggaaggcaaatacaaaattcatataaatatttgcagacacaccctgagtgtgatgagccttgattacaaaaaagatgttgataagctctgtcctcaccaataattatttgttccttttggaaaggtacatagtctgtcaaagcaactgaattatttctagtctgcaaataaatttaatggagcaaatactttctaggtcacagtatgggaaaggtgacatttttattatggaaagagtgaaggtctgttttttgatctgctgaaaaaaatagattggcatagagtttttttctagtcacaaaattgaacattttattttgagatgttaattttcaaaaaacaccatcagataagaaaatgagtctttgtcatatacattttgtcccaactttataataattcattactagtatagtataaggttttaataggtagttagatcatttgagccaaattatttgccaatctaaatattaattattcatttattgaaaatgtcaaagttgtgagatcctggactgtgttaatcatgagtgttttttaaatttaattttttctttattcagaacaacattaagtagcaaataaaaaataccactgcaagtctag

SEQ ID NO: 69311 - DNA, 2022 bp, Homo sapiens
aatgtctgaagttgatttctgtctcagcagtaaaataaaagaacatgtttaattattgatgtctgcaaaggatgcaggtgtggtaactggaagaggaactgtcatgcatttgagattcctagtcttgagatacagacaaatctgatgttcaaagctggctttacatgatatcttctgagttgaattatatgtttggaaaattagacaaaccatgcaatggggttagtgaggcttttctgcacagaaaacaacagggaatgcttagcaaggtagaggtttttataaggacacttgggaaagtgcggaagtgcagaaagccatctctgaatttccttcaaatagtcctgggtggtctggcaaagaaactgggaagctggcatccacagctcctttctccatctctgctatcattaaaactcagctgctctcttctttcctttcattgttcctgccttaacaaactaattcaaattctctttgcctaccagccttctgctttctgccttcctttggtactctatttccctgccatattcctatctgtacatctcaagttaaaattcccttaagggagggcacagtggctaacacctgtaatcccaacactttgggaggctgaggcaggtggatctcttgagctcaggagtttgagatcaacctgggcaacatggtgaaaccctgtctccatgaaaaatataaaaattagccaggtgtggtggcttgagcctgtggtcttagctacctgtggttccagctacttaagaggctgaggtaggaggatcgcttgagctcaggaggcagaggttgcagtgagccataatcacaccactgtactccagcctgggtggcagagcgagaccctgtctcaaaataaaataaaataataaaattttaaaaatattccccacagagagtaataggtcaacccttcagaatggcatgcccctcttatcctagtcctagccaattaaaaaaaaaatttttttaaagaaaaaaaagagtggcatgcccccttgggtgggattctcatgccaggttatataaataccactgggcagtctaaagagagctcctgaaatcagatgcccattcctagtccaatcacctgtgactatagtggcggaatcacaaggtacaaaggatggagaggagaccatgcgtctggcaggaactccgagggaccccagtggggagtggtgtgcctagtaggcatctgtccattacaaccatcaatagtgtagtgtacacactgattggacttgcatggcttcaaatgaagaaaaattttcttataatgagcaaaagcagtggttttcaaactgtgcttggcaaaatgtcttgagttctgcccaaagaagagacttagtaggtaagactctgacttccttgttcccttttcatctagagcactttcatattattcagtttcatatatgggttttttaaaaataaaatttcacttgaagttaacatgctactgttcaaaagtagtttgagagccattgagttgtaggaacacaaaaaacttttgtttggctaatttttttaagtggtaaggctttattttaaaaggttagtagttaatacacacaataaaataaaaagtcacttaatatattttacacaattttttgtaaaacaaaaaaagggtagggtagataggaaaattgaaattggttatttcacaacattatattcttaatcacaattgtttttgtgtcttggatgttattaatgaaaattgtttaattgtgattttcactatatgtttgaggctaaatgtggtggctcacacctgtaatcccaccactttgagaggccaaagtaagaggatcacttaaggttaggagtttgagaccagcctgggcaacatagtgaaatcccatccctacaaaaataaaataaaataattttacaattagccagatgtgttggtgcacatctgtagtcccagctacttaggaggctaaggcaggaggattgcttgagctcaggaattcaaggctgcagtgagctgtgatt

SEQ ID NO: 69312 - DNA, 1061 bp, Homo sapiens
ttcctccatactttcaccagtactcaccattcaatttctttctttttttttttttttggccaatttgatagatatatcatgttttggtattcatttcctttattataatcatctttcacatacttcttgcccatttgtacttttgctctgtaagatgcatgatcttatcttttgcccatttttctattgatttgctcacctttcaattcatttgaatgagcgctttgtaaatcaagaaaattagcctgtccacctgtcaaaagtttctaatgattgaaataaattattttcttccctttatcttaacagatagacttcttaagccctcttatgcaaagaatttcaggctgatttcactttaaaatgagatataggtgataacaaaagccaaattgtcacctactttaaaggataagtgaataataagaaggcagcatgatgtacccaagggaaatttgagtgatcttagctgggaaagaaaccaaatattcatgcctttatgcactgcacaaaacttgcacaccagaactttaaaagatgactctttgaaagtagttcttcagtgtctttcatactccttaatcttcccaattttaagtaacactgttgacaaactttaatttccattttaataatcttagcatcattatgagatagtattaggcaaatatttaagtataaacgatatctacaaactttaatttccattttaataatcttagcatcattatgagatagtattaggcaaatttttaagtataaacgatatctacatatactagaagacaagtcatagttcaagagaagcatgatataaaaaggccattatgatgagagtcagtggacttggattctagatgtgccaccgtcactcctttgccacgtaaccttgggtaactccctcagtttctgtggttctgttttctcatctataaaatgaaaataataataacttttcttcctagccaataccttgttttgctaattaaaagaactcatgaagtattttgcaaactatgcaacactctcgattactgtaattgttgggaagtaacatatct

SEQ ID NO: 69313 - DNA, 1048 bp, Homo sapiens
tgtgaactttctctccatgtttactcaaagtaccagaaatatgtagggacagcctccacttatctcgagatttcctgctgttcatgattcagctcactttgctgttctttttcatttcctctatcttacattttgattgttttttatcttctttttcttcagctttattgcttgtttcattggttcttagcccagtgtctgaaagtgaccctgagaagttgtctaagcagaaaagcatgcattgtgtttttagattgttcaagacagggccgccattaccccattggatgcctttgtgcaaagtggaaaaatgtgtccttttctctgaggagatgcagccctacactagggtgcatggcttggttagcagaaggcagactgatttcaaaatccagtctattgtgcattcttgtgccgtgaatggagaggtgcagccctgtttagagaagagcctgtaatcttgcttaaataagtcactacagcaactattatctcacagtgaaaatgttcctctttaaaggccgctaaataaatgaatgaccttggacatacatttatttcctcacttttcagtagtttacaagatccctgaacaccattcaaggcttatattagtggctttctgctaccgctaacatcaaatccaaaacaccatggacttacttgcaaggtcttatttgcactttcagcatagcaccatggacttattagcacactttagtgttatattaccatctcacacttgtcttcatttcagcaaacaattaataaacatggactaggagccaaactcttgaagcacaactttcgtttatcaccagcttcgcattttcacctcatctaaccctactaacaaaatgcatatccttgaaacttccaaacagaagactctggggatgtttggcaaaacctcagcataacttctgctgctccaggcttgggatccacagaagagctgcctcttgggtcagctcttccagccctgctcggctcctcccttggccactcccagtcccacagaccctcctctatgcactgtgctcagaca

SEQ ID NO: 69314 - DNA, 1121 bp, Homo sapiens
ggctcacccctataatcccagcactttgggaggccaaggcgggtggatcacctgaggtaaggagttcgagaccagactggccaacatggtgaaacaccatctctactaaaaatacaaaatcagccgggtgtggtggtgggtgcatgtagtcacagctactcggagcctgaagcaggagaatcgcttgaacctgggaggcagaggttgcaatgagccgagaccatgccactgcactccagcctgggcaacaagaccaaaactccgtctcaaaaaaaataaataaataaaaataaaagcggtttgtaaactgtaacaccttgcacagaaacacaagattactactattaaatattatttagaaaagtagagttcttcttaccatttccctgtttctttcttctcacttcctcctttccccttctgaccatcttttcagccgtgaacataccacaccagcaagaacaataagagccaagggtctgaattgtttaatcaaaggaagagtcaaaataagctacacccagattactgagaaaggtgaaatgaaaacaagctcaaaaccaaattccaggaagatgctgtctttgtattgacttaccatttcatgttttcacacatgtcaaagtcttgaagcttcggtcattagtcttccgcttcctaaagcaagaaactaaatgctgacttgtgtcgtttgccccagatgccaccggaaatgtcatcttctccccagacgctggcttgcaagcacagcagcacccagaggctaacctatttcccctatagcccaagctctgagatctcccgtctggtcacaatgatctacaggagaggaagaaagctatctagggacgagatctagaatcaactgagagagatgcttaaaaatcaccagttactttaatgagtaagtacttttcagtttttccattttatctgaaactttaagttggcatttctgaccagcctttcttgagaccatcattttttgggcacttactgtagacaggaatcagcaccctagcctccttcagcccaccccatgtaacactaaagagacaactggtgcttggcaataacaaaaatattagtgattgataaacttgtaaatttattaaaatgga

SEQ ID NO: 69315 - DNA, 1052 bp, Homo sapiens
tgttggccagattggtcttgaactcctgaccccaggtgatccacccacctcggccttccaaagtgctgggcttacaggcgagagccaccgtgcccggccccatttcgggttctaactggaatgcttcttcccagtcattttcccctctctttccttctcacagtcatagctgcatgttccattagagaagaataataaggccaggcacagtggttcacgcctgtaatcccagcactttgggagggcgaggtgagtggatcacttgagaccaggagttcgagaccagcctggccaacatggtgaaaccccgtctctactaaaaatacaaaaattagctgggcatggtggcaagtgcctgtaattgcaggtatctggagaccaaggcacgacaattgcttgaaccctggaggcaaaagtttcagtgagctgagatctcgccactgcactccagcctgggtgacagagcaagactctgactcaaaaaaaaaagaagacattcttaggtaaacatttttgtcagatattggccctgagctcttggagcaacatttgggtgggttaagtgaactggttaggatataggacctccagaagtcctcagacactgtgaggttgtcagtctgcagaactgtgttttggctcttcttctttgttttttcttttcctttttttttttttgagacaaagtcacactctgttgcccaggctggagttcagtgatgcgatctcagctcgctgcaacctcctcctttctggactcaagcaattctcgtgcctcagcctcctaagtagctgggattacaggcgtgtgccactacacccagctaatttttagtatttcttgtagagacagggtttcaccaagttgcccaggctggtcctgacctcaggtgatctgcccttcttggcctcccaaagtgtagagattacaggcatgatccaccgtgccctgcctgggttcttctgaattcaaggtctttatgtgtttttatgtctcttgcttgagattaggatatgggattatactcattcaccacccatcccctcccttc

SEQ ID NO: 69316 - DNA, 1011 bp, Homo sapiens
agtaggcacttattaagtgtgagttggagaaataaatgaatctaaacaaatgaacatgcttgagtcccaaagggatttggagtttgcttcagttttgttttgtttttctttgtttcaaactcctggtctcaagcagtcctcctgcctcagtcttccaaagtgctgggattacaaacataagccactgcacccagccaaaacttttattctgatagcaaaaatattttaatgaaaattctttgtggggaagatgtcaatattttcaactgttctcttatgaaacttaatattctatctgttttaatattttcatttttgtatttatacccatttaaaactacaaataggatatatagcttttaaaacttgaatgtgtaatttaataatagctatccacccatacctattaaaatgttcctacatctattaaaatgtttactaatgcgtaaaatcttacaaatttcaagccgcaccggattttcaaggcttttgtgtaagtagatgaagtggatgccatgttcctcccatttgcaatctgttagcagtattttagtgtttctactatttagtcatctgtggatatgagttgtaaatggcaacttgaaataatctgaagttttgaagatgagtttcacagtttttaacattgcatccaatgtgttggagagaaaaaactttttctctactcttttagcatcagtacttgggggcgtatagattaaactaacaaaagacagattaacaggagaaaaagcacatacttttatttatttatgttgtgtgtgtgttgccaagatacagacctagaaattttatttatttatttatttatttatttatttatttatttaatttatttagagatggggtctcactttgtggcccaggcgggagtgaagtagctggaacactgcttactgcagcctcaacatcctgagcccaagccatcctcccgcctcagtcgtgcgccaccatgcccagttaatttttgtataaagatggggttttgcc

SEQ ID NO: 69317 - DNA, 1041 bp, Homo sapiens
tcccgctcctgtccccacagcctcctcctcccattctccatcaccagggaatgccccggttcccacagggtcccccagatgcctgtttttcctcagaccatactttccagtcggatcaattctattgccattcagatgtcccctcatcagcccatgcaggtttcttcgtcgaagacaattttatggttggtcctcagctgcctatgcccttcttccccacaccccgttatcagcggcctgccccagtggtacataggggttttggcaggtatcgtccccgtggcccctatacgccctggggacagcggcctcgaccttcaaagagaagggccccagccaatcctgagccaaggcctcaatagacggacctaggccttatttcctctttatgaacatggattggacagatctgacacttcctttccattgcttggcctgaacagactgaccttgttaacttaagcctggagtccatgcctcgtcttccttttgttcattgctgttaccaagaaagccaaggaagagcagcctgactcattcttcttggctgcagcctcttccccacttcctgggagtgacccagcgttattcctgcctcctcactcctattctctttgcctttgtgtaaaaataaaatggaaataaacaagttgcacagaagtagttgtgggttttgcatgtgtctatatttaatggatgcctctccattaaatgattagttcttaatatggtttgtctctgtgtccccacccaaatctcatcttgaattgtaataatccccatgtgtcaagggagggaccatgtgcaggtaattgaatcatgggggtagtttcccctatgctgttctcatgataatgagtgagtctcacaagatctgatgggttttttttgtttgttttttttttttgaggcggagttttgctcttgttgctctggctggagtgcaatggcatgatctcggatcactgcaacctcctcctcacaggttcaagcgattcccctgcctcagcctcccgagtagctgggattacaggcatgcac

SEQ ID NO: 69318 - DNA, 1038 bp, Homo sapiens
tcagcctcccaagtagctgggactacaggcacatgccaccacacctggctaatttttgtatttttagtagagacagggttttgccatgttgcccaggctggtcttgaactcctgacctcaggtgatccgcccgcctcggcctcccaaagtgctgtgattacaggcgtgagccaccaagccgggccttagcagagggtattaaattaaaagtgctttactgagtaattccttaataccaggttctcaaaccgttccactgaaatacctgtaatggtggagatgaaacccatatatacaggaggtctgcctgctgcagctactccaaggattaaattaatttcaagcatcatataaaatattaactgaaattctctgttcacttcatgcggtatcctttgttttataaataataataatcataacgcccttcaaaacattgaataaaatcagtgcaaaacattgagcaaaaatgcagtgggatttagggtcctaatccataaaatagggggatgatagcatctcttataagattattatggacaactaaaattgtatttataaagcccttagaattgtgactggcacatagttactactttaaaaatatttgtccatcaggtgcaatggctgatgctgttaatcccagcactttgggaggcccaggtgggaggattgcttgaggccaggagtacatgaccaacctgggcaacacagtaagatcccatctctacagaagacttttttttaatcaggatcccttgagcccaagagatcaaggccacagtgagctatgatcacatcactgcattccaacgtgggcaatagagactctctcaaaaaatagggcctggcgcagtggttcatgcctgtaatcccagcactttgggaggccgaggtgggtgaatcacctgaggttgggagttcgagaccagcctgaccaacatggagaaaccccctctctactaaaaatacaaaattagccaggcgtggtggcacatgcctgtaatcccagctactcaggaggctgaggtgggagaa

SEQ ID NO: 69319 - DNA, 1010 bp, Homo sapiens
atcatactcagaaaagaaattccaggaaactgcgttccaattaacatggaaatgaatccacaaaataaatatgtatccagagtttatgcaatcccagggtacaatggagacagatgcagattgatctaatctggttgcattaggaataagaatgtttgttggggaacattgtgtggaaagttgacatttggttcaatcaggaaggccaaagtagaaattatgaaagcaatttcctttgtccagttaaattaggcattcaaataacaggctactctttgaccttcctgggaaaggtcaggatggcatcgaatggtcattaaataaatagcaggcctgttcttgtaaatactttgtgagactttaggaaaacatattctggattgaaaatcagccaaaaaagatctgcaagaatttctctaacatatttttattgcttctatttatccatttttaatttggagaaatagtaagtactggtaaaagcacaagaacaaactgaatatggggtctattgaacaaaattaagaggtcacttttctgccacttgctaatatgtgctgcagctgctaaaaaaaggaagttttgttgtttgtttgttttggttttggttttggttttgagacggagtttcgctcttttgcccaggctggagtgcaatggcgtgatctcgcctcactgccacctcctcctcccgggttcaattgattctcctgcctcagcctcccaagtggctgggattattggcaggtgccaccatgcctggctaatttttgtatttttagtacagacggggtttcaccacgttggccaggctggtcttgaactcctgtcctcaggtgacctgcccgccttggcctcccgaagtgctgggattacaggcgtgagccaccgcacccagccagaaagaaggttttttgaaaaatagctcctgtggatgtctccccaaggctccacttgatatagctaaggagaattcctggcatgtatcataagatatatggtttcttaat

SEQ ID NO: 69320 - DNA, 1049 bp, Homo sapiens
tccatccaagaaaatacttgcatccagagagaaacacaatacagactcctccgtgtgcacccaagcagttgggcaaagcataacacttagttctatataaaactaaacctctcatttcaggaagtaatggaaaaaaaaaatcaaccaaaatttctgcattgagataataaaaatatcttttgttattccttaaaggcagattgtagatgtactacatgttaatttgctgtcaatttattcattttttaaaatataatctcctccagtcaaggtggatttaattccattttcatcttgtgtacttcctttcaaggcttggtaatttcttttctatttttatccattccacttttgcttcctgtcaatttttatatcaaaatctgcttcagttccatttggcaaggtgcagtaacaaaaatacttctcatgctttaatgtttaaatttgccattgcactttaatatggttctctgtttgtgccaatggcgtaacgtcagctctttcacttggcacagatcctggacttgcagaaggcaggagttcgatttctataatggttcttcatcactatctgaaattatcctttttcctattcatttagtgtgcattgcacacccactatatgctagacactgtgtgtgtgcagcaggaatgcagcttacataggagataaaataagacagcaactgaaaaaatgctggtatatgatgtcagcacaggtgttctgaggaagaccgtgcccctgccatcatgcagaggaggagggaaaagaactgggacacataccagtcactagaggccatgagatttttctcttatctgaaagaagaatataaactcaatgtgtcacagactgaggccattctgcagccactaggccatgcgacattaagccataggacacaggtatgattggctagaagcctggtccaagaaagggccctgtgggagtgcaagggacactacttcaccactgagaccacagccatggatacagactcattttaccagcattttgaaccacctgtcatgccacagggagtgtcaag

SEQ ID NO: 69321 - DNA, 1388 bp, Homo sapiens
tgagaggcttccacttccttccgcctcccaaatatcattttgttggccaaatctaaaccatagccagaactctgctaggaagggagtcttagaaatgtgtttcccaggcttgcagctcctgtgatacaggaggaaatgtggaaggggatggaaatagttaccagacggtaagtatagtgaacagaaaatatccagtacctacagatgatgtgacagctagcctccaaggtggccttcaatgacatgtgcctcctgatattcacatacttgtagtaggtgaaacccacagtttaccaaggttaatccctgtgaccaacaaaatgtggcagaagtgatgatatatcacttctgaggttagattttttttaaaaaaaactgtggtttctgtcttgggagtgctctctttatctctctctctctctctctctctctctctctctctctctcagctctggctctgagaaaagcacactgccattttgtagagagaatcaattacttactaaagaaaggagaaacaagaggatgcacaaagaggaacacagaaggagtatggcacagagtcctggagccaggaaagcattcaagtgaggaccagaaaaccctagggcttgcatccctgagtggctatggattctgagggacctctggtcgcatgttctactggaaactggttgtttttatcttatttcagtgtccatgaggcctgcacatgtcactaagtccctaattctccctagaatcatagatgcaacttccccattacttgaggtagcatgaatgagcctctgctcctggcatcgggacagcctaaccagcgcatattgttgtgactgcttttccttattagatatgcaggagagcctttcagccctcagtgatttggtcaacagaaaatccgtgcttgggacactgtggttcagacatgctttctttgttgctggcacggagtgagaggcccttgttgggagaacttgggagaactggcctggcttcttcgagacccagcttccaagggggtggctttctctgcaggagaaagatttacctccaatacctgagaagcaaggggccaggatggatgtcctctgcaaccagaagagcatatccagccactaactatggcactcagcttctttctttactgaatgaagctcaaattgatacaaaagttaccttgatcaaaatccttacaactacacattagctgtcactcccccacccccaacaccactccccggctttgccctggtaatcctcattctttaaggggtctggccttttatttacttttttattcaacgtttttgcagcatctgaatagaaattatccttgctcttctttaccccaagtgccttggctcttgacctctgctctcatcctccct

SEQ ID NO: 69322 - DNA, 1053 bp, Homo sapiens
gaaacaccatgtagccatttgagaaatgttatagacatatctttattgacttggaaagatgtgtatgctacatcttgaatggagaaaccagttcacaggaaattgagcatggtgagagatgtacgaaaaatgtatactacaaaatagatgcagtgataatatagctctaagatagaattattttttaatctaattttggcttatttgattttatgatttttctgaaataaatgtgaattccttgtataatgaaagttattgaaaaacaaaatgcattacggtgcagctcacatgccaataagccaaaaaatctgatagccactgaaatctgataaagactgagtacatcccacaaattcccttatgttagggatgatgacattatctgagacagttgcagaatccatgtgggtgagttctaccctgttatcaaggcaaaaccctaggaataatcagtggctttgagcagtattggagggtgagcctttccaccctccttgaagcactgtattccttaagggtttcagttaagttcttgaaagtcactctctaaaagcacaataatgcttatagcttttcacttgaaaaattaatgaaattgcataagaaaataattataccttattctgtgagcatggagatgaaatacaaagactcagatcattggccgggtgcagtggctcacgcctgaatcccagcactttgggaggcccaggcgagtggatcacctgaggtcaggcgttcaagaccaggctggctaatgtggcaaaaccctgtctgtattaaaaatacaaaaaaattagccgggcatggttgtgcatgcctgtaatcccagctacttgggaggctgatgcaggagaatcacttgaacctgggaggcagaggttgcaatgagcagaggtcacaccactgcactccagcccggatgacagagcaagactccatctcaaaaaaaaaagaaaagaaaagaaaaaaaaagactcaaataattgacaaactccaacactgcacaatcttggggaaatagtctggcaaatacctatacatgaagag

SEQ ID NO: 69323 - DNA, 1022 bp, Homo sapiens
ttcatctccaccatgccgtgccgtgcaccagccccactggacttctcacctttccactgactgtgctgcacccttcaactttgccattcctgtgtgctttttctgtgaaggcttccctcatgccagtgtttatcttccttcctgtgttctcttagcgttttgtgctttcatctcttaaacatgaccatggccttatatatttacgtatacatgtctctctcccttgtttcgacctacctgggataagtgctttgtatagctttttatttttgtattctcagacttctaagtctgtctagccaccaaattgaatttactaatcactgggatattagctgtaagatcattgcagccttttaacttgtgaccctaaaataggaaacctttaatattttgatttaaggaattgattttaattgttttagaaaccactcaagaaggttattattgaagaaactggtaatttgatacagactattgatgtgccagatagcactactgctgctgctccagagaataatcctattaatctagcaaatgtaatagcagccacaggcaccacaagtaagaagaattcaagccaagatgacctttttcccacaagtgatactccaagagcaaaagtattgaaaatagaagaagtcagtgatacttcatccctgcagtgagtagaaatactgttatttgctgatcatccagaatgggttaattccaatggagaattgatattactgagacttctgatttgtactcatcatgctaattttttgaactgcctaacttaagtttctagcttttcttttttgtttgtacttattgtaagggtgattttgcttaaagaatgattactattttttttttaaccacagtgtgaaatttaaagataagaaggtatcttgaaaattgattttgtttaaaaattttcatttctaggatttcagttttattatttagttcagcaaaattttagttttttaaaaggaagcttcataaaaatgtagaatttatggattgccattatt

SEQ ID NO: 69324 - DNA, 1044 bp, Homo sapiens
acggaaggactagtttgccaaccagtacttaaagggaaaaaaaaatcccctaaaattaccaggattaccggttgacagtagtctgttcatggtggaaaaacagtaactttctcacatggttattatactcacaaaggtcagacaaattaatgtcacaaaggtcagagattagcaaggtaaatattagggattaaactgtttaagggagtccagggaaatattcaaggttttattgttttggagatcagaaaatcaggatgatcctgcagtttttgggttatctccttttaagcttagtcatattggaagcaggcagaaggctcagatattgcttttacataccctcaagccaccaagctggttccatcctgagaaggaagtcacgaagctgacttctgcgcgcgctcaagcccaggctaaagggggcggggcgaggccgcgggggcttgtggggaagcgcaggaggcggggctttgcgtgagtcactgccgggctcggcgtgagtcgctgcggggctgacggggtggcagtgcggcgggttacggcctggtcaggtgagcgggcgttgcggttctcgctgcccggagcagcgtaggagatccttggggtggccggtgggaggaggggtagcggttatgggtaccggtgaggcggggcgggccggggctggcggtggaggcgcgcgttgaggcggcgcgtcggtgtccagggcagcggcgtctcgggtcgcgcgttcccggaggggctcgcccccgcaacccgggcctgcgcgctctgctttgcaggcggaccctccaccctgctgcgattttgcagtgctcgggaaggcagagccgccctcccgcaaagaccgaggtggggcccgcccccttgcggcgtgggtgtgcggtgttcgccgggacagcgggtgtgaaagtgatacccccagcgctggaagtttttgattgctggctcgcacccccgccccatcgcagggtccctgggagagtttttgggcctgctcgagcagcagcggtgatgggtgaaatggaaaagcatctaacc

SEQ ID NO: 69325 - DNA, 1449 bp, Homo sapiens
cttagcacagggcctgccagtcagtgctgagaacatggcgggctcaggagtattaagatgggcctccagagaacctggaacattcaaaaccactgttctctgcggagggcacgggcttgacagctggaacccagggcagacaagaattaggggcgttcaagaagtggggatgagaaaagaaaagccttctcccttcaggaagtggggagagatggtcacctgtgtgccctgccctgggaagcactgccctctgctggccacctggtgagttgcagttgcccaaaggtcatgtttattgagaccctactatgtgccaggcactgtttagagcactgatctccgaagcacttggatcgacacccatgtcaataaccaacatttaattaaaacccacaccccactgtgtgaatatttgtttgtaagtaatacacatatattactacattaatatcataataaagatagataaaatagaaattgatggagtagaaatgcaaagcaggtagaaaaagtaaacgtaagtagaagagctcatattttccccaggcacatggatgatctgatgtaccttactttggaggccactgctctagggactggggactcaagcacagtcccagtccatgaggagctgatgaaaatcaacaccaaggcttatataagacacttcccaattttcaaagggcttttatacatagcatgtacttatagctactatttatatacattattttatttgacttatgaaatagttggggcaagtcttattgtctccattttaccagggaagaaagtgaggctgagggaggctcagaccctgcccaggttcttcctgactcactgagaatctttcctcatcctcttggatgtgcttccctgggctgcgtggctgcgtgggcacatgcacctgtgtattctgagcaccacccaggacttcaaccccgctactaggagaaacaacctctcagcctcccaaacagcacctccaccctggcatccagctggtccccggcctccctcccttcccccacccagtccgcctctgctgtctttgcagatgccattggcctgcagccagatgcccgtggtgtggccacatctctggggctcaatgagcgtctctttgttgtcaacccacaggaagtgcatgagctggtagggaccaggcagggtgccagggcccagggaggagatctattttgagtgtggcagtggtggattctggggagggtcccagggagaagagggaggaggggcctggctctggctgctgctgggtcctcagcacacaaaggagtgggcctcagctgatgggggaattcccaagatagtgcagggcaggggctggtagcactggttgggagctcccaaggagaaagaggaggacctgccctagttaggggttccccaggagacaggagcccaaaaggaggggtctcagcactgggg

SEQ ID NO: 69326 - DNA, 1058 bp, Homo sapiens
tttacctattaatttttaacaagaaattttaattttaattttaaacgaaaatacgcatcgtactcagaggtaaagatttttaatcctcgcggttcgctcgtataaaggcatatttccggtcccttccaaggtccaacaatccggacacggcgggtctggggatgggcccaggaatccgcctttttagcagcattcccccaaacgacacggcagcttcgcaaagcggcggtggcgtctgcggttccgggcgcgggcggcctccggccggggagggcgctgtgcgggcggcgctgggggcgggccgggggcggagcgcggggcgccggctgctctggcggctcccgcggctccggctggcggcttcgggccctgcacctgtgactctcggccgcgctcgccctcggcccgcccggcgccgcagccccatggccccgtccaggctgcagctcggcctccgcgccgcctactccggcatcagctccgtggccggcttctccatcttcctcgtctggacggtggtctaccgacagccggggaccgcggccatgggagggctcgcaggtaccccgggacgctgggcggcgcggggcgggtgcgcggctgcggggcgggcgccgtcagctgctccaggacgctccccgcgagcggcgcttccccgcggagcgggtggagtgtttactcgaaaacagcggttggcggcggcaggccccacgcgggcccgggctcctgggcattcctgggtgcctctgagacccgatgcccgcccgggcgccacctgggggtgccgacggcccgccactgccggctgcacagacctgccgcgccgcccgggttatctgtcacggcacactgcctgtcgccctccgcccagttgccccacgacagtgtcccctccgcgcgcccgcggcgctggtcgcctcctatccccaaacacacacacacacacacacgcacacacacacggttgttctgagggatcccctgccccccaggcgccccttccctgggtgctgggtgagggcagagagggaagaagtgggaaaggaagagggctaggg

SEQ ID NO: 69327 - DNA, 1051 bp, Homo sapiens
agactttctggttttcaggatccttttatcctcttgaaaagtagtgaaactccatgcaaattttatgtatgtgagttttagctattgatatatactatattagaagttagaacattttttagcattttaaagtaatactaaaaataacatgaattaacataacatttttgtgagagatattcatgttttccaaaacaaaataaaatcagagagaatggtagggttttgtatttctgcaggtttctctaatgttgggcttactagcaggcagctcagtctcttacctgcttctgatatcacagcctccgaaaaggaaaactccattctatgagggaatgagagacaagaccatattcttggtattcttatgcaaataggcctggtctagtggatctgcagggctctggagcaccctggggatgggccctgatgtgtctctcctgcaggggtgctggcactgtgggtcctggtgacgcacgtgatgtacatgcaagattattggaggacctggctcaaggggctgcgcggcttcttcttcgtgggcgtcctcttctcggccgtctccatcgctgccttctgcaccttcctcgtgctggccatcacccggcatcagagtgagggcgggtcccagggaaagagggcatgggagggacagcagcggggattttagcagcattcccatcctggttccacaggttacctccaaagagactgggtgaattacttaacctccccggacacgggttttgttatggttcatgtggagaaaacaagtccccacctcgcaagttgggtggattctatgaaactgatgtgaagtcttgagcagtgcatagcccatacaagcactcctgatattgggacccattagtctgtgctcagctctgggatgggagcgccctctggtggctgtggctggaaataaccagaggtccttcttccgggagtctgatgctaactaaagcaggttggaggtggcctagggtatttgtcacaaaagcggagtggatgatacagacctgtgattggccagccctgcccttccctaatc

SEQ ID NO: 69328 - DNA, 1583 bp, Homo sapiens
acccctggccctgggcccacagcctctccaccgcttcattcctccctgcttgaagaccccgggtccgctatgcagccaccccaaccctcccaggcttcctgaccagggttgagaggaagcttagctaaggcccttgctgcagccctggtgctccagcatcccacccttgtccctccccacaggccctcggagcagctggtggaggaggaagaacctatgaatctctaaggctctggaaccatctgcccgcccaccatgcccttgggacctggttctcttctaacccctggcaatagcccccattcctgggtctttagagatcctgtgggcaagtagttggaaccagagaacagcctgcctgctttgacagttatcccagggagcgtgagaaaatccctgggtctagaatgggaactggagaggaccctgagaggagacgggctgggcggcgacccccacagggctctcgagaacagattctcccctccagtatgggccctggctgtggcccccattcctcaggactgcacagaggaggactggctccggctccgtcgggctcacccttaaccactattcctggctctgcaaaccccagactttgcacacagcctcaggctccacacagaaatgtgaacttggcctcagacaggctggcccttcctaggctctaggggctaggggggagtggggagccaagaggtcccatattcctgagtgcaggggtagtccctctcacctgcttcctcagacgactctggaagcttccctctaccactgggcactgagacgaagctccctgacagccgagactggcagccctccatctggtccgtaccctcgccagaggcccccctacatcaacctcctggcgatgccctggtggagcagatgggtgctctgggagtcctgtgcttcctgatccaatggtgccaaacccttcatctccccaagaagcgcagcatacccctgggacccctcggccactgcccactcggggagccttctctgtttctggggcctcccccaccatagctctgattcccaccccacataggagtagcctgactgagggggaaggggtgggagagaagatacagacatggaggaggggaggctgctctggcaaagtcttcaaggcttttgggggtccaggcctggggtcaagaaggaaaatgtgtgtgagcatgtgtgtgagtgaggcgtgtgtgtgagcgtgtgtgtgagtgaggcgtgtgtgtgtgtctttcctaggacccaccataccctgtgtatgtatgcatgtttttgtaaaaaggaagaaaatggaaaaaaatctgaacaataaatgttttatttgctttaaaagtgcctctgaaagggccccccagaagtgagcagtgcgccgtcaagcgggtgtgcagggcacacagctgcacggcacagtgtgggtctgagtcactgccggaggagggaccagggtggtctgggccgcagcccctttaacaatctgcccttcctgccctgcaggaagaacccattctgaacacaccctggctgtccctggctgccccactttggggtgacaaagaggaggcagccct

SEQ ID NO: 69329 - DNA, 1135 bp, Homo sapiens
gcctcctcctgcaccctggacgtccctactccagcttgctgccaagcccctcctcagcccacctccacctctcccttccatatttctctcccccaatactcacccggccctgctctctgggctccctgctccctgttgggccaaaggctgagagtattcacgctgacgtgggctgggcctctccccgcagggctcctggcacagcggatgtttgtgatgctgccctgtggtggggttggggtaagtgtgcccaggggtctcaggggggcgttgccagggctctcagctctcctccctgtggttctcccaggcccagcccctgcagaacctctgcttgttgtggttctgccagacagggtgagccagggacttcctgaggtgccccctgcagcaggaagctccttttggacaggcgtgtctcggacccacagtctcccccgaatgcggagtccagcctaagccttcccctagaaggtgtctggtagatgttgagtgaggtttcaggagcagggccaaggctggggcttaggatcatctctcccttcaaagacccccatgactgggcattggccgccaggctgctctgtctgctcttaagtggcaagttggggtacctcagcctggtccccagaccttgggctgcctggtgtgacatcacggtggtgcttccggtgtccttggcgatcccagcactccccactccgggacatagccccaaactccgctcgcgagctttgcttcctaagtcctcacccctttgtgaagggagcttcccgctccctccggctcagctctcctcgcctaacactatccctgcagtagtttctcaagcaaggtgtgtagaggcaggggatggaggcctcattccggagggaaagtgggagctgtagctggtgggggactttgggagccagtcagtgccctattcacaacttcccatttcttgccactttctggtttttccaactgttgttgcttctgttttctcctccctcctctccctctctgtctttctctctctctctctttctccagcctcttgcgactctctctgccttcctcgcctctcttggtctgcctcgccctccccatctccccatcatgccccccggcccctccctagccttgaggccca

SEQ ID NO: 69330 - DNA, 1021 bp, Homo sapiens
cagtgaacctagactggaaccaggtcttggacctattgggactggtcctctgcctttagtcccctgatgtccctccttgcccagcagggccaggctcagaggcaagctcagagctgcctcctgatgttgcacctggaatggtcctggtgcagtgttctccagaggcctctgtgtcccttattcggcgggtgtctctgtggccaccgggtcttacagtgggttttggggcagggaagtttgcatgtctaagctgttcactccactttgacactgaagttcagtttccccatcagtaaaatggggagaaaattccaagcacacttctcagagcagagcagaagaggttgactatggagaggagaatgaaggtactgtgctattatccaccccctccagtttgcttagggataatggacctcagctttagtccttggtggcctcttggcatggaagctggaactttctcaattctgatataaaacccttgagcaagagagaaactcatgtgtgatggggtagggagtggggaccctctggtagctgtgggcaagcatgcccaaggacttggaagacagaagcctgtggaaccccatctcctctttgccttctttctcctggcctttcattaagggctggtaattttgaagtcggcaggggcctgagagaaggtgagctaatgcaaggcccagggtcacacagccagggaatggcaggcggagggggccagaaccaggccttctcactctgccagtgcccattctgctggcccaccctccacagcttggctctccctggcctgccctcagttagacttcggactgaggcctccagtggggtgtggggtattgctggaagcagggcctgaataaagtctggggctagcgggagggcatctgtcctcccggaggctcccaggactgtgcatttgtgtgtgttggatttgttcactagatggggcacttcctttggggcaggaagctttgatttcctgtggtgatggtgaggaggggttggtaaggat

SEQ ID NO: 69331 - DNA, 1077 bp, Homo sapiens
ctggctctgctaagggccacctcctgccattttggctgcaaagaactagtgtcttttcttaccattggtccttgcattactcccaactgggcgccaccagccttttcatcaaatcctccagccatctgggcagcaaagttctgcaaagaaacccaacaacgttaggaggttgaaaggcactaggtcttccctacttggctaggtaagctctatatggatacaaagaactctactgagataaactctgattgttggagactaacctatcattgatcagaattaccactgatgcctggaaagtaattttgggaatggattattagatgacagtggcaaaatcatttcactggaagggaaagtgttatttgaggaagtatcagttccttgcatttcattttataaaattatttttatgctctaaaatatgacagatgttatttaacgtatatggagaaacataaccaaaccttctaagggtgttctttattctttaagactttagtgcccagcaaaagactaaaatcaacagtcttggaatatttcagcaagagatgtagtaggcatctgtgatcccatttgagtttaagaatttaaaatacagcaaacatcaaaatagcaaacctgcaaaaactaggcaatcatataatttgttgattggtttgattccagaattgactttagccacacaccttcactcagtggagctctttcatgagagtgaatagttgcttggaatgtacttggcaagaaccaaggataaatgtcttccaaggacagtggtcactcgtcttccagggaaatacaagtgcccagtcatccttcctcctatcccttacacccaccccccagcatcaactacgtggtacagatgccaggaagccaggtaactgaggactttctttatagaatcccagttagtgaaaaaagccagcccttagcaccacagtctcatgcctaatatgtgactcttctaaattacaggcctgagggcaaagcccatggacaggctatgtacacactgctggcagccctgggagccagccaggtaagtgcaagcagcaatttaaaagccacatt

SEQ ID NO: 69332 - DNA, 1064 bp, Homo sapiens
gcccatcgcagttgcaagtatttgcaggtccctacgttgcgctagaatactgaacttgcaaagtgttggctcggagaagtttgcgcacagatataaatgggctcttttccaccagctttgataattaggcgcacatgcacacagctcgcctcttcgaagcacttcgagttcagcaaaaacagatctcaactcatcgaacttaggtgaagtaggaaagagagagcgcgagcgagggagcaagcaaacgccaaagggttgacttcacagcctgtccaaggcttggtggctggtgggctcaaagcagagttagacaaaggggactaacactctgacactggtgggctgaaatcccaggccacaaagaacggcttccgataggccctctgagacctcagcgcctctttagggtaccctccccctcccagctggccctggagcaaggtgcagccctagcgctcatctcgacttccctccgtccgcctgcgcctctcttctgataaagggtacagaaacttccagtaggagaggccatctgaaagacgataacattccaaccagaccgtgcttttcaaatgcccccgaaaatagcgcccccttccccgcggtcttaccccattccccgccgccccgaggtactacaatgagttacttttctaaattctggaactcaccgagccaggctgcgtggtgtgtgtgtgtgtgcgtgtgtgtgtgtgtatgtgtgtgtcagggaaggggagcaggctggtcgattgctacggttgctacaactatttcaaccggtatagttagagatggctcttgtagtcgggtccaaatgctgttcggactgcacctttctacccctcctttggtaaggtccactgtctgggattatattcaggacaaacgaagcctggaaagtgtattaggtagagaggatttttttttccacgtgtttgggcacgtttccgacggctgggattccagccctgtctttgtatgttacagattgtaaatcaatcgcagagggaaactcttcggcggggggaataaaagttctctgccttcgaggctctgtgggc

SEQ ID NO: 69333 - DNA, 1910 bp, Homo sapiens
gaggaagtcaaggcagagattcaaagttaaatttttaaggccactggcttagcactggcttggttttagagttaaggcgacaagaccttagctgcagaattttctccattccaatctaaggagtagccatcaattccttacttctggagattgccttatcctttgcagaacacaagtgctaggaaaggaaaaagtgtgggagagtggcacacaagaagtccagagtccagtccactggagacccctcattcaatttacttttattcttttcacaaatacctactgagtaatcgtacgcaaatcctatctctttgatgccttccctgatcacatgatcttaatatctctcatctggacatctgcagcccttataatcagaaaataatataagtccacatggtatttgtattgtaattcaccttttgcatcatgaatggactgagacatgtagccaccaagggcaggtaaatgatttggtgcttttttttcaaaccaggaataaaagctgtttctttctggcctgccagtgatgaggtagaggtaattattcaacatttatttagaaagacaacattgtgggccaggcatagtggctcacacctgtaatcccagcacattgggaggctgaggtgggaggatcccttgagcccaagagttcgagatcagcctgggcaacacaaaaatttaaaaaaaatatattgtgaagaaaggaggactgctcatggcagcctgcaacctcctttgtggtcccaaatcgttcatctctggcctcaaacctaacgctccactctacccttaacaaaaacaccttcctcagcatttagcatgctctttggggtgggtgggggttctcagtctctaccaggggccttgtggaagtattttctctacacagctttctgttaaatagtttcctccatcctttttatttccggtgatattgtgcatccctcatagactgagactctgaggaagcccctcaggctaggtgttttacaagcacgtgtttaagcactggccttagtcgccctgaagggtggagtgaaaagatggtttgactatggaaataaaagccaccttgttctcaggtttttatagcctgctgaccttgtcctcaggatcttagagtctgtattagagtctgtagaccttatagttaactaatttaggaagctaagcaaacaccaagcaatataccttatcaagaaggcagactcataggcatgtagttccatacagaactagaagtagaggatgaaggggcaaaggtggaggtaagtcagggataatgttgcctttatctgcctatctatatgattcttcctaatttttaaaaagttgacttatttaaaataaactgtggatcttgctttcttgctttgactggaaactccctggtaaaaaggacttgatggtgtttgtctctctgtccccctgtctctgtggctgtttgctctgtctctgtctgtgcctgtgtctcccgatccaagctggaccagtgattggatcctcggtgtggtctggatttctgagtccaccccttacccaggagtctgaatactgttcattcatttatttcatcccatatacctggaagtgaagcctggaacgcaaataacatgcaaatttgtggctctttggcactttaaaaaaccaaacctgtctgtggaggctgccaaagaactttcctgaggccaaacacaccaatcaggacttccaacccaccctgctaactgtggccttctgttcttgctcctctcctgcacccctttcttctcacaatataacttcgaagtgaagtgcttgccacttttctacctgtaaaactcacactcatgacagtaaaacataagaaagcaccaacttctcaaaaatctattattttgggggaacagttttctctatgttgg

SEQ ID NO: 69334 - DNA, 2793 bp, Homo sapiens
atgaaaagaaaaaaactacatgtaaccaagaatgaataatttaaaagaccagaaatacaactgagactgtttgttgaaaaccttgcaaaagaaagaagtatggggaaaggcgtatcaggtctagacaaaagcattgaaaattaagggtgtctctgtgtccctacagcaacacatgccatacttccggaagcggatggtctgggagatcctccaccgaaaactcttgtgaagactgtctcacttagcagaccttgaccatgtgggggaccagctctttgttgtctacagccagagaccttggaaacagctgctcccagccctctgctgttgtaacacccttgatcctggaccaggccctggcgagatgcattcacaagcacatctgcctttccttttgtatctcagatactatttttgcaaagaaactttggtgctgtgaaaggggtgagggacatccctaagctgaagagagagactgcttttcacttcttcagttctgccatcttgttttcaaagggctccagcctcactcagtccctaattatgggactgagaaaagcttggaaagaatcttggtttcatataaattcttgttgttaggccttactaagaagtaggaaagggcatgggcaaaaggtagggataaaaaccaccagcatatacatggacatacacacacacccacacacacaaacacacacacacacacaattttcacgatgtatggtcaggaatgtgactgtaaactggactttggggcccaggcataagtcccttcctccaggacctttcctatttatatgtccctatacaaaatccatctgcttttatacgtagctgttttatcatctgtagcttcatcctatccggaggcacagcacatgagccctggacaggtcccaaagttccaagcagtcctttccgtgaaagcaggggtttgcatgtgctaccaacacatgatacggggaagacccacccagggagcggtttcagtggcgcaacaaagcaccacttttactgttgcctacttctgaccaagaagaaaaaggaccttagtatttagcataaaattccagcgctggatgaatgcagatctagtttggtctgtggctagtttaaatatgtttctaaccacagagaatttcatatatatatacatatatatatacacatacatatatatatatatatatgtatgtataaaatttcacagggatatgcttttttttttaaagactgaatgtgttcaccatttagcctgtagatttatttccattttccaaattccagcacacagagatcccagcccctatgagtagggtgtttgtggactacctaatggaatatttttgaggcctggatgaactttgccatatgggtagaggttacagagggaggtgatattttcagctaaaaaaaaaaacgggtggagtttggactgatcaacttgagatttaaaaactgctattccttttgttctttctagcatctctccccaccctctgagagctcctcaggcttagatagtgaagtgatcaaatgccagtgtcattttgtacttaagttccaaagtaggaacattttatacttttttctgtattgtaataggtagttttgtatgaaatcttttctcctctcccgttgtaccgcattctttccagcattgtgctttttccctgggcttatttgaaaattttactgttttatacaagctcgtttagtacatttttctatgttttaccacaagttacaatttgaaaagaaaactattttttttaaatattccattgttaactgaatgttactgtttccactccagcaactacatgtcctcccttcaactgcctgccttttggggaaagaccaccttttgtgtgtttgttttttctctctctttctttccctttctctttctatctctctttatttttctttctttttctttgtttttgagttttctataggaaataaatagctttctatatatgagttgctggggaccttcacattctcttttagaaagctgtggcatgcagtctcattgcaggactcctggaatattgtctggttcttggtatttactgtatgtaagcaacaacttgaaaggtggcaatatggtgtcgatttggactatgaatcaaaagacctttttcaggttctttcactattgtctgggggactcagaacaagattgttctctgtatttattgtttgtccatttaggtaacatctgtcttaccttcctcacagactttgtacagaccaaagcaacaaatatttattgccatgtatagcagaaaatgaaacatgcaacaaaagcactttgaaaaatatataaggaattgttgagcctgtctgaatttgggccccctttctgactaatgcagttttgcacaaggtagaagttagtgaccctgagaccatcttaccaccctggacctggtccaaatacagacttacacagtggaccattctttcctgagctagccaacaagagcaggagtagtatctggaaactttcccctttgtttaggggtaggctttgatgaccaggaaaaaaaaaaaggtatttctgcattttatggcccaaaggcatgttattaatatcttatgtaatttactttaaactaaataagacttttttctcctgtgttcccctttctcctgtgtccactgctcatattcacctgccttccctaaaaaaggaatatttgagggatgataagcactagatgccagctatagagacctcaacagaaaccataatcccaagaatcactccgagaccctgaa

SEQ ID NO: 69335 - DNA, 2201 bp, Homo sapiens
tgaagtgtttctaaatagaactagccctgattaaccagggatttatgcaaggtcacatggagaatagtagttattctccataaatgactccataaacatgttgcttgcctgtctttctctaaaagtttagctttaattctgataatttgttccttgaattggcatgtaagaaaaattctgtgtgcatgtttgcagtgagggaaacctgccttcctggtttctataatattactaggttagctcctgtgagtgaatgacctgaaccatactattcaaatgctgctgttagtctcttggactttgtggttgataagggtaaatttaatttgaaaatcagaatggggaggtcaaggtgaaaatctagagaggtaaaattggaaaaatggcttttgtccccccaaaagttgtcttgatctctgctcagaagtattgtcatgcccaggccttttagaacattttttctcaagctaattagaagagttcaaactataagcatgagaatggctaaaaatcaagactttactggtagtgaaatgttttatttctaaaaacatgagaaaacaatagtttggctggtttactggggaagaaggaagatacaaatagcattggtcgtttatgtcattgtggtaatgtacaggaaaaagattgaatccttagtttgaaaacattgtaggcttttctctgaaagaaaagcttttttcagcttcagcctggcagctcttcaaataaaatctcaaaggaacaaggcactataaacaacccacccatccctaaacatgactgcatagacaagtagatgcttatggccaaggctgcaaaggcagcaggaagggtagctccttaagcaccaagagccacagtgagcaaatagaggcaagtgtgggtcccagaaaaggtgacaggtggactaatgttgacagttagtcctcagattgtggtatattggtgagacaaatagcaagcacaggactcatctacttttagctcatttcaaagggaatttaggatctgctggtgctaagagagtcttgtttgaggaaagggctgttgccaacttggcgtcggggacagttgtcttcacaaaagtcaagcaaatgctgtgaccatcactgctcctctttcatcttgaacactgtgatcccttctctcatttctttttccttcatcttcagccctcctctgtgagatgacatgtaggacttttttgttctctcttagctcatttttttggtttaattgtgtcttggctgaactatggcaattttcctcatttggatggtgtaatagctaaaaaaattgaggagaaagacttgaatccagattctgccttggatgtcagatttacattctcagctaatgtggggagcattgaggtcaccaaactcccttctactgggatctaggggaaatgaaaaagaacccagatcattccttagagctaattaactagttgactttggaggccattttcctctcagttgagaaactttggttgggtgcagcaatggaagaggaattctcaaagggaacagataccatggtgtctgatgactggggttctctgttcttgttcagctgtgttggtctttagctttctagtgaaccctctgaaggtgaaaaaacaagcaaaactcaggctgtgtaagtccagctaagcttccttggtttctggaactctttcctcttgaaaaatagaatagtgatgtatagcatgacactcatttatgtcattcttttttttttttttcacttcagacttacgattccagaggtaatctctgataggcacctaggggagatgtatttccatggctgtcatgtgcttcaccgtccttatctctctgcctgattcctttcacctcctgcttcagtccttatttcttgttggaatatataagctgtctgcccctatggaaggtttcgcttacagtaactggcagatcatctgcttatgtcttggattgaagggtttaccctataacatggccaacattataagatgggtagaaggccagaggaatcagtgaattccttcttgccaatttttcctcattagagaacatagtttacagcctagaaatctgtacttgctgggaagatcctactgcatttatggctgccttcggaaacctagaggcagtctttagcaccattatcctgaggggcagagttagactgaaaacttatagttaagaaat

SEQ ID NO: 69336 - DNA, 1819 bp, Homo sapiens
tctactcattttagatcacttatattacgaatgacaagctttccaaaatcgcctccatttatgtatgatattttttaaatggacattgaaaaagttatattattattaaatatttgaggtattgggggagaagttacggtcttcacctcctaactccaatttattttaagtatattaattacactacagtttttaaactgatctgttcctaagcctaaacctgtaggtacctgttttattttagaaggttatttttacagcaaaagaaaactgggttgggtatcttttcctaagtaccttctttgcataagcatccctggctaatctgggtatactcaagcttcacagctgtggaggatttttagtttctcagtgtagtaatcattaaatattttagatatccatatcctgtttttgtatgatcaagaccttccaaataatatttgccaataactattgatcatttacctcattagtacgattcatgttttatgtgttttattcttgtaatagtcatcatatctttggaagtagatatgatagttcaccattctgcagataaagaaacaaggcatagaaagatttaaaaacttgcaaggttatacagctagtaaacagcagagccaagattaagacccaagcattgggtcttatctactatatcttaactacctcagaatcttaaattggatactggtcttaggatcagatatatagaacttaggagccatatatcatgtccaggatgctttttttctctggggccagccccattctttttgccactggttggtttataagataaaaatttcagaagctcatcactccctgaataatatctgtgaccaagaataataaggaaggcatggtttgttactgtctttctttagaagaaaccctctttgcctcttttggctcagatattagaacattggttcaaataatggaaaaaaagagctcaccaaatcaaaggaggaaattaaatcaaggatagttataagtatccactgataagttatttttgatctgtggtcctttgccatttatttcctgccattgctggtggtgcgaggtcagttactctaaagggatagtaggctttagtttgttgtaaatcatggaaaacctcctagagggcagcaatcagtaggatatgagctgagttcttgctatttactgtggcatttacctcagtgagattccttacagagacagcattcatcaggacatattttccattccctgggcccatcagaggctggatttttagcaagctaagttaatggaaattacattattttagaggagatgagaagaaggaaagattctttgtctactttatccctaccacccctagccataacttttgtagaaggagtgcatttcttctcagttcagaatgatgttatccttgaaaatgagtgccagttcacatgtccataataatgatgggagctatcttaaaaagcaccattttcaaagtaccatacttcgtaggctttcaaagttactgcccttgagaagctaacatcctgatggagtattattaggtatccttaagtattgatactcattgaagaatacttaattttggccagacacagtgggtcatgcctataatcccagtgccttggatggctaaggtgagaggatcacctgaggccaggagttcaagagcagcctgggcaacatagcaagacccgatctctacaaaaaaattaaaaattagccagccatggtggcatatgcctgtagtcccagctgttcaggaggctgaagcaggaggattgcttgagtttaggagtttgagtttatagtg

SEQ ID NO: 69337 - DNA, 2989 bp, Homo sapiens
gatcaccggaggtcatgagttcgagaccagcctggccaacatggtgaaacctcgtctctactaaaataaaaataaaaaaaagaaaaaattagccaggtgtggtggcgggtgcctgtaatcccagctactcaggaggctgaggcaggagaatctcttgaacccgagaggtggaggttgcagtgagccgagattgtgccactgtactccagcctgggcaacagagtgagagtcaaaaaacaaacaaacaacactaaatgcctactctgtgccaagcactattctagttgcagatcatttttttttttttaagagacagaatctcactatgttgcccaggctggtcttgaactcttggctcaagcgattctcccacctcagcgtcctaaagcactgggattacaggaatgagccaccatgcctggcctctgatccaggtctcttaactcccaatttgatgctctgtttacttgttctctatatttaatagttttctttggaaaagtgttcactcttcttctttgtgtttctgtgatagatcctgcctagttaggagtttggagataaggaagtttgagaaaaacaagaggctctaggacaattaatcatgtctgtggctctgctcagcatatcacttgggttgtcagcagagccacatggacctagaattggcctgtcatctttggaaggaagttgtgttgctgattctctgctttggctcattggcttgttagccatttgatgtagattattttgtgtgtggggatttttaataaatctttcaatctgagtcatttgggaagagcaatgttctagcttaatgtattattttgagaagtgatgtcctctttcacgtaatgttggtctcatgcaagtagggagctatgccaaatgtagtatctctgctgaactttgggtcacctttttaactaatatgtatccatatgattttaactaatatgtatgcataaggattgtgtctccttaattcctagttacaattattttatgtcatttagattccttttacttattccatacttgtaaagcactcatataaacaatttaaatgattgtttttattgatgaaaatattttaattttctcataagcctcctgctcatttgtcaaatttttcttttcctacccatagttctactttcttccaggcagagctgtggatcaaagaattgtaagttatttttggtatcatttttccttctcaatcagttcatttttagttagaagaaatcaaacaattagctaatcatcctgcttattttttgccaataagaagtacctgtttaggctgggcgcggtggctcacgcctgtaattccagcattttgggaggctgaggcaggtggatcatctgaggtcaggagttcaagaccagcctggccttcatggtgaaacctcatctctactaaaaatacaaaaattggctgggcatggtggcacgcgcctgtaatcctagctacttggaaggctgaggcgggaggattgcttgaacctgggaggtggaggttgcagtgagccgagatcacgccactgcactccagcctgggcaacagagtaagactccatctcaaaaaaaaaaaaaaagaagtgcctgtttatacttttaagttgttgggttttcaaaatattgttggagttggaacatttctatacttatgtttattaaatctataacaattgttgaagctaaattaaattggaaaaatagagttagctattatataatagggaaaataaatgatcctattttggcatttgtaaaactaatttattgaataattcatatttctggactttgcaaaatcactgaaagcatttagtctcacttaaggaacttaagttatccaaacccctcggtctcggtaattttttaaaaatctatcaaaaatgaagtatttgaattaaacttcagtgatatcttgtattcgtttctcctttagggttcaatcccatttttggatttccagactgaagtttcgctttcactataatcttaaaagcatgttaagaaaagaactgtgtgtttacaaatgttaacaagtcatctgttcacatttagcagcacactaatatttttagtaatttcagtaaaaataggtcgggtgcaatggctcacatctgtaatcctagcactttgagaggccaaggtaggggggtcgcttgagcccaggagtttgagactagcccgggcactgtagtgagaccctatctctataaaaaataataagtaaaaatggtagagtaatttcagtaacattatgtggtttcactctatgtcttaaaataaggatgataagttagtgtaaggattttagactttctttgtgagggtcctgtatttaatattcagtgtacatcaacaatatgtttcataatgagagtggtctacatttggtcacgttccttttcattttctagaactagtgtttatgattctcgagcacgagaaagattgcgccagattgaagaacagaaggcattggccttacagcttcaaaaccaggtaaaaaagaaaattggaataatattacaaataaatagtacatcaaagtagaaactattttggaaagttacccagatttgggtaattgctgttgtaattccaagatcgtatggtagcatagcatgttatgatatgtcgtaaatgttcttggtctgtccagtcagtgctactcattgtacataagacaaatatagatagtcccctacttgtgatggttcgactaatgattttttgactttacaaaaaagcgaaagcaatgggcatttaagcacgctctttgacttatgacaggtttattgggacataaccctatcataaatcaaggaacatccacagatttctttatcccacttactctgaagttttatctttcagagattgcaggagcgggaacattcagtacatgattcagtagaactacatcttcgtgtacctcttgaaaaggagattcctgttactgttgtccaag

SEQ ID NO: 69338 - DNA, 1022 bp, Homo sapiens
ttggagtcagatctgccttctgatcttgggttggaaaaggcttcatgtagctttggacaagttactcttatgaacctcagtttccttatcaataaaatgccagtattgataccttacacttaattgtgaagattaacttacagataaaacacttatttttataagtgcttcacatgaaatgccacaagatgcatgcaactttcttgggaagaagttgatctctcaggtaaagagttgatctcagttccttaatggttctttactaagactgcctttcctttacggaggatttcccctagtgatgactaaagaatgagatggcaggagaaatggtctgttgggtaaggctgtttgagcaatgctctttgtcaaagttggtgcctactctgctgaggcttggtttattggctctctactcttaattctccactactgcctctcagttaagttccagtaatgaagatctgcttttatttcccagaatatgctatgctgtgtcatacctctttgcctttatacattctgatccttctgtctggatgtccctttctctctctgtctacttggtaagctcttattttgcttccttttctttctttcttttttttttttttttttttttttttgtgacagagtcttgctctatcatccaggctggagtgcagtggcacaatctctgctcactgcaacctccgcctcccgggttcaagtgattctcgtgccttaccctccagggtagctgggattacaggcatatgccaccacacccagctaatttttgtatttttagtggagattgggtttcaccatgttggccaagctggtctcgaactcctgacctccggtgttccacccacctcagcctcccaaagtgctgggattacaggcatgagccactgtgcctggccttaattttgcttttcaaaatctcatccaggtgttattttttttttctcagaagatttctttgactttgccagataatgttagtttttccctccatccttctaccttgtttgtta

SEQ ID NO: 69339 - DNA, 1131 bp, Homo sapiens
tcttttgtagagacgggatcttgctatgttgaccaggctggttttgtactcctagcctcaagcgatcctcctaacttggccttccaaagtgctgggatcgtaggtgtgagccactgcacccggcctgctgtgttctttagtccatcttccatgctgcaatcagagtgatctttcagaattcatgtctgatcattcattaaaggggtttaatgattatttgttaacctccttcaagggtggtttatcagacattgaattaagctcaggctccttactatggtatacaaagcacttctttcacaagcctcactttctcacttttaacaaatatttactgagagcctactgtgtgccaggtactagtataaatattgaggataatagggaacaatgtgaagtccctattctcaaggagcttgcattctacttgaggggaaggatgaaggacaatgtgaagtccctatgctcaaggagcttgcattctacttgaggggaaggataaacaaatgtatatgccttgtgataagtgctatgaagaaaattgaagcagggtaatatatagagtaggattgggaggatactatttgtatagggtggtcatggaaagtctctgataaagtgacttgagcagagacatgatggaggtaagagggagccatatggaaatatgggactctttcatgtgtttttataagctggactattttcagtttgcaaatacaataagcatttcttaccttcacattcagtgttctttttgcctggaatgtcctccgtacctcaactttgtctgtcagtagtgttttatcttttaggtctcaactcacatgtgaacttctgcatgaaactttacttatctggaggtatcaaatacttcttcctctgtaatacagtaatagtaatccatagtaaccattactatgattgctatgcctttgccatatatggctttgggaattcaattgctaggatgagaataatatcagttttccgttgagaagattaagagtaatgaaatattctttctcatctcagttcccctacttctttgcagctccccatatgttctaagctttaaatatttcttaaaattctctatttgttaagtcttttggggagacttcatagttt

SEQ ID NO: 69340 - DNA, 1224 bp, Homo sapiens
acagccagttggtttttttttttaagttttcttttgtagagttggggtctcactatgttgactgggctggttttgaacttctagcctcaaatgatcctccccgcttgtcctcccaaagtgctggaattacaggcatgagccactgtgttaggcccataattcttaattatcttaaggattctgcctgagctttggcagagctaggattctgtttacatgctagtttgagaaatacttgccttattggatgtgtttaaactgttttttttttttgttttcttatagacagttcaagaagaagaaagagagatttacagacagctgctacagatggtcacagggaaacagtttactatagccaaacccaccacacattttcctttacacctgtgagtcacagaagcatatttcagatgaatttaattctacaatttattacttgatattgaaacaatattcttctcttgctaggtctcgatgtcttagttccagtaaaaatactttgaaagactcactgtttaaaaatggaaactcttgtgcatctcagatcattggctctgatacttcatcatctggatctgccagcattttaactaaccaggaacagctgtcccacagtgtatattccctatcttcttataccccagatgttgcatttggatccaaagattctggtactcttcatcatccccatcatcaccactctgttccacatcagccagataacttagcagcttcaaatacacaatctgaaggtaaacatggtatcatataactacatttttagtcctaatagccaattaactgttcattagctcattacaggcaacattgtaatatacatataaataaatgagcataccgaatctgaaaatatgaagtccgaaatgttccaaaatctgaaactttttgaataccaacatgatactcaggaaatgctcagtggagcatttgggattttggatgtttggatttgggatgctcaaattgtataatgcaaatattcaaaagtccaaaaaatccaaaatttgaaactcctggtcccaaccattttggataagggatactgaacttgtaagacatgtacttacatactttaaatacatatgattcagttaaccatgctgtgagtaaactaaatccacaaataggatattctttttttcttacctcaagatgcaaatgatttgatacattttatttaaacaacttcctaagtacagg

SEQ ID NO: 69341 - DNA, 1013 bp, Homo sapiens
tatgatcccagcacagtgggaggccaagacaggtggatcacttgagcccaggagttcgagacgagcctgggcaacatggagaaaccctgtctctacaaaaaatataaaaattagacgggcttggtggctcatatctgtactcctagctactggcgaggctgaggtgggaggattgcttgagcccaggaggtcgaggctgcactcgacttgctttgtgtcactgcactgcagcctgggcatcagagtgagacccatctcaaaaaaaaattgtttttttaatttgatgaaatacctattcttcttaccaggaacaatttttcttcaatataagagaaaaatcaaaaagctagttaaacaatatacatcctttcattatgagtaagaccttttttgaagttacagactcctgaaaagaaagatgttctgttgacacttgggttgttatattaattcagtaaacctaaaagaaaaagccaattttgtgaatgtaatgtagcatataatttgcatgataggatgtgtgcacatatctgttagattacatatttaatgtacgtctaatgctgtggttgcttggagatacaaatgaataataattaccttgcatttaaatagcattagagcttccagtgtactttccacgtgtattattgtttttaatccttttaactcagcaaaataggtagagatgaggtaatagtcatgttttacagattaggaaaataagggtcataggtcacatgactagtaaatggcaggcctagaacccagaacttctgaagaggtttggtcaagtatgctttctgttatacaacacagcaatatggttcctgcccaatgaagcttactgagcatggagtcaagaatacagcattacctgctaaataattacataatttggtaatcagtgatctcttaggtggcaaaacttgattatttgtgatatggttactaaaaatgctgtgcatatttttggtttaaagtttgtattgaggccgggcatggtggctcat

SEQ ID NO: 69342 - DNA, 2217 bp, Homo sapiens
aaccctccctctccaaaacaatagaaaaattaggcatgtatgatggtatgcacctgtgatcccagctacttgggagactgaggcaaggagattgcttgagcttaggagttcgaggctgcagtgagctatcattgtgccactacactccagcctgggcaacagagtgagaccctgcctcaaaaacaaacaaacaaaaacagtatctgtagtttcctcttggtctgtctctagctttgtttgatcccatcagcaatagaacaccattcagcaatttcattgggattggaaccacctttttctgtttaaacagactgcctgatcttctgcttttccccttgcattttaaagctgcagtctctgtcacatgccgttgagaatgctactctgacttatccttggtctcaaatttcacacctgttagggtaatttgcatttttgacagaccgatgcctcagatagatatctgtatttagatcatgccctaatcaaattttagccaaaatgtgtgagagacaaatatttctactgttacaactttaaacttaagtataataattttctagttctttactaagactcattttcattagcatcatgtttctatcctcaaaattatagtaatagatgctaagcatagatactgattacaaaggaacaaagttacaattcattttgaaagtaaattagcttattttaattatcagactaaggtcaccaactgttgaattaacaagtgctaataccagccatgacttcttcttttttcctatttaccctaaatcctgacatcttgattagcttacagaagcacaaaattatattttggaaggctgcctatttggatagagcatgaaaagatacattaaatacttttaatagcataaatttacaatattgcgaaaagttctatagtaatatgttttaaaagaatatcttcaaaataatgtcagcattagaaaaaaattccagaaatagagaattattattcttgtgttttcactggagctccttagagttccataacttaatgtctgaagttattttgagggagctgttttaaattgtccaattctgcagatagggagaggaggttatagaaattattctaccactcctagctgaaacttcaggaggtttttgatatgccagattgtaatccacaagttagaaaattcaaataataagtaattctcagttaatctgattgtagtagcaaacattggagtaataatatgtttgattatggcattagatgactgaagattattataccagaaccagatatatatgatgggtcattccttgccataagccaaccagaataagcagcaattaggttatctctgctctttgagagagtacctgagtcttgaacatggtaactaaaacgaagaaagtgacactagctgcttagtaatcaataactgttgttcatttgaattacaattctcactggccccccacctgctttcttactggtctggcctaccttctttcaggcccaggcctgggagtgcttgcaagatatagttggggtaaaatgttgacttttggtggacaccacggagtcacattgatgcagataaggcacatggctgtggcaggattcagctccttcatcaattttcaggttagtatggctgaatcaattatagtttgtagaagttcccctactgcagactttactggcagttgagactgggatctttcttccatgagagaaatggtgacatgccacattactttggaatacaatggttggtcatggttgcagtcataaggagaaccacctgtagaatttgtttaatttattcaaacttttatttttttagataatccttcctcagacagttttcttggctcaggcgatttaagaacctttggccagagtgcaaatggccaatggagaaattctaccccatcgtcaagctcatctttacaaaaatcaagaaacagccgaagtctttacctcgaaacccgaaagacctcaaggttcgtattttgtcatcttagttctcaagcccttcctcagacataagagaaagtgactaaaaggtagatagttattacattgggattttaaaagagtaacaccatttttggactttaaaccttaaggatatgaacaaatccattttacattttcaacttctcatttacttagtgctgaattttgatgatagccagatcttactagaagagagaattttaagtaaa

SEQ ID NO: 69343 - DNA, 1059 bp, Homo sapiens
tatcttaagtcctaatgtaatatttggccagattccttggctttctactcagttacgtaattgttgagaattacatttttcttatgtttatcctcataccacaagttgattcccatatcaacagtcttacactaaaagcttcatctctcacttgagtaccttttttttggagaagaaaataattataacagttactatatatatggtgatgattagagaataacaatagtaaataataaagtcatactgaaatgggatgctaaattacagcttgaagcagaggactcaaatttgtgcctttaacaaatctcatctagtccctgatcaaacaagcttatggcatgtcacagacatcaaaggtccctttctaaaaatcaggaatttaaatctgtgaacgtcagtggtctatatatatttttttcttataatgaagtctttaattaaaacctactttttactatggactttaaaaaaacttcttcctctttccacactcattccaattatgctctctcctttggatatattcttttctgataatccccacatcgattgcagtggtcatcactttgtgccttacctcttgattgggctagacacggaccctcagtttacctgcctttatctgctgatcctgactttattggtatttgtcttctctctcaccctgctgtcccctccttcaccaggatgaaaatgagcagcaaggcccaaactttaggatctaggatctggaacttctcctttattactttattggattgacttctctagatcaagctttttaaaaatctgcctctcaatccacttaagattagagtatttaaaacattgatttttttaaaaaataaaattttaaaaacttttttacagtttactttgttacagcaaaactttacacgcctgtaatcctagcactttgggaggccaaggcgggagtgtcacctgagcccaagagtttgagaccagcccaggcaacgtactgagaccctgtctctacaaaaaataaaaataaattacctggacatggtaacgtgtacatgtagtcccagctactga

SEQ ID NO: 69344 - DNA, 1728 bp, Homo sapiens
cttgaagtcctgggttcaagtgattcttctgcctcggctttgcaaagtgctgagattataggcatgagccactgcacctggcttatagtcttgtttaattatatatttttcctagtatatgtttttattttattgttaaaaaagtgacatggccgggcgcggtggctcacgcctgtaatcccagcattttgggaggccgaggtgggcggatcacctgaggtcaggagttcaagaccagcctggccaacatggtgaaaccccgtctctactaaaaatacaaaaattagccaggtgtgatggcgcgtgcctgtaatcccagctactcaggaggctgaggcaggagaatcacttgaactcaggaggcggaggttgcagtgagcagagattgtgccggtgtactccagcctgggcaacaagagtgagactgtctcaaaaaaaaaaaaaatgtgacttaagaaaaatcttctgctttgtttagattttatcttccaggcaaggacatttggaccgatcttttacatgttccacaagaagtgcagcttataatccaagctattactcaggtatgacacattacttggagtcaagggactttataccttttggatttcttgatagcatatcgtttatgtttatcatctccaaaagtaaaaacattgtcaaaaacaagatggtattttcttcactaaaacatcatttgaatggcttttcctgtgtatgtggttgctatgatactttactgattttgtctcatccaaatactggttttctagtgggaaagtgttttgagaatctaactgtccattatgccattgtaaaaagcaatacaactttgtttttgacctttttttgggaatatgtgtatgtgatgtgtgtaaagggtgtttgttttgcgttaatttaaatcacagagcaagtttatttctgttctgcttgaaaccatgaaacctgaaaatttatttcttcctgagcttgtccttctttcagggcaggaaatgttaactacatgtttctgtctagcacctgccacagccatatgcttgcatattcaagggcttttctatttaacttgtgatccatgacagaagtcagcattctctaggctgttcttatcctgtgacctgcctgacttatctatcatctgccctcttactagggtttggacttccaagggtcttctgcccctgccttgagaaactaagagttttgttggttagcctcttggctgtaggactcagaaagattacagtagtcttcccaggtctttttactcctcatgcttcagtctccttgccttaccacaatatgggaataccagttataccattgaaactgcctcaacaggaatttttttttttttttttttttttgacacagagtctccctgtgttgcccaggctgaagtgcagtggtgtgatctcagctcactgcaacctctgcctcctaggttcaagcaattctcctgccttaacctccctagtagctgggattgcagacacccaccaccacgcccggctaaattttgtaattttagtagagacggggtttcaccatgttggccaggctggtccgaactcttaacctcaagtgatccgcctggctccccctcccaaagtgctgggattacaggtgtaagccgctgcacctggctggatttttataaggataaattgggatgataaatatggaatgcagataataattattcttgttatttggcttccttag

SEQ ID NO: 69345 - DNA, 1043 bp, Homo sapiens
ggttcgcggcggttcccgggttttgcgttccgcgcccggccggaaaccccttcgcatggcagccggttccggttcggtgagtggcggcgggaagctgggggaggggtgaggatggagggagcctggtccaggagactgtgtcggacccggtcagccggcccgggctggactgggcggaagcggggagcactgtggggccggcgccttttcctctgccccgccccctgggaccacctcccctcccccctgctgtccggtggccgcgctgtggccgccggtggccgttaggctacctgaggccgttccttctggtctctctctcctgggccgcggagagaccgtctccctgccgttacagcaggccccatcccagcgcccagccgtacttggggaaaggccggttgcgattccggggctttcccgccagagctgggtcttctctggggagagctgttttcaccgggaagctcggctttctgtggtaccggcttcatctcccgccttccttgagacccgagtgatatttcttgactacttctgcgtctcacgtaaacatttctccaactctcctactctgtggtatctccctgagatgtgatatcgctagtgccaccatcagaaagaaacgtctggaccctcctgctcaggttatgaaaatccccttaactgccacaatttgcttacctggctcatcgcctcctggtaattcccttgaaccgtctctttcttggtgtaccctaacgtgatctctggatctatgcctcgtttctctttccttgagcttggtgatttctgtttatcggtgcctgtgcagtatttccactatcttgttagcagtaacttgcttctttatcactttcaagtcagccttgttaaagtcattttacttcatatttggtacacttattatatttggagtggtggtgattcttgtaatattcatataaagccttttatctactaccaactatttgactgagggtctttgttataattggttattctggatgtattagatctcatcatctcctaaatctttattc

SEQ ID NO: 69346 - DNA, 1036 bp, Homo sapiens
gacagtggcaaaagacaaatcatatatcattaagggaacagtgcaatttcagtgctctagataatttttcgttaaaaatagtgttctagccccagaaaactggccattatagtcaccatagctcaaacgctttagtcttcaggagcttctagccctttagcctgtcctagctgccatcttcttacactgcctacctcccaagtccccttacctctgggcagtggtagtgatggcatctacaatttccatgatccgatgcagggcagagtcagtgccaatggtcatatcggtgccacagaagtcattgtcaattgacccaaccaggcccacaatgttcaggtagctggacttcgtagcctcctcatctgtgatcttacctgacaatgagaagcaaaccaggagccactgggtgaggcacctggcatgcctaaagaggagatatctagagagagagaaactctagccaaaaggaattgtagacaataccagaaaaaggagggcaaagactgcctatttgtgtctgggtaacatttttctccaatgggaggtaaaagcagggcgggggcgatgtgtgtgtgtacacgcgtgcacgtaccgacacaaataagcaatactgatgtgaaaactctcttacctgctttctggaggtcactcaacaagtcactccactcagaacggaaggtgtcagccccagtgaggctgccatcacccccaatgacacagagattggtgatcccacgcttcaccaggttgtaggcagctcggagtcgtccttctcgttcccgaaagtccttgcaccgggcacttccaatcaccgtgcctccctttggaagaggtagaagtcagctccccagagacagggctcaacatgctgagatatcccctattccaatgctgtgatggcctaacataactgtgtgactccctagaaagttccttgacatccttaagagtgatctgtcccttccaaaggaaagggaaatgatgctggctgaggcatcatagggtcattcccatattttgctacacatctgag

SEQ ID NO: 69347 - DNA, 1113 bp, Homo sapiens
ttgtatttttagtagagacggggttccaccatgctagccaggctggtcttgaactcctgacctcaggtgatccgcctgccttggcctccaaaaatgctggaattacaggcatgtaattccaaccttagacactcagtttaaaccctcttatcctatcttcactggaagagcaaagcaatctcctaccttgttttgtcaataagaagggaatattattaagccccagtaatcctgttgattaccatagtgggcatgtttctctagaagtaagtagaatctttggggttccgatggcaagaatacagagtcatcaagctttagatgaaatctgtttggggaggtaaagcccagtaagttctttgctgcagttcttaattgtgagactcagtcttgtgatttggaaaagggctcgagtatcctgactctctaggctgagccaagatggggcagcctgagccagactgtctttgttctctgggctcctgcagggcagcaggatgggtgtggaagcagtgatggcacttttggaggggaccccagataccccagcctgtgtagtgagcctctctggtaaccaggctgtgcgcctgcccctcatggaatgtgtccaggtggtaagtactgatcctaaacccctttcttaacactctcaagcccctgccttggagctcaaggggcatgagactatgtctaaggccactggtataggagcaggtggaaaggcaagatggtatagtaagagacatgtggggaaagaacacagtgggctttgcataggagctcttaactaagcttcagtgttcccatctgtaaaatgttcctaaggaaggtgggagattctacatcctccttagtaatgaaacccagtatctcataatatacaacctcaaacctttttatcttgtctttattggaagaataatgctatattcctcctaactttattaagaacaggagaatattattaaattctagctgggtagcttttgtctctatgatttctatcttgaacatgtttctctgaaccaacacgaggttactaatgctaacgttgagggttattgtaaggattggagataagctatattagcatgtgatacagtacctagcaaa

SEQ ID NO: 69348 - DNA, 1036 bp, Homo sapiens
acaggtgaatgccctggatgggtataaccgaacagccctccactatgcagcagagaaagatgaggcttgtgtggaggtcctattggagtatggtgcaaaccccaatgctttggatggcaacagagataccccacttcactgggcagcctttaagaacaatgctgagtgtgtgcgggctctcctagagagcggggcctctgtcaatgccctggattacaacaatgatacaccgctcagctgggctgccatgaagggaaatcttgagagtgtcagcatccttctggattatggcgcagaggtcagagtcatcaacctaataggccagacacccatctcccgcctggtggctctgctagtcaggggacttggaacagagaaagaggactcttgctttgagctcctccacagagctgttggacactttgaattgaggaaaaatggcaccatgccacgagaggtggccagagacccgcagctatgtgaaaaactgactgttctgtgctcagctccaggaactctaaaaacactcgctcgctatgccgtgcgccgtagcctgggactccagtatctccccgatgcagtgaagggccttccactgccagcttctttgaaggaatacctgttacttttagaatagccggagaagatgtttgcaccatcgtgcaggcagctctgggtgaggttgtccctgcagtactccttgtcacagaaaacagaaaaacagttgttcctgttgtgtggtttatagatttcgaagcaacatgtcacaacaataacctccatagcacctccccttcccaaaccaaacaacccaacaaaaaaaatccctcacttttgttttctgtttattgcttacctggctttttatattgcattttgcaaaagaagaggtctccctcaatcctcccctttagggaaggagtcaacagtgtaactaaatttctctaggaagatggaaagtacttaaataatgtgtgtgtggttttcctttggggacgtggttaacggtccagaagaatcccttctagaaagcatt

SEQ ID NO: 69349 - DNA, 1036 bp, Homo sapiens
taaaactgtttatcagctctattaaccttttggcagagtctttagggttttctgcattttaaaatgagcattctggctgctgcaggaagataagaatgatctagttaggaggctttgacaacagtccgtgagatatatactatggcgtggcctagagatgatgagaagtgatcagatttaggatacactgtaaaggtacagccaatacatctatctgatgtaaaatagaaaaatagaggaagtagtcattattctaaggttttggagcaactgggtgaatgatagcacaatttaatgtgatgggagataatagattttgggtgtgtttggaattaagaatttactttcggagaacccagcagagctggttgagctttcaaatgtgcggttgtgggttcggggtttattggttgaattccgctggctcaggagcctctgcagagaaagcgtgagagatggagatgggcaaatggattcatttagagctgcggaacaggacgccctccgatgtgaaagaacttttcctggacaacagtcagtcaaatgaaggcaaattggaaggcctcacagatgaatttgaagaactggaattattaaatacaatcaacataggcctcacctcaattgcaaacttgccaaagttaaacaaacttaagaagcttgaactaagcagtaacagagcctcagtgggcctagaagtattggcagaaaagtgtccaaacctcatacatctaaatttaagtggcaacaaaattaaagacctcagcacaatagagcccctgaaaaagttagaaaacctcgagagcttagaccttttcacttgcgaggtaaccaacctgaacaactactgagaaaagatgttcaagctcctcctgcaactcacatatctcaacggctgtgacccggatgacaaggaggcccctaactcggatggtgagggctttgtggagtgcctggatgacaaggaggaggatgaggatgaggaggagtatgatgaagatgctcaggtaatggaagatgaggaggacgaggatga

SEQ ID NO: 69350 - DNA, 2652 bp, Homo sapiens
ttttcctagaattttttttttttttgagacagggtctggctctgccacccaggttagagtgcagaggtgcagtctcggctcactgcagcctctgcgtcccaagcttgagggatcctcccacctcaacctccagagtagctgggactacaggtgtgtgccaccgcgcctggcttatttttgcagtttttgtagagacggggtttcaccatgttgcccaggctggtcttgaactcctgggctcaagtgatatgcctaccttggcctcccaaagtgctgggattagaggtgtggtggccagaattttgttttttaatctactgtattggtctatgttttacacttggcagcaaaagctctcagtgcttttggatcttgtttcatttgttggacgctcttgtaaaattttttttttattaaaggtaggctagggttgagggagacagcagagtattgctttaaagtttgctgaaaaacatgccaactttattactgtttcccttggtattgctgatgggcttttctcttttttctaggacttggatgttgtgggtgatggtatgcagtgtcctccttcacctttgctttttgatccttcactaacccttgaagatcatttagtcaaagaaattgctgaagacccagtggatattttggcaagtgaagaacagtcccacctgtttccctcatgtagtgacctggccaggcagagggttccctgctagatagcatgtgctcctggaggggagtggggtgtcatcactagtataaagatgctccacatgtctctcacttattgaataccatataagcaaagcacttttaaaaatgccctactctgctcctgtgtacccttgttgctgtagttctccagatgggctcttagaacacctaatggcccgtgatcctcatatcccagagtaggacatacatttatttaaataaaagcttgagacaaggaatctagggaaatcataccttctgagggagagttcatcactgaaattgttctcattgtagaaggaccagtaaagtaatgtgatttgagttctgtccgtgagccttgggtagaattccagtggccctgactgaagaccagcagttgtactgtggctgttggtttcaagcagaggcctaaaggactgtcttcctgtggtctgttggctgttctgggacctcagtagggaatggctatttcatttggaagaaacaacctacagctcaccatcccattggaagaggctcaggaataggctcttccaagggactaggatagctaatatgggaagagcatctgtccagaattaatttctgttgtattgttcttattgctagtttaagtggccactgataagtcagattcatacttcagaccacagtgaatgaattactaactgaagtgcctttatttcttttaacagggccagatgcagatggctggagatgggtgcagatcccagggatctcgaaattctgagaaagcctctgcaccattgtctcagagtggattggctactgcaaatgggaagccagaacccacttctattagttgatagtttggggaaccattttactttggtggatttaaatttctcgttcttcaaagaagtatttctgatcatctctcacaaaacacaggcaacccagactaccttgtttttcttctggattgagtattatagtcaaacgtaaagccaaattttgaggacgtggaccgtgggtttcttcccactcagggcaaggaagagaaagagagataatccctatcaaagcttctgggattatttgggactatacctaaaaggaaagtgacatctttgtaatgggatttcccaagtcatggatagaaatccacttaagtagctaggtgggagctgtctttgtgagtggtgtctttgagatactgatggccctaatatcggttatctctatctgaagacctgcagtttagcttttcttcacctctacttaattgggcagtctttaacccctttccctggtgaactctggctttttatcctctgagaaaacagcccacaggactgggtcctccttatccgtcttgcttttaacctatgtaaatttctgtggttgctatcttatgtaaaatatagtaaaaatttattgtatatagtttctattaaatgttaaagaaaatgttatgaaaatatcaaacagtcacctgaattgaatgcatgttttgtttgagaatatagtttctttttcgcggttttggggacctgtctctgatgggaaagggaagttgggacagatgatacttccatcccaagaagtaaataaatcttcagtagctcattttggttttgctttgaaggaagaagtaaatgaaaaggggcaggacttattaaagcccatcagttccaaatatctttcttctttttaccctccactctgtgtctcctacacccactcccatttctcacgattaatgccaatgccatctctgccagacgtggtggcttacgcctgtaatcccagcactttgggaggctgaggtaggcggatcacttgagctcaggacttcaagaccagtctgggcaatgtggtgagaccctgtgtctatatttttaaattttaaataattatttttaaaaaaataatgctaataccatctcagaattctctagtggtagg

SEQ ID NO: 69351 - DNA, 1180 bp, Homo sapiens
ctacaggtatgtgccaagacgcctggctaatttttgtatttttagtagagatggggtttcaccatgttggccaggctggtaattttttgtggagactgggtttcaccatgttagccaggatggtctcaatctcttgacctcatgatccgcccaccttggcctcccaaagtgttaggattgcaggcgtgagccactgcacccggcctgagcagctttaagtagattttaaaattatatatattctttaatgtgaagatgttgtgattctcatttttggtgattagcacaccaacaaatgggaaaggattgcaaattcttagatttatttaaaagcgtagaactaagcttctcgtgaagctagatgaatagaaacacggagcatctataaactggattaaacataggggggtacaaacctcctggatatttttaattcttaggaagaaggagaatttagcaccagactcttgaaaagcagtggcatgaaagttagtttgatatattgtttgagtttgtattgccttaggccctgaatcaagaccaatggtttgctgtagctgttggtttcaaacaggagctaagagtgatgtcttccttgtggtctgttggctattcagtattccagtgcgaattgccaattcagttggaagaaacatagtctagaatgtaatgtcattttttttttttttttttttacagagcaaaactatgttaggcttaagaaccagggagttggccgggcgtggtggctcatgcctgtaatcccagcactttgggaggctgaggtgggccaatcactggtcgggagatcaaggccatcctggctaacatggtgaaaccctgtctctactaaaaatacaaaaaattagctgggcgtggtggcacacgcccatagtcccagctactggggaggctgaggcaggagaatcacttgaacccaggaggcggaggttgcagtgagccgagatcacgtcactgcactccagcctgggcgacagagcgagactctgtctcaaaaaaaaaaaaaacaaaacaaaaaaaaccaggttgttgctctgtcgggatagggacttaaccaaaataatatttcctagccattcagaggaactgtgagttttctgttgtccttcctttcttcctaccttctccctttcccttgttggagcttgtttgcttgctt

SEQ ID NO: 69352 - DNA, 1056 bp, Homo sapiens
tagagctctgtttccccctattccagtggtgctttaaatgaatttatcatgtaatcatctttggaaacgaggtccaagaaattgttgcaaactttgccagtctgctaagggagcagagacattgtatcgcttgactcttttggaagggctgtttaggggcattttcaaggctatttgcatttgccactacatgtttcttctgaatatgtgtgtgttcctaggagtgttactgctacttgcttaagggagaatgggatggtgtctagtttaaatgaccaggatcctgaaaaggaggttggggacaagttttaaattactggtagagctagaatttgatgctagtaaatgacatttattttgagaagtaactttaaaaattgctaactgcatttggtattctgtatcaaatgtagttgtaatttatcttatatagtccacaccttgagttttatgtggcagacaatgctatttgtattttatgctttcgatagattgtgttttatttcccttgaccatttttctacagatatttgtcaggatacgaatcaggttctcttcaagtgctgccagggatctgaagaggtaccctgcaacaaacctgttcctgtaagcctctctgaggatccctgctgcccactgcatttccagttgcctcctcagatgtataagcccgagcaggtactgtctgtgccagacgatctggaagccggccccatggatctgtacttgagtgctgctgagcttcagcccactgagagtttacctctggagttcagtgatgtaagttagagaagctctgctttggttcaggcccttgagacaaagccttatttattaatggtgagaataggttagtctttgtggttaggagaatcgacaaagtttttgaagtgatatatacgtatagttgtatttatatgttagcatattcatttagagaaatctaccctaccttatatttttttccagactcttcccatacctttttagggatacaatttacatactataaattgcactctttgaaagtgtataattgagtgatttttagtatat

SEQ ID NO: 69353 - DNA, 1049 bp, Homo sapiens
taaggttaataggaagaagaattaagtgatcattcttaaatttgtttttcagacccttggtctctgtttcagtaagagtaattttgtttcatttgttgagattccacttaaggctgcaatttcagagttctgttggtaaaagacaaaatttgtgttaaataggctatatcacacttttagaatatggagaggtgtatttgggattgaggttgactcattctttatgcactaggttttaaagttttttgtcttttgcataatattggtgaatctatttttgttaaatgttgaatttctagcctttaggatgtgcttttcttatataactattttcatcgtaattgtttgtgtgttcttttgtgggtctattttatctgtctttttccatttcaggcccataccactcgttccagtcagaggtgcttggcctttgtggatgatgttcgttgttccaatcagtctcttccaatgaccagacactgccttacccgtatctttttactctgcctgttaaggctgtggtttgctagtttgaagactagtgggaatctctgtgctagtttgcttaattgaaggattttgttttcctttggccctgaatcaaggccagcagtttgctgaagctgttggtttcaagcaggagcctaaagaattgtctttctatggtctgttggccatttcataactttggaaatgtaatggtcaattcattagaaagaaacatgagtcgtttttcatagatgtgggctaatatttatttatagccttaatacttgggtcccaaaatatacataaaatatttgtaattgtctcaaggtttctgatttaacttgcttattaggatcctaatgctgttaaatctaattataaacttaaaaaattactgtgggttttccaccccagttgaaaggatgattttgcactgtgaacttctagtattatccttttgtgtggttagggccctcacttctgtattttattttattttttattttttggagatggagttttgctctagtctcccaggctggagtgcaatggcgtgatct

SEQ ID NO: 69354 - DNA, 1031 bp, Homo sapiens
tgtttttttttttgttttgtttttaaaatttcaaggtttgggttgataaaagtaatctagttttgtgtggtggagttacagaggtgggaagtcttaatggctgctctcccttccttgcctcagatgaagacagctggagtgatggggagcaggaacccattactgtggatcagacatggagaggtgaccctgacagtgaagctgatagcatagacagtgatcaagaagatcccctaaagtaagttgtaactccacataaggcatttgaaatgtagttagtatgtggaatgtagtgctgcatgctgttaataaattagtaacctaggagggttgaagacagctatttgtcagcagtaagaggttctgtatataaaagtggcatggttcattgtcgtcttgcttcaaggcaggatgattcttttttagaagccttgtaatttaaaaaaagtttgaacaccaaattctacgtatgagaaagtataggggagaaaacaggaaatttagacatgggagtgtgggaggtggattgagaaatggtcagaccagtttagagaagagaaaatggttgtgaatgggtgcttggcctaaacctcaggaataatgtgattgtagttgaatacttctgcaaaatgtcgtgtttatgggatttataaattttttaaagttatatattgttttaaattgacaattgtacaatgtatggggtacagtgtgatgtttggatacttgtaaaccttgtgtcatgatcaaatcagggtaattagcatattcatcagctcaagcatttagtgtttttttgtgtgtggattttttttttaaaaagaagaataaaaaggtattcaagagtttggtttcatgcctaagaaagagaaaccgatttagaaacccaaaagtgattatatcttaatcaggtttatatcttagtaagcttctgctcttcacttaacccatcatcaccgtaggagttgtagaagcataaaaacattaccactctggagtctcatatttctgtgtctcaaggtctgggtgta

SEQ ID NO: 69355 - DNA, 1004 bp, Homo sapiens
gggaggcggcgtggccgccgcgtggggctggtgttgtcgcttcccttcgtgctgcagctgtgcgagtcctgaagatacattcagcgtggtgtggttcggggtggggccgggcatggagggacacgctaaagggaggcaaagccacagatgcctgtggagacttggggagggcggcggggacttacggagcgtaccttacggggacgacttctgcatgtcctttggaaactgtccgcgcgatctgtgtggagcaggaattttcgggaagggtaagggctttttggtctttcgtttgaccccgcaggttttggttatgaacaggattcggattcacgtcttgccaaccaatcgggggaggatcactccagtgcccaggtctcaggaacctctgtcttgtgcattcactcatcgtccatgctctcaccctcgtctggaggggcaggagttttgcattaagcatatccttgaagacaagaatgcacccttcaagcagtgtagttatatatcgacgaagaatggaaaaagatgtcccaatgctgccccaaagccagagaagaaagatgggtatatatgtatagatatatatgtcgtttttcttaaagcgagggggtatgtgatatgatgcgggcttcagcatagctgccgcgtttgagattttgtccttgtaaatttggggttatggttgtatccttggaaaactgaaaaaacggtgaagactggaaagacccttgagttggattacttagttcacctctttggttcttttcccttatctgtaaaataaaggcatattctaaattagtctttttttttttttttttttttttaagagagatggggtcttgctattttgaccaggccggtctcaaactcctggcctcaaggtatcctcccatctcggcctcccagagtgctgggattacaggcgtgagcgaccgcgcccggccctaaagttaattttttggcgggggggcggcgcacagattcttgctttattccccagg

SEQ ID NO: 69356 - DNA, 1240 bp, Homo sapiens
attttgtctttttatccctccgtggatgtgagtttgaaacaagcacggtacagtaatcctgcctgatagagtagtctggaatgagaattactttttgggtgagagagttctccattttaatgtttctaaagtttttcatatgaacttggcattggaaaagggaggtaaagaaaaaggacgtttactaaaagcagtgtctactcttcccctttgtgagtgtttattcatggctaatgaaaaaaagagaaggactcttgggttttgtgttgccatgttaagcatggagagggatgcttgacagcatgctaattgaagccagagcaagtatgtccttcatcaggtaatcaggaactcttcagttgaagctgaggaactaactgattagttgttgatcataatataattggttacaaagtggaagtgccagctggcttaagtacccaaagaaaagaatgcagcagcctaacttagtgttaccatatgttactgaatttgaaactgaccttttttcccaccctacttcacacacctaaaactcttttcttgtcagaccaaagagcgaaaagaaaaaaaaaagtaaaacactttaccaatctgtcactcaggtacaattttgtggtgagatttttgtctgttctctttgtattgctcttaagagtcctttctcagcatattattctgccattgcctctgtcttccttggggcacctcagctctggatgctacccctgggatatctactgctgttatgtgaatgataggaggtaagtgaccattatagtaagggctctttgtaaaaaaattcaaaaaatttaaaaaggatgtatacattttatagtctggctatcagtttgatatcttgctgtcaagtatgtttctcaatctgtatttatccatcccatcaataaatgttaatggtaaaacactcatttgattgttgtttatgtgtactgtcctcaaattagtccttagtctttttttttttttttttgagacggaatctagccctgtcacccaggctggagagtacagtggcgtgatctcggctcactgcaacctctgcttcccgggttcaagcgattctcctgtctcagcctcctgagttgctgggattacaggcacccaccactatgcccagctaatttttgtatttttagtcgagacggggtttcactgtgttggccaggctggtctcgaactcttgacctcaggtgatctacccacctcggccccccaaagt

SEQ ID NO: 69357 - DNA, 1099 bp, Homo sapiens
aacagctctcaaaatgagaatcccagtggcaggtggagataaagctgcgtcttcaaaaccagaggagataaaaatgcgcataaaagtccatgctgcagctgataagcacaattctgtagaggacagtgttacaaagagccgagagcacaaagaaaagcacaagactcacccatctaatcatcatcatcatcataatcaccactcacacaagcactctcattcccaacttccagttggtactgggaacaaacgtcctggtgatccaaaacatagtagccagacaagcaacttagcacataaaacctatagcttgtctagttctttttcctcttccagttctactcgtaaaaggggaccctctgaagagactggaggggctgtgtttgatcatccagccaagattgccaagagtactaaatcctcttccctaaatttctccttcccttcacttcctacaatgggtcagatgcctgggcatagctcagacacaagtggcctttccttttcacagcccagctgtaaaactcgtgtccctcattcgaaactggataaagggcccactggggccaatggtcacaacacgacccagacaatagactatcaagacactgtgaatatgcttcactccctgctcagtgcccagggtgttcagcccactcagcccactgcatttgaatttgttcgtccttatagtgactatctgaatcctcggtctggtggaatctcctcgagatctggcaatacagacaaaccccggccaccacctctgccatcagaacctcctccaccacttccaccccttcctaagtaaaaaaagaaaaagaagaggagaaaaaaacttctttaaaaaaacacataatttttcttttttttttttggactaagaaaattacttatgaaatatgtcatccttggactagggaataaattgatattgagacatagttaggagggtggtagaaggccttggctatatatctgctgtctcatgcatttaactattttcttacagtttttactggtattagagaggtgttgaagctgtgaaggattaaggacacattctgaattcttggcctctccaccatctaattaggtt

SEQ ID NO: 69358 - DNA, 1151 bp, Homo sapiens
tccgagtagctgggattacaggcatgcgccaccaccccagctaattttttatttttagtagagacggggtttctccatgttggtcaggctggtcttgaactctggacctcaggtgatccgcccacctcggcgtcccaaagtgctgggattacaggcgtgagccaccgtgcccagccttaattaaaaactttcttaacagcaaaagtcacttttcccaaatatgtcaaagtcttctagattctgatcttgcttctagatcatcttagttcatcctgtagtttagtgattctcagtgaatccttacatcagaatctctgggttacttgttaaaaaatgcttgcacccttctccaaacatttaattaaattttagggagcaggtccaagaattgcatttaaacaagtacctcagatatgtggtgtgcagaataaagcttgagtacctagatctggaagcagcatagttattaatgttaaaattaaaaatcattgatctgtctactttggcagaatgtaaacgtcaggtttacagggaccatgtgtgtctcatttgccactatattcacagtaccttgcaaatattaaatgcttactaaatatttgttgagaatgaatggaactaataacttttttcctcccccacccctgactttttttttttttctttagcaagcaaggacttagcacagacttcttacttcatggcaaccaacaggtttatattttaatttttttttctcttcgatttttggtataggactttacttgagtttgatacagtgtgctatagataattctctggtgaatgttgatttttctgcacagttttcatgttgtactttaaatttccatggtactttttaattttctaaggttatgtaattatttagtactgatttttttgataacctactcagttctgcatgatagtgactgaaaatctaatttggagtattctgcaataattatatgtgtatatatatatatatatatatatttttttttttttttttaaattattattattattttttgagacagagtcttgctctgttgcccaggctggagtgcagtggcacaatatcagctcactgcaagctccaccttccaggtttacaccattctcctgcctcagcctcccgagtagctagg

SEQ ID NO: 69359 - DNA, 1016 bp, Homo sapiens
tggcacaatcttggctcattgcaacctccgcctcctgggtgcacgccattctcctgcctcagcctccagagtagctgggactacaggcgcccgccaccacgcccagctaaatttttgtatttttagtagagatagggtttcaccgtgttagccaggatggtcttgatctcctgaccttgtgatccgctcgcctcggcctcccaaagtgctgggattacaggcttgatccaccgcgcccagcctctagttaacttttttcttaaaatatcttcaaattatatttcatgggacaatgatgtttttctggtggaataaatttctattaatattttagtgtggaaaccagtaaggtgtaatttacaatcagttatccttttacaataatttgtaaaatgtaaacttcttaatagttttttaatccattactttttcttttaaggctttgaactaacaattgatcacccacatactcatgtagtaaagtgcactcaacttgttcgaggtaaggaatcccagcttatgaagactatctcaagctgttttcccatttagaggttgtggtttgtggtggacaatacataatagttctgctttggctaaatttaaaggcctacttggcttaaatcaaaatgagttgttctgacttgatgtttttctgttgggttcttacaagtaatatttttagatgatctctagttaaagagaactaacctcttgagaatgtttgtcaaagttgggcagtttgtgaagttatttaacagaaattttatgaaagttgtgaggagtgggtgatcttattttaattctggggttgattaaaggccacctagaggatcatacagaatttatttggactttccatgatatacaatcccttggcagaacttttctttttaattctaatttaacaatattaggtataattgaatgaaactctcttatttagtttagtatcaagaatatctgaacactattgtgcctttaagtgccttttatgatttttaggccaaactgat

SEQ ID NO: 69360 - DNA, 1041 bp, Homo sapiens
gataaagattgtatttcacaaaaaaattagccgggcgtggtgttgcgcgcctggaatcttagctacttgggaggctgaggcaggggaattgcttgaaccagggaggtggaggttgcagtgagtcgagatcacaccactgcactccagcctgggtgacagagggagactctgtctaaaaaaaaaaaaaaaaaaaaaaaaaaagattgtatttcagttcttaactctacctcctaactccactcatgccttttattgttttggtttccctggaagggattgttagaattgtttatactttatatattgtgcctttgtagggaataatttctgtcttctcacttttaggcttatttgcaacaagttcaagatctggtcattttagaaagcataattttgcagactttaggtaagtttattttcctttgaaacatttttttaaattatgcaataaaatgatttgattctaaaaatttgctatataggaagaatatttcttgggaaagtttttgtagtgtccctctgtttccagatgatagaggttgtagacctgagtttagctttgacctgttccatagagtgaatgcaggtagtacagctgacctttgaaacagcagccagtgggttattatttttttcattctagggttatttgctttttaagttttggtgatttttacccccaaaaattataaaaactatctaaagaatgtttttccttccgtggattgttatggcctgtaacagcatttgtttttaaaattggtaactagtgtttagaacagcagagtgaaagtgggggaacttaagctttagtggttgcatgggcaactctgatgatattgtgttattatctgttattttcatcacacaggctgcctttagaagtttagaaaatatgaaaatacagattttttttttcctggttcttttgggctatcatttttctcttctaggtagggtaagatttcatgagttgtacgtcaaagttattggcgtagacacaattttttttgtacatatatatatatgatgagttcttca

SEQ ID NO: 69361 - DNA, 1055 bp, Homo sapiens
gctgtgatgaatccaaatttaaatgtgagaggacttaatacattaaatgtggcctaataatcaatgtggcattgatatgttatatatcctgtcaagtcctcaggcatttttgtatgtgtgtgtgtgtttttcttattacaaaggtattagaggctgggcgtgttgactcaggcctgtaatcctagcactttgggaggccgagttgggtggatcatttgaggtcaggagttcgaaaacatcctggccaacatggtgaaaccccgtctctattaaaaacacaaaaatcagccgggcatggtggcgtgcacctgtagtcccagctactcacttgggaggctgaggcagaattgcttgaacccgggaggtggaggttgcagtgagctgagatcgtgccgttgcactccagcttgggtgacagagtgagactccatctcaaaaaaaaaaaaatgaagaaacccaaagatattataataaattcccatggtaaaaattaagacagtacagaaatgtatgtggaaagtgaaaactactctgtaatcccacccagagataaccattgataaatgtttggtttatagtgacccagacatttttctgtgcacataaactagcattgaggtatttttatttaaaaaatcatatcttgctatgctactgttgcacagcttgcctttatcatgtaacagtatgtattggacatctttccatacttccctttattattttttggatttcttattattttaatttgccacatggtatttgtgtagttactgtagtttatttaaccagctttttattgatagctatttgggttgttgttctagtttattatattgtacattatgtttcatgggatagtcttgtacatatatagtgcacttatataagcattttaatacaagttcctataggtggaattgctgtgcccagagtatacaatgtataaaaatttttgtagtgtcagtttgccctactgaaagattatacattgtttccagcactgtaggtgagggtccttttctttccaccctaacaaacaacaaatattaatt

SEQ ID NO: 69362 - DNA, 1170 bp, Homo sapiens
cctggccaacatggtgaaaccatgtctctactaaaaatacaaaaagtagccaggtctgttggtgggcgcctgtaatctcagctactggggaagctgaggcaggagaatcgcttgaatttgggaggtagaggtttcagtgggccaagatggtgccaccgcactccagtgtgggcgacagagtgtgagccaccgcgcctggccgccttatatagtttttaaaaaaatctgtctagattcatacatcctgagatgtttgtttattcattcagtacatttatattaaatatttgttatgtgtaaggcattgtgctaagtgtcagttggcgattaataatttggtgaaagaaaacagacatattctttgatttggagagataagtatgattttcatttagtagtatctacttgcttggccatttcatccttttgggagggagatagaggttatcttttccagaattatacctgcctgtttttggatcttaacttgaacacttcagctcacaattgactatcaacactgctatagtatacatgcatcgattctacatgattcagtccttcacacagttccctggaaatgtaagtataatttttttatatgatataatccttttgtgattgattccacctacctattccatttgtggttggtctttgctactgaactgtaacttgaactttagaatttagggttgatcacttccattatgtgctgtgttgctgttctgaatccagcttttcagttttcctgttaagtgtctacttgtctagtggatttagtatatccatgtcgattctctaaagaagtagattaggccgggtgcagtggctcacaactgtaatcccagcactttgagagactgagatgggaggatcacttgagcccaggagttcaaaaccagcctgggcaacataatgagacctcatttctacaaaatatcaaaaacaaaaacaaaaagcaagtagctgggtgttgtggtatgcatctgtggtctcagctactccagcagctggcaagaggattgcttgaactcagggagttgaggatgcagtgagccaagattgagtcgcttcactccagcctgggcatcagagtgagaccctgtcttcaaaaaaaaccccaaaaaacagattatcagacatctaaagtcaacattttggggttgg

SEQ ID NO: 69363 - DNA, 1404 bp, Homo sapiens
agcggcgcgtgggcggccgccccatcccactataattgcggcctcgcagcctgacccggggcgccaacgctcaatccggttctcgcgggaagatacacggtttttaagaaagaacttctaaccccactccaccgcccaacggtcacgtgacgcgcctgcgtcctcgcctcaaggttttttctggtcgcatattggctgttaactcggctacggggtgtagcgaggtgcattccggaagtaggtcctttgacttttgcttcctctacggaggcaagtaacaacccggcggtcgacgcttagcggaagttcgtcaagtcgcagttgcccccgcacagcggatgtgggtcgcctcttaggtgacgctgggaagtgcctgcagccttcgccgctgccttctggttgaagcactatggagggagagaggaagaacaacaacaaacggtggtatttcactcgagaacagctggaaaatagcccatcccgtcgttttggcgtggacccagataaagaactttcttatcgccagcaggcggccaatctgcttcaggacatggggcagcgtcttaacgtgtatccttgtggcctaggccttcggccttggagttggtcccgccatgctctggcgtccgggtctcaggctctgtgggggggacgaaagtggggaagaaggtgggcagaagctggatgtctagttgggagagcccacgatggggcgggctgaaactcagttagcgctagggaagcgaggcagagttgatttcccgctcgctcacccgtgccgccagccttgctgggaattcgtatccttcccggctttgtgttttaaccagcccttccaactctgtcttcattgtgttctgatctgctctggtgacgttaagattctcattttccgctgtgccctaggggtctaggtctggcagaggtttctctgttgacggctgcctcccaaacctagtgtgtaaatttcgagaaattcagtacctgaaagtgttataaagggtggactagaattaatgcctcagccttggtccaaaatccattcctcatctactagctgtttaagtgacctctcaaatttttggccgtcttgtctataaaatgggataatacctcttgtgtttgattctgtgtccagcacagtgctttgcattcagatgctcagttagtagctactgttttatagaatttcagaggaaagatgttagtttacgtttgtaggggatacccacgaatctaatgttttaaatagtttacaaaataccgggtccttaacttacttagagtgatgatatgtatttcattttcaaaaatgaggtaacggctggatgcggtggctcacgcctgtaatctctgcactttgggaggccgaggcgggtggatcacctgaggtcaggagttcga

SEQ ID NO: 69364 - DNA, 1054 bp, Homo sapiens
gggggctgtcctggcacagacattggcccttctgtgccaggcctggtgatgggcgctggggacccaggaactcaccagagtctcccacactaggagcaaccaggggccctggtgtgttgtaggggctgggcatggaaggtggaggatatgggggtttgaggggtgtggtgggaaggttaggtcaggcaggagagtgcagggctctccctgcccaagggtgctgtggcctctgccttcacccaacgctgcctctgccacccccgcagtacttcatcgggaacatgctgctgagtctcttggccagctctgtcttcctgcacatcagcagcatcgggaagttggccatgatctttgtcttggggctcatctatttggtgctgcttctgctgggtcccccagccaccatctttgacaactatgacctactgcttggcgtccatggcttgtgagtttattctcaggtcctttaataccccaggagcttccctcacctttctaggtcactgtgagcctctctggtgcccatgccccttgtgccttggaatgccacaacacccctgtgggggaaagggaggagatggaggagctcccagcatgtgaccccaaatagttacccccaaggaaaccctagtcctgggaaatccttgtgtctttaggctagacattaaaaaaaaaaattccctcttacatttgcatggtgctttcacatccaccatcttaaccacctataggacatacagctgcttggtggcagggctctggttaggaaccaaagcttctgattcctgcttgggggctttgcctgggacaccacactggcttttcctctgcaaaaccccattcctttgatatgtggccatagcttgttgtagtagaaaaagcctctggtctctgctgggtttgaatccctgctctgctgctcattagctgtgtgactttagacaggtgagttagcttctctgagcctcaatttcttcatctgtaaaatggcaatgtcacctaaatcacagggtagttgtaaagattatagtaactaacatttatggaaggctga

SEQ ID NO: 69365 - DNA, 1026 bp, Homo sapiens
cagtgagagccctgcctttcctctcttagcttctctcttcaccacttcccagaagcttcctaaatacccacacaagcccacaatccctggagcctgcatccctgcttgttccagagggtgggacaagaatgcccagatcttccagaattaaatgatttttctggccctgttctgccccagctccaccctgatgcttgggatctatgccagcatcttcctgctgctgctaatcaccgtgctgatctgtgctgtgtactcctgtggttctgtacgtaaggggatttctgaggctgttggggagggcaggctggactccagacagggaggaggtcacatggggagagggagaaggccatgcctcttccactgggccccatccctggttgccattcctccttggctgatacaaccttcaactcttggtctcttgatgcctctagctgttccctaaggccctgcaacgtctgtcccgcagcattgtccgctcacgggcacatagcaccgcagttggcatcttttccgtcctgcttgtgtttacttctgccattgccaacatggtaagggtccagtgggaattctcccacctctgctctgtgccaagcactgtcctggacactgggagtacagcggagaaaaggacatattttctgccctcagggagccccctcccagaataggggaaggttaactccggttctccttccttgttctcccaacctcttgtcatccctgagtgagtactaaggcccatggggtataaggtacctgggcatagcccaggttagggtacatggcttcaccaggtaccttgcaaccctttccctccttggttaccctgatatacccctccacttttgcagttcacctgtaaccacacccccatacggagctgtgcagcccggatgctgaatttaacacctgctgacatcactgcctgccacctgcagcagctcaattactctctgggcctggatgctcccctgtgtgagggcaccatgcccacctgcagctttcctgaggtgttcg

SEQ ID NO: 69366 - DNA, 1020 bp, Homo sapiens
gggcaggcagggcagcccagggcaggcaggacctcgggcctcagtcaaagccgtgccagtcgctgtgctccgagtagtattccagcttggcacccatgcatttgacaccgtccagcagcatgcatgtgccatggcgtcagcccatgatgcaggcttgcaccttccgcgcacgcaggtgctggtgccaccttcccagactagtagcatcccctctttgaggaccccttctttgtgcgcctagtactcgcacttgacactataaccttcagggaagggtaggacgctgagaagcttcaggtgcaggctggggacaagtgcctggcggacgtccttgctcagcctgtgcactgggacggagcaaaggtaatctcatacctgtgcaggatcttcaggaaccttgaccagaaagctgctgtccctctcctggatgaccatgaccaccgagtcctgcaacttctcatcaaagtggacgtggctttgggagccctctgcatcgtggcctgtcacaaagtggatactccggaatctgggcttgctgcctttgttggttgcagccatggaccccctccctgccacgcagcttccgcaggaccaagccactcatgcccagcagcctcccatgctccggggacaacagcaggagccttgcagggtgcagcccggggcggacagggcagggacgaccgctgaggcggtggcagggtctcaacgctgagcacaaggaagggagcaaggctcctcttttaatttggttttcagtcagttggaactcagtccttagtttaggactggagcttgggaaaagagaagcgaagaagaggaagattttcaattactactgggcttgcttcagactggatccaaggctcactgcctttgcagcaaggagcaggaattgcctagtcacgtcatgcagtcatgtccccaggaaaaacatgaacaatcacagcttttcctttctgggcctctcctctttgttttgtttgtttgtgtttgtttgtttttttagagacagggtat

SEQ ID NO: 69367 - DNA, 1300 bp, Homo sapiens
atcagacacggctccccagggcatctgggctatgctgagtgacgttcttcccattccccagattacatccaccgcattggccgcacgggacgagcaggcaagagtggggtggccatcaccttcctcacaaaagaggactctgctgtgttctacgagctgaagcaagctatcctggaaagcccagtgtcttcctgtccccccgaactagccaaccacccagatgcccagcataagccaggcaccatcctcaccaagaagcgccgggaagagaccatctttgcctgacacagcactcttcctgtgggctgagggcatctccaaagctgcctgatgcctgtttttcagaaccctcacatccctctttccaggtcctcactcttgggatatgggggcttaggaaaacaatccaactccctagcccagaccctcaggtcaggaggcctgcgtgtggggctgcaaaaggagaggacgacgctgtcggaggcagggagagcaaattaccacagcttcttggcccagttctgcccttctttgctttgggattgcactgggccatcagctcatgccaggctatgggggcagccagttggcattgctccccagactgaacagaaacctggccgccggatgggacctcctttggcacagacttgactgtgtaactgcataaactgcagtagcatcattgccctagatgccccaggagacctggcaccatgaggattacagacagtggaatcttactgtcatctggacagctgttttcctgtttggatggtaaaggaagttgagagtctttagacctgtgcacagccccgcaccaaggggtgctgtatgctctaggcatcccctcccccaggggattttctaagtagatggggggacacggtgaactggctgtgtccatctttgtcactgagtgaaatctctgttttctattctctgagaagataagtttgtatgttctgagaataaatacatgaatattaagactgttagatctagttctagttaaacttcccagcttctccctggcaggagggacaccactgggtgcggggtgggttggcttggaaaatgagagacagccacattaagagaagagtagaggggtctctgctgatagtcttgagtctgtaggtggacttgagaggagatgcagaagccacgcaggactgtaatgcatcttccgcccctgctctagcctcgcgtaatgtgtggccctggcctggacaccctctagggagctttaggcaaaggtgagaaaggaaagcagttgtgaaattttggcaggtgaggc

SEQ ID NO: 69368 - DNA, 2586 bp, Homo sapiens
cagaacgagaggctgaagctctaaagcgacggcagcaggaggtggaagagcggcagaggatgcttgaagaagagaggaagaaaaggaaacagttccaagacttgggcaggaagatgttgggtttgttattctaccctgtgtagcccctagatggaagaggaaagagtgggatgagatacagtgtctcttaggagagatagaaacctgttcactctggagtttggaaaggggaaggatggtgggagtttatgagaaaacatttttctgttagatctccatttaccccatatcataagtctacccctttttttcttcatttggggttcctcgtctggattccctccattccctctcctcttttcttccatgagctcttctgcagctttgctttctttggtctgcagaagatcctcaggaacgggaacgtcgggaacgcagggagaggatggaacgggagaccaatggaaatgaggatgaggaagggcggcagaagatccgggaagagaaggataagagcaaggaactgcatgccattaaggtgcaggccttggctccatcttcacttctctcccacacaaaaatgaggtttagttatttggccattgtgatctctgcatgtgagaattgggcctcaaagctcatgtgctttgtgttctgtccctgggtaggagcgttacctgggtggcatcaaaaagcggcgccgaacgagacatctcaatgaccggaaatttgtttttgagtgggatgcatctgaggacacatccattgactacaaccccctgtgagtggcttcaggcctgagttctaggtcttttccactaggcagtcctagagagctgatgactacggaggtggaggaagtaagataagctgggatggaaaattggtagactggtagtcagccagccctctggtggaagaaagaccctgtctgggaagaactgtttcatactagtagtctgcccttccttcctactgccgttaacagctccttcttttttcttttcctctatctcaatcccaggtacaaagaacggcaccaggtgcagttgttagggcgaggcttcattgcaggcattgacctcaagcagcagaagcgagagcagtcacgtttctatggagacctaatggagaagaggcgaaccctggaagaaaaggagcaggaggagtgagtgatcaaggctagggtggctggacagagcccagaggctctacagaaaggagttggagggcactgattctacttactcctcacaccctgctccagggcaagactccgcaaacttcgtaagaaggaagccaagcagcgctgggatgatcgtcattggtctcagaaaaagttagatgagatgacggacagggactggcggatcttccgtgaggactacagcatcaccaccaaaggtggcaagatccccaatcccatccgatcctggaaagactcttctctgcccccacacatcttggaggtcattgataagtgtggctacaaggtaaggagggatagattggcccaagagatctgacatgttcctacactagtttgggaatagagaactttgttccttgactatttggagccatcgctgctagtgggcaccaatgtgaccttttctgtcactttctggtagaagtgttggcttttagtgattaggtttcttcttggggtccctatttctgtgaactgtacttggcatccttccattgtgctagcagatgtgcttactactatcagtggttgcccaggtggtataactctccctgtacctattactctttcttggggtcactgcaggaaccaacacctatacagcgtcaggcaattcccattgggctacagaatcgtgacatcattggtgtggctgagactggcagtggcaagacagcagccttcctcatccctctgctggtctggatcaccacacttcccaaaattgacaggtgaggtcagctagcaccagctggagtgggtttgtctgggtaggaaaggtgaaagtggcaaatgaatgtttgatttttgttttacgtctataatcagaagctttcttctttattctttgttggatattagggaataattggatcatgatatcgaagaagtatatgttgctggcaaagacctggagaactttgctatcctggagtctctgatttattttatttatttttttgaggcagagtctcactctgtcacccaggctggagtgcagtggcacgatctcagctcactacaacttttgcctcccaggttcaggtgattctcctgcttcatcctcctgagtagctggggattacaggcgtgtgccaccacttctagctaatttttggttttttgttttgttttgttttttgagacggagtttcgctcttgttgcccaggctggagtgcaatggcgcaatctcggctcactgcaacctcctcctcccaggttcaagtgattctcctccctcagcctcccaagtagctgggattataggtgcccgtcaccatgcccggctaatttttttgtatttttagtagagacggggtctcaatgttggtcaggctggtctctaactcctgacctcaagtgatctgcctgcctc

SEQ ID NO: 69369 - DNA, 1024 bp, Homo sapiens
tgggccagtcttgttgagtcatggggaaacttccattctcttttcggggctcaacttgaacctcatccaggcactgaagtaagagtgatgtggaccttgttccttttcctcaaagcttatctcctggtcgaggaaaagactttaaatctcggaaggacagagactctaagaaggatgaagaggatgaacatggtgataagaagcctaaggtaaaggagaggaaggatatttttcatcttcaactcgtgcgttgctttgttgatctttaaagggagagagcctttatagactaaagttctgttttatcttcaggcccagccattatccctggaggagcttctggccaagaaaaaggctgaggaagaagctgaggctaaggtaagtacttgagggtcttcattcatcggctcaggctgccataacacaataccacagactgggtgacttcaacgacagaagttaattttctcacagttctggaggctggaagtctgagagcggagtgtcagcagggttatttcttctgaggtctctctccttggcttataaggctgtcttcttcctcagctcttcacatggtcctccctctgtacacatgtaccccttgtgttggattagggctcaccctaaaaggcccttttttttttttttttttttttttttgagacagagtctcactctgtcgcccaggatggagtacagtggcatgatatcggctcacttcaacctccacctcccaggctgaagcaatcctcccacctcagcctcccaagtatctgggactacaggtgcgtgccacaacgtccagctaatttttgtattttttgtagagtccagatttcaccacgttgtccaggctggtctcgaacccctgggctcaagtgatctgccctccttggcctcacaaagtgctgggattacaggcgtgagccactgtgcccagcctaatgggctcattttaacttaatcacctctttacatgtcctgtctccacatatagtcaaattctgaggtactaggagtt

SEQ ID NO: 69370 - DNA, 1002 bp, Homo sapiens
ttagcctcttcggctccaaagctgccctggaaatcccccctgaaatgagtaagaccctagggctctacgagttacctcctgaggttcaaacctcacttctagtactccacttgtcccatatcctattggaagccagagatttaagaagtgagggaaaggtcaattgaggatggaggaggaagactttgatcttcatgtcatgggatttggggaaggtggatagcttccagttcagttgtgtcttcttcttcaaggtctggagcagagtcttctcgacatgtgtgtggggtgagtatctcggcaggggtgggcctgggtaccccctttgcatgggtagaggctttctcggccatcctcactccttaagcaggagaatgtggaataaaggaccctgcttcccactggacaggtccaggtcagtgggacctctgagggcattcaaagcctctgtgcctcttgcgctgttgcttttgtcgggggagttgaggcacatggggagatggacacctttgctggccagcctgtttggtgttcaggtggaaaaattcgtgttttgggtgtgaagattcagggggttttgctgaaggagcttcagctggactgaggctgctggcctacctctcctgcctctggctgtgactgacattccttccctcagagagaagcgaagggcaatcattccttctcacttggcctatggaaaacggggatttccaccatctgtcccaggtaatctgactaggactctctctcaggccatcaaaatacccagtccctaagagctataaggagctatatactttgtttgatgcttgagaagatccagaccaagtttgtttagacagataggagtggctggggcctccatctacagggccacctttttcctcctcatatcaccaacagggactaaagacaacctgatgaggccacctggcatgacctccagcagccagtaacttgttagggaagagacctgcttgggccacatgggtctgctgc

SEQ ID NO: 69371 - DNA, 1525 bp, Homo sapiens
tgcaatggcgtgatctcggctcactgcaacctctgcctctcaggttcaagcaattctcctgcctcagcctccgagtagctgggactacaggtatgtgccaccatgcccagctgatttttctatttttagtagagatggggtttcaccatgttggccaggctggtcttgaacttgtgacctcaagtgattcgcccaccttggcctcccaaagcactgggattacaggcatgagccaccgtgcctggcagaaaagcttcttttccagttctgaagagtgtgaaggtaggagagccagaattcagttctctcactttccaacccagtacctggagagagagtgtcttgctggtcactggggagtgataggatccggatgcccgccttcctcttcaagtttttctttctgattgggtttcctgaccctgattgctggtatgggtaagaatgactctgaattcctgagaaaagggaagagggttaggacagaggaaatggaatcatttagtcaggtaaagggagcaaagccaccgaaggcagtggttggaggtgtagatgtgaggaagttgggttgagaccattcaccatcaaggcttgaagatgagtgtctgtttgtgtgtgtcatgttggctgtgagttgcagaagagagtatctggcctctagttgaggagcacttccggcttctgagctgaacatggtgtagaagagaggatactcaatccaaaaccctggctatctatgcagagggctgaccagttctacccatgtacccttccttccctcacccttcctcacaaaccaggcatattgagagctgtctggcagtcaatccaggcgaggcagcaggtttgagaatgggcttgtccgcctggcacctgcttccccccacttccaccttcacccctccatcccatatatcgttcagggtcctcccagcacagaattgaatagaaggacttttaaggcttggagggcttagcttggggctctaacccacaggaattctttctgagttctgaatatagtaataaagggcactcttggccttaggttatagataggagatggggaatctgttcttgtctttgccaaatcttgcatttatgggatgatacctctttgattagaacagccataggggaagagtggaggaagtaagtaagtgcttcattcttggatgaatatatgcataaacatacctgaaagaaaacatctagtcagctgggggtatgtatacccttgaaaatacaacaccaggccaggcatggtggctcaattctataacctcaacactttgggaggcttaggtgggaggatagcttgagcccaggagtttgagatcaacctgggcaacatggtgaggccccatctctataagaaaaaaaaaaaaaaaaaaaaaaaaaaaaatatatatatatatatatatatatatatatatataaatatatgtttatatgatatatatacaattatatgtttatattatatatatatatatatttttacttttatttaaaaaaaatagag

SEQ ID NO: 69372 - DNA, 1105 bp, Homo sapiens
tttccatgtattttttcctacttaggattttccactctatctttgtggttcatgaggactttgcctcttctcctgcctcattccctgactttctctagttagatgtcagtcctaaataggttttcctcacttcaggcctcacccctcaccttgtttttttgggggctccagggaccaatctggggctggaaatgttaggaggttgccttggtgctgccccagatctgtccagcagggggcagtaagtgatcttggtagtatccctggctgctaagcccttggcaggggtggtcctttctacattcccattcacttaacagctcttttgggattgggtgtttcattccatttctgcccactccctctcctctcctctctggtaggtttaattttatgctttccctgattccagctttctgcttcctgaggactcccgctccccccaccccaaagtttgtctgtggtgttatagtggtaactgcagttcctcctctggaatgtagactgtatatgtttaataactcaccttctctatccttgctcaaaatgtgggataacgcgatgactgtgaccctggttggaaattaaacttgttttatgcagctttggagccgaccttcatctttgctgtgcagcagccgtgggacagtagtttcatggtgaggggagtcctgtttctggtccctctctccatagtgctccttctttcagcaaaggggtaaaaggcacacttgattgatagagagtaaggttatggaggaacttagtgccactccacactggttatttcttcccatcataccccgcggcgggggagcccaaatgaattgggcatcagagtgtgagggcttcgtgactttcctcctctagttctaaagggtttaaacctgaaatcagctgtatttctcacctgttggtagactgtatggacttcactggctgaagggccctgaacttggagggccccatgtgcctctactctcagatctcctcagccttgcacatgaggtgcttctagtttgaacagagaccccctcactagtctagttctggactttggcagtgaataaacatgaaggataaacgtctgggcagtgtaatgacc

SEQ ID NO: 69373 - DNA, 4341 bp, Homo sapiens
ctttgtctaggatcaagtcttccataccagggaccaggccaaaaccagactgccactgcccctacttgggccccactgtccccagaaagcagctgctgtgatcatgggcaatatctttggaaaccttctcaagagcctgattgggaagaaggagatgcgcatcctgatggtgggcctggatgccgcaggaaagaccaccatcctatacaagctgaaactcggggagatcgtcaccaccatccctaccattggtaagagcacagcttggatgtgggctttcacgccggcagctgaggcagggcagggacctattcctggttccccaacctggcctcttctccccaggcaagtccatacaatttgtggggttcagaaaagagggtggtgttgtttagcttactaccaggtgctgaggctgctgtttgcccacctaacctggctctccctgatgcgggaacttccatggcctggcactcaacagctgccctcaggcacggagttggtttcttctctgtgttgtttggaaagcaggtaaaaggctttgatgttcctgccaaaggcttggaattacttgggtttagatctttggtggccaatcttggttacagtttgctgaagggaggtctccctacatttgctatgtagatgggggctccagtcagcattgtcagctggctctgcctttggggctccaggatgccagcttacttccctttcttcactctgcctctcaggccccacatcttagctgaggccgactctggtagccaaagtaccagagcagggctgagtcattttgtaggagggagcaccaaagactgagtggaaaagtcaggaaagttggcccacgttacccaggcaactgtgaacctctcaaccaacttcctcatcctctttgacttctcttaggttttcattttggccttcaggctgctagcttaacgattatcaggtctgaggaagccttagcttttgttccattgttggtgttatggccaccactgggggaaagcagaaccaaactcattgtggtggtgtttgcggggctagtgtttgaggccaagtggccattgcctgttttttttccaaagggttcaatgtggagacagtggagtataagaacatcagctttacagtgtgggatgtgggtggccaggacaagattcgacccctctggagacactacttccagaacacccaaggtatgctcaggcctagcgtgggttggttgggtatgagcagagagtgtggctgtctttgttaatgggtggccaactgttaccctgctgcagctcctgggggcagaagaaagggaggaaagggagcaaatatttggagggtgtcaggcaggtgtggtcttttggttggggggagggggttacctgtcatcttagtgcagcccatgctctgccttcctagggttgatatttgtggtcgacagcaatgatcgggagcgagtaaatgaggcccgggaagagctgatgagaatgctggcggaggacgagctccgggatgctgtactccttgtctttgcaaacaaacaggtgagacttcttcccacccctgaatttgggagacagcaaactggctgtggaaattgttggctcttgggcctattatatggttaacccttttagtatgctctcaatgttagaagcgtgggaaactgagcacttggcttctttatgcccctcttcttgtgccccaccccaagctttatttagcaacatttcagtcctcaggaattgtctcaaatctttctttcatcttgcctgttatctactttaggagaattggcctcactcctgctgtcagacagacctgattctttggtcagtctgaatcacgtctcttgcttccccaccatcctcgtatttggtttccaattcttcagtacagtgacctctagtgctttggatcttgagttctaggtgactaaatccaaagtagctccttaggatcttgttctgggtttcctaaaataaaggaggaggggaaggtgctggtacacatttctttggtagatgggtgttctagaagcctttaaaaaatcctgaggcttctttttatgtgtctcccacgtgctccaggatctgcctaatgctatgaacgctgctgagatcacagacaagctgggcctgcattcccttcgtcaccgtaactggtacattcaggccacctgtgccaccagcggggacgggctgtacgaaggcctggactggctggccaatcagctcaaaaacaagaagtgaaagccagacagccctaacaaagcaccccacccacccctgacatacctactgtcaccctgccccagtcctaccccttcctctccatgcaagtgtggccagggccctgggtatcatgtccacatgcccagcaagagccttgcctcccctgcctcccctcctttttcctgtccacctatatgaccaatccctaattgctgtcctgatgatgagtcattccaatttactggatttaaaacaaaaagttgttacggtttcatggggtggcccctctctctctcaccctctgggtttcgggaggtcgagtggggtattctctttgtttggcagtggttgctgtcctcttggcatctgagtcctttccctgtccccacaagcccttctactccctgtttgcctttcctttgccaccctctccctgttttacatggaaattgcacgggcctctctgtgtttgcgtgcatgtgtgcgcctgtatatacatgtatagagagatatatttgtgggggccggggggagcggggagggggtggagtgaagctcagggcttgcagccaggacactgcccactggagcctgtcatctgccccttccgtgttggtgagattaagggaagaaggtgggagggcattagtcaagccggactgccccagtctttgactggttaccctcctctctgcaggtaggtttttctggatgataggacagatgatggattcttcaccaccattttccttgtactcttctctccacccttcttagggctggaggatggcatttatctctagatgactgttcccaaggagatgccactctgctctgccttactgttgggaaggagagaggaacccactcactcttatcagcttagagtgttcaactgatccttccccaccatcttcagatctgttcctctggagcttgactggggggtggggatggcaagtccatggtgtgtgttagggacccagggcattgggggaagggaggcgaaggcctgaggttttccatcttcattctcttttgttattaggagaaggtgaggcatgggccaatcccattcctgccttccagtgccccaccacccttctgatcttaggggttggatgggtcatctgtccttggtcagaattttctcaccctagtactcctactggcctgaccagggctgactgggtattctaatgaggagctgggaagtggggtgacatagctgaccttagtatcaacccccctcttctccaactcttgttttctagtccaggatatgctaaaggacgaagattttctattgtttccaggccctcagaccatccttgctgtcccttcaccctccatgcccctgccatcctcactcacttctcataaatggatctgggggttagagtggaggaaataaaatcctgaagtggttgtcagtgcttgtgggatgcagtggtcttcaggattctccccgcattattatgtagttgttcagaagctgttgctactgcgtctctctgtctgcagggggcacttgttcctgaggtcctcgcctgggtcctgacttctgtagtttctgtgaagacgtggctgtcctgtgggctcctgtgtgtgctggctgcgccctgagctccgagacagctgcccataacctgctaaggtcagggcccagggccccccacagcatggctgagggaccccttcccagtagggctgtcccaagccccactccatggggccaggtttcctggccacttttgttgatagcagatggatcaatattagtaaccccatccaagattgaactgtgaaagagaggttccaggggtatctccctcagtgccagttacttagtgatgtgttacccaggatgcagcaggtgtgtgcaggtatcttgctctctaggcctgtgtgtgtgtgtgagtgtgtgtgtatatgggtgtgggtgtgtttgtgtgtggtggttgtggggggggtgttggaggttctatttcatttaaaaatgtattcatttccctggccccacagatgcttccctccatactttttatttgctctgtttcctcagatttattttgtcttgccccattgcctctccttccttgaactc

SEQ ID NO: 69374 - DNA, 1048 bp, Homo sapiens
ctctttggtaggtgacattgaaacagacaactaactgaaggaggtgaaggagtaatctatgatggttatctggaagagaagcattccaggcagaggtgatagcaaatatgaaagctttgggccaggcatggtggctcatgcttgtaatcccagtgccctgggaggctaaggcaggaggattgcttgaacccaggagtttgggaccagcctgggcaacacggtaagacctcgcctctttaaaaaaaaaaaaaaaaagctttgaggcaggaaaggaaagtgttggggaattggagtggagtaagcaaagagagagtagtagatctcatgagagaagtaggggagtgtaggtcttgtaggaccttgtaagccatggtttgggccttgggttttactgaaaaggagctatgaagccacgagtgggttttgaacaaaggactcatatgacctgagtttggttttaaaaccaccctagatgctatatggagaataggccgaaaggcttagggaagaagcagagaaccaatgagatgactgcctcattgcagcgaccatgtgggacagccccctccttggatgggccacagtaagccaaggatgcacctagctgaggagtaaaggggtagccccgccataccccacctctctactgccagtgcactgttgtttgaacagggcacaacattagcagctggcattccacagagtgtaaaggatcggcttcttttaagagtgcggctttcttattcctcctttattttggtgtggaagaaagatggagttgcaaaaatataggaagggaagaggcagagtctcttgattaaaggagaaagcataaaccttgggaaactggcaagcctgaaccttgtcaggagtcacagagagccactccttattccgctccctcctctcccacccttgccagaagtctcagggtaagtaaggttaggggagggaggggcattaatgatcttacaatgcctttgggtatagggtagaatgtcagaactgaagggacttcagaaatcatctagttcaatcccccttccat

SEQ ID NO: 69375 - DNA, 1058 bp, Homo sapiens
gcacccggccaatttttgggtttttaatagagacggggtttcaccatgttggccaggctggtctcgaactcctgacctcaggtgatccacccacctcagcctcccaaagtgctgggattacaggcgtgagccactgtgcccggccttttttttttttttttttttttaagacagagtcttcctctgtcaaccaggctggagtgccagcggcatgatctcagctcactgtaacctctgcctcctggattccagcggttctcctgcctcggcttcctgagtacaggcgcgcaccaccatgcccagctaatttttatatttttaatagagatggggcttcaccatgttggccaggctggtgtcaaactcccagcctcaggtgatacgcccacctcagcctcccaaagtgctgggattacaggcatgagccaccatgcctggccagctatttagatattttatcagttattcatcagtcccactgtatattaaatggcaagagagaatcccaccaattctagtcttctagtccttttatgttgttcccaaaccagtcctgcgtcaaatatgtgtggaaaatggctgagaatggacaggatagctaagcaactcgctgtgcattacacagagataccaaatcctactggacagaagaaataatataaggacatcctcagatgaggcttaaatcagccaatgtgcttaattgaactcccacaatctacttggcactagagggaggacagattcaaaataagtagacatagtctttgcacatagggaatacacagcttaacgtgggaagcagtaaatacacagacttataaaagaagaaaaactcgacaaggtagtaagtgccacattgagtggttaaggtcattcaaagtaaggccttgatgtggcatgccaggaaataataggtgtaacactgggatcagcttttgaaccaggacttcagcatgacagccgagcaaagaagcaaatcaaaggacagtgtacctgtgttctggggcaaggcatattggctagttatatctttttcagccaccactatactcaca

SEQ ID NO: 69376 - DNA, 1025 bp, Homo sapiens
gcctgaactctcctcaccatttttgttgaggtaaatttagaggcagaatggtatagtaattaagagtggatcttggaatcagacaaaattagattcaaatcctgcttctgctaattaccagttgcatgtttcttgtaaaattgcttgtcttctctctttattttcttcatctgtaaagaaggtaatgacatatggttttcaagagaattattatttttttggttgtcagtagaattaaatgagataaatgtaaagcacctggtattgtacaaagcatatagtaagtaccaaataactgttagctgctattaataatccattatcataatcctaataatatgaacactcagggctgccttagaggaaaagaggtttacagaagaacaacttgctgcctgaggtgcttgtgtagagggatgattgttaccatgagtttctgtgctggtcgtaggcttatgagcagcgaaatcttttttcagcttcagcatcagcatcgcagagacagctcctgctgcctgagtgggaggtgaagctggagcaaggcaggggccctgaaccatcaatttggatgtagggtgaagatatgggggcacaagaatagtattcatattagaaaagtcagtgtgactctgagataatggttcactcttccagaaaagagcaccctgatgacctaggtcagggatttagattcctagatgcccttattttaggtctcagtcagtatatggggatcttcatttagtccactcttttcatttagtccaatcttaataaaaaatgtctgcttttgagtatctgtttcagaatatcatggcctagaaattgtgatatctgtagaattatctgtctaccgtaccttcttcacttgaacatctgttgcaaatatagatagagtgctaataaaactatttgataatgaaaagacatgaggagcgtttggaaagggtcccacagatgtttgaaggtttcatattatagtctggtaaagaactgactaaagtagggatttcatgaatgtgtta

SEQ ID NO: 69377 - DNA, 1084 bp, Homo sapiens
tagggaagtggtggggggggggcactgttaaatatggagagggagaagggagtctcttctgtgatctaagggtcttagaagcttccaggctttcaaatcctatttgaaaaggaattgaatgagttgggtgtggcttgtggctgacaattgccctgaatccctctgttgaggttggatgggttcagggtttggaggctggctctcttgcttccctgcaagctccttcctctgtctccccagaatctggcagcagaaaagacctacaacaacctagatgtatctgtgactaaagccttgcaacatcgatcacattactttgagggtgttctcaagtgctacctgcatgagactctggagaccatcatcaacaggctagtggaagcagaggtagggaggccagcaaccctaaaggagctgaggggagcagccttgagagtggggtttggcaaggagagtaggggcagaggggcttcccctgaggccagcactaaacattccctttctcccttgttgctctgtgccaggttcaccgacttgtagtggtggatgaaaatgatgtggtcaagggaattgtatcactgtctgacatcctgcaggccctggtgctcacaggtggagagaagaagccctgagctgggggaaggggtcatgcagcaccaggggatatgcccaactcactgcctgctggaagctctgtgggaatcagatgaaacttgagggaattgtgactctgttccctgttcagggtcccctgcccttctatctgggagctagggaaggtatgggggaggaaagagaatggatttatagctacccttaccctcacacatacacttgaaaaaactttcagcctagccagttctagcccctgtcctcttagatatatccccctttctgggtgaactataggctctgtgcctctcagacaaattctgatctctaagagatccccagacctcacttgcctctgcctccatcttggccctgattcaaccctaagataatagcacaacaaaattcttcataaagatatttttattcacctgttccgtgctatatggaggaggccaagtccatttagtga

SEQ ID NO: 69378 - DNA, 1289 bp, Homo sapiens
accatccccagcacagtcttggaagaattttaagaagcttacttcattgaaaaaagaggaaagtgaaaatgtgctaagtatatgaaagggaaagcttggattaaagatgagaaacatttttagactataacatgttaaagagagatactataggctttatgttttagtcaacttcttttacctatagggaccaatagataaagtcttaacctggagacaggggttggatgaaatggtttctaagaggtttatccaggttttgtggaaacaataggaacaagacagataaaataaggggtcttattaaaaaataatgctctaaatatttgagatactagaacactattttgttttctgtctcttttgattgggagtttttatgtggaaggaagctactaactatcccaccctatgcagagaccccagaatccaacaatagcgtgtatacttccttcatgaagtctcatcgctgctatgacctgattcccacaagctccaaattggttgtatttgatacgtccctgcaggtgggtgaaatcctcttttcccttccccctttggagcctgtggtttaatacctctcatcctatctcatcctaagggtaatatccttatccttctgtgaagttagtctcatgttttacccaacatgcccaaacactgttctttttttacagtcctgcccctgtggatttgcctttatgattattactgtcttggctacaggtgaagaaagctttttttgctttggtgactaacggtgtacgagctgcccctttatgggatagtaagaagcaaagttttgtgggtaagcaaaagtttctggaacacaatattattggcatcttgtgctgggcagggagacaagcttcaggcagtgctgagggctctgtcttgtcctctaggcatgctgaccatcactgatttcatcaatatcctgcaccgctactataaatcagccttggtaaggaaccttaacccaatgaccaaaatcactttccctgccctaaatccctcattctcatttctttttctccaagcaagccacgagggcttaaggaagcagagagatcaggtctcaaattctgttgcttctgctttcaggtacagatctatgagctagaagaacacaagatagaaacttggagaggtatgtagagaattggggttataaaaggataaagggatggcgggtttctgggaaacacttttccatggtggtattttgtgacccatcccttttcccttcagaggtgtatctccaggactcctttaaaccgcttgtctgc

SEQ ID NO: 69379 - DNA, 1047 bp, Homo sapiens
cagggttgttatgaagattaaatgagatcatatttctgaagagccttataaggctgggtgcagtaactcgtgcctgtaatcgtagtgctttgagaggccaaggagggcaatcacttgagcccaggagttcaagaccagcctgggcaacatggcaaaactccatctctactaaaaatacaaaaattagctgggtatagtggcttgcacctgtagtcccagctactcaggaggctgaggtgagagaggatcacctgaccccgaggaggtcaaggctgaagtgagctgtgatcacaccactgcactgcagcctgggtgacagagcgagaccttgtctcaaaaacaaaaaaaaaagggtttggcgggggcagtggctttatagtgctttaaagaaagtcattatttgttcaccagcccttcccctaatgttgctaggctaaaatggatggaaccaggttaagctgaatctgttttcttatctctccaggtcatttcttcagatagctccccagctgtggaaaatgagcatcctcaaggtaagtttactgaagaaaggaaactgggcatgaaaacaatagcctgaccctaacaatgtcttcaacaatgcttttgaatctctcccctggaaaaatcaaagcagggccagataatgtgccaaaccacaaaaatcagtgacagtagtttggcaagatcacccaggaataaatcttgggcagagtggggatgattaatatcttcaattatcaaaccacttgagagaaacatctgaggtacaggcaaaacttccataggcaactctgggctggctaccatgttttagaagtcctgggtattttctgcatagtccagaaacagtgctaccaggattttatcacccagcaagctcactaaagccactgaatgtacaccaaaaattatgcaaagggcttggtgcagtggcttacacctgtaatcccagcactttgggaggccgaggcaggtggatcacttgagctcaggagtttgagaccagcctgaccaacctggtgaaaccctgtctctactaaaaat

SEQ ID NO: 69380 - DNA, 3637 bp, Homo sapiens
agaatcgaggcatctacatgttccgaataaacaatgaacatgtgattgatgctacgttgaccggcggccctgccaggtgagagatgacgaggaaggagggatttagtggtccctgagagtggcactctgggggatagacgaacaaggaatcaaaattgtcccaagttagttgcctgacatccctgactctgtcccactgcccaggtacattaaccattcctgtgcccctaactgtgtggccgaagtcgtgacatttgacaaagaggacaaaatcatcatcatctccagccggcgaatccccaaaggagaggaggtgagaggaagtatcctgactgagtgacaaagcagctcctcctcctttcaccccttctctgccattccctaaatgtggattcctaggctgggcacctcagatcatatcttctctggcctcccctcttcctgtgggggactagcattgattctgccctcttctcttttcagctaacctatgactatcagtttgattttgaggacgatcagcacaagatcccctgccactgtggagcctggaattgtcggaaatggatgaactaagaagctttgaggctaccaggcaggggagtccccctacccacaacctcttccctgaaagggatgagggggaagagaggtagcagccagagccaggacccagggttggggctgccggctgacccggagcccctggagcaggaggctggggcagagggccctaggccaagcccaccctgggcaccagggacaatcctcttccccaccaccggccctcaggctggcatctctgcccccagctccaggaggggccagacagaagcagccattgggcatctcaggtttgagggggatatgggccgggaactacccagaagcatctgggaggcagcagggtgggggaagaggatgtgtggccgggcctcacagccctgctgctcccactgacctctccggcccaactcacggctgcaaagagacttgactaagcttgacaatcccaaaggccgggtcccacacctggccctgcctgccgggtcctgcccccaccctcacccccatccccctccctcttgatctgtctctgtttccctcttttcctctgtgtttctgtctctctatgggttgtgtttccttgttttccactctgacaaatgcaacatgaacgggaaagaggcgcccagctgcctaggagggcaagctgggcaagccgggcaaggagaccccgcacccacacctacctcatttaagtgttggattttttgctgttttgaaatgtgagaccctctccaagccccctactgccccaaccctctcccccacctcactgccctcttctgagtgggtggaaggggggtaggaggaggaagaaaaacaacaacaaaaaatccatctttgtttttaattatgggcatgggatggtggttgaggcaaatgatgatgaagattggggatgactggcccctagttgctctaggacttccttctccatctggacatgggggcaggagggagctaaacctaggaccaggatatctccctcctgttttcccaacctcatcatgagcctgtttgccctccagcccctggacgggttgggtggggggtagggtgagggctatccctgagtggcatgcccatacctagtgaggcagggtgtggcccggagctcccactttccctcagtcaccaaactgctgctggtctggtgggaaggggtggtgatgtgggggtgggggagcttagtgtcagcgcggggagggtggggggtatttatctatttatacatgggattgtacatagtcttgtggggcatgggggagccggctggaggtgagaaccctcccctctccccccaccccccggggagagcaaatgtaaaactactaatttttgtgctttatatattctatataaatatatctattttctttttacaaaaccagtttataaatggtaggggggtgtggggcggacacatggagctccccttgtgggggggccccctccattacccgacctaccgcccttttcctcaccccccaccccactccccaccccctggctgtgactgctgtaagatgggggtatagaggctgggcaattcccaccccctgttgtatagttggactatgttataacgcacaaaagagagctgaccccagggggagccagagggtgatgggttccttgcctccctttccttcccctttctgcccaagcttgtgctgcagttgaacctcttcctgggggtgggagtaggtaaggggtgggtgaggccccaaacccctctctggtagggaaccgtggggatgaagatgaagcttatatgcagttctcttctaggggctgtgggcaaagggcattttgtaattaatattttcaagaatcagatgtctggagtgtaggggtgggcttggtggtggtggacgggcgggcctgctggagggggagcttggtcgctgttgtgattttaggtttgtttttgttttgttttgaatttggggggttgtggattgttgggggtagggagattttttttttttaaagctgcttcctcaactgtttcaagctgcaaatgtttaagagaataacagcccccactcccacaggaaccgctgtaattaaatcagacagtaggaagactgggctgctgccctcaaagccacagcccttggatgttccttttccgagagcagaaggtctaggctacagggagggggagattggctcccgtgagtcaggctgtgtttggggcttgggccctgggattgggaaaaggggatggggcagactttgtaagcatatgctaggtatccgatagtcctgtagaatttagtgaagaaaccttatacagtttttaatttttatataaactataactcagacccaagctacaaggttggaattttggttggttttttttttaagtaccctgcctgtataattgcatcagaatcccccaccccaccccccgcccccgtgtttgtattttgggttggtttacactcgcacatactcagttttcagttttcccctttacagtcttctcccctcacctccaggaccctccccctttttaaaaaataaatcgctgacaagtgtgaatcccgtgaagactttattttgtgttgtgtgtatcctgtacagcaaggttggtccttcgtaacaacggatgaaatggttcccttttttaaagcgccctctctccctccaccctcagcgcccctgtccttggcatgttttgtatcagcgatcattctgaactgtacatatttatgttgcgagaggcaaagggcaagttttggattttgcttcttccaagtttgtttttaaacgacaaataaaaaaagaacattttaaatacaagcggctccgtcccatgaccctcgccgtcagccggatccgtgcggtccgcgaggacccgggggagggcggttaccgaggcccgccaccgccggaagggtgggttccttgccttccgccccagtctggcgactgccatgacgtgggcggaagtggcgtcgccgcaccggatgtggggcggggcctgccccaagagagtttcctaaagcgaggaaaccaagccgggcgcctcttgcaatggagacggtgaggagtgcag

SEQ ID NO: 69381 - DNA, 1649 bp, Homo sapiens
tgagactaggaggccaagagaggatctggaagaccaacacaacttcatgatagggaggcttgaaggcctcagaaaactgcagttctggattggggttagggactggaggtcagtgagcagaagttgcctctgaggactgctctcttccctgcttcttagccgtgtggaatcgcatcattgagcctgtggctgccatgagaaaagaggctgacatgctgcgactcttccctgagtatctgaagggcgaggagctctttgggctgacggtgcatgccgtgcttcgcatagctgaatcagtaaggaaggggctgggagctggggggcttggcgggcactgagaactttggcctaaccccaaaaaaactcaggctaaggtgagtatgaactgtgcccacagctgcccggggtggagagctgtcaaaactatttattccgctatgggcgccacccccttatggagctgccactcatgatcaaccccactggctgtgcccgatcagagcctaaaatcctcacacactacaaacggtgagcttgtgatgctggagccaagggatgtgggtgtgggtgttgacagggatcctctggtcccattatgaggatttaggatacagatcagagttcccgtggagaaaatggggaatcactcttagacttcctaattagagggcatgcaggtattagtagggtatccttttcctcctctcccaacctgctcagatgcacttgggatataggacagaattatcttgggcaccctggggaggtaatgggtaaactggtgaaattttatgaaatatataagggacttggtcacctctttcttctcctgttttacttctgggggagggcctgtgattctcccaaacctcagataccccatgggtgctagggtcaccttcccttccccatgagtgttggtgtcaaaaataaatagttagagatataatagaaaaataataaaaccttacatttgtatagcactttatactttttttttcaaagcgttttcacatccattatctcatttgatcctcacaacaaccttatgaggtaggtagggcaggtggtatgacccccattttacagctgagaaaactgagacccagaaagattaaatgactaggcaaaggtcacacagctgggaccagacccttacttcttcactgcaggtccttgttctttctgtgtaccagggaccttagtccctgggtagagggaggcagaatctgtggtagcagggctttctcgaaggtctttggtggctcctaggctgttgtagaatgtcagagactctccatccctagccagccttgtccttgatgccctgcaatggtggttttcaaactgtgagtgcctgtgttccaaaaagtcctggatcacttaaactgatgggttgaacttttccttcccatgcatatctcttccttccccaaattggattaaaccagaagagctccattgtcatctagtttatgtattggagttccagtcaacattttgttaaagaaaaaagcaaagatttctgctaaataaaaaaagaaccagaaacgtttgaaaaccactgctctgggatggcaagaatttggctggtgccctaaggtggtaaaaggcatcctgccaggcagccgtcattcccctgcactgag

SEQ ID NO: 69382 - DNA, 1311 bp, Homo sapiens
acctgtgggtgcacctcaactgtgccctttggtccacggaggtgtatgagacccagggcggggcactgatgaatgtggaggttgccctgcaccgaggactgctaaccaagtgctccctgtgccagcgaactggtgccaccagcagctgcaatcgcatgcgttgccccaatgtctaccattttgcttgtgccatccgtgccaagtgcatgttcttcaaggacaagaccatgctgtgtccaatgcataagatcaaggggccctgtgagcaagagctgagctcttttgctgtcttccggcgggtctacattgagcgggacgaggtgaagcaaatcgctagcatcattcagcggggagaacggctgcacatgttccgtgtggggggccttgtgttccacgccatcggacagctgctgcctcaccagatggctgactttcatagtgccactgccctctatcccgtgggctacgaggccacgcgcatctattggagcctccgcaccaacaatcgtcgctgctgctatcgctgttctattggtgagaacaacgggcggccggagtttgtaatcaaagtcatcgagcagggcctggaggacctggtcttcactgacgcctctccccagggtgagcagtgggcccttgaaatggataatatggaatgggaaaagtttctcccagggtcactgttacaatgtctataagaggacctgtagcttctatgtgaatgatcctccttcccccacctcaggcaggcagggggtctcttgaaaactcccagtgaaagtgtttgagcctctcttgtcaccctaaattcccttgtagttgaaaatattttgctggtctaatctcacatattctagttctgttgctatccccagtggaacaaaaggaaacagttctgagactatcatctgcctcacccaacctaatcctaaccaagttccttggggttgtttttccctggacgaaatcagaattattttgattttagttttagtgttaatgataaaataacagtaagagcaggtacctttttttgagtgtgtactgtgagccacaaactaagctaagtgatttgtgtagtttattttgttcatacaaccctatgaggtaagtattatactacgattatgcccagtttgttcataaagaaactgagtctcagatttcagtacagtcgtgcattgctaaatgacagggatacattctgagaaatgcattgttaggtgattttgtcattgtgtgaacttcatagagtgtactacacaaacctagatggcatagcatactacacacctaggctctgcggtatac

SEQ ID NO: 69383 - DNA, 1044 bp, Homo sapiens
gagcacctgtgtgtgtaatgacacaggtactacatgacagcattgccccagtcatgtttggtgggactctgtcagctgttttgaaaatattaacgggcttttgtggtcaaagaaagttggaaaacacagttaaaatgacaatatgggtttctttactacaagagtcctcaggtccttttaatttgctaacgtgtatcatgagcctccaagtcatggatagagcatgcatcatttcctaaacgtagttgatgtagttcccttttcgtggagctcccgtcagtgcccacagcagtttgggaaaggctgctgtgagggaagtgtatgaaaagagctgggtgacataggatagaactaccctggggagtgggttctaggtgtccttgtccccacccagctggtagtagagctcacctcagacacttggctgatatgtttcttccatcccttccctggccctggcagaacctgaatggcgtgatggtggcagtggcggagctgctgagcatgaagatccccaactcctatgaggtgctgttcccagagagccccgcccgggcaggcactgagccaaagaagggggaagctgagggtcctggtgagtgtggcagggaagccctttgggacttgaggggagtgattctggtgggaggctctgatccactcctttctgcaggtgggaaggaaaagggtctggaaggcaagagcccagacactggccctgattggctgaagcagtttgatgcagtgttgcctggctataccctgaagagccaactagacatcttgagcctcctgaaacaggtaggtctgggggagaaaaaggggtgggtgttagaaaaaaggggctgccggccaggcgcggtggctcacatctgtaatcccagtgctttgggaggcaaggcgagtgaatcactttaggccaggagtttgagaccagcctggccaacatggcgaaaccccgtctctactaaaaacaaaaacaaaacagtagccaggcgtgatggtgcgtgcctgtaatcccagctactcgaaaggctgaggcat

SEQ ID NO: 69384 - DNA, 2127 bp, Homo sapiens
actaagaacattacctttgaagaatgctttccgagtcataaagtgtacttatattcttgtcacatttgatcctcttaacacctctgtgaggtagacggagtagggatcatcatctgtatcaaataaaagggtaaactgaggtgaaataacacaggttgactcaacaaatatttacggagcccctttttgtagcacggtgcaagtaaaaacaggcccacatgtcctgtgaatagagctgattcacccaggccgactggctcctaattcagtggtctttctgccttgccgtgccattgttctgcctggcgtggttgaagtcaggatgttgaagggaatcgcagatattcactggagcattggccccatagcccagctcacttggttctcccctctccagacctggacaaatttgctgcagaagatatcattgatcccattgcaaaggccaagatggtggctttgaaaggcatcaagaaagtgatggctcagggcagcattggggtggcacctggtatgaacaggtaagactcagggctggaatggggttggcccttttctttcccagtcacaccccttcttggctcccctccctacttgtcccacgtctctttgctttccaactttcttattgccaacacttatcttctgtgctttggtggactccagacagcaagtgtctctgctagcccagaggctctcggggggacctagcagtgatctgcagaaccatgtggcagctgggagtggccaggtaagtggtcaggtgggagtaggaacttgtgtcttatgccactgggccacccttcttagggcctagcagggaacaatgaccctttagcagcctctctcattgcaggagcggagtgctggtgatccctcccagcctcgtcccaacccgcccacttttgctcagggagtgatcagtgagtatggggcgtgggaggaaggtgcaggggagtggtttgggtcatatggaggaagagggattgggattacccttttgcaggtcctgacacccagcttcttttcccagatgaagctgaccagcggcagtatgaggagtggctgttccatacccagcagctcctacagatgcagctgaaggtgctagaggagcagattggtgtacaccgcaagtcccggaaggctctgtgtgccaagcagcgcactgccaaaaaagctggccgtgagttcccagaagctgatgctgagaagctcaagctggttacagagcagcagagcaagatccagaaacaactggatcaggtgggggaaagcaaacttcagcctagcacccagaaggcagggaagagggttggcatggggggagcatgccccagcctgacctctccgaccctcccatgttaggtccggaaacagcagaaggagcacactaatctcatggcagaatatcggaacaagcagcagcaacaacagcagcagcagcagcaacaacagcaacagcactcagctgtgctggctctcagcccttcccagagtccccggctgctcaccaagctccctggtcagctgctccctggccatgggctgcagccaccacaggggcctccgggtgggcaagccggaggtcttcgcctgacccctgggggtatggcactacctggacagcctggtggccccttccttaatacagctctggcccaacagcagcaacagcaacattctggtggggctggatccctggctggcccttcagggggcttcttccctggcaaccttgctcttcgaagcctcggacctgattcaaggcttttacaggaaaggcagctgcagctgcagcagcaacgtatgcagctggcccagaaactgcagcagcagcagcagcagcaacagcagcagcagcaccttctaggacaggtggcaatccagcagcaacagcagcagggtcctggagtacagacaaaccaagctctgggtcccaagccccagggccttatgcctcccagcagccaccaaggcctcctggtccagcagctgtcccctcaaccaccccaggggccccagggcatgctgggccctgcccaggtggctgtgttgcagcagcagcaccctggagctttgggcccccagggccctcacagacaggtgcttatgacccagtcccgg

SEQ ID NO: 69385 - DNA, 1341 bp, Homo sapiens
aattctatccttcctcactgccctaagcccatgttcttgctccttttcatctgatttcatcctactgactactgtatattcttccaggcaactggtaggaggctcccaagctttctatcagcgagcaccctatcctgggtccctgcccttacagcagcaacagcaacaactgtggcagcaacaacaggcaacagcagcaacctccatgcgatttgccatgtcagctcgctttccatcaactcctggacctgaacttggccgccaagccctaggttccccgttggcgggaatttccacccgtctgccaggccctggtgagccagtgcctggtccagctggtcctgcccagttcattgagctgcggcacaatgtacagaaaggactgggacctgggggcactccgtttcctggtcagggcccacctcagagaccccgtttttaccctgtaagtgaggacccccaccgactggctcctgaagggcttcggggcctggcggtatcaggtcttcccccacagaaaccctcagccccaccggcccctgaattgaacaacagtcttcatccaacaccccacaccaagggtcctaccctgccaactggtttggagctggtcaaccggcccccgtcgagcactgagcttggccgccccaatcctctggccctggaagctgggaagttgccctgtgaggatcccgagctggatgacgattttgatgcccacaaggccctagaggatgatgaagagcttgctcacctgggtctgggtgtggatgtggccaagggtgatgatgaacttggcaccttagaaaacctggagaccaatgacccccacttggatgacctgctcaatggagacgagtttgacctgctggcatatactgatcctgagctggacactggggacaagaaggatatcttcaatgagcacctgaggctggtagaatcggctaatgagaaggctgaacgggaggccctgctgcggggggtggagccaggacccttgggccctgaggagcgccctccccctgctgctgatgcctctgaaccccgcctggcatctgtgctccctgaggtgaagcccaaggtggaggagggtggacgccacccttctccttgccaattcaccattgctacccccaaggtagagcccgcacctgctgccaattcccttggcctggggctaaagccaggacagagcatgatgggcagccgggatacccggatgggcacagggccattttctagcagtgggcacacagctgagaaggcctcctttggggccacgggaggaccaccagctcacctgctgacccccagcccactgagtggcccaggaggatc

SEQ ID NO: 69386 - DNA, 2210 bp, Homo sapiens
ttgggccagctgtccaccatctcacctgtgctctatgccaacattaattttcctaatctcaagcaagactacccaggtacctgtgggatgagggcaagggagacagcctggcaacatggcaggtggaggagtcgcctgccaagtcttctctgactcactctctctgccctccagactggtcaagccgttgcaaacaaatcatgaagctctggagaaaggttccagcagctgacaaagccccctacctggtgaggcagaaaggagcatggattagcgtgggaactgagagggagggagggatctttgggtaatttacctcagttctttccgctccccactcctaaagcagctgggccagaagggatctgcttctgggtagggagtgtgaaaacactacagtatgggggcggggcatgagaccaagcactaggccctaaggctgtgtcccatatccctcagcaaaaggccaaagataaccgggcagctcaccgcatcaacaaggtgcagaaggtgagtggggctgggctggggtgtagcagtcctctagtgggtggcctctcttgagggtggagggccatggggcctgcctgcagcagcctgactgccctatgcctggtctccccctgtagcaggctgagagccagatcaacaagcagaccaaggtgggcgacatagcccgtaagactgaccgaccggccctacatctccgcattcccccgcagccaggggcactgggcagcccgccccccgctgctgcccccaccattttcattggcagccccactacccccgccggcttgtctacctctgcggacgggttcctgaagccgccggcgggctcggtgcctggccctgactcgcctggtgagctcttcctcaagctcccaccccaggtgcccgcccaagtgccttcgcaggacccctttggactggcccctgcctatcccctggagccccgcttccccacggcaccgcccacctatcccccctatcctagtcctacgggggcccctgcgcagcccccgatgctgggcgcctcatctcgtcctggggctggccagccaggggaattccacactaccccacctggcacccccagacaccagccctccacacctgacccattcctcaaaccccgctgcccctcgctggataacttggctgtgcctgagagccctggggtagggggaggcaaagcttccgagcccctgctctcgcccccaccttttggggagtcccggaaggccctagaggtgaagaaggaagagcttggggcatcctctcctagctatgggcccccaaacctgggctttgttgactcaccctcctcaggcacccacctgggtggcctggagttaaagacacctgatgtcttcaaagcccccctgacccctcgggcatctcaggtagagccccagagcccgggcttgggcctaaggccccaggagccaccccctgcccaggctttggcaccttctcctccaagtcacccagacatctttcgccctggctcctacactgacccatatgctcagcccccattgactcctcggccccaacctccgccccctgagagctgctgtgctctgccccctcgctcactgccctccgaccctttctcccgagtgcctgccagtcctcagtcccagtccagctcccagtctccactgacaccccggcctctgtctgctgaagctttttgcccatcacccgttacccctcgcttccagtcccctgacccttattctcgcccaccctcacgccctcagtcccgtgacccatttgccccattgcataagccaccccgaccccagccccctgaagttgcctttaaggctgggtctctagcccacacttcgctgggggctggggggttcccagcagccctgcccgcggggccagcaggtgagctccatgccaaggtcccaagtgggcagccccccaattttgtccggtcccctgggacgggtgcatttgtgggcaccccctctcccatgcgtttcactttccctcaggcagtaggggagccttccctaaagccccctgtccctcagcctggtctcccgccaccccatgggatcaacagccattttgggcccggccccaccttgggcaagcctcaaagcacaaactacacagtagccacagggaacttccacccatcgggcagccccctggggcccagcagcgggtccacaggggagagctat

SEQ ID NO: 69387 - DNA, 1059 bp, Homo sapiens
gctgtgcccctgagcattgtcagtgttggaggctggaaactgtcccatggccctctgtggttcagagtggccatgacccatcctggccttgacccatgggtttctcctggcatttacaggacctgaggatgggggcgtgaaggcatccccagtgcccagtgaccctgagaagccaggcaccccaggtgaagggatgcttagctctgacttagacaggatttccacagaaggtgaggctgtgacccgtacctctttgtgtataagggttttctatgggagaaggaggaggtcctatctttgggactgtgatctgtacagcttctctggtggggagtcctggactgttcctggccatgatcatttgtagacctgtggtgtcacctgaacttcccagtcttcctcaacagtgtccttcattcccccacagaactgcccaagatggaatccaaggacctgcagcagctcttcaaggatgttctgggctctgaacgagaacagcatctgggttgtggaacccctggcctagaaggcagccgtacgccactgcagaggccctttcttcaaggtaatacaggtgggagtggtctgaagactgacataaccaagcttgcctccaggatgggccagttgctcttttctctgatcctgtccgtcttgtaggtggactccctttgggcaatctgccctccagcagcccaatggactcctacccaggcctctgccagtccccgttcctggattctaggttggtgtctctgcgtaacctttgtgggcagtcctcgttgtcctttccctccatctgagttcatgctttgcctccctcggactcctgcagcacttcccctgctcctccccattcccttgttagtgaccctcctcttttggggcagggcagtggcctggggctctaggcagtttgtctggggtgggacttggcatccctgcgccctgtgactctctgcccctgcgccccagggagcgcgggggcttctttagcccggaacccggtgagcccgacagcccctggacgggctcaggtggcaccacgccctccacccc

SEQ ID NO: 69388 - DNA, 1096 bp, Homo sapiens
cccgtcagccctgatgtggagcctggcaaagaggagaccgaggaaagcaaaaaacgcaagcgtaaaccatatcggcctggtgaggtcctgggatggggttgtggggtggtggggtggtgcggggcagctcaataggtcccccagcggcttctcatccacaactctgcctcctcataggcattggtggtttcatggtgcgacagcggaaatcccacacacgcacgaaaaaggggcctgctgcacaggcggaggtgttgagtggggatgggcagcccgacgagggtgagacgggtgagggcaccagtggggcctgggagaaggtggggcaatgctagagagacccagggggtggactcattgaaagggccaagagggtggtagacccagctggtgttgtgggagagagtaggcacaaagtgtcaccctgcaagttgggagcagcatgctctcaacccgagtctgacacttccgttctgtccacagtgatacctgctgacctgcctgcagagggcgccgtggagcagagcttagctgaaggggatgagaagaagaagcaacagcggcgagggcgcaagaagagcaaactggaggacatgttccctgcttacttgcaggtgggtctcaggctccaagcagtgagggaggtgtctgtgccctgcagggcatgaagaaaactgtttctccttgactgccccacaggaagccttctttgggaaggagctgctggacctgagccgtaaggccctttttgcagttggggtgggccggccaagctttggactagggaccccaaaagccaagggagatggaggctcagaaaggaaggaactccccacatcgcagaaaggttagttatgtgggagtgagtggtgtgagagaatccaactttcttctggcttaggagctggcaagttatttgatgggaaatggactggcctccaggagtcaagggtggggtcaagggtcctggcctgtagggctgtgggactggagacctgttctgggcatcagatgtaggacatctctgattggaggggggactcttgctcataggagatgatggtccagatattgcagatgaagaatcccgtggcct

SEQ ID NO: 69389 - DNA, 2581 bp, Homo sapiens
ttgggctgcctccagcctcacccttagaagttccacctcctaggctgggcacggtggcgcacacctgtaatcccagcactttacttcgggagggtgaggcgggtggatcacctaaggtcaggagttggtgaccagcctgactaacatggtgaaactctgactctactaaatacaaaaaaattagccaggtgtggtggcaggtgcctgtaatctcagctacttgggaggctgagacaagagaatcacttgtacctgagaggcagaggttgcagtgagccgagatcgcgccattgcactccagcctggggaacaagagcaaaactccatctccaaaaaaaaataaaaagaagttctacctcttttccacctcacaccctgagaagttcccatcttctgccccagatcaccaaggtgatgctgctcaagggctggcgttgtgtggagtgtattgtgtgtgaggtgtgtggccaggcctccgacccctcacgcctgctgctctgtgatgactgtgatattagctaccacacatactgcctggaccccccactgctcaccgtccccaagggcggctggaagtgcaagtggtaaggagactgggatcttcagtggagccctggggccttgagatgttaaagtggatatgatgttgagtatgtgacagaggctgggtttaggaggccaggctggtggcttgggtttccggtgaggggacttctgggtacttcgggtaggttgggtgctaaagctctgttttcctgctcctatcaggtgtgtgtcctgtatgcagtgtggggctgcttcccctggcttccactgtgaatggcagaatagttacacacactgtgggccctgtgccagcctggtgacctgccctatctgtcatgctccttacgtagaagaggacctactaatccagtgccgccactgtgaacggtgagaacatccctttctcctcactttggccctgttgccagcctcgcattgcctgagcttatttcctccagtctctgttctccaggtggatgcatgcaggctgtgagagcctcttcacagaggacgatgtggagcaggcagccgatgaaggctttgactgtgtctcctgccagccctacgtggtaaagcctgtgggtgagtaccagctgctgggtagggggaggagtcagagcaggggtaccttgctttgggacaggacctcagccacctccgtttgtccttctctccatagcgcctgttgcacctccagagctggtgcccatgaaggtgaaagagccaggtgagtcacagaaattttgaatgccaaagccagaccagacgtcggacatcatctagtctagctccaaccccctagcttcatctccttattttaagaggaggaaactcagacccagagaagttaagtggcctgcccaaggtcacctagtaagttagtggcaaagttatgcctagaaccaaggtctccagcttcccgggcaatgttcctttcatcaggcaccatggtctcttcactgctaggatttcgtcttcagatctcttttttttttttttttttgagatggagtcttgctctgttgcccaggctggagtgcagtggcacaagcttggcacattgcaagctttgcctcccgggttcacgccattctcctgcctcagcctcctgagtagctgggactacaggtgcccgccaccacgcccggctaattttttgtattttttagtagagatggggtttcaccgtgttagccaggatggtctcgatctccggacctcgtgatctgccagcctcggcctcccaaagggctgggattacaagcatgagcaccgcgcccggctgagaacataactctttttcctaagtgaaaggggccagggacatctccatcgtgatatggcactgctgctggcatctaggacactgtgtgctggcattcagcaagtaggggccctcatagccccagacagcaagagaatctatttagtgaacctagggttaatcatgagcaaaggcaggcttctgagttacagttcctctctgaatctccctgggtcactgacagagaactcgggcctcagccagtgccccttggtggcctgttctcctcagcatttagaccctaagctggacttttgtcactgcctttgtctcagctaaggacataggttgaaacttgcagttctggtttccctggggcttccatccagggatcacatactctttcctcttatgcagagccccagtactttcgcttcgaaggtgtgtggctgacagaaactggcatggccttgctgcgtaacctgaccatgtcaccactgcacaagcggcgccaacggcgaggacggcttggcctcccaggcgaggcaggattggagggttctgagccctcagatgcccttggccctgatgacaagaaggatggggacctggacaccgatgagctgctcaagggtgaaggttagcttggggaatcttagggagcggcagagtagggggagcgtgactctgggagtgggatgttgggtgggggctacattgccactcagttacccttaagcactgctgtctcgtctaagtggctctgaggca

SEQ ID NO: 69390 - DNA, 1215 bp, Homo sapiens
gaggagtctcctctgtctcccccacctgaatcatcacctttttctccactggaggagtcgcccttgtctccaccggaagagtcacccccatctcctgcacttgagacgcctctatccccaccacctgaagcatcgcccctgtccccaccatttgaagaatctcctttgtccccgccacctgaggaattgcccacttccccgccacctgaagcatctcgcctgtctccaccacctgaggagtcacccatgtcccctccacctgaagagtcacccatgtctccaccaccggaggcatctcgtctgttcccaccatttgaagagtctcctctgtcccctccacctgaggagtctcccctttccccaccacctgaggcatcacgcctgtccccaccacctgaggactcgcctatgtccccaccacctgaagaatcacctatgtcccccccacctgaggtatcgcgcctatcccccctgcctgtggtgtcacgcctgtctccaccgcctgaggaatctcccttgtccccaccgcctgaggagtctcccacgtcccctccacctgaggcttcacgcctctccccaccacctgaggactcccccacatccccaccacctgaggactcacctgcttccccaccaccggaggactcgctcatgtccctgccgctggaggagtcacccctgttgccactacctgaggagccgcaactctgcccccggtccgaggggccgcacctgtcaccccggcctgaggagccgcacctgtccccccggcctgaggagccacacctatctccgcaggctgaggagccacacctgtccccccagcctgaggagccatgcctatgcgctgtgcctgaggagccacacttgtccccccaggctgagggaccacatctgtcccctcagcctgaggaattgcacctgtccccccagactgaggagccgcacctgtctcctgtgcctgaggagccatgcttgtccccccaacctgaggaatcacacctgtccccccagtctgaggagccatgcctgtccccccggcctgaggaatcgcatctgtcccctgagcttgagaagccacccctgtcccctcggcctgaaaagccccctgaggagccaggccaatgccctgcacctgaggagctgcccttgttccctccccctggggaaccatccttatctcccttgcttggagagccagccctgtctgagcct

SEQ ID NO: 69391 - DNA, 2443 bp, Homo sapiens
tctgtccttagttctgggagtcccaggcttcaggagactcctcaggactgcaggtagcttgtttgagggcacatgaggatttgagagtctagggctttcaaggaagagaatttaggaaaatgagtgttggggaagcatgggcatgccagatcatggggttgctgggggcctggcgtggtactgatgcttgtgtgtccacagtgggggtccggtgcggcgttgtgctctctgtaactgcggggagcccagtctacacgggcagcgggagctacggcgctttgagttgccatttgattggccccggtgtccagtggtgtcccctggggggagcccagggcccaatgaggcagtgctgcccagtgaggacctatcacagattggtttccctgagggccttacacctgcccacctaggagaacctggaggtgagtgaggagaatggggcaggaaatgggataagggctgggtagtcctgagccagcaatcctctttttgttaattctttcctttctctttacctcttcccacctgtaaagggtcctgctgggctcaccattggtgtgctgcatggtcggcaggcgtatgggggcaggagggcccagaactatgtggtgtggacaaggccatcttctcagggatctcacaggtggggctgggccaggggattgcataggtgaagggcagggctggtgggcttctgagagtcaggttggaatgagaaggaccatgggtatactggggcagagctagtgcctgaactgtttgtctggggagagctggctgacactgaggctcttttttcaccctggcagcgctgctcccactgcaccaggctcggtgcctccatcccttgccgctcacctggatgtccacggctttaccacttcccctgcgcgactgccagcggttccttcctatccatgaaaacactgcagctgctatgcccagagcacagtgagggggctgcatatctgggtgagaagtcctgatctttggtcatagggcaaatgagagaccaaatgtgccttggatttttgtactctacagagcactgatcaaagtatagcattatttactgttggtctgccccactaaaataggtgtgaactttgtgagcaccagggttttgcctgtctcatttatcattttgtctccagtgcctagaacagtagctggcagacgttgggcaggcactcagtaactttgttgtttgttcattctgtgcccatggagtgcctgttttgtgtacagcaatgtgctgaggcttacaaggaatccatagctgacctgtggtgtctctaccccctgcagaggaggctcgctgtgcagtgtgtgaggggccaggggagttgtgtgacctgttcttctgtaccagctgtgggcatcactatcacggggcctgcctggacactgctctgactgcccgcaaacgtgctggctggcagtgccctgaatgcaaagtgtgccaagcctgcaggtaggaatggaagggcaggaggaaagtcttaggcacaacacaggttagggttgaaaatgagggcagtcggagaaggcctgttaacatgaaaacaacaaaaaagaaaggaaatgagggcagagaggacactgtaatgttccatgtgcacctgcaggaaacctgggaatgactctaagatgttggtttgtgagacgtgtgacaaaggataccatactttctgcctaaaaccacccatggaggaactgcctgctcactcttggaagtgcaaggtgagtgtaccctgattctgccctattgtccctaactgtgtctgctacagcattctctgtcttgacaagttgtgtactttcgtttagtctttgctgtctgaccaatgcctgttttgcccactcccttcccttaggcgtgccgggtgtgccgggcctgtggggcgggctcagcagaactgaatcccaactcggagtggtttgagaactactctctctgtcaccgctgtcacaaagcccagggaggtcagactatccgctccgttgctgagcagcataccccggtgtgtagcaggtaagtggtggggactgactgagattgggctggcaggttggaagaactgacattggcaggggccttgttaaattgagtggactttgagaggagagccctaaggtgggcagtgccatccacagcattcgtgcctccccccagtgtgctctctaggatttgttagctggtgagagccacagtgcctgctcccctgtaccctctgcagattttcacccccagagcctggcgatacccccactgacgagcccgatgctctgtacgttgcatgccaagggcagccaaagggtgggcacgtgacctctatgcaacccaaggaaccagggcccctgcaatgtgaagccaaaccactaggtgagtagggtttgagggtccctgaaattcatccccttttattctatggcaaga

SEQ ID NO: 69392 - DNA, 1898 bp, Homo sapiens
cccaaacgtggcaagagtccaccctctgcagcgccaggcgccgtacctcactttctccatttgcggactccagttcccaggatgctgagcagcggccaatctcctggctcttcttccatccccctcccgggaaagactgcccctggccaaagcaaggggcagttggaacttcagggaccaacgactgcaagggtatggaattagacagcggccagagtcctagtttcgcggcctgggcggtaaatgaggcggctccagggccgcggcggagaggaggggggcttcgttcccacgtgtctgccctgctgccggcccggcgcggtcggggttaacccggagcggaaggatcccgcagcgtgtgcgtagaactgcagagtcacagcctttcctccgagagggcgggatccctccgccgctccgctccaacacaaaatagggccgcctcttctcctttctccccctctcgagtggggtgccccgggcaaaaggcccccccggatctagcgccgaaggcttcacgaatcttcacgaccgctgcccagctcttgggccaggaaatagccccttcgcaggaaccaccctaccggccgaacaggaggcggagggggggaggcggagcggcgccgcgctgcactactttcctctccggttgcaaatggctgcctcgttccccactttccgctcagtttcctgaccccccggtgccgggagccggggttgggccatgcacctctaggccgcctgcgatcacagtcagccgggggtcgagggggtgccaccgaccagagccggccaggccgggggcggggcagctcccgaggccagaggggaagggaggcgagcgcagggcctggagcggccggaggggagcgggcagagggctcgcaccgcccgccccttccttttcctcgcctacctagcctcctcccttccccggggggagcagaaggtggggggctcgaagccgccgagggtgagcgctcggggtcgagaagcccggcgctgggtgtgtgtcaggttcagccccgcggccccgccggccccgcgtcgccgtagctcgcgcggccccgggcgccggccggggcggggagaggggctcggcgctcctgcgagggtctcacgttccatccgggccaggcgcggggcggcgcggcattccttccgggctgctggggaggcgcctcgacgttccatctggagagcctcgacgttccgcccgagcccggcgcgggcggccggggcgctggccgggccctaggactgagaggccgcccggcgacgcggatgcggagcctgctcgcccaagatcaaagccaccggtgctctctttgtgtccgctcgggattcgccgccctggggctgtccatggaaacctaaactgctggaacctgaggcagagaacccctctttggcttcttgctgtttttttgtggggggagggtggccactccgacctggatttaccgttcttggcccccctaagcccccccgtgcggggggcggctgtgatcgctctggcggttggaggtcggggagcggcccgggctctggccatgttctcggatgaggatttctggatcgccctgtgaagaggtgagtgaagtccgcccggccagggcccagaaagggttggactgggggcacagccagatggactatcttagccggagctggcctttaggttggagaagggggtgccagagctggggagcgttcctttggcagggtctgtcaagggaacctgagccagtcaccagggcagaactgaggcctggtgtcttggggtgtgcctctttaaagactgggggttcagggaaccacgggagtttgggaacctggccagatagcctctctgcctgtttatttttgtgttgggggagctcgactaaactaggacc

SEQ ID NO: 69393 - DNA, 1308 bp, Homo sapiens
gtgttgtccaggctggtcttgaactcctgagctcaagtgatccaccacctcggcctcccaaagtgctgcattacaggcatgagccactgtgcctggccaggaagtcttgattctgaagatttttcagagcacttactgacatttctatcctccatctttatgtcccaaatttgcttccagagaggtacaggcagttgaaggaaagaagctggcagagtcctggggtgcgacatttatggagtcatctgctcgagagaatcaggtgctgggcctgaagactagaagggtggtgatggtagctgtgttttccttattgtactgcttggtggtgggaatgttgcgggaatggggctttcaccccagagctgggtggtattggcactgaactgacttttgccctgaatcctctcctcttatagctgactcaaggcatcttcaccaaagtcatccaggagattgcccgtgtggagaattcctatgggcaagagcgtcgctgccatctcatgtgagcccttgggtgtggggtaactgccttgcttctgcccccggcacttgccatgttccagtggggggcagatcctcaggacttcacgggtatggttgccagctgtgttcctggcccctggacacacagtgtggcatcctcatgtttgcacactttccccaggctccagtggcctggatgtcaatgtttacaaaggggcaaggacctctcatggacactggcctctagccctctgtttttgtttgatgaattctgttataacctatggggtcaggatatgagtcctgggcattatttatccaggacccatcctcttgggtgggttttgggtgttggctgggtaaggggagccggggacttctgaaatagagctggctccctggggtgacaatgtatatatgcaaataaattgagaaatcttttgttgttgacttctttttcgtgtgtgtgtgtgagacggagtttcactctgttgcccaggctggagtggtgcagtgctgcaatcttggctcgctgcaacctccgcctcccaggttcaagcagttctcctgcctcagtcttctgcaggcacccgccaccatgcctagctaacttttttatttttagtagagatgaggtttcacctaggccaggatggtctcgaactcctgaccttaagtgatccacccacctcagcctcccaaagtgctgggattacaggcgtgagccactgcccccggccttattttattgttgacttctatgtatctagtgagagctcagagccaagatctctttttccaaggagtgatggctgtggtctt

SEQ ID NO: 69394 - DNA, 1030 bp, Homo sapiens
cgtgccccagggagggtcacctggatgttgtcccaccaacctttgccatcttagtggtttggatctaggtactgatgtttcccatttcttgccaggatgagtacagcattctgccctattcattcatcattggggtccatggttatgtgcttgtgtattctgtcacctctctgcataggtaagtgaccaaggttgtgagtgcgggacttgggagaacctgaggactgtctcataaagttatagctccaattcttgtgtttaaagcttccaagtcattgagagtctgtaccaaaagctacatgaaggccatgggaaaacccggtaagtggccctgggggatagggacatagtgtgggcatgagggggtgggagagagcagaggggagaattgtcaagttagagaggaggctcggatatagatcctgcctggtctgataaggagtcgtccagccttgatgtaaggagttggggaatgcggggaatgaggggattctgaagtaactgctgtttcctcacagggtgccagtggttctagtggggaacaaggcagatctctctccagagaggtatgtaaatctctgctactcagagcaaaaggaagtgaaatggactgggaatcagtcaggctctcatcctggctcttccactgactcaaacaagtcatttcacctctctttgtctctaacctgaagcttaaggaagataatacttctatcttaaaagccacaatttcatatttcaagcctcagtcctagattcacccattgttcctttgtttacctatattttctccttccacagccctcctcccaaaacttggggaaatggcatgggtcagagaaagtctttttcttctctattttttttttttttagacggagtcttgctctgttgcccaggctggagtgcagtggtgtgatctcggctcactgcaacctctgcctcccgggttcaagcgagtctcctgcctcagcttcccaagtagctgggactacaggcgcgtgccaccacgcccagctaattttttgta

SEQ ID NO: 69395 - DNA, 1022 bp, Homo sapiens
cgaggttgcagtgagcctagaccttgccactgcactccagcctgggcgatagagtgagactccatctcaaaaataaattaataattaattaaattaaataaccatgtgaagtttctaggtcagaaatactcatttttcagccgggtgcagtggctcatgcctgtaatcccagcgctttgggagactgaggtgggcggatcacgtgaggtcaagagttagagaccggcctggccaacatggtgaaaccccatctctactaaaagtacaaaaattagctgggcttggtggcagatgcctgtaatcccagctacttgggaggctgaggtaggagaatcacttgaacctgggaggcggaggttgcagtgagctgagatcgtgccattacactccagcctgggtaacaagaacgaaactccatctcaaaaaaaaaaaaagaaagaaagaaagaaagaaatgctcatttttcaaggacagctgattactttcactaaggagagaccctgtctcagcactggtctctttctacctcaaatatttctggaagcttgaactagtttgctagagctaacataacaaaataccacagactgcgtggcttaaataacagaaatttattttctcacagttctggaggctagaagtccaagatcaaggttctagctgatgtgccttctggagagggctctcttcctgtcttgtagacagccaccttctctctatgtcctcacatagcctttcctcaatgcatgtgctagagcgagtactcgagcactctggtgtctcttcttataagggcactaaccctgtaggatcagggccctacccttatgacctcatttaaccttaattacttccttagagtccccttctccaaatacagacacagtaggggttaaggcttcaatatatgaatttgagctggggggaggagacacaaacattcagccataacaaagttcaatcttccctctccttctctagtccaaaaagagctaagggtcttcttatgctttctgtgttgg

SEQ ID NO: 69396 - DNA, 2350 bp, Homo sapiens
ccctcaccttttttctaccttccattctcctgttggatgcgaaaccagagggcaaagagcttgtgggatgcagacctcggaggtcagcctcccagagcacacaatgacaaggaataggtctggggaaaggagatgcaaatgaagaacacctggtatgtggggtgaccttagactggggagtgggaagacagagcaacttagcagaataagaggaaaaccctctctcttacctcctgaatccaaacctttctggttcctgcaggctgcctgccatctccaatgttcccacactgccctgatgttaaccttcttcactggttgcctcctcccgtagggtgtcctgggccgggtctatgagacagtggtgatgttgatgctcctcactctgctggtgctaggtatggtgtgggtggcatcagccattgtggacaagaacaaggccaacagagagtcactctatggtgagcggcccagcttcctccaggctgcatggcttttcagttggcccatgtccccctgcctggaatgactgtaaccttctaaagtggaaaatgttggcaccttctcccttagactgaagtttcaaactgatagacatctggccaaatgcaatctgcagaaatgtttcattgggcccatgcaatggttttaaaaatatatattattcagttgctaacattttaaattgggaggtttcacattaatatccagatatctaactttgtttgacaaggagaagatctggctacattagtccctggtgatgggggccaaatagcagttgtaccctttagttaggggttaggatctccagtttactataggccctgccactccctattctgctaatgctggccagctttcttcatttgtattaattgcctaacccctgtggggactgtgcccttgtctagactctgaggcctgtcagcctggggacagtaagtaaggagagatgagctgacatgcctcttttttttatccttagacttttgggagtactatctcccctacctctactcatgcatctccttccttggggttctgctgctcctgggtgagtgtacagggtctgggagggaatgggcagggtccttggaccagagtaaccaggctagaaggaaagggaatggggggcatgttagggaaggggtggagagcagggtctggcaagtgactggctcttgtccctacagtgtgtactccactgggtctcgcccgcatgttctccgtcactgggaagctgctagtcaagccccgggtatgtggtattccttgctctttgatcctgcagggtgagcttcctgcagagctggaaccaaacaatgaaacaaccctatggttgtgtagtacacaacttgcagagagctacagcctttgttggttcctgtattctgtacccctatcatgcagagctggtcactagacatgcagggcagaatacagggcaattgggagggactgagcaaagctgcgggccacagggtggtgaatgagggtctgggggaagcctgggactacggagccctgggaagaacagggttctcctggggcctttgggtcagggagcctctgacagttagtctcttcctttcccctgcccctagctgctggaagacctggaggagcagctgtactgctcagcctttgaggaggcagccctgacccgcaggatctgtagtaagttgcagttcttccctgctggggtggtaggcttggcctgggcagaaactgcaggacttgagagcaacaccatcttctctgccctcagatcctacttcctgctggctgcctttagacatggagctgctacacagacaggtcctggctctgcagacacagagggtcctgctgggtatgtggcttcgtagggcttgggatacctgggtttccccaaggagagtagcccctggttccaggtgcttgctgacagcctcccatccctgcacagagaagaggcggaaggcttcagcctggcaacggaacctgggctaccccctggctatgctgtgcttgctggtgctgacggtaggtataccagccctagaggtgaggagtggaccctcagtacttgaggccttctcagggagaggggaggcaatgcagggacctggttatcatcagtaatagtggttgcttctcactgagtgcctacttttatgtcctgcctgtggtgagcacaaatgttgagcacatcaatccccattttgtagacgaagagacagagttgagtgacttgcccaaagacacagggccagtgaggagttgtgcaggtttgccctggcattaaaataataaacattgaaattcagtcgattcccctatggactcagttatagatctcatcagt

SEQ ID NO: 69397 - DNA, 1013 bp, Homo sapiens
tcaccacaggtactttgatttccctccctcctgctagagtccctgttgccatggaccagcctcaggggaatgggcctatggtacccactgggaaaggagcagtggctgtgtggggctgttctggagcctttgcctcttcagcctccctttctgcaagataggggcaagggcggctagatggatgtgtctgctgggcaagtcatataacatttctgatcctcagtttcatcctacaaaatgggcgtaacaatgtctacctactccattgtgtggaccaaaggagatggttaatgtgaaagccctttgtgaacctgaagtgagcaactgctggatgaatgtcattacgggcacaggctctgtgtcatctcctctcctagtgcttccacagccaggaccagagacctccctgatgactggggaacctggtgatggtggcctttctctttatggggagcctgagtatgctcagatcgcagctttccttccctagacattgtgtaattgggggtgggggcacacttgccccagttcctagctccagcctttcctcctcttaggatggctcaggatgagtcccccctcaacaaggcagctacccaagagtaattcccctggggactttctgtgtgaatctccccttccccctcctctcttttccctttcctggacccagccactgatgtaaccaacctcacagactagttgtttattatattaatagtttgagcatataaagaggaacttgtgatgggagagatctagggaggagtaaagaagtataggaatgtctggcctgtattctcttcacctgggaccactgatttttaagctgccaccttggctggagaacaggctatggagttcataatgtgtggtctcctggagcctcctgttcagctctgccttctttgagggggcagggatggggcagggagcacattgtaatactaacggcctcagagctgccccctgatgtcctcctgcctgttccccgtgcctctgtctcttacagt

SEQ ID NO: 69398 - DNA, 1135 bp, Homo sapiens
agcctaccatgaacagctttctgtagcagagatcaccaatgcttgctttgagccagccaaccagatggtgaaatgtgaccctcgccatggtaaatacatggcttgctgcctgttgtaccgtggtgacgtggttcccaaagatgtcaatgctgccattgccaccatcaaaaccaagcgcagcatccagtttgtggattggtgccccactggcttcaaggttggcatcaactaccagcctcccactgtggtgcctggtggagacctggccaaggtacagagagctgtgtgcatgctgagcaacaccacagccattgctgaggcctgggctcgcctggaccacaagtttgacctgatgtatgccaagcgtgcctttgttcactggtacgtgggtgaggggatggaggaaggcgagttttcagaggcccgtgaagatatggctgcccttgagaaggattatgaggaggttggtgtggattctgttgaaggagagggtgaggaagaaggagaggaatactaattatccattccttttggccctgcagcatgtcatgctcccagaatttcagcttcagcttaactgacagacgttaaagctttctggttagattgttttcacttggtgatcatgtcttttccatgtgtacctgtaatatttttccatcatatctcaaagtaaagtcattaacatcaaaagctttgtttcctgcgtttttttctaaaagtgccttggtttttagattcatctatacttggagtatagagagtctggtgtcaaggatcccacttactgtgcaggcacctctagggaaaagggagctcaacagactagaaaggcaggagccctagattctcagactagtttaccacctcaacgcttgcatagggggtggggaaagtcattctgctaatctaaagctcatttagctcttcagagtaagactgggtagttactaatgagtaatgtataggaagtgtaagttttgaatatccactgagatgctgctgtttaaagtggcctgctaacttgttagtgtaattaagaaatttccaagtgatctttggctggtcatggtggctcacacctctgatcccaggcattcaagaccagcctgggagacatgatgaaactccatct

SEQ ID NO: 69399 - DNA, 1102 bp, Homo sapiens
tctggaagggatggggggctcgggctgccctccgccgtatccggagctctcttttgtcgcgtaactgtgtcctgggtgcggtccctcgagtccccgcagtcctttccagcgcatgcccttactccgccttgggtggacgcgcgcgcggactcttccagccctcacttcctcttgagcgcgaaaagcgggggtgggaagcagctggagacaaaagcgcgcacgcgcgaccgttaccttcccgccgctcctgggcgggaaaccgccactgcgctttgcgcatgcgctctgggtcgcgacgcgactagggctacagggcgtgtctcctgttaacctgagtgttctttttttgatgaaagcaataagaggactgcggaagagctccctgtcaatgtaccgctctacaccagtgtattacgacagttcgtacacaacagtctgtagaggccacctgtctctccctgctgcgttaggaattcaggggagcaggtggtggcagtaagggattttgagggaacggaaatcggatcttgacccagatctgggccgccgataatctcctactgcgctcagactgctgtggaggtgttaggctgagcccgatgccggcaggcaagggaggatgggcggcttgggcagcgcctttgcagacgtggccatttcgtgcctctgcagcaccgccggggggcgcaagagcgcgcgcccggaattgctcattcatcctgtgccgcagagccccgccccttgtccctgcggacagacatttcttctgcgctggtctggccacgtgcttcctgtgctaggagctgcccggaaatgtgaccacctagtctaaagtgggcttctggggcctgagcgctggatggatgcccaccttcctgtcttggtcctccaaaggaggaagctgtgactgagctgtcttggtctggaaggaggccttcccggtttaggatgggaaggtaacattcattaaaagcaacgtagactatagtgtagctgttctcaaaagtagtacatcttagaaaaggatctttagaaaagatcgctttagaaaaggaaattcgttttcagattacgtgagtagcctaggtaacacagccagacc

SEQ ID NO: 69400 - DNA, 1205 bp, Homo sapiens
acctggtgccctatccccgcatccacttccctctggccacatatgcccctgtcatctctgctgagaaagcctaccatgaacagctttctgtagcagagatcaccaatgcttgctttgagccagccaaccagatggtgaaatgtgaccctcgccatggtaaatacatggcttgctgcctgttgtaccgtggtgacgtggttcccaaagatgtcaatgctgccattgccaccatcaagaccaagcgtaccatccagtttgtggattggtgccccactggcttcaaggttggcatcaactaccagcctcccactgtggtgcctggtggagacctggccaaggtacagagagctgtgtgcatgctgagcaacaccacagccattgctgaggcctgggctcgcctggaccacaagtttgacctgatgtatgccaaacgtgcctttgttcactggtacgttggggaggggatggaggaaggtgagttttcagaggcccgtgaggacatggctgcccttgagaaggattatgaggaggttggtgtggattctgttgaaggagagggtgaggaagaaggagaggaatactaaagttaaaacgtcacaaaggtgctgcttttacagggaagcttattctgttttaaacattgaaaagttgtggtctgatcagttaatttgtatgtagcagtgtatgctctcatatacaattactgacctatgctctaaaacatgaatgctttgttacagacccaagctgtccatttctgtgatgggttttgaataaagtattccctgtcttaaatgaattcagtcctgtgttttctatctgggtgtctgaagtttttcatgtatttagtgcattgagaataaaaaataagtgttgcctgtggtttatacatatcctaggaagtgacgtttgtatttaaagtatcttagtaatttaaaacttttatttatgaaacacaaaatgtatatctaaagattaccattacagagcatcatgtactttttttttttttttttttttttgtgagatggagtcttgttctgttgcccaggctggagtgcagtggtacgatctgggctcactgcaacctcaacctcctgggttcaagagcttctcctgcctcagcctcccaagtagctaggattacaggcatccaccaccacacctgactaatttttgtatttttagtggagactgggtttcac

SEQ ID NO: 69401 - DNA, 1062 bp, Homo sapiens
acctttgtgacgttttaactttagtattcctctccttcttcctcaccctctccttcaacagaatccacaccaacctcctcataatccttctcaagggcagccatgtcctcacgggcctctgaaaactcaccttcctccatcccctccccaacgtaccagtgaacaaaggcacgtttggcatacatcaggtcaaacttgtggtccaggcgagcccaggcctcagcaatggctgtggtgttgctcagcatgcacacagctctctgtaccttggccaggtctccaccaggcaccacagtgggaggctggtagttgatgccaaccttgaagccagtggggcaccaatccacaaactggatggtacgcttggtcttgatggtggcaatggcagcattgacatctttgggaaccacgtcaccacggtacaacaggcagcaagccatgtatttaccatggcgagggtcacatttcaccatctggttggctggctcaaagcaagcattggtgatctctgctacagaaagctgttcatggtaggctttctcagcagagatgacaggggcatatgtggccagagggaagtggatgcggggatagggcaccaggttggtctggaattctgtcaggtcaacattcagggctccatcaaatctcagggaagcagtgatggaggacacaatttgacctattaacctattcaggttagtataggttggacgctcaatatcgaggtttctacgacagatgtcatagatggcctcattgtctaccatgaaggcacaatcagagtgctccagggtggtgtgggtggtgaggatggagttgtagggctcaactacagctgtggaaacctggggcgccgggtaaatagagaactccagcttggacttcttgccataatcaactgagagacgttccatgagcagcgaggtgaacccagaaccagttcccccaccaaagctgtggaaaaccaagaagccctggagacccgtgcactggtcggcctataacaaaagagaggaacagaggaaaggttaagtttttattctttgtagtacaatcata

SEQ ID NO: 69402 - DNA, 1049 bp, Homo sapiens
gggcgcggtcgccctcttacctggagcttcccctcgctggggttttgcccacctgacgcccccgcacccaccggggacggggcagacgtccggcctgctccctcctcccagtggacacctctgtccctgtcccggcccattctccagccccagagcccttcctgcccttcctccccttcctccccttcctccccttcctccccttcctccccttcctccccttcctccccttcctcctcttcctgctcctggctccttccgacgagtttggtttgaacttttgaatccgccaatcagcgccgcgcgcccccactccgcgggtgcggccgggcgcaggccagggctcgaaggtggggccgcagcggcacggggcggggtctggggcccgccctcccgacacgtggccggggaccgggtatataaggcccttcggggccggccaccctttcactacttctcccccggactccttggtagtctgttagtgggagatccttgttgccgtcccttcgcctccttcaccgccgcagaccccttcaagttctagtcatggtgagtggggttccctcggggctggggaagagtgcgcgtcccaggggacggcgggcccggaaactactgcctgcacctcgggccgcgcccaggacagctccagactaccccgggcccctccggttaacctggcttgtggcggccgggctggaaggtcgagttcacttggcagacaccagttcgggccggaaaacctggcccgggtgcggccatcagtggaaatggaaagccctcttgatcctagtgagggctttccccgcagggcccgctactgccctagggaggaaggtcagggagcctgctcattggcctccaagaacttaaactaaaaatccctccccacgttttctcaagcgacctctccttcctactgccttacaaactgggccccggaggccctcgtgcgctcccgcaccgacggtgcagcacttcctggctccccctctccagcgcccagtgactcgctgctgagtcacctgtggccctgccctggggag

SEQ ID NO: 69403 - DNA, 1045 bp, Homo sapiens
tacaggtgtgagccagaaacaactaatttcttaacctatcagtaaagtcttggtaacatttctagcctttattattatggtcttccctcttccggagatgttttgacggtgaaggaaaaacgttcttcctatagattagattcttccacttggttaaaaagctgcctctgaccacagtttttaaaatacagctaactgctgcttatccagcattttcttcatgagtcatggctatagtttgctggtttaagctggttttaaaggagggagagagaagcttttgtctcctaaagaataggattaaagcgggaccagaatgagctcagtagttacacaatcattcagagaatgaatcagagctggaaaggggaattttgccttagtttaaggaatcatatctactgtggctacaaagcaactgtctggtcttgccgagtagttcatgaacacatctttggttttccaaggcacttttgctgaattaggtcttcaaagatttttgcttttgaaattatagtccctgagcaggagtggcctgctgaaagatggttatctttttttgtttgagatggaatatcttgtcactcaggctggagggcagtggtgtgatctcagctcactgcaacctccacctcctgagttcaagtgattctcctccctcagcctcccaagtagctgggactacaggtgtgcgccatcatgcctggctaattttttttgtatttttagtagagatgcagttttgccatgttggccaagcagatctcaaactcctgacctcaggtgatccacctgcctcagcctcccaaagtactgggattacaggtgtgagtcactgcgcccagccagttatctgtcttgaaggttaatcagtcattaggtgtgaatcattcctaaatgtcccatctgatgtattataccctgacattttcctttcttcctcccacagcgtgagtgcatctccatccacgttggccaggctggtgtccagattggcaatgcctgctgggagctctactgcctggaacacggcatccagcccgat

SEQ ID NO: 69404 - DNA, 1490 bp, Homo sapiens
ttctcagatgtttacgtagtcttcccagcaaaactggactgatgtttccgatgcttaaaaactaagctttaggctgggcacggtggctgacatctgtaatcccagcactgggaggccaaggtgggcggatcatgaggtcaggagatcgagaccatcctggctaacatggtgaaaccctctctactaaaaatacaaaaaaattagccgggcgtggtggtgggcgcctgtagtcctagctactagggaggctgaggcaggagaatggcgtgaacacgggaggcggagcttgcagtgagccgagatcgtgccactgcactccagcctgggcgacagagtgagactccatctcaaaaaaacaaacaaacaaaaaaaaccctaagctttagttataagcactgacttggaaaatcagggacctgcctttaggacaaataaacctagtagctatttagggttctggaacgtgaggtttattgcctaccaaaacaattgcatttgtccttgtcattactgtgctcacaggaggcttaactggtgtaattggtaggcgagagtctgccctgtgcattgatctcatgtagttgatggacccacaggctataagggagctgagtagagaatgttcacaaatctgaggcccatcacttggagaagcaagagtttacaacagaatactttatttggaaggtcaaaatcattccttcgtaaagtagcagtttgctaaccaaaatagcccagttaggtggaggaaatccccaacaacctgaggtctcatggaattgtggttgtgtcactttacccaaaataaatgggcttcttggtacctagtgtcatatattggcttactgggccaatactgtgcttactgtgccaagcactatgctgagtacttacttaattctcaacctaaggtgattactattctcacttaatcagtggaagaactgagaaatgaatgtggtcatacagtaaggaactggtacagccggatcctgacacagcctgactccagtaccagggtgttagaactttggctattctgttgttccacctcagaaagcagctgccaaatctttacaagacatccactgtaccaggctggtggtcctgggcctgccccttaggacctctccaactaagaaactgccctgttctgtggccacagcaagagaaccagaggctgccttcccagttaccaaaacttgagccctgtatgcaagcccaggccttgtgattcctctgcctaaggcaatagttcatcttaaaatagtcttagcaaaggtttttctgctcaaggacttgattgtgaaaagttgttctgaatcacttagcacttaaaagcttttttttttttttggagacagggtctgctctgtcatccaggctggagtgcagtggcctgatcatcagtcttgaacccctgggctcaaatgcaaatggtcctcccaccttggacccccaaagtgttgattacaggcgtgagccactgc

SEQ ID NO: 69405 - DNA, 1195 bp, Homo sapiens
ccagaccaacctggtgccctacccccgcatccacttccctctggccacatatgcccctgtcatctctgctgagaaagcctaccacgaacagcttactgtagcagagatcaccaatgcttgctttgagccagccaaccagatggtgaaatgtgaccctcgccatggtaaatacatggcttgctgcctgttataccgtggtgacgtggttcccaaagatgtcaatgctgccattgccaccatcaaaaccaagcgtaccatccagtttgtggattggtgccccactggcttcaaggttggcattaattaccagcctcccactgtggtgcctggcggagacctggccaaggtacagagagctgtgtgcatgctgagcaataccacagctgttgccgaggcctgggctcgcctggaccacaagtttgacctgatgtatgccaagcgtgcctttgttcactggtacgtgggtgaggggatggaggaaggcgagttttcagaggcccgtgaggacatggctgcccttgagaaggattatgaggaggttggagcagatagtgctgacggagaggatgagggtgaagagtattaacctgtgtgctgtacttttacactcctttgtcttggaactgtcttatttttgttctgtaaatgtctattgccgtaaattgttaataaaattgaagtttccattttaaatgtcgagctgacttaaatacttgatccagttaaagttggatgtatgaggctggtagatgaaaccacctgagtcgagggtcttgctctgtcacccaggctggagtgcagtggcatgataatacatagctcattgcagcctcgagctcctggactcatgtgattctcctgcttcagcctcctaagtagctggggactgcaggtgcacaccaccatgcccagctatttttatttcttgtagagatggggccttgctatgctgcccagggtggtcttcaactggcttcaagtgatcctcctgcctcaacctctcaaagttttgattataggcatgagccactgcccagcttcttggtttatctgtttaatttgggcctgaattaagtggttatagaatcattttgtaagtgaggaaacgggttcagattgagccagtgcttctctaactaaaatggatgtgaatcacctgtagatattaaaatgcaggtttggggtcaacctggtg

SEQ ID NO: 69406 - DNA, 1027 bp, Homo sapiens
attgtcatcaggacttcagtgagccaggcctcaggattgctcctggagaccccagtccagcctggtaagtgtttctggcgtggggagagaacaggggcagttgggctgcctgaagcagggaacaagaccagagaaaactcagcaggctgggagggagcatgaggaagtgggaggccgggaggctaggtcagaaggagaaggagaagagaccttctagataggccagcgattggcacagttgcacttttgtctaaggagatggtctccatttcggccctctctctgccacttcctgcaagatttatcttccactcactgtttatccccagcccctaagtgccatcaccacatccccagcctactcagacgttcagattaataagtgtttactgagatagtgttgggtgttgaggggctgctggatgggttcctgtccctaatagtgcaatggggcctattaaactaatataccctcttcagaagttgcagaacactgtgccaaactttggtgggtgttctagagtctacaacaaatgtcctgtttcttcctagctttctctcttcctaaaggagaacgcgaggttgtcactcactcagatgaaggaggtgtggcctctcttggtctggcccagcgagtaccattaagagaaaaccgagaaatgtcacataccagggtgagatgcgactctcctgggatggtgggtgggaggtgcaggagttgcttggaagaattttgctgcagcagccaacactgagaattgtaggtagagccaggaagtcctgggcctcaggatgttactgggtaggtttaccccagatgcacccagtccctctccaatgtgagactgacctctctttatcagatgtctggggcctagggtgagaggtcatatttgtatcaccatcagatcagtgctaagggtgagacagatctgacacttgtcagccaaaagcattcatcccttggctccacaaatatttactgagtagcaccagcctactgagtgccaggctctgttctaggctc

SEQ ID NO: 69407 - DNA, 1510 bp, Homo sapiens
tctagggcctctcagttaggggcttcaatccattcctcatgagggtgggactcaggctggtctttctcctgccccagcctggcttgcttgtgtgccttgttccttggtgacaggagcaggttgccgtccggttgtttgaccaggagagttgtataaggtcactggagggttctgggaaaccaccggtggccactccttctggaccccactctaacagaacccccagcctccaggaggtgaagattcaagtgagtctgtgtggccaacagctttgatgtctattgaacagtgactgggctgaggaagagggaaaagagatgggggatcaggaataggacagtgtgggtagactactgaacgcacatcttgatgtcacactggggtgctctctcccaccacagcgcatcggtatcctgcaacagctgttgagacaggaagtagaggggctggtagggggccagtgtgtccctcttaatggaggctcttctctggatatggttgaacttcagcccctgctgactgagatttctagaactctgaatgccacagagcataactctgggacttcccaccttcctggactgttaaaacactcagggctgccaaagccctgtcttccagaggagtgcggggaaccacagccctgccctccggcagagcctgggcccccagaggccttctgtaggagtgagcctgagataccagagccctccctccaggaacagcttgaagtaccagagccctaccctccagcagaacccaggcccctagagtcctgctgtaggagtgagcctgagataccggagtcctctcgccaggaacagcttgaggtacctgagccctgccctccagcagaacccaggcccctagagtcctactgtaggattgagcctgagataccggagtcctctcgccaggaacagcttgaggtacctgagccctgccctccagcagaacccgggccccttcagcccagcacccaggggcagtctggacccccagggccctgccctagggtagagctgggggcatcagagccctgcaccctggaacatagaagtctagagtccagtctaccaccctgctgcagtcagtgggctccagcaaccaccagcctgatcttctcttcccaacacccgctttgtgccagcccccctatctgctcactccagtctttgagacccccagcaggccaggcaggtaaggagttggctgggaaggagtgtgaacacaagaggtcctcacctcactgtgagctgcacacctgccctgcccctaccccaggcaatctcatgcttccacaccttccaccctggcccagcctggctctccctcaggaagaggggaggggctgcacttccagccctgtgctcctaattggcttggccgttggtgggggaggaggagaggacagtacatggtggaagtataggaccccagacctccctctaaattttccatgcccctcaggcctcagcaatctggcccctcgaaccctagccctgaggga

SEQ ID NO: 69408 - DNA, 1041 bp, Homo sapiens
cccagacccggagtcaatatcccagaggagaaatgaggggtctgacagctctctgtgcagccgatccccacatttcattaactggaggctggagctggcaagcggtggaggcagaggggggcacaaagggaggtggaggagtcaaaggctaggagcagcacctggccaggggtggagggctgccgaagtaagtcagcaacagctctgacctggcagacaccttggaagcagtctttacccactctctgagaagccaggagcttgtcttcagccctgtggaccctggtgcgatactttgaacttaaggttgcactgagttttggtgccagaggcactggctgatgagtgggagccctgggcctggccgtgatggcagaggcaggagggtagtctctgcaaggaggcaaaccatgagcaggttcttgggctgggacggttttcccagctgcagtcggagaacagccggcttcaggcttcccttttgtcccttaagcaaattttccttgactcgcttcgttttcctttgccttcctttttctctgccctctcttcctccatctggacggttgttctctgaaactaactttggccatcctttagccaacagttgagcacctgttgggcatcatgcttaacagtgtcagggtgggggttgggggatacacggagccaagacccaacccttttggcctcacatacaaaaggctcccggaagccattcaaatctcactgcccactcctggcctgcctctctcactcttccactgccttgggtgccatttgtctcctctagggaactgagaaggaagccaggaggtcataactctaattccaggactatcccttacagggtgataatggacaagccatttcccctttctgggccccagtttttttatctttaaaatggggacaatagatctaactctaaagggtgctgtgaggatgcaacgagaagttgcatgttaaagccctaaaatacaataaggactcaataatgttgtttccctttccatgccgtcccctgtcctctcacgtgga

SEQ ID NO: 69409 - DNA, 1735 bp, Homo sapiens
gagtcacctttcaatttgtgggggtgggaggaggtaatcaaggacgtattcttgcatttacaggagtttatccttttttttagcactacagataggagcgtcccttgctcctgccaggcagcccctccataggggcagtcctgtgctgctgtgcctcggtacccgcacaaggtgtctggggaccgcccggacccccccttccatcggcggcagcgccacctggcggccatggtgcggtggtgtgggaggagctgggcccgggctgggcactgagcccaccggagctgcaggcgtctgcagagccttgcaccgagtttccccgcgagggcgggcgggaggagtcccaggcgggaatgtgatccccagggggccggggagggccctggggaggagcctggcctggggaagccggacttccgtgacacaacagacacaaaagacaaagtccatttggatggaagtgggagcagggcgagacgggccattttcactctgtggtcaaaggaaatgactggtctgactcggtctgggagcggggcacccaggtatggccacttgatttggaagtagcgggtgctggctggtggtcgctccagatagaggggacactggcaggcacgcttggcgtccagtttgatattgtgaggatttgtccagctgctgtggagtggctttccaagccggcctccgaaagaggtggttgaattgtggggtgccaaggtctaggtcaaacgaagttttccagaatattttaataaagggaattcaggacccctttcaagtttgacctgtgggaaaatctcatggcctggagagttaggaaggcaggagagtggctaaagcctgggccaggtgtgggagggcagccacagttggagttaagtcaggggtaaggcagaggctttcaaaatgtgtgggaactttggaaaagcatccaatgcagccctgcccctccacacatccccccatgagtcatttggggtcatgggtctcaggggaagtctgaaatttaaacagctttctcctctaaatctggagtcactgtggttgtaaagaatgggactgaggtgctaggacaagggatatgagataaatagcactggggactcaggcagatctgtactcaacttttattggaaagagaaatggttgctgtgttggagcctggacatcatcttatgactctactttttcccatctcttagggtctaaggataactctggggccatgacagccatgagtctcacagaggaccccgagacttctgtgctgcgagtaaccggacttgttctgagacctttgccctagaggatggccaaggggctcctggtgacctatgccctctgggctgtggggggccctgctgggctccaccacctgtacctgggaagggacagccacgccctgctctggatgctgaccctggggggaggtgggctgggctggctctgggagttctggaagctcccaagctttgtagctcaggccaacagagcccagggacagaggcagagccccagaggggtgacaccccctctgagtcccattcgctttgctgcccaggtgatagttggcatctattttggccttgtggcactgattagcctttcttccatggtcaacttctatattgtggccctcccactggcagttggcttaggggtcttgctggtggctgctgttggcaaccagacctcagactttaagaacactctggggtcagcatttctcact

SEQ ID NO: 69410 - DNA, 1008 bp, Homo sapiens
cttccccctgaggactgactcttcctagcagagctgggcaacttgtcccaaatctagctttgcccacgaatggcatcccaacagagttaaagaaactgcttgcaggggctgggcgtggtggctcatgcctgtaatcccagcactttgggaggccgaggcgggcagatcacgaggtcaggagttcgagaccagcagcctggccaatatagtgaaacttcgtctctactaaaaatacaaaaaattagccaggagtggtggcaggcacctgtagtcccagctacttgggaggctgaggcaggagaatcacctgaacctgagaggcggaggttgcagtgagccgagatcacgccactgcactccagcctgggcaacaagagtgaaactccgtctcaaaaaaaaaaaaaagaaagaaaaactgcttgcaggggacatgagaaaacaatggggtgagaaaaggttgtggtagaaggatgtgtttatattctgaatttctgaattcttggctattgcattcttgacaatttttcttaaaaccagagagtgaaaggcatattataaaacaatcaaatatcttttagagtatggacaactattatatatcaataaaaaattaattagaaaaaatatatcttttagagaacacaccaccttatcccacccatgatatattgatgtgtgatggagaaagattatttaactatttttttaaatgtgtaaagcagcagggcatagtggcttacgcctgtaatcccaacactttgggaagctgaggtgggaggatcaccttaggtcaggagttcaagaccagcctggccaaccaacatggtgaaaccccatctctactaaaaatacaaaacttagccagccatggtggcacatgcctgtagccccagctagtcgggaggctgaggcaggaaaatcacttgagcctgggaggtggaggttgcagtcaactgagattgagccactgcactgtactccagcctgggcggcagagctagattctgt

SEQ ID NO: 69411 - DNA, 1034 bp, Homo sapiens
tcagactttacataggtgattggactggctgacttctcaggtcttcccagtatttgaggtctgattctgggctacataccctactcctagaagcatacaatctgatgggagataatgacacaggtacacagatatcaaagcccttgttcagtgttttgaactaaatgtcataagagctgtaaatagtgtattggcacattggaggagggacagataacattgttttatggggactcagaaagattcattattttatatgtcatatgtccctttggggactttgggaaaccctagggaaccagcggctagagcatctcaagggggccttattcaattctaggtaactagccaggtgtgaaagaaagggcccagggtgtctcactttgcagaggaagattggagaccaggaacatgattttaaattatgtgcctttactgcagctttcttgctctctttgtgtgtgtgcattctttccatttttttcttctttctggatgttaaatctgagtaatatatatcatttttaaagtggaattatgaccaggcatggtgcctcttgcctataatcctagcactttggcaagccaaggcaggaagattgcttgagcccaggagttcaacaccagcctgggcaacatggcaaaactccatctctacaaaaagtacaaaaatgagccaggtgttgtggggtgcgcctgtagtcccagctaaggaggctgagattgggaggatcacttgaacccaaaaggtggaggctgcagtgagctgagatcgtaccactacactccagcctgagtgacacagtgacagcctgtctcaaaaatataaaaataaataaataaataaagtggaattatgttgatgactattctctctattctctctctctctctttttttttttttggagatagagtcttgctctgtcacccaggctggatcttggctcactgcaacctctgcctcctgggttcaagcaattctcctgccttagcctctcgagtagctgggattacaggcacctgccaccacgc

SEQ ID NO: 69412 - DNA, 1075 bp, Homo sapiens
ccaaatcaagaaattagaaacgtgtatacataaaatcagtttatctttggcagaaatcagtatattatcaatgtttaattaattcctaagaattaatggcaatagtgcctctagttttagctgagatttagatcatctttcttcattctgccctgttatgcgacatttgctataaatgccacaatgagaattttttgaaacctgggtcagagaagcctactttttatatttaatagtatgtgattgatgtattatcattgttttatgcttattgcatcttggttttatggggtgttcaaaagaagatagatgagaataggtgatccaaagtaatttagaattttatcctccagttgggactgaaccatcttgaactgatgaatatattctaccaggtttataggtagatatgccgtttcattatatcgtgatttggagtgagacagtagcttttaagcagaacaaacagccatatgtaagtctaaatttggttattttctttgaataagcaatggaaactgtatgcattcaggaactggtgattcagatatcttctgaaggccctctctccctgtgctccacagctttgtcctgaactctcctgtctcttgcgatgcctctgtgcctatacctattttgtgaactctgcctgcaatgccgtccaagtcagttggtgactcctcaaacctcactgaagtctttcgggtggattcaaatgctgcttttagccattaaaatctgttacatctgttacatactttcacaatagcacttatcctagtgtagttttaaaaatgcacttaaaaatttttaaagcagtgcatgcatgcagtaaacaaaattggacagtacagaaataaatggtgaagacagtctcccagttttcttccccatggatagcactttctcttttttatccttccaaagatattttgtgctgatacaagaatttttataccgtatgaagtgcttattcatcttatcttttacttcagggtaatttatgagtaatgaaaaaattcaagcattacaaaaatgtagagtgtgtgaagcaaaaggtcccctttactttgat

SEQ ID NO: 69413 - DNA, 1043 bp, Homo sapiens
tcgcaaggctggagtccttttggcgcccctggcggaggcggttagcagaggtgtctcccccgccggtggtggggctaaacgctactggcttcacggccacacctccgctgcctccgtctggttcagcgtctgctaactgaggaggcagattaggggcgcggagtctcttcccttgggtgcataggtcccggttggtagaggctttgagtcctcatcgccacagctgacggctgcgagggactaagagcaggatatatctttagaaatgagttgcacaattgagaaggcacttgctgatgctaaaactcttgttgaaagattaagagatcacgacgatgcagcagaaactctgattgagcaaaccacagctctcaataagcgagtagaagccacgaagcagtatcagaaagaaattcaagagcttaatgaagtcgcaagaacatcggccacggtccacgttagttatgggaatccagcaagaaaacagacaaatcagagaattgcaacaagaaagaaaagaattgcgtacatccctggaagaacatcagtcggccttggaacttacgatgagcaagtatcgagaacaaatggttagattgctaatggctagcaaaaaagatgatccgggaaaaataatgaagttaacaaaagcagcactccaaggatacaggcacatgttgaccagataaatgaaatatggcagcagtaatgaagaaagccattgaaattgacaagcaacaggattgcaaggaacaagaactaatatttcaacttgaacaagaaaacaaaggcgttagagagatcctataaataactcgagaatcacttttgaacctaaggaaagaagatgtgtcggaaagtacttctttgtcagcattagtgaccaacagtgacttgagtctgaggaagagctgaagagcttctgagtctgtgagcttcttacatggctcccagtggtcaaataagtgaatgaatgaatgaacagaaaattcaatccattatttttttctctttaaatatgtacagtgtactggctatgagat

SEQ ID NO: 69414 - DNA, 1034 bp, Homo sapiens
cacattttcagattctttagtgttaaattttaccatggggagctatttacttgtgacatttttagaaggccttaaggtgggataattaacaacgatatcaaggattacaggacagtctaatatggttgatgtatttagtgtttacctcaagctgtgacagtttttattaaaattaaatttctgtattataagtttaattcaaaaggcagttatatgttatctatgtaacagaatttgccaaatagcaactaagttgctgttaattgttttatgggacgaaagcagccagtcttggcccttctgtcttagggatggattatatttggatcatgttgaatatatttttcccttattctttcagattcatcaggattcatttttgatttgcagtccaataccgtactggcccagggaggagcttttgagaacatgaaagagaaggtaagactagtcactatggatagtaaacttaaatgtcataggaaaatttaggtactaatacgactagtggctaccacaaactcattatgagactgaaattttaagaataaaacaatgccactatatatcagagagtgacggccataaataggttctgattgcgcagaacctattaacagaacctattaaatgcaaacattttctttgcctatctccatgtatattcattctaaattcttttgaagatattcagtattaattagttgattaatatttatgtggctgagtgtatctcacttggcaacattccttaaggaacaatcgaataggatcttcccaagtacttgaagagcattcttaagtccaggagccttcagagccaagacaagaaataggtctttttttttttttttttgagacggagtctcgcactgtcacccaggctggagtgcagtggccgatctgggctcactgcaagctctgccttccgggttcgcgccattctcctgcctcagcctctccaagtagctgggactacaggcgcccaccaccatgcccggctaattttttgtatttttagtagagacagggtt

SEQ ID NO: 69415 - DNA, 2334 bp, Homo sapiens
gcccatctctgcctcccaaagtgctgggattacaggagtgagccaccgtgcccagctggtgttaacagatgtttaaattctagctcctttgtgggaggtattttataagggattttttgaaactagaaaagacttaaggaccatattaaaatgacaggaagacaagcagctagggtgatgttttgagacttagaacttgttcattatacttatttttagtaactgtctagatctgaaatatgacaggaagtgttcatgaaaagaacaaaccatacatgctttcttgctgcctgtagactgttccctcaggttatacctaactgtgtctctgttcacaaatttagtctagtcacttttgccacaacatataagagatagaggagagtgtaggtcccctcagtcctcctggtctctggaattgcagaggagtagttaatcaaaatgaaataatgcctccaaaaagttaaatcatcagaaccaaaacttactttggggctagataattcatcttagtctacccatgccttgtcctgaactctaagttttacttttcaggttttatggctaggaatttaatgtcatgtcttctgtttttctttgtttgtttgagacagggtctggctctgtcacccaggctggagtgcggtggcacggtcatggctcactgcaacctccacctcctgggctcaagccatcctcccaccctcagcctccctagtcccctagctgggactacaagcatgtgccaccacacctggctaattttttaattttttgtagagatgaggtttcaccatattgcccaggctggtctccaattcctgggcccaagcaatcctctcatctaggcctcccaaagtgctgggattacagccataagccactgcgcctggctgtcttctgtttttcttgacacatatttttgctcctgccagattactcattgtctcaaaacttaacattcacatttcctcttccatctactagttaatgccactttcccagcctgaaaatgttctcctattcctctgtatttatctaaatcccaccatttctccaaactttccttaaattaaggtctaacttctggaaattattttaggtaactgatttttcccctttctgaacctctaggaggaagcaccatgccctttgcactgcattcttgtcatataagatattgttggcttgtttagaaaataaagagctggctgggcacagtggctcatgcctgaatcccagcactttgggaggccaaggcgggcagatcacaaggtcaagagttcaagaccagcttggccaacatggtgaaaccccatctctactaaacattcaaaaattagccgggcgtggtggcgtgcacctgtaatcccagctactagggaggctgaagcaggagaattgcttgaacccaggaggtggaggttgcagtgagctgagatcgcgccattgcactccagcctgggcgatagggcgagactccatctcaaaaaacaaagaaaaaagagctgggcgcggtggctcatgcctgtaatcccagcgctttgggaggccgaggcgggtggatcacgaggtcaggagatggagaccatcctggctaacaaggtgaaaccccgtctctactaaaaatacaaaaagttagccgggcgtggtggcgggcgcctgtagtcccagctactcaggaggctgaggcaggagaatggcgtgatcccgggaggaggagcttgcagtgagccaagatcgcgccactgcactccatcctgggcgacagagcaagactccatctcaaaaaaaaaaaagaaaaaagaaagagctaagtgtagtaggtcatcacaactttgctttgataagcctctggtctccatgattgttcagcttactgattacttagtcacaggatctgattccattcggaacaagcttgaaccagcaggaaacgcagttccgggagagagatttgtgaattcctgctgactggaacccagccaggaggagcctccttcaataaatgacaaatgaaatggtttcctacctgggaactgtgtatttaggattgattagctgacgtaacaaccaggtcaatttaacttgaggaaagagattacctgccctttcctgctagtataaagccctttgctctggttgattgagtttataaaccaccttatttcaatgttccttgtagccgctacttcaagacataattggcaagtgagctaactccatttggcaccaaaccagagcttggagttaatgtcacttagaaagacatttctgtgttggttatagcataaaaaaaaggcaaagagttctaacagatttgccccagtaaaa

SEQ ID NO: 69416 - DNA, 1642 bp, Homo sapiens
tcttttttccaaaatgagaatatgttcaccacctcctcaatagcaatacctccaaagtctcatctagttagttaatattcagctgaaaggccaggtcttcagagtgatttcagatcttccaaggatggggtctcataaattaaaagaaaggctaaatgcccccttctcccatattacatagttggagaaagaaaaggataattatagtaaaaattcccacttggaaaagcaatgatcaaatcttgctggatgggaaggaatagcagagtcccttccctggtagtagagaacattcgttgggtggtttatctgcttcctgggaggatttctttggttttgtttccactgtagcccctgtctctctgggagatttttattgtatgttctctgccatgaccatatccaagttatatatcagaaagcatgccagagaaggtggttcttaaaagggtgtaacaatctaaatacccatcactagggaactcggtaaataattgtggtatatccacatactgggtggctgttaaacagaatgaaggtgatccagatgtattaatagggaataaatttaaagatatattaagtaaaaatagctaaggtaaaagaaagaccatgtgtatgatatacttccatttgtgagaagggaaaaaagagagctacatatgtatgcatgttgtatgtacatacacaatatttggatgtgtacgtaagaaatggtgaacagtcgtttcccctggagaggagaccacaaaatcagaaataagagagatgctcttttcattttatacccaacttactctagatgaatattttttattatgtgtacatatttcctttttaatttatatgcatcttgataaaatttttttgactggaaggagaaataacaatgatttatgagtgtttgtgatttataaaaaatatttaccacttaactgccttcagagacccaatggaaggtagagaccagacttttgatattttcattttctgggtggataggcagctaagcctttggctgaccaaatacctactgcaaggcttatatttctagttcttctttatcctatttagcagcaacataaggttcacactcacttttcctctacagtggaaattttgctcagccgacaaaagaaggctgaacttctaaagaagatgactcatgtggctgttcaaatgtcagagcagcaattggttgagctcagagctgatatcaaggtaaaacttctttctgctttctgcctttcttcttatcctcaggggctaaagtaagaaattttcataattcatggccatatctaatatattaaactcatgatcttcctttcccaaacctggccctcttccaagtccctttctctgtaagtggtattatcatctacccagttgtcccagctggaaaccttaggaaatttctccatttcccaccttaaatctgtcagcacactccatccatttgactaaatctcagatctgaccttatctcttcatctccaccaccaccattatgatcaggttaccaccatctcttgcctggacttctgtaagagcctcttaactggttctgttcatccattctgtctctgccccacccgccccaccctccatgtatgttccccacactacagcagtctgcttc

SEQ ID NO: 69417 - DNA, 1031 bp, Homo sapiens
tagctgggattacaggcgcctgccaccacgcctggctaatttttttttttttttgattcggagtttcgctcttgttgcccaggctggagtgcaatagcgcaatctcagctcaccgcaacctccgcctccccggttcaagcgcttctcctgcctcagcctcccaagtagctaggattataggcatgcgccaccatgcccagctaatttttttatttttagtagagatggggtttctccatgttggtcaggctggtctcaaactctcaacctcaggtgatctgcctgcctcagcctcccaaagtgctaggattacgggcatgagccaccacgcccagcggctaatttttatccttttagtagagatggggtttcatgatgttggccaggctggtcttgaactcctgacctcaggtgatctacccgcctcggcctctcaaagtgctgggattacaggtgtgagccaccgcgcccggcccagttaccacccttgacctcctcatccttcctgacttccccatcatatctcctcattctgtggtttcagagcgtagttatgactttatgtgcattggttactttgtcttccccactagatagtgaacttcacagtggcaggcaggagctcctgtctctccaagtgcctagcacagcaccttggcatgtacttggtcttctgtaaatagttggttgaccaattctgattttatagagaaaaattatctttgagatgtttgttataatctatttataacaattacttgggttcaacatttatacctttttaatttttttttttttttgagtctcgctctgtcatccaggctggagtgcagtggcgctgtcgccactcactgcaacctttacctcctgggttcaagcgattctcgtgcctcagcctcccaaatagctggaattacaggcatgtgtcaccacgccctgctaatttttgtatttttagtagagacagggtttcaccatgttggccaggctggtctcgaacccctgaccccaagtgatgcactcatcttggc

SEQ ID NO: 69418 - DNA, 1024 bp, Homo sapiens
ggtcattggcattctaaataattgcttataaactgcaagctgtaacaaagggagttggccttctccacacctgtgccctttacctcttctctttctgaacacataagatttattgtcacactgagagaacacttgctgcagaggctgtacaacagtctctctaaaataaaaacagaggtggaagatcatccaggaccttacagggatccttactatcgtctgacccagtgttagacctgtggagtggtgttgttctctcactgcctcccctttaattctattggggtgaactagccaaaccatgcaaatgttcagttactgttttctgtttaactaaaactatatgattaaattttatagaaaggcctcctcacattgatgccagtcagtctcattcaactctcggggagaagccggaaacccctttgcaattagatgagaatgctggctctcacaggcttcatctgttcctcttcccacgtggctgaaaagctgctagaaatatttctgcaggctgactaaggatctgtttctctccactttttcagtgtactgaagtgggtgctgtgcaatttaaatgtcttatttccagatcattttatttccgtcattcctattatgtctttgactcaacaaaccctagaatttgtttcagaattaatctcagactgatattacatgtctgaaggctttgtaacaagaggttcgtgtgctttcctaagccacaacatactctgaaactttaggaattcaaggccggaaggtcatttttctctctcctttccctttcagtgcttctggttgcttcccgagaattctgatgcagagtggtattagcccacccccagttaagaggagtgctctgaggggttcagttcttccaaattatatctaggcctttcacttctcttttttatctccttttcatctgaaaaaaaaaaaaatgattccagtctaccttagacattgtttaatgaaatagacccccagaagcactttattcctgacatgtttctagtcccat

SEQ ID NO: 69419 - DNA, 1047 bp, Homo sapiens
taggagccctgtgaaacagccagggtgggggctccttatgctccatttcacaaaggaggaaccagagctgagagagagggagagaggaagaagaagaaagaagaaagaagaagaaggaggagaaggagaagaaggagaagagagaaaggaggaaggagaaaggaggaaggaagaagaaggaagaagttaagaagaagaagaggtggaggaggaggaggaggggagggagagggagaagaggaggagggggaggaggagggagagagagacttgctcaaggtaacagagttgataaatgacacagccagggttagaaccctgacagtctcccagccctaggtcgttgggtctacctctctctagcctaactgtgtgggcactcagaggactggtcatctgggcttgtgtagcatgtctgggtggccttacacttatccctgtaaggcctaagtgtttagactttcaggcttccagctcacctgctggggctggttttgggcattaagccaaaccagacaccttgggttagggtgatcagggtgagatggaatgtgtggggtgcccctgaggattacagcagcttacacttattgagcattaactttgtgccaggcactgtgcaaagtgctttacttggatcgtcccattaatcttcataataacgctatgagctagttattagctataactgccaattcacggatgaaaaacttggggcagcgaggtcaagtccctagtctgaggtgcactgcctcctccagcagctccaggcacaatgcccatgtcaccctttgctgccctggttcccacttccaggagaagaaaatacactaatatttatggaatgttattaccattcttattgcagagtgaaaagtcaaaggcctgtttgggcctttaaaccccttcccccattgcccctcaaagaactcatgtgaatgcgtactgggagggggtaccgccactgaccctttcctttatgtggcctgttttagatgagcgtgatcaggcacaggatctcagcccactatcctctctcttcacctt

SEQ ID NO: 69420 - DNA, 1043 bp, Homo sapiens
agagaaacagccagggtggagtcaggagtagttatggagtcctggtcaaagctcagagaagccccagtgactgcaaggtggcagcgtaagtaggtggacacgatctcgcaggtgtccctggggccgagcgagtggagggccagcctttgaaaggagccagtctatgggggacagaggggagctgcccttccttcaggaggaaaatcagaagctagggatggaagtgctggggagagtgtcaggcagggctaaaaaggggaggaacaaaagctgtctttgtggtcccccaggaacagtgagatgtgactttcctgaggcagatcacagagcaggcccagagcccagatgggtgacagagctcagtctccaaacagtcagggagactcattctgatgaaatggtatctacagtgtatatacttcccttcctgggaaaagaaggaggtgaaaaaggaaatcagttccctagacgcagatgaagaaattgcaggtgtggaatggacacaatagtagtgctgataacagggggctcacagcgtgactagccctgtcccagctccttactgctttgtctcactctaacctcacaaaacccattattcctattttgcatagcaggagaccaaggtcagagaggttaatgaacagctaggaatcggccagccggggctggagccccatccacctggcgccaagtctcatgcttcttccacagggctcccaggtgctctggggggaattgggactggcagggaggaagccatcgttaggagggttggacctgcactctaggatttggagagttgggagcacattctaactctcagggaaacatggggctgtgtctgtgaaaagccactaaaggaccgggcgcggtagctcaagcctataattccagcactttggcaggccgaggcaggcagatcacttgaggtcaggagttcaagaccagcctggccaacgtggtgaaatcctgtatctactaaaaatacaaaaattagccgggtgtggtggtggacacctgtaatccaggctacttgggag

SEQ ID NO: 69421 - DNA, 1142 bp, Homo sapiens
agggccccacggtctccccagccccagctgatgagccctccagccccctgctgtcccctggctgcacctcctcatcctcagctgccaagctgctatccccacgtcgaacagcaccccggcctcgtctaggtggcagagggaggccaggcagggcaggggctttgaaggctgaggctggcccctctgctcccccacgggccctagaggggctacggctgccccccatgccatggaatgtgcccccagatctgagccccaggtgagcagaccctaggcccccgtggcagagatggtggtgatgaggctgaggccctgggcaggcgcaccctgccctaggtgcccatctaaccatcttaactcccgctagtctatgtgggccaagcctgcctcctccaggaagccttctgtgctcctcctttctcctgctgtcccactccactgtgtggtgtgtggcacacgctgctctgaactcttgcatctcatgctgctcaagcttggccccccagctaaactgtaagctcctaggggaagggaccccatgttagctttctcctgggctcctggtcagttccacgctcctgcagcctgtgtgtgtggacgctggggcatcccgtcccgtatgaccccacagtggctgcctgtccattgatttgttgtcctggtacctgggttcacagggtagtagatggcattgaagacggctgtggctcggaccagcccaagttctctttccgcgtgggccagtctggcccggaatgtagcagcagcccctcccctggaccaggtaccagggccccgggatggtctaggttggtggggcagcccctttgccttgtgaacctcaagcactgttgacctctgagccttcaatgttagagaaactggcagactgcctggaggccgtctcaccccactaccccttggtgtcgtgcgggcaggggagtttggtggtgaagaccagcactttaatttcgacgcagccaggaactgggtttatatccttgctctgtcagctttctagcagtgtgaatttggcttctctggccccagcttcctgtctgtaaaaaaatgggttgatgtttacgttatataatgtaactgaaagccttagcccaatctctggctaactgaagggatagagg

SEQ ID NO: 69422 - DNA, 1095 bp, Homo sapiens
cacctggcaacgctgagttctagggctggtactcagacccctgtgccttcttcctgggtccactggactgtgccagagccatggcagccaataagcaccatctccaggctgtgggggtcccagggcaaggccaggccccctgaccctggtgggggctctccagtgctggtagcctcagcctggctcacaggctctgcgggcccagtcctagccccttcctcagaaggaggaggggaggcaggggtgctgggctcagagcagaggtctcctgaggcagggggctctgagtctgaggtggaggtccagaaagctgtggctcgaggccagggggagctctgagacgctgggggaccccagggccagggtgccatgaggggaggaggccccggacgagggtggggccaagtcccactcaagacagagccagctgggggctgcaggcagtaggaggatgccccagtgtccacacacagaggctgcagaagcccggaggtgctggctgggcacggcccctctcccgatgcccgagggcacggaccctccctgtggggcgccaggacaagctgcacagcctggcgaagtgactgcagtccttcccgcatctgcagcacctgctctgacagctctgtcacctttgggggagggaggaggcgaggtcagaatggagtcagccatggagtgccttcccctggtgcccccctcacctccaccttccccctcacccaccgcctgccgaagcttgtccagtgtgtctgtgttccttgcctcgctgggcccatggggaacagtgagcaggccgctctctgtgggtagtaggatggggttatcagctggggctggtaagaggagataggcaatttgggggtctaggccttgccccagttagagcacattgacctggtaggacctgactcctaggatcatctcttctggccttgcccaaggtgctgaattttgcccaaacttccaggggcagggaaaacaccacccagcagccctcagccacactgcctagtgctctccttcccctcaaaaagttgttctttgtgcctgtcccttgctctgtcctccaggcaaatggacattcctaggagc

SEQ ID NO: 69423 - DNA, 1534 bp, Homo sapiens
gccccgctcggtctcgccctaagtctcgcctttccctttaaccaacccctcaagccgggttacctctccggtgcctataatccttaacgtttccctatatgctgtcccaactaggaaagcctttactttccgctattggtaaaatatttacactttccgtaccatggccacgcccccttcacacacgttgccaagacgaaccggaagagattgccagccccctggttcgttaaccggaagtagacgtacctcacggaagccggctttggccctgcggctgctaccgtcgccgcggagaaattgttggatctggcagtctaggaatggtgagacctcgcggttcgcctctgagggttctcagaggagttggggatgaaatggagttttgcagagtgccgccggggacgaccaccccccaagtttggggccccgccccagtggcgccccgaaaagctgcgcatgcgtgggccggaccgggttagaatctggctcgaagtgttacgcatgcgcaaaggcatggagaccgtggggtgagaatgggcttgcgagtttacccccacctccccagccaccagcctgtgggtctcaaaccaaggctacttggtgctctgctttgagttgcagaggtgacttcatcaatgctcctaccccgagttcttgagacagacctggaccgatcccctaccttgggtgtgcactcttgggagaacgaggggcggagggtccggtaaggaaggggcacagaccctacctcagtttgccggcaagctcgggccccttcgccctctcctcagatgtcaagattcttagtcgtagcctatggagcggagagcgacaggctcacctggggacagggctagaacactgagctaagagccaccctggttagaagtggggactcacgagaggagcgccccgagaaagtccagtacctgggttctctaggggttgttggggcacagcgtggttgataatcacgcagttcccaaacagtggtttttggtttccacgagatggtatctcatggaaataccacttactaaatcttcagtaaaaaccccaaatggaaaagaaaaacaaaaaaaaaacgagatggactggttggagttttgtctccctttcttttttcctgctttggcctgggaggggaaggctggtgctgctgagctgagtggacagctgaagtaaagaaaaatgtgggccaaagaatcccttgtctcttgctagtttatagtcaaggcgcttaacctaggagataccagtagaattaaagggtctatgaaccctctaaaatagtatgtgtttgcacccttttctgcagtccatagctgttatcatactctgaaaggtgccagtgaccttcacaagactgatgtctaaggctattattggcagagtggggccttatgcctctttcctgtccttatgtcttccctagcttatgggaccctgggggacctgagccagtataaggaagtgaggctggccagttggaaatctgagcctcagggagcctcatttctcctttgcagaa

SEQ ID NO: 69424 - DNA, 4221 bp, Homo sapiens
ggagggatggaagaactctaaggagaggaggaggttgaaacctaactccacaatgatggagaccaaaagtaacattcgcttcttcagagggagagtgatgagatggcaggatcagaaagaagcaacaggggccgggcgcggtggctcatgcctgtaatcccagcactttgggaggccgaggcgggcgaatcacctgaggtcaggagttggagaccagcctgaccaacatggagaaaccctgtctttactaaaaatacaaaattaggcgtggtggcccatgcctgtaatcccagctactctggaggctgaggcagaagaatcacttgaacccgggaggcagaggttgtggtgagctgagatcgcgccattgcactccagtctgggcaacaagagcgaagctctgtctcaaaaaaaaaaaaaaaaagcaacaggaagatactttctagtaaggcagatctttggggagcaagaggaagagtagggctggtccaggaaagttggaaactaggatggtctttgaaacggaagggcaggtgctgtttggggcagctgaagaagggccgcaggtagatcacagggtaaccagctggtctctcagccttttttttgatgatggctaccactttctgagagatgtgcctcccagccttcatcttcaggaagtgggaatgagtcagaccaagcagaccttgggaacacctggctcgctgaggatttctggattgtgtaaggattggggttaaaaaagaaaaaaggaaatgtatctgaatgtaagcagtatcatctgtggcgccatcatccttgctgggaggcagctttgtgaactggttgaaagcacaggctttggagtcagactgcttggattccaaacctgcctctcccatttaatgtcttggaaccttggtcaggttacttaatctctgaacctcagtttctttatctgtaaaatgggaataataacctctgagatggttgccaggattaaatgagtgtttgacacagtatctggctcataataagtgctcagtaaatattagctattagctgttatcattccctctttctgttttttttcctactgcctctccattcttgtccttttctccttttattcttctgagtgctaagttctgagatgccccttagatgtgaagtcccagaagtattgattgcatctttggtggtgggaaaggggtggcccctcactggcccaggtgaacatatgatgatcagatgatcaagtgtctcttcatcatctctcagcccacaaatgtgtttttgttccagggaagacacaggatctgcttctctttcagcaaccatttctatatccttccctgtcactagttaatgtcttcatattctcacccagaaataaaataagacccaaagttttatggcactgcagcaggtaggagagggacggggtgtttcaggaaagcagggacacaacacgggaagctcagcgaaggaagggctttggaagttctgtagtagtttatgtttattccattgttctgtcctctgtggggaactgtccagaataggccagtgtctgaatcctggccagaggtcttcatcccaagttgaagatgactgtatacagttagctttattaggttttctcatgccaacatttcaatccaatttcctttttccaagccacaaagacttctgccaagctacctctctctgtcacagcctgtatgtcagagaatttatacagatgtacatatgcacacgtgtatacactgttttcaaagtgcattttaggatattccagtatgcaaaaatctaataaggttagagatgagactgcattttatcacagcactttgtgtgcagggccctgactaaacacttgggggaggtataaaaggagaaaactcaatccctgaatgtagggaaatccccacatgagtgggagacaagcagtcccacatgaaacacccagcaaacattcacagagtagcatgtcactctgcaaagtagtgcatcatttatcctgaagggacacaggtaggagtgtgtgtatgtgtgtgggatagtcataagggtaacctgaaggaggtgaatattggatcatcttgaacaaagcatgagactgtagaataaaagaaatgtgtttcacttgagggtaatctaacaattctgtgcaaagagaggaggagggaagccattgagtcaggatgagcaaagaagagtgtggggcggccttcgttgcaaggctttgactgttagatgaaagattttgtagggtaggcaatcgggaaccggtaagttctcaataaaacgttgaatcattggtgatttaaccacttaggttgcaggggatatactagattgcaaacagacctgtttcatgtggtaggagctttgcttttaagggaggagggctagagggcagattggatccagtcccagttctgtccctaaccagtggtggctccttggacagattattccctgaaaaagggggataccttgggtgactgccagagtctcctccagttctgacattctatgttccctgaataactactagacctaacttaccagtggccccctactgttttgtaggacttgccaagaccatttagtcattcagttaacacatacttattagcacctagtttgtacccatagatggtggtaaggaaaacacaatgggaactggatatgaggtgagcaaaaacagatgaagtccctgcccttcagtgttttcagtctagtaggggccacggatattatatttcattaattctgagactcatatttgaacatttgtcaagtcaggatgcatcttcaaattgacaggatattataatttaattggcagcatttgttttttattcatgccaaatagaaaaataatataatcaggattatacaaataactataaaattctaatggataattgccgaaggagaaggtacatggtgttgtacaagtatataaaagcgggctctgactagttcagggagttgggaaaagctttcgtgaagaaatgattggtagatgtgaagtgtagtaggcaaggtgtgtggggttggcagggccaacccagttttctcaggcaaaggtggatgcctgaggtgggagagctgagagaaggtgagtagggctggaactgagacccaggagctcagcatgggggagattggcaaggtagctgggtagcagaccccctcatagtactgggtagggggtttactatttaccctaagagcagtgggaagccattgaagagttttaagcagggggctaacagtctgaggtgcactttgaagagcttgttatagctgctgattggagtggatgtggggaaaacagttgggaggccactgcaattagatgaaaaaagatggtggcttgggcaagatgggtggtggaaaaggaaatggagagaaatggatagattcaagaaatcttgaggaggtaaagttaacaagacttggtgatttattggcaaggaagagggagttgtggagagtgactcataggtttccatttggacaattgaatggtgtggtgccagtctctgagacgcttctgaggctcccctggagcctggtaggacccaaagatgttagagaggctcctgaggcagcttgagatgggaaagtgtgacacagaaaattgtatttcctccactattgattagtttctgacttcccatgctgaggaaagcgtcaggggcaagagcaagtctgaatacagaactaaagcagttgagcacttagaaaagatgagtcacattggagaggtttagctcatacccttttcttcttaggacaagatgaaggacagtttgttgttgttgttgttgttttgtctttttgagagtgtctcactctgtcacccaggctggagtgcagtggtgcagtctcagctcaatgcaacctccgcctcccaggttcaagcagttctcgtgcctcagcctccccagtagctgagactacaggcgtgtgccaccacacctggctaatttttgtatttttagtagaggtttcaccatgttggccaagctggtctcgaactccttacctcaggtgatctgcccgcttggcctcccaaagtgctgggattacaggcgtgaaccaccgcaccaggccaggaacagttttttttttttttttttggagacgaaatctcgctctgtcgcccaggctggagttggagtgcagtggcgcctcggctcactgcaaactccgcctcct

SEQ ID NO: 69425 - DNA, 1232 bp, Homo sapiens
accttgctttctttcccacttgttaatacatcttagagatcatatcgagacaataagcttcttcattcttgtttataactgtatagcactgcattttatgtgtatatataatttcatagctccttactggtggctatttaggctgattccaatcttctgtttttacaaataatactgaaatgaaaaccttaaacatacagcattttggccatgtagggctatacctataaaattaatttttagaagtagaaggttctatatagagatttgttctgtttgttcttcgttcgttcaatatttgctgaatacctattatgtgccagatgctggtaggtaccaggaatacagcttccaacaagtcagatatgatccctgtcttcatggaatgttattacactcttgttggggaaaacatatccaggcaaacataataattacaaaattatgtacatgaggaaactaaaaaggggatcagatagagaaataggaaggagctactttaaatacagtcaggaagttgtcttaaaataagtgatacttaagctgagaactaaaggatgggatgcagacagccattaggggtaggacagggcaacctaagctgttcaaagcctacatccacagggagatagttcaggatttgtagaggaggggatggacaccaaaaaggggatggagataaagccaaagagatgaagttggcgattggaagtggaagatgtcaaagaaagtaggtggctaaggatgaggtcagttaggggaggaagctggtcatgaagagatgagaattagggagacaagcattttaaaggactagcgactatttgtgttgagagagctttggactgaatctctgtaactgggataattaggggaactagaaaagaggcgactccctccctagatactttgggaataaaagagacctctaacttatttgagagaggcacagccttgcccacaggcaggataatggattagaagccttaggtagagccagtctgtgcctgtagtgaagcctccttcatcttttctgttgctttgacaaaatggaaactttcaaaataaagatgacattcaaggggctcagccagctggctctgagctggcacaagagagagcaaaagcacaagagagagcaaacctaccaagggctaagggcttggggtgggcaggaaatcgggcttgaagaccctcctgaattttgtgctcctttttcatcctcaccactt

SEQ ID NO: 69426 - DNA, 1048 bp, Homo sapiens
tgctgaccttggaagagggatggttttacttgagcattgggttggggagagctgttgtgaagccctcagtacataacattgacaattccccctttgtctttttgaccttaggacacactggggctagaggtaggagaagtggaagggaaaagaccccattaatgtgagggcagggtgggactatctatctctttcactactccttacctatgctctttaaatatgccacagaattcgggctggaatggcattggtggtcatgagttggagagaaagggatgggaggcaggggactggggtacttgggtacctggatacctgccttctgccccttcatctgagaggcctctttgggggagaattgctgaagaggtggagccttccagtctcagtctggtgctgttaaacctcccttattcctttcctttcccgttacaattaagaagctgtgtgcttgcctgttagaccccagttgtcagtctttctcagtggtgaggagggaggcagtttcatgccttgtgcttctcaaactaaagccttggaattgcctcagagcagggtggagggttggggagggaggtggtggatatttcctgacaggtcctctctacctctgacaaggcgatgtcttccctgctcagtatctcttcctttactcatttccagatgccccctccagggatccccccaccctttcctccgatggggctaccccccatgagtcagagaccaccagctatcccccccatgccacctggcatcctgcccccaatgcttccaccaatgggggcgccaccaccactcacacaggtaattgtctctcctcccctggggcctcagaaaaccctgtcagtttagctgggggtggagataagagcgggcatgtaggcctcagaaactggggaaggaagggagctttgggccaaacccatgtggatttgtctgctgaatgactgagacaactctcaggcaaggtgagaggccagaatctggggattgcctgaggaagtgcccaagtgagggtcatggctccagtgagatgtctcag

SEQ ID NO: 69427 - DNA, 3515 bp, Homo sapiens
gtggacacatgaatatagttcttcacatcctctttgtccccagaagagtcagtagcacctggggatcttgctgtgccttcttatgctatcgctcagtgtagcagagtctgggtaggatatagaatttggcatccactgtgaaggaatgagcctcgggagttgtctcaacaaaatactctcacttgaggagaacgaagaatggagctgctatgcgattctcccttgggatcccagagctatggccctgaagggtgggggaagcctgttagggagcagagatctctaggagcaggacacatggattctggcctggcctgcttctccatcccccatggcctgggtcctgggggccactgggcttggccccaacccttccccctcctctttcttcggcagacggctccgggtgcggacaccgccagctgtgagtcttctgggggcctgctccccccaggctcggaggttggggggcataggggagaggggaccgtggactggagcccaccctggatcatgcctgttgggatgccaaggagtctgggatattgatgggaccaggggactatttactggggctggaatacgggaggcataggtgggaataagatggaggtcggagcaaggacttagtatgtatcctttggcttttttctagctgctgtggctgggacaggccctccggtgagttcttccagctcaggggtctctgggtagaaagcctgagagtgggggactgatagttaaatctttggggtgaggagaggctttggaaaaggggccttgaccaccattctgtgcccccccccccacccagagggccctatggagtgagcatgtggccccagatgggcgcatctactactacaatgctgacgacaagcagtccgtgtgggagaagcccagcgtgctcaagtccaaggcagaggtcctgagctgggctttctggcccttcctttcagctgccctgacccttccaagtccttggccttcccttagtctctaaccatattcatgatggttcctctgatcccaaggtccctgaccattcctcaccctccctggaaatgcctccataggatctcaagaagtccaccttccccagtttgaaccaggccaggtggtagctaaaggttcctgtgtcctctactcactaggtccccttagctcccctgactggctggagaacttgcccatcccactgatggctcctatcccatccacttgcagctgctcctgtcccaatgtccctggaaagagtacaagtcggacacaggcaaaccttattactataacaaccagagtaaagagtcccgctggacccggcccaaggatctggatgacctagagggtgagatgtcctacgggtgggccaggtcaggagctctgggggctccctattgcccctgtgactgactgtgttatcttttcccatcacagttctagtcaaacaagaggctgcagggtgagtgacttgcccacctatccatttatagttggggcacctggagtgtggaagtagactctgtcgccatgatctctacactgtgggaggaagagccagctctgtctccttgtggagtcatcccctctggccccagtccttcccaggatagagaaaccagccagcccctgaagtcctccattcttgctctcctcctggacaccgcccttctggctcatctgcaggaaacagcagcagcagctgccacagacacttcagccacagccacctcagccacagcctgaccccccacctgtgcctcctggccccaccccagtgcccacaggcctcctggaacctgagccaggtgggagtgaagattgtgatgtgttggaggccacccagcccctggaacaggggttcctgcagcagctggaggagggccccagcaggtgagggctgccccccatggcattcccaatgttggcctcagactcccagcctggttcaacccttgtcctctgctgggcctctctctcaggaggggtttgaagatctgggtgtgacctctgaagggcagaaaaaggctgccctggggaacaaggagggggtgatatgttgccaggagttcagggcactgaaagctgtgagagctgggggaccctgtggctgagtcccctgtgccctccagttctggacagcatcagccacagcaggaggaggaggaatcaaagccagaaccagagaggtctggcctcagttggagcaaccgggagaaggcaaagcaggcattcaaggaactgctgagggacaaggtgctggagtggggctcccagggaaggtttggagggggctggagcggggcaggccccatgactcccacctgcttcattccaggctgtcccctccaatgcctcatgggaacaggccatgaagatggtggtcaccgacccccgttacaggtaggcctgggcagagggagccaggccctgttcatgagagcagctgtgctagggactccctaaaaaaccccagctcaacactcagccctaagggaaccagagtcaggacagtgatagattgggttggggtgcaaggggaagaaaagctggagggcctccaggagaaggaaaggaaaggtatctgacacaacacgttcaataaatgcttcctgaattgaatcaaacggaattgaattaattggggaatgagggtgctggatagggtgacttgagaaccccaaaggaaaagggcccagtatttgcagtgtcttggagctgcatctcttcccctcacttcctgtcacccctacttctccatgaatggtgttcagatcccagacatctgtgcccttggagcccctgcagcctgcagtgtctcatgaccctccagtgtgggctgtgcagagtggttcgggtgacttctctatccccaccccactcctaccctctatcccagtgccttgcctaaactgagtgagaaaaagcaggcattcaatgcctacaaggcgcagcgggagaaggaggagaaggaggaggcccggctaagggccaaagaggccaagcagaccctgcagcatttcctggagcagcatgaacgcatgacctccaccacccgctaccggtcagggggccaggctgggctgggacttgggaaccctgagaacacaaaggtccagggtctctgttctctgtctacctactcacagcttatatgctccacaggcgggcagaacagacctttggggagctggaggtctgggctgtggtccctgagagggatcgaaaagaggtttatgatgatgtcctcttcttcctggccaagaaggagaaggtaatggtccctgggcagaatccttcagcccatctcatcctggactttccttgtctttgctttgttatggaccctcgccatttacttctctacttccccagtgtcccagcttctgacttggaagctggtatgggacttgcacatctcatttctgctctgggcctatagtcctgggtgtagcagggaggaggagtctctgagagatgggtctgtaacctgtactccctccccttccctgaga

SEQ ID NO: 69428 - DNA, 2455 bp, Homo sapiens
gagctctgggataggaatcttaagtcctagagatgtcaatgatgattttagctcatgtgaatatggtcttaaagcatcatagaactacaggccttaattggtcacgttacaatagactgttgttggcctgtaattactgatgatactcaaattcactttctgaaattgcatcaaagcctgattgattcccagttccctaaggtgtgaaacctcagatcccaagacaaccggtttcatgttatggcttctaataactgaattcacaagagctgaatacttgcttatttattcttatacaattaatgatcccctcttaagaactaccattgcagtggctgctcccacagagccccctccaggcccttcccccaccaccctgggtatccctagcacctgtaggacagcatcgttgaaacattaggggtgctggggtctgagagggtatcctgctgggacaatgcccgcggaacctcctgcctgtctttagacatggacaaggaagatgcactgatctgttttgaggagcacatccgagctttggagagggaagaggaggaggaacgggagcgggcccggcttcgggagcgacgccaacaacgcaagaatcgggaggccttccaggtatctttgctgtcctttctagatcagagctcagctctgccctagagcacaacctcttcacccattccctgcccccttctggatacgctgcctgttctttctgtgcctagccctgtccaagctctatgagacctctctctgcctgcagtctgtttctgctgtacctcctcaattctggactgtgctcttctagggagactagatgtatgcaccacccagaaactgccagtagagagcaccctacaggcatgacttggcagctaggccatgtttatttcccttggtggggcacccgacaggcagagtttattccctcagcttgggggtggcagtggtggtggtagtgctaggggttactgcaggcaggtttctgtttctttgcatcccgggactggcttgttctcacctttttgttctgtccctctctgtgtatttactttctctctttttgcattgttctcagccttccatctgcatctcttcatctctgcctctcttgcctgcatttcctcaatcttgattgtccctgcctcttcctctgccattccctctcttccccctcagtctgtggctctgcctccctgtctcactctccctataactggcctctccctgctcagaccttcctggacgagctgcatgagacagggcagctgcactctatgtccacctggatggagctatatccagcagtcagcactgatgtccgctttgccaacatgctgggccagccgggtaaggcagccaggctcccccttctctggcctggcttcctgccctgccagcctctctgcaccccctactaccggctcctgtcctcggcccagcccccaggccttgggaagctgccgcccgccaggcccccctccctccctccttacaggctccacccctctggacttattcaagttctatgtggaggagttgaaggcacgattccatgatgaaaagaagatcattaaggacatccttaaggtgagggaggctggggttatggatggatacaggatggatgcagggcacactccctgcagaggactccctgataagtcctgttttgcagaagcattacagcttggttcagcagatatctactgtgatcctttactgcacactagggatacagtaatgaatacacaatttctaccacaggagctcatggtctaataggaagatatacatgagaactgttatacaaaggggcaagtgttattacagagacaggaatctgaagaactaacatttgaactgtgcatttagaaatttgtaggtggaagaggttggagtgtacacggggtactaagagcaaaggcaagggggtggaaagggcatgccaggtctgaggaggaagaagcatagctaattgtaaactggtagcacacagattgttctttctggcctgtacagtgttctgtaaaaatttggaatttgttgctaacattttaaaaccaggaaacttcacatagaaaatctgaatctttagcttctcttgtcaatatggattatctagcagtactgagctggatttgcaaggcattctgcagactcaagctgagatgccactttagaaagggcaagtcatccttctcaccattccttagtgccttcttgatactgtcgcaagtgtcagctgccatttaccatcacacatggcctgttgctcttcttctactggagaagagaaatagttctcaatatttacatcttatcaaaagtggaaaagtgagtgagtgatggactaaaccttgtgttccaaaagaaaaaaacaaagagcatatttctttatggaagtgaagattctaatgcatttgaggagataatacagtacagtggt

SEQ ID NO: 69429 - DNA, 1034 bp, Homo sapiens
agaacactgtacaggccagaaagaacaatctgtgtgctaccagtttacaattagctatgcttcttcctcctcagacctggcatgccctttccacccccttgcctttgctcttagtaccccgtgtacactccaacctcttccacctacaaatttctaaatgcacagttcaaatgttagttcttcagattcctgtctctgtaataacacttgcccctttgtataacagttctcatgtatatcttcctattagaccatgagctcctgtggtagaaattgtgtattcattactgtatccctagtgtgcagtaaaggatcacagtagatatctgctgaaccaagctgtaatgcttctgcaaaacaggacttatcagggagtcctctgcagggagtgtgccctgcatccatcctgtatccatccataaccccagcctccctcaccttaaggatgtccttaatgatcttcttttcatcatggaatcgtgccttcaactcctccacatagaacttgaataagtccagaggggtggagcctgtaaggagggagggaggggggcctggcgggcggcagcttcccaaggcctgggggctgggccgaggacaggagccggtagtagggggtgcagagaggctggcagggcaggaagccaggccagagaagggggagcctggctgccttacccggctggcccagcatgttggcaaagcggacatcagtgctgactgctggatatagctccatccaggtggacatagagtgcagctgccctgtctcatgcagctcgtccaggaaggtctgagcagggagaggccagttatagggagagtgagacagggaggcagagccacagactgagggggaagagagggaatggcagaggaagaggcagggacaatcaagattgaggaaatgcaggcaagagaggcagagatgaagagatgcagatggaaggctgagaacaatgcaaaaagagagaaagtaaatacacagagagggacagaacaaaaaggtgagaacaagccagtcccgggatgca

SEQ ID NO: 69430 - DNA, 1207 bp, Homo sapiens
atcctgggatagctaaattttattggacaattaacttttagccacagagtggctggttgataggcctgtaggggcctatcctcactgagtcctgtctctccacacaacctgagaaagcaacttttttagacagttcccttcctctttccccatttgggttcctgcctatggagggcagatgagcccaggagtccctcttgctttccacagccaggcagaccatgatggtgcctttcatcccataggataatgcaaagagccctggacttagaacaggcagacagatccgggtcagggagatccatggaggatgctcatgagaaatatattctcttgagatctgttgaattttaagtgtctgaaatatccagtctaggatgtttgaaaatcaggagagatgaaggatgagattgcgagggagtacagattgggtagtgaaagaggactaagtgctgttctcaggaacatgcatatgcaagagaataaaaggtcagagagggtgtgacctggagaggggagtgttgaagaagtaagtggtagaggcactgaggaccagatgagtgaggacaaagaaggcggccttggatttggctagtagacacaagcaacctttgggagagtagagtcatggaggtggcatgggggcagcacatgttttagagtcagattactcctggttgcttattggctctgagacctccgtaagttccgtgtctctgagcctgtttgctcacctgtaaatcagggataattcataggtaaggttgtgagaattaaataacatctgtaaagtgtctaataggttctcaataaatgtttattccttttcctttctgctgcatttcaagaggttttgaaacaatggaaaagagcagaggtagttagcttgatgaaggggagagcatggtggaaaggatgttccaggttaggtgaggtgtctgcttgatggaaggagccagtaacaagggtgacttggagctttcaattccctgagaatgaatgctgtgttgataaggactgtagcagggttgaggaagtacccttggaaagaagaaagaggagcacacctctgccatcagcaaaaaggccagaggaggtgagagctatgtggagggagagaaagggaatctggcctgtgcttaactgacgtgagagccagactttgaactccagtggcttcatttaccactcatgtcatcttgggcca

SEQ ID NO: 69431 - DNA, 1053 bp, Homo sapiens
gcttttgttatcttctttctgaccacttcaaagctttccgctggagccttaagcaggggccactccagagggagccttcctccaggcgccaggcctggcccagcccagcccttcccagctaggtacagtgggagcaggaacaagaaggggagcagtcgctctttactcccaactccctcaagctggccccagaggtcttgtgttttgtgtatgatgtatgtgaagtgcttagaaaaaaatcataaagctctctatagacatgaggtagctgttatttctgccccacccatgaaccctagggcaggcctgaggcagtttcattttggagaccagcagtctctgtggcttgcctgcctttgctactgtgttctttggggtcacaagctcagtttccattccattccctccccctgtgagggatcagctagcttggtgtgtacttccttatgtccatacaggtatgtgaacctgagtgagcccatgctgagggggagggccagagtttgatatagctctgggctgggaggtgagcatgccaggccctaggcattcctcagccaggcttttggtgaccagtgtccctggagaacgtgctgctggacgtgaaggagctgggccggggcatggagctgattcggcgtgagtgcagcatccatgacaacagcgtcctccggaacttcctcagtaccaatgaaggcaaactagacaagctccagcgggacgccaagacggctgaggcaagcacggggtgcaggcggtgggagcaaccagggccaaggcaccaggcccctctaggtggccctagttctatttttttttttttttaaatcaagcagctggctggctacatgtaggggagagagagcgctttgggagtgccaggcagctgcctctggagacatgtaggggagagagagcgctttgggagtgccaggcagctgcctctggagactcatactcaggagctttgggagccccaggttccctccagctcacaggggcctgggtgcttggttttcctccctttggccctgggctctgctttctgcaggc

SEQ ID NO: 69432 - DNA, 1046 bp, Homo sapiens
cccaaagctcctgagtatgagtctccagaggcagctgcctggcactcccaaagcgctctctctcccctacatgtctccagaggcagctgcctggcactcccaaagcgctctctctcccctacatgtagccagccagctgcttgatttaaaaaaaaaaaaaaatagaactagggccacctagaggggcctggtgccttggccctggttgctcccaccgcctgcaccccgtgcttgcctcagccgtcttggcgtcccgctggagcttgtctagtttgccttcattggtactgaggaagttccggaggacgctgttgtcatggatgctgcactcacgccgaatcagctccatgccccggcccagctccttcacgtccagcagcacgttctccagggacactggtcaccaaaagcctggctgaggaatgcctagggcctggcatgctcacctcccagcccagagctatatcaaactctggccctccccctcagcatgggctcactcaggttcacatacctgtatggacataaggaagtacacaccaagctagctgatccctcacagggggagggaatggaatggaaactgagcttgtgaccccaaagaacacagtagcaaaggcaggcaagccacagagactgctggtctccaaaatgaaactgcctcaggcctgccctagggttcatgggtggggcagaaataacagctacctcatgtctatagagagctttatgatttttttctaagcacttcacatacatcatacacaaaacacaagacctctggggccagcttgagggagttgggagtaaagagcgactgctccccttcttgttcctgctcccactgtacctagctgggaagggctgggctgggccaggcctggcgcctggaggaaggctccctctggagtggcccctgcttaaggctccagcggaaagctttgaagtggtcagaaagaagataacaaaagccagaaacaaatggacccaagtgttctctctcctcatagcttcctgggattgtcctgggctggatgtgagggcag

SEQ ID NO: 69433 - DNA, 1061 bp, Homo sapiens
aggtactcttcatatttcattctcttctgtattttctcctgactttttgttcattataaagtcatgcccccatcctactttctctttcagaagaatatatgctggctctgttgagctcaatatgtatctgcccagcttctgctgagcattgtattgggagctatggaggatacagagatggttaagacagggtcttgtttatagggggcttccaattgagccattatacaaggccaagtgaaattaaagcaaaatgaggcccaaagggttatggagagagccgctatgtcagaccggtggtagattaaggagagtttcacaggggcaaccttttttcctgggctttgaggggcccatgcagtgagaattggctggagcagagaggacacttcagggtgccagcggagggaggcagcttctgcttgcctcttttgttttgctgccttccagcttcctcattcccccacctgggtttctgccactctgagcctctgagtaccctgacagagaccctcgttaagagaaccctgggtaggaattctcactcttggggcaatgactatgccttcagcccacttttcccttaatggtgctgtctgcctgccaggagacatatgagaacacaagccaccaggtgcacaccctgcggaggctcattaaagagaaggaggaggcctttcagcgtcgatgtcatttggagccaaatgtccggggcctggagtctgtggacagtgaggccctggccagagtaggccctgcagagctgagtgagggcatgccaccctccgacctggaccttctggctccagccccaccccctgaggaggtcctgcctcttcctccaccaccagctccgcccttgccccctccacctcccccattaccaggtaaccacgacgacccctgggagccaacaggggcagcctctttgtggggaccaaaactgtagtcagcagtgtcttcctcagggagaagctgggaaaatggcattatctgaggacttggagggatataaaatcagggtgagggaggcctggaatctgagggaagctcaagttatc

SEQ ID NO: 69434 - DNA, 1063 bp, Homo sapiens
cctccatcagcttcccatctccttagactgccctccttgttgctgcctgtgctgcttctgccgctgttctgtgttagtggctcttccagctaggatcaggtctctgctccccagttctgctttctctccttgctacccctgctgcttgttgccctagaggcctgaagggtgggggtgggctcacggggggccttggcactgaatttctcctgtgtatgtgcctgtgtatgcgcatgtgtgtcctttcatgctccaggtttgactttgagggtctggaaagtggtgacgatggtgcatttgacaaactccggtcctggagcaggtcaatcgaggacctgcagccacccagcgccctgtcggcccccttcaccaacagcctcgctcgctctgcgcgccagtctgtgctccggtatgtgtgcttttgctctgcccacctgcctcccaccctacccttcagtgcaggtctcgggttcagcagtgagtgctcatgctcctccctccactcttgcttccaggctcagctctcttgccctctgcctgccagtctgtctctggtctgtcttctctgtctccttgactctgcccagcggtctgtcctgggtaagtacatggtctcagctgcacttacccaacgtggggttccagctctccccattcctcacccctctctgggggagcccttcattcctctcactctgccattcctcctgggtctcttgagcagggcacatctcatacaggtccatggccttcactgggtgatccagctcctactctcattctgtttccctctagttcttcactctgcccctttagctgcttggagaccagctcccacccaacctggctgccccttgcattcccttcacctcttccttcaggcctttctctctgaggctgccacatgctcatttgtctgcggtgtcttaagagccgccctgcctggaggtaggcggatggactggatgacttctcagagccccttcctactctgggaggctttcctttgggtcccatggccctttccttggtttctgtctctcttgtggccatgctttcctcc

SEQ ID NO: 69435 - DNA, 1085 bp, Homo sapiens
ggctttgagtggaagacattcccacagcagttgagactggagtctgcctgtggcctggtgctgggccaagcgaggctcagagaaggctgagggtggggagaacatactatattgggtagctgagacctagttcccattcggtgactatttggactttttggtgcctggaagtttatttgcttgtttgggagaagataatcttagttcatgagcagaagcttccttaagcaccaggaaagatgtaaggcactgggggcaggagctgaatgttttctatattcacagaccctggtgtccccaacacattgatagggcccttaggaactgtgtgagtcttttttttttttttccagtccctgagtgggaaaccaggaattgctgaacaagcaaagagctaatgtgtaaggtacagtgaaagagggtattggcctcagtgttacgaaactgtaatcagcaaaggtatatgcaaaggtatatgaaagtgagagagagagagagaaagtgtgtatatgtgtgcgtatgtgtgcttatgcaaaaggacagtgagggacacgtgatgtagaactgcaggcaggggtatagacctgatgggagggcctggcacaaatgtccagtgcttatgagtgagcagtggaggcccaggtgggggtggggtgcccaggcttcctgacagggggttagagacagccaaatgacatcattagcctttcccctcctgttgtagcagcagccctcatccgcccccagggcaagccttcccaggattctttagagggaggggacacctgtgtgtagccagctgtagcagcaatcacaagggaaacagcacaggagagaacaggaaagggatggttcctggcctcagtaactgtgctctggtggccagagtatggcttctgtacctcatctgtgaatcagacattgaaagtcaagctgctgagaaaggtgtggccaagcctcttcctttgtttggtcagtccttcactgacttcactgactgaaggacaaagtggcaggggctgcttagtacccctgtgtgtgagggcaagaaggacaccgatggcaaccctgagtgctacctgcca

SEQ ID NO: 69436 - DNA, 1083 bp, Homo sapiens
gaggtttcagccttgttgactcaggttctctcctcagagctccatgaacctgcctccagacaaggcccggctcctgcggcagtatgacaatgagaagaaatgggatctgatctgtgaccaggtatggggtttgggaaagaggagggaggtagggagttgtgtcttgggctggctaaggctgtggggccaaaggcattgagtgcagccttgggttccttgaggaaccctggcctaagcttggcctcatctgtgttcactttcttttccaagaggattctcataacagagacagagctggcaggccaagttcccctctagctcccacaaagagctgtcttgatttcttccaatgggcaatagtataaggggatttgtgtagatcaggggtataggattggctgtgcaggttcagggctatgcccggtagggtgctcaaaggactgttgatctctcactctgtcttagccctggcaaatagcagggtctttctcattatctcagggcctctaggaatgagaagccccagactctagtcttttgttcccaaatctcagaagagtcaaggtctggaaactctctctgcatgaacagtgttgagagctggaagagaatagaaatcattactttgctcagagttgagagtcttctaacacatatgacctggctctttcccttgcatgcatttgaagatcatgagtcacgagtctgtgaaatgagacaggactgtatgcagggctgggagagttggcttttacctttttacatcttggtagagatggaagtatctggcagtgtgggtagtgtgtttacccagcactttgccatgtacaattttattatttcttttcaggctctgggtgaaataataataggtaacatttattgagtgcttgttatggaccaagtactcaacacactgaagtatctcatttaatcatcacagaaccctctgaggaaggcagtgttggcattttatagatgaagaacccaaggctcagtaacttgcctaatgctagtaggtgatgaagccagggctgagctcaggcaagcagatgccaagtctgtgttaactgttctgttcca

SEQ ID NO: 69437 - DNA, 1010 bp, Homo sapiens
actggggctgtcaggggtcaggtggagagttaggaaaccttgctggagggaccaggccttgctcacatgcaccccattgtgcagggagatttgcctggcctcaaactggcaaacagagcagccttgctggagaagcaccagctccatgcctttcggcttcttcccattatagatttttattattagatgttttgctggttccctgtgatttaggaatcggtcccagagttgctttcagtttgagttcatcttccccttttcctcacatctcctattgtgactgttttggctgtgacttacctcccttacttcttccttggagtctcctgccatgtcccccacccctcaagataatgataccaaaattggcgcctagtcttagaggaagccagagcaggatcagtgaagggataatggattgctctgtagtcagagtgttgcgaagcaattgctgaaggtgggatggaggcagagagagagagacagcctagaagcaagagggcaggtccctcggacatcagaacatgacacaagattttcgggaggaagcaggcggtgagggggactgtgttgaacacccacagtgttccagacacatacagacataaaatatttatcttttaatcctcagctaaaaccctgtgaagtagtgagattatctcgtttatggatgcgttcaccaaggctccataactctgaagagcccaaagttgatcttgggccctctgacttcacccacatttagtgccctctcctttccaagacagccactgcctcctttctgctcagcaagggtctcaatgaggagttagcaagaacttagctcagcttctgccttctgggagcctacagtgtctgtggaaccactgaagaaaaaatgtcaaggaaacaaacttttgactgagaccggaactgtgtcaaatttgctactttgctgtccccggaactcaggaagttgtcattcctaagggcagagaggcttccttaggacattggagccctgccagact

SEQ ID NO: 69438 - DNA, 1035 bp, Homo sapiens
aggctgaggcaggaggatcccctgactttcggaggttgagtccagcctggacaaccccgtctcttaaaaaataagagagaggggccaggcgcggtggctcatgcctgtaatcccagcactttgggaggtaaaggtgggcagatcacgaggtcaagagatcaagaccatcctggccaacatggtgaaaccttgtctctactaaaaatacaaaaattagccgggcgtggtggcgggcacctgtagtcccagctacttgggaggctgaggcagcagaatcacttgaacccaggaggcggagggtgcagtgagccgagatcgcgccactgcactccagcctggagacagaatgagactccgtctcaaaaaaaaaaaaaaaaggaatggggaagatatttagataagatgataagattatcaggcagttttgggggttgagctataagagaaagtgaaactttccatgaactttggatcccagtgcctgagtgtgtctccgaggaaggggctccctatggcagtgcagccagtctgggtggggatcagagtcagtactcatctgggggtccaactggctcctagcctcaggtgggccccagtcagagcctgtggttgattcttcctggctccagttgtcagaactgtctgcagggccgggtagggtgctgattaactgtaaatagatacttgtctttcctaggcttctcaagtctgattctctcaagatttcctgaagtcactctgtgtgttctggtcttgaagagaaatatgaagtctggtctgggaagcagctgcaaggagtgtagggatggatgctcagccaagccttttttaagagttttggggctcagtgactgacataaaggtgctcaatacttttttttttttttttttttttggagatgaagtctcgctctgtcgcccaggctggagtgcagtggcggaatctctgctcactgcaagctccgcctcccgagttcatgccattctcctgcctcagcctcccaagtagctgggactacaggcgcccgccaccac

SEQ ID NO: 69439 - DNA, 1022 bp, Homo sapiens
gggggttttggggggtgtcgaggcctctattctgccccagagcgctggcgaaggccccttctcagcccgccttttcctttctcccgctccttctcctctactaagtgtagacgcagggccccttggcctagcttcgatcgttcgaattcagagcacgtccttccgaggtgaaggaacgcgaaactccacccatccgattgctgttcggctgcgggcgggtcctttggtcgggctgaccctgggtgagcggcccggagccaagactcgaggtagggcctggcgggcgggtgatgtcacactcctctgtgacacgcgaggctcctcagttacttagccaacggcagaggcgggaagtgagaggagtctggggctggggctgccttccaggcccacggggcggccccgctcttttcggattggttacctttgggcaggtgaggtggctttgctttgcttggtcttgaggttttgtgggcgtctttctaagtctgctcagcaagggcgtcgttgggcagtttttatcttgggcctacttgctggacctgtggtaacaagtaggctttggtatctttgtatatttactgagtgtagaattactacccggtgccagcccgggctgcttggggtcatcagcctttcattgaccacccccacaacaaaaatcactatgaacttgagactgtgttctagcaacttgtgaatgtgtaacccagtagaagggctgactgtgcttgaaacagacaaggattttaaggtcaaaggtaaataaatggcaaatggacttttctagttacttattgatatttatttacagtttatcttttgtatgtgtggtttaagaattgaattctggaaagataccggaattgcataaacacatttcttatgacctgcgtatacacacttttttctgtaattattgtatttacactctttggtgttttcttattctttgtgtctaatatttttgttctggcctaaagaatatgttgacatttagattctctgccgccactttcctc

SEQ ID NO: 69440 - DNA, 1957 bp, Homo sapiens
tcagaatgcaaacagcatagtgctgaagtgctgtctagtattcctgagtgcagaaagaccgtaatgtgccttatgaagaaaatgtgtatattagataagcttcattccggcatgagttgtactgctgttgtaactgtgagttcaatgttaaggaatcaaaaataatgtcaaatgaggtgtccttaaacagaaacacatataaaagcaaggtatctattgatcatttgatgaaaatgttgtgaccttaggcttgcaggaacctacctaccttttatttccctcaggaacaagggtttactaattcattgtccactgtgattttataacataaacactgaataatgagaatcaacttcttcctttaaaggaaggaaggaacttcagtgtctacgtccatccttaatgatttctcttttttctaatgcctatagtttttcccacttggcgtttttaaaaaaagaaacacttttttcttactacaaagctaatatgtgttcattttagaaaattcagaaaacagactagcaatgagaaggaagtattttagaaacttccataatcccatcatccagaaataactactgttaacattttagtactttgcagtcttctgtatatgtatgtgtcttggtgttttggtgtttgggggttttgtttgttggtttttgtttttttgagacggagtttcactcttgttgcccaggctgaagtgcaatggcgtgatcttggcttactgcaacctctgcctccctgggttcaagcaattctcttgcctcagcctcctgagtagctgggattacaggcgtgtgccaccatgcctggctaattttgtatttttagtagagacggggtttctccatgttggtcaggctggtctcgaactcctgatctcaggtgatttgcccacctcggcctcccaaagtgctgggattacaggcgtgagccaccatgttttttttaaagtgaccaaagggggatcatttctatttgttctacagatggaatgtactttaagcacttgtcacgtttcattcatcctttctattttttgggcaagactcactcatagtttgacttgggtagttgtactgtagttgaaggactacgcaagccagaagagcctccagcatccaccatggtcctaactctgtgcttcaaggcttctgggttatctcctcagccccatccctgagaaaacactactttttctcctgcctccaggttataagcaaatgttaggaagttcagacgagtgtttgaacccaataaaggtctcttgcaaaataaatttgaaactttcaagtgtttaatgattgattgattctgactctaacaggctggcctgctgtctgccttgggctccctgatattgatgatttggctgatggcaacacctcatagccatgaaactgaacagaaaagactgggacttcttgctggatttgcattccttacaggtacgttaagggatttgtctaattttgaggggtgagctatattttcagtatctcttaattagttcccccccctttttttttcttttttttttttttgagacagagtctcgctctgttgcccaggccagagtgcagtggcttgatcttggctcactgcaagctccgcctcccaggttcacaccattcttctgctttagcctcccgtgtaggtgggaccacaggcacctgccaccacacccggctaatattttgcatttttagtagagacggggtttcatcgtgttagccaggatggtcttgatctcctgacctcatgatccgcccgtctcggcctcctaaaatgctaggattacaggcatgagccaccgtgcctggccctttttttcctttttttttgagacagtgtctccgtctgtcacccaggctagagagtgcagtggcgtgatcttggctcactgcaaactctgccttccgggttcaagcgattctcctgcctcagc

SEQ ID NO: 69441 - DNA, 2557 bp, Homo sapiens
ctacttttgtgtccaaaaatagccattgtgtacttgaatgaatgaggttcaagagcttaggtagcataacctattaatagtaggcatagaacttttaataaactagacttgagaatccgacatagttgcacccatactggcaattatcataggagcttctgttctgagtcttacagacagtgcattaaagctatacattgagatctattgtgcaggacactttgctgattctcaaaaaaagaaaggcacagctcttctagaattgtcataaaggaaacaagactcaagctatgtaataaaaatgtttgcaaaacatttgaattagaacagcttgttctgagtgacagtctaatatacgtaggagaaattttagaaaggaagagatttagggattaaaatttttgcatcagggcaagctagtttttgaaggcattaaggggtggaattatcagaaggaaagaggaaagtaattagaacgaaagaaatgttagagctggaacaggttgccctcctgttggcaggtgtccacctgcagaaccagtctcacctttctttgctacaaaggggagtcagtcctacatgactataaggttgctggccacgaggcactgttttgctctttatcctttttttctaattcctgatctggcctatattaccatcttacatcactctagctctgaaatgtttggcatgcctactttattttcttgtaatctctgtaccctccctgaggtcatccatgattttcagctaagaggacaattttgcagctatttctataaaaaaaaaaaaaacaacgcagtcaggtatacattttattgaaaacaattacagcggaggggagagagatttaattctttagtccacgtttgttaagagcatgagtatgcctatatttcgggatcagcttttggatgaggatcctattcaagaattgatcgtaatactgtgttctgggttttctgttttctaggagttggcctgggccctgccctggagttttgtattgctgtcaaccccaggtaactcttttggtagtgtcttatgtgcttttatctttatgaatataccttctaaatgtagaccgtatacctgtagcccttaatctaatggtctttttttctaacagcatccttcccactgctttcatgggcacggcaatgatctttacctgcttcaccctcagtgcactctatgccaggcgccgtagctacctctttctgggaggtaagtgtgaactgggaaacagggaatgggggctcctttttagccagaattctcactagtactccttccttacccctaactcctttgcgactattgagttgagattaaccttcattctgggggaagttaaggaatggctttaatgggattgctttactttgccttggcttctctcaagacagctttttgctgtgtcttataggtatcttgatgtcagccctgagcttgttgcttttgtcttccctggggaatgttttctttggatccatttggcttttccaggtaagacttagcctggaactttccagcagccatttgcctcacacttctttctttccttttttttttttttttgcacttctttctgtactactttgggcagtgctctctaagccttcccattatccttcataggatggagccttctgccacaagtgaaaacaggctgcacaaggttgggcattgctaagagaaaatggtttgctcagacaccatttgtgtaaggccagtctggcagtggctgattgttaaaatgattgaaactcttccagtgaccagtgcagtattgtgcctagggaagtaaagtggtcttcaccctaggctgcagttctcgtgaatggtaatgttcatagggttcacatttgatgtactttcaagtgactatgagccagaaagtatggctggtttttttttctctgcaacttctgctgtatagtaacttcatctcttacatttgttaggcaaacctgtatgtgggactggtggtcatgtgtggcttcgtcctttttgatactcaactcattattgaaaaggccgaacatggagatcaagattatatctggtgagtgtgggaactagtctttaacaagcatgaaggttgaggcataccgttcagcagctgaacttaggttggcattggctgaacataggtggccaagctttgggagtgtatgtggtaggaaacccacggttttggaactgtgtaccataatcttcctcaattcctgaaagatttcagattttttaaaaatctgggctaataggccaggtgtggtggctcacacctataatcctagcactttgggaggctgaggccactggatcgcttgagctcagaagtttgagaccagcctgggcaacatggcgaaatcccatctctactaaaaatataaaaaaattagctgggcatggtggcacatgtatataatcccagctactcaggaggctaaggtataagaatcatttgaacctaggaggtggaggttgaagtgagccaagattgcaccactgcactccagcctggcaacagagcgagaccctgtctcaa

SEQ ID NO: 69442 - DNA, 2793 bp, Homo sapiens
cactgttgggatctgagctgtagtggctgtgaatagcctagagtggtcaggcagcccacctcggcactcctggggtgggggtggggacagctgcttaacctttattcttggtcggtctgtcggcaactttgggaaccaccagtaggatgtggttaagattcagttcttgctgagctaaggaagcatttctcatttctttttaattgtctggctcacttctagtccctaactaaatgctcactcaagagttttagcttgaatgtcaaatgtcaaaaaattaattgggtgatttttctccatttctaggataagaagaaagagaagaaatgaagtgaccatccagcctttcccaattagacttcctctccttccacccctcatttcctttttgcacacattacaggtggtgtgttctgtgataatgaaaagcatcagaaaagcttttgtactttgtggtttcctctattttgaattttttgatcaaaaaactgattagcagaatatagtttggagtttggcttcatcttcctggggttcccctcactcccttttttgtcaaccccatctgtagcctcttcctctactcaggcagtcgacccgccacgatgagaagtgggaccagcagagggcgccaacttcaggagtccgctttcccaccaggcttcattcacccagtggacctgaactgtttggtagagccacccggcccttccttcctcattgttgtttggtatgcgcacagttcctgtgggactgggccgtgagttttccattggaaagaagttcagtggtcccattgttaactcagcctcaaatctcaactgtcaggccctacaaagaaaatggagagcctcttctggtggatgctttgctccctctgagctgcccatgctggtctggcaaacacacctttctgctttgccttcacaaaagtaatgtgttccctttcccaccccttgcctgaccctcagggagtcagcctgcttccatccatgggtgggaagacttcagcacaaaggaaagactaattcttgtcaggcatttttgaaaaggctgattatgtgtatcaaggtacagcatcgtagggttcccctaaacttgccctgtttttgtttttttagtttgttatccccttactgagcggcctctactaggtggctgtgattaaatgtcccaagcaaggatagggaaggggaatggttgagcctctggagatcattgtaaccaatcctgccagacctgtttggggcagtggggagcaaacctagataaggacctgtttggggcagcagggagcaaaatctcctttaacaaccaagcagttcctcattcacatcaacagagcgaggctgtgataacttaggaggcagcaatcctaatagtccttcagtgcattttagtctgtctccaactggacaccagtaggtagtgtcaagccagagattcggggcagtagataaatgttcattttactgatgcactttagtttttggtctgttacctgttttccagaaatttgtggccttttaggcgggagttaggcgaccaaaccagtgagagccccaatccctgcagttttgtggcttcaagtgtgggtggacagtcctaatggggatctccagctccttcctgtgggctgccacagacagctacccccagaagggtcaatgttgggagtggttgtggctctgagctgctctacagagcttcagtgtgagaggatcgagccattgaaagctcattaccagtaggacataatttttggctctccctattcacaaccagtgcacagtttgacacagtggcctcaggttcacagtgcaccatgtcactgtgctatcctacgaaatcatttgtttctaagttgtgtttattcctggagtgacatgccaccccgaatggctcactttcactgaggatgctgtcctctgatttagctgctgcctccagcctctggcttgagaacttactaaaggcacttccttcctgttaaacccctgttaactctccataaatttggtgattctctgctaggcctaagattttgagttaacatctcttgaagccaaactccaccttctgtgctttttgcttgggataatggagtttttctttagaaacagtgccaagaatgacaagatattaaaaaaaaaaaagaaagaaaaaaaaaaaaacacctacttttaaagaaaatacctaacagatttttaatatagttatctctaccactttcttttctagtttcttgattttcagctcaggctgcattctaactcatactgtgaagacaaaggtgtttttgattcagaaatatatgaaatctgcatagtcttaatttgtaaaaaataaagaaaattccttaacctttcctggtgtttgtgttaaattcaagggtacagctggtcatggagcttgtgatactgccagggtttgctactgggggctgggagtgggacacgattgagttcgtgtcataagtatgaacagagacaaagacctcccactctgtagccccagcatgccacaaatgttgagaattttctctgtcaaatatgtaagccagttttttttccagtcctctccaccccctgccacctttgctatatgttgtttgtggtgatatgtgcagttggttcagatgtgcagccaagctttggagtttgaggatgcataatggaaaaaaggcaaatgatacccactcattctgcaagtatttttgttcacccactgctgcccggctgtattctaagtgcattagttaataaagatgtaaaagttggccaggcatggtgg

SEQ ID NO: 69443 - DNA, 1041 bp, Homo sapiens
tccacctcctgggttcaagcaattctcctgcctcagcctctccagtagctgagattacaggtgcatgccaccatgcccagctaatttttcatatttttagtagaaagggggtttccccatgttgctcaggctggtctcgaactcctgacctcaagtgatctgcccttaagtgatctgcccacttcggcctctcaaagtgctggattacttacaggcatgagccaccacgcccagccaagaaacaatatgttctttctaagcatggtgagcagatgaggggatctgtcttgtttaagctggggataaagatgtagaagacagttcctgccttggagtccttcaccactgagtagtgctggagagccacatgtgaacattacatgtgaataggagttaagcatagtgggccatgagacaacagcaggagacacagcctggtctggtcggtcagagaaagtgctttgtagatgacacctcagctaagtctaaatctcaaagtttgagtcaaagtgaggcaagtgaagagattaagaaaggcagtgggagtggatgtttctgatcaagggatcagcacgaggaaagacaggagtacgctccagcatggggagtgcaaggaaggagctgcaaaaacaggttttgctaactaggaaagttggaggaaactagtaggaaatggagggggtaagtcaacagttactgaagacctggtatgaggcactgttgcatcaaacctctgatgaagctgggcgcagtggctcacacctgtaatcccagcactatgggagaccccaggcgggtgaatcacctgaggttgggagtttgagaccagcctgaccaacatggagaaacctaaaaatacaaaattagctgggcgaggtggtgcatgcctgtaatcccagctactcaggaggctgaagcaggagaatcgcttgaacccaggaggcaaagattgtggtgagccaagatcgcaccattgcactccagcccgggcaacaagagcgaaactccgtctcaaaaaaaaaaaaaaacaaaaacactttt

SEQ ID NO: 69444 - DNA, 1061 bp, Homo sapiens
tgcatactggccaggcgcggtggctcacgcctgtaatcccagcactttgggaggccgaggtgggcggatcacctgaggtcaggagttcaagaccagcctggacaacatggtgaaacccggtctatactaaaaatacaaaaatgagccaggtgtggtggtgggcgcctatagtcccagctactcgggaggctgaggcaagagaatcgcttgaacctgggagtggaggttgcagtgagccgagatctcaccactgcactccagactgggtgacagagcgagactccatctcaaaaataaataaataaataaaaattaaagatgcatactgaaataagtatggattaattactatgatgtctgagatttgcatcaaaatactcagttgggcttgtggagtgcctggagtgagggttctggatcccacccgtgagatttaggattgttaaaatgagtcttcagaagcaaatccctagtgacttcttatagcaaatcatcggatgaccaattgtggtaaaattaaattatagagtggattattgaggggtcctggcttgcctggatggctacatgaatatagccttggggtagacagaagaatatatacaaccaaagaataagtatgggaagctgggtacagtggctcatgcctgtaatcccagcactttgggaggctgagttgggcaggaatttgagaccagcctggccaacatggtgaaaccccttctgtactgaaaaaaaaaaaaaaaaaaaaaaaaggccaggagcggtggctcacgcctgtaatcccagcactttgggaggcagaggcgggcagatcatgaggtcaggagatcaagaccatcctggctaacatggtgaaaccccgtctctactaaaaaatacaaaaaaaattagccaggcgtgatggcaggcgcctgtagtcccagctactagggaggctgaggcaggagaatggcgtgaacccaggaggtggagcttgcagtgagccaagatcgtgccactgcacccccagtctgggcggcagagtgagactccatctcaaaaaaaaaagtacaaaaatt

SEQ ID NO: 69445 - DNA, 1079 bp, Homo sapiens
ggggccccccagggctggagacctcggagtctctcagtgactcactctacgactcgctgtcctcttgtgggagtcagggctgaggggctgcgccacgccacggccccgctggagctggggaccacagactggaccggctctcttcatgcccagcccccggagacggggacccctccctgaagggaccaaggaggcaggtggataagaaggtgaaaagggggtccctggcacaccccaccacccactgcttcggcggatgagatgaccgtgctcagctcagggagagaccccgcccttggtcccttctctcacccagagtaaggctcttcctggaagggactgggggttaaaggccactgtgtcgcagccctccagtccctacttcaggctgagccatcttgtggtgctgggcttcctgcccaccagccgtgccatctctgcccaacccggctgctcctctgccccgaagccctcgcgaggccctcctggaggcccccgtgctggtggagtttgggggccagggggacaagttgccttctctctctgccctggtcctccctgctgtctggatggtgctgccctcctctgccccatgcctttggggtctgttcgtccgtcttttttgttgttgtttttatatattgaagcgcctggcccagcccccagcccccagccccgcactgcggttaatttatgtgttgtttaaaatgcggctgctctgcttcctgcctctgcttctgccgtatccctaataaaatgtggaggccccctccctgcccctgagtcggcttgttgtgtgggaggactcaggcaggccaggtcgggggacactgcatgggtgccaggttgagggaccccaggcccccttgtgacacagccccctcaccagggcaactggctggagtcatcccagaaggtaactgagggttgggagagtagggcctgcttaggcccggaagggtatctgggctcggagagattctcctgggccagggcttgggcacggcgcgaggctgggtggccccttggagagggagctggggaagatggctgtggacatgcactcaggccccacgtgt

SEQ ID NO: 69446 - DNA, 1132 bp, Homo sapiens
ggtgatgatatgaaaagtctccatttatggaattcacgccagacactctacatatattatctcattttgtcctccaacaaccctttgggctaagtgttcttatccctgttttacaagtgagaacaagagaaaagagattctttagtgtcagatttctagcccaagtttctagcctccagggagccttagggctgtacggagcttaaatgtctgttttactgtggagcttacagtgaagcttgggtgtgtgcagaggagtgggaaaatctaggcctgtctggtgtgctttgtgaagtagtcatgtgacttgggcaatatcctctgccccagagcctgcctcctcccgcaggcgggtgctccccttccagggttgttaggagaactggatgggatggtgtggaagaaagcgcctgtgctattcatcacactgggtaaacacagtgtgtgcaagtgtaactttctgttcctcggtttcctcatctgaaacacaggcactgataatagcatttaacattgttgtggttaactgttgagcacgaggcaagacaatgtatgttgtagaaccgggttgtaaagtaccaggtgtgacttttcagtctcctctgttgtctgatgattcctggctgagagatggggacctttgcactggctctttctgctgtcccaaatgctttcccattccaggatttcatctggacttcattcaggtctctgcttaattgtcatctctcagtgccttatcacaacccaacgctgtacattgtcggcctcgtccaatagagtggaagcatcatagcggctgggctgtctctggctgttcgtcccgtgtcccagtgcctggcacatagcaggagcccagtaagtgcgtggctgacgtctttttttttttctccacaggcaaggtgaccgttctggatgctagagtgagtgtgcccacctgcgtaagggggcagagacaggtgaggggctttggggcctgtgcatgctgggggtgggagaggcacccctgggctccactgtggaggataaggaagcaagcactcagatggctcgatggtgagctgctgaggacacctctctcctatagtccaaaagctccaagcctttttatttttgttttgaaacggtcttg

SEQ ID NO: 69447 - DNA, 1056 bp, Homo sapiens
ggatatttacatagtccaaagtattgcccccaaaaatatttaattacaaaaggaaaaatagtgactttataatggagaaaccaattaatagatactgcctaaccaagtgatgaggttaaaacatcaccaggaacaagaaaccttgatatcatgtgtgtcctcagatataatgccctggggaaggcatatcacctccgtggtattcttctcaaagcatataacctcagtctaattagtgagaacatcaaacaacccaaattggaggacattctccaaaatgttgaccagtcccttcagaagtgttacaatgatgaaaggtaaggaaaggtcgagggattgtcatgaattgtagacactaaggagactgggtgaccaagtaccctgtggaatcctggattggatcttggaacagaatattgatagaaaaacggataagatccatataaaggctatagtttcattttctaaaaattgttctgctaaagaaagatgtggaaccatgagaacgtgctactatgtcttttttttaagtatgtatttatacataaagtaacacataggcacacagaagaagaggtggaagaggggtgggaggagcaggggaatgtaataggcaagggaaaagtcatccaggaagaagtggataccctcaagaaagtgaaaagacagcccacagaatggaagaaaatattttctttttcttttttttttttttttgagacggtgtctcacactgtcgcccaggctggagtgcaatggcactatctcggctcactgcagcctccacctcccgggttcacacggttctcctgcctcagcctcccgaatagctgggattacaggcgcacaccaccacacccagctaattttttgtatttttagtagagacgggctttcactatgttggccaggctggtctcgaacttctgacctcgtgatccgcccacttcggcctcccaaagcgctggggttacaggcttgagccaccacacccggctggaagaaaatattttcaaatcatatatatatatatatatataaatataaaataaagga

SEQ ID NO: 69448 - DNA, 1044 bp, Homo sapiens
gtcaggccaggactgcagatgtgggtaccatgtggcctagaatgctggctttctcaacttggcttgagtggcttctcttctccccactcccgcagtctgtgggatgtcctgggccccttgagttttattgtgtccaagacaggagacccccttctctgccagatggtgctgatcatttctcttcccccacccgcatcacatcgtcttctatttccccagctctgagcctgcaggctcctgaagctggaggctttctttccattccaggctgaggggaagttggggggtggggatgggggtttgcttctcacttcctctgtagacagcacctcacttcctgtcccccaggctagaagaaggctaaaactcttggctttgctgtcccttcctttctcctccctgactgctttcctggaaagcctacaggccttgaaggagcaaggcagcatcaaagccagcagcttatccctgaaggccctgccgagctccttaccccacccttaccccgcacaagggacctggctcctcagctgcagtccttttctagatgggatattcttctctcctgtgccctgcaggggagaggagtcagagtcagagggctcacccccattttacaggaaggaaactgaggcccagaggggtgccagcttcacctagggtcacgcggtttggctgcatgaatctcaggagcagaatcccaaaagcctgactcctgtttgtgatcacaaacaagagcagagcccagtgggggcttgtgggtgaaccagagctgttttctcctcccagcgtagagctgacagcttggggtgtcacctctgggctctggctggatggtgcccactagctgagcactggagttgcttgagtgcagaaggcatattggctggccagagcctattctttttgtagaaagaagccaggagatgggggcctgggtgcagtggctcacgcctgtaatcccagcactttgggaggccaaggtgggtggatcacaaggtcaggagatcgagaccatcctggctaacacggtgaaacaccgtc

SEQ ID NO: 69449 - DNA, 1188 bp, Homo sapiens
tggcagcagtgaggagaagctgcccccaccccacctttcccagccccttccctccccagggtaggacttctcaggagttgggctctccaggttgggacttgctttccagcccaagagccagaggtcttgaagttcttcttgtttgttttcatcctcggtctcccaggtgaaggggaatgttgaaggagaggtggtggttaaggaagccctgggtttgctcatgtaggggcacattctccctgggttacttttccctctgctggctctcctgggcctgggaagccctctgccctgggccctgctgcctatgaaggtgaagctgcagcaggaggtgtttaggttaaatcccaaggaagccttccttaccgctgtgagccgttggaatggataatggaagctcccagggaggtcagtttcccagaaagtggctaatgctggagtcactgtcagactgaaggatgcagctgttactaggcagaagctgctgttccctcttggggtgtggctctgaggctggccagccagaggccccgttagaaggaggaagagaaagggcccttgcctgacagccgaagtggggtccctgaccccatcatgcctgagtcaccagagctgcatctctcaaaacaagtgccctttctagcccctgcttctcagccccctcccccagttcaccaccgctctcactgtctccttcgacaaccctcacccgaacctggcaggttccccgagccccagtctggctgcattaatggactgattggattttctatacttggagtttgggatttctgattgaacatgcaaatttatgtaaatcaatctgggatctgccactacatcaaaacaacacagagcataggctggaaggaatcctagagacagtctagtccaacgccctcatgttaaaaatggggaaactgaagtccagagggggaagtgattcatgcggtggtgagtgtcagaggcaggactcctgattctgctgtgtagttttacatggtcccattctgcgttaatgttttatgcatgaggtagcctggctggatttaaggcagagagggccagttcttgaacctgagatagcagaaagctgggcccttggagagtcagagtgttatcgcaggaccctccaggggctctggtcagctttgtaacataccgaggaaaagcagcttcaaatccctg

SEQ ID NO: 69450 - DNA, 1031 bp, Homo sapiens
cctggggagcagtagaaagagtgtcaatgccttaccgttttgtggtcagtactttcggggaaaatgaacatagcccatttgccttgttgcagaccctcccttgcagacattacgccatctggctctctgagactccttgtgtgataggaaaattcacttctcaaattggtccccccatcttcctaaaaacaacctgggattagtgggtttcctatcccaaagaaaccgtgtgtattcctttccggggagatattcccatgttcaagcttgttttcaaagtctatggtctgtgcatgaggtggctttgtccctccagcatctttctccagctctggccctcacgaagagagtgaggacctggaggggcaggtgctgtggttggcagggaagaaggatcttcatgataggccggtgaagacctaagtgtttggggagcaagcgggtatcaataaagacagagtcagaagctctggtccctacttttcctagcttgctgtatgaccttggccaagacagtttgctctctggggctcagtttccccatctttaaatgtcagtagttggactagatagctctaatattcccttccactttttgacattgaatggttccactgatgggtgaatctataggggagaaaggtcctctggcagaatggttccatttagagggagctaaagtgttgggtgtgctttaaattgcaattagttaggattagaaccctgggtagagagaacagattcccttattctaagcctgagagtagaccttgtcccacacacccctggtgccttgggatatgaactcctgctcctgctggcttgggtttggcccacccatcacgcctgtggtgagacatcctggccctttgaagaggagctgagagaggaggaggcagccaagggccagcagggtaagcagattcccaggagacagtttacgtctcagctgttgggacttgttttaggatctgggccagggagcacaacatactcacccacccgccctcttataggaggagggcaaggag

SEQ ID NO: 69451 - DNA, 1056 bp, Homo sapiens
agttgtccaggctggtcttgaactcctgacctcaagtgatctgcccacttcagcctcccaaagtgctgggattacaggtgtgagcctctgtgcccagccaatattttacttttcatttagatgtttactcttgtttaataaacagccagaacatctgtatttgtcagagcaagtacctggctctctccttccttaaaggctattgtgcacttgataatttcagcattcagattttggcagattctctatgcttcacaaaccttcatcctcactgacaggggttgaaagaagtgtagctactattgcttcaagatccctttcagtcttttgataaggcttaaggcactttcattccttagtgctattatttgcataaattaaaaattacacagaagtcccaaagtttgttcttcactcttatgatataccactaatcatatattgttatttacttgagtcgtctgtgtaacaaaacaggctaggcctcttaggtctctgttagctgcaagctgttactactggtttagtaacaaaccagtttggtggtattgtctaactatgcatgtagtgctggtgcctgatagatggattctcagagagaatcacctcgtcactgctaacatcagtactttgaatggggttccctgctttaatactgtgtggtcattcatttaatgttggagcatcttcaattctcagaggttgaaactatagccatttagccattggttgataagctgactctagtttagaactcctggcaacaggagatagtcaggttggtaactagcctctcaaaacattttttctttttttttttccagatagggtcttgctgtgtcacccagattggagtgcagtggtgtgatcacagctcactgcagccttgacctctaggctcaagtgagcccctaccaagcagctgggactacaagtgcgcaccaccatacccagctaattttttcattttttgtagagacagggtctcactgtattgctcaggctggtcttgaactcctgagatcaagcgatcctcccactgtggcctcccaaagt

SEQ ID NO: 69452 - DNA, 1076 bp, Homo sapiens
tccttcctgccttttgctgtcttagtctctctgtctctctctattcatttctctcatcctgcagtttctgtctcctggctattttcacctttcctctgcctcttaatttttgtgcctttctttgtttctgtctgtttctacctcattttccatgtctctctctcttacatgtggtctttctcagtctccccaaagtcaagttcttctacccctggtctgggtgacactttcttccagttcccatcccccttccctctgagcttgtaacccctttgtgacctgctgcctcctcgcacaccaccctctccctcttcccacccactccaggtcgggcatgtggagaacgaggctggagggctctctagggcttagagggggaggacccacccccaggatcccgggagaggagctgcattaaagactcccatccccatgtgtgttagagaagcccttagcacagtgcctggcacagagtaaggctcagtaaagtctccttacgttgtgactgttaattttaaaagccccttgagggtttagtgtggtgctaagctagggggaagagtccagcgggagggtgcagaggaagtagagaacaggtgcctcctctgtcagtttgtcaggcagggctgaggggaggagcctgcaggaatgctaaggacttggaggagcgggctctgggctctgtggcagctaagatgccaaagaaaacaagggctaaagaaaccccgctattgttcctgcccagctctggcatttcctgctggagcagctcctcccccaggtctctcctcttaaggccggaggtcagtctgtcctttcttccatgggtcccagcgctttgtccccagccaatcatgccagctgtacatgccagttgtacgcaggattttcttctgggcctgggacttgggctggacaatgaccctgatgaccccagaggccattgggggccaggctcctttgctgctgaacttgcctccagttcgcaccctttcacttgctttctcatcctctctccccaggcactgtcttcatagtccacaggtctcaaactccagcatctcagaatgaaagga

SEQ ID NO: 69453 - DNA, 1402 bp, Homo sapiens
actcctgaacatcagcttctcaagactccttcatctagttccctgtcacagagagtccgttccaccctcaccaagaacactcctaggtatgcagaattggccttcctaggaaataaaaaacaactactttcttagacttcttattatattgaagcttattgaaagaaaaattgcattcgattttagctagcaactagactttaaaagggaacgtggggctataaggattccttctttaaaaaggttctgaaagtctttactatttcccctctctcgttgttggtgactaagaatacttaagcaactattgcaaaatagttgtctagggtttcctacttataatgggttatatcaagtaatattatagttgtttattcaaccattttttatagaatatttttccagttcattctctttttattgtagatttgggagcaaaagcaagtctgccactaacctaggacgacaaggcaacttttttgcttctccaatgctcaagtgaagtcacatctgcctgttacttcccagcattgactgactataagaaaggacacatctgtactctgctctgcagcctcctgtactcattactacttttagcattctccaggcttttactcaagtttaattgtgcatgagggttttattaaaactatatatatctccccttccttctcctcaagtcacataatatcagcactttgtgctggtcattgttgggagcttttagatgagacatctttccaggggtagaagggttagtatggaattggttgtgattctttttggggaagggggttattgttcctttggcttaaagccaaatgctgctcatagaatgatctttctctagtttcatttagaactgatttccgtgagacaatgacagaaaccctacctatctgataagattagcttgtctcagggtgggaagtgggagggcagggcaaagaaaggattagaccagaggatttaggatgcctccttctaagaaccagaagttctcattccccattatgaactgagctataatatggagctttcataaaaatgggatgcattgaggacagaactagtgatgggagtatgcgtagctttgatttggatgattaggtctttaatagtgttgagtggcacaaccttgtaaatgtgaaagtacaactcgtatttatctctgatgtgctgctggctgaactttgggttcatttggggtcaaagccagtttttcttttaaaattgaattcattctgatgcttggcccccatacccccaaccttgtccagtggagcccaacttctaaaggtcaatatatcatcctttggcatcccaactaacaataaagagtaggctataagggaagattgtcaatattttgtggtaagaaaagctacagtcatttttt

SEQ ID NO: 69454 - DNA, 2654 bp, Homo sapiens
attggaggtggttcttcgcatgtggtcttcatctgttggtctacatggcgtaaataataatttaaagctcttttttttttccagggaatgctggcagactttgtgtcccagacttctccaatgatcccctccattgttgtgcattgtgtaaatgagattgagcaaagaggtctgactgaggtaagagtcaactgtaggagatggtgaatttgttatttgtgttaattcggaggtttttaaataaaaatgtcatcttgataatagacaggcctgtataggatctctggctgtgaccgcacagtaaaagagctgaaagagaaattcctcagagtgaaaactgtacccctcctcagcaaagtggatgatatccatgctatctgtagccttctaaaagactttcttcgaaacctcaaagaacctcttctgacctttcgccttaacagagcctttatggaagcagcaggtaagggcagatgtaatacttgaatatgaattcctccacggcagtagtttttcttactctctttatttttttatttattttttattttttagacagagtctcactctcgcccaggctgaagtcagtggcgcaatctcagctcactgcaacctccgtctcccaggttgaagcgattctcctgcctcagcctcctgagtagctaggattacaggcgtgtgccaccatgcctggttaatgttttctatctttagtagagatggggtttcaccatgttagccaggatggtctcgatctcctgccctgtgatttgcctgcctcggcctcccaaagtgctgcgattacaggcgtgagccaccgtgcccagcctcttttttttttttttttaagacggagtctttctctgtcgcccaggctggagtgcagtggcgctatcggctcactgcaaactccgcctcctgggttcaagcgattctcctgcctcagcctcctgagtagctgagattacaggcgttaacggtgttataccatgttagccaggctggtctcaaactcctgacctcaggtgatctacccaccttgtcctcccaaagtgctgggattacaggcatgagccaccacacctggccaccttcctctttttattagctcctgcctagtacaatgcctgaaacatagtaggtgctcaagtagtttgatggatgagtaactgtatgcgtgtcacccttgcctatcctcttgctttctcattacgttattgtgtacagtgttcttcctttctttccttcctctccagttaggttggagctttttcaattcttagaatataccaagtttactccctaccttaaggccttcacatttgttgtctcaacctgaatgctcttacattagatacagtatggtttgctcctttatttctttcatatttctcttcatataccttgtccccagaaacacctttcctgacaaccttgtctagattaacagctctcatttctttctagcttcttgcctgccttgttttcttcatttatgtatcactctacctgataggtatttgctttttgactgactccaccaatagaatgtaggttccataagataagggctttgtttacttctgctttatcctcagcacttgtacctggcacatcgtaggcccttaaatatgtctcatgaatgaataccttcttggtaattgtagtcactgcaattgtatgcctgtctgcctagcacatcagttgccaactgctttccctaactgcaaaggccgattttttaaaagttttgacttctaatattgagctgttggccagtatcctgcttgttaatgaaactagagtctgatgtagtcatgaactaatcaggagtttcagaagcttactgtatagatgagactttgtggtcgataacttggaagcccgctgtcaagggaaagaagtctaggcctcttggtgctttcttttcaattacagaaatcacagatgaagacaacagcatagctgccatgtaccaagctgttggtgaactgccccaggccaacagggacacattagctttcctcatgattcacttgcagaggtgagtacagcagaaacttgttctgggagttagggaatttttttccaaggggaagataatgtgggttgagtgtttgggagtatgagggatgaattgttttcttatagaatttatattttggtctgcatttaagcaaggagcaagacttctaatttaatattcttttgcttagagtggctcagagtccacatactaaaatggatgttgccaatctggctaaagtctttggccctacaatagtggcccatgctgtgcccaatccagacccagtgacaatgttacaggacatcaagcgtcaacccaaggtaggcaggtgcgtgtgtgtgtgtatgtgaacttgtgtaatgtgataacttgaaagacagttgagaagccctgagctttggaagtttgctaacagatttgctggcttttaggtggttgagcgcctgctttccttgcctctggagtattggagtcagttcatgatggtggagcaagagaacattgaccccctacatgtcattgaaaactcaaatgccttttcaacaccacagacaccagatattaaaggtaaggcccaagatgtgcttcttcagggacttgactctctctttagttttagtcatat

SEQ ID NO: 69455 - DNA, 1569 bp, Homo sapiens
tgagaccatcctggctaacacagtgaaaccccatctctactaaaaatacaaaaaattagctgggcatggtggcagacgcctgtagtcccagctactcgggaggctgaggcaggagaatggcgtgaacccgggaggtggagcttgcagtcagccgatattgggccactgtactccagcgtgggcgacacagcgagactccgtctcaaaaaaaaaaaaatcagtcaggtgtggtggcgcatgcttgtaatcccagctactcagaaggctgaggcaggagaatgccttgaacctgggaggcggaggttgcagtgagccgagatcacgccactgttctccagcctgggcggtagagtgaaaaactctgtctcaaaaaaaaagtatcagactggggtcttaagtcttgactaagactaaggaattttttacctgctccaaaataccctatagtggagggtaagttagattctttgtttgtctttcctcattactacttttgttgcaggggaatgaatccatagttgcaaaaactacagtgactgttcccaatgatggcgggcccatcgaagctgtgtccactattgagactgtgccatattggaccaggagccgaaggaaaacaggtccattgaatttgtgactaaactggcctgtgtaaaacaactagcaaaattttggagagttggtttcttagaaccctctggaggcggggattggatgtattgggtagtttcttactgctgcataccgaggaccagagaactgcttgtgtcatgctttacctttgaattgctagcccactggcataactttagtttttcttgaaactgtttttttacatagccattagttctcacttttggctatgataacagattactgtttatctcccagttaaaattggagctaaaatttagaaggagcaaaatacttaagacacaaagcttaaaagttgcttgttttctaggtactttacaaccttggaacagtgactccaccctgaacagcaggcagctggagccaagaactgagacagacagtgtgggcacgccacagagtaatggagggatgcgcctgcatgactttgtttctaagacggtaaatctgtgattgttgtttgtgttttaattttttaattgtgaaagtaataaataccaggaataaagttaaatactttagtgttataaagttaaatgtcaaatttccttcctcattccaattttactctccagaagtaactattggttacagaggtaagtttctttccattctgtgagtaatactaaattaaagagaccaacttttctgaagcaattgttagtacttttttttttttaatttgagacagagtcttactctgtcacccaggctggagtgcaggggtgtaatcatagctcactgtagccttaacctcccagtctcaagcaatcctcctgcctcagcctcctgagtagtagggatacagatgtgtgccaccacgcccggctaatttttaaattttttgtagagacttggtcttgctatgttgctcaggctggtcctgaactcctgggctcaagtgctccccctgcc

SEQ ID NO: 69456 - DNA, 1013 bp, Homo sapiens
tcaaactgaagaagagagaaaagagggtatgtatgatttgtttagtctttttttaaaacaaagtaataatggagttatttttggaaattttgccatgatactgcattcctgtcatgttgctctagccattgttaagcacatactacagatgaattcatgctgtggggacagtattgatattcttttttttttttttttttcttttttttgagacggagttttgctcatttcccaggctggagtgcaatggcgcgatctcggctgaacgcaacgtccgcctcccgggttcaagcaattctcctgcgtcggcctcccaagcagctgggatacaggtgcctgccaccatgcctggctaatttttgtatttttagtagaaacggggtttcaccatgttggccaggctggtcttgaactcctgacctcaggtgatccacctgcctcggcctcccaaagtgctgggattacaggcgtgagccactgctcccaaccagtactggtactctttgaagtagtaacttaggacagaatcctgtccatttcactgtttaggctgcatttcaattcattcatacagtggaaaaggataaacttaagtttgttttgaattgtcatatgaatttttacacagaacttttgtgctctaatataagcttcatataatgggatatatagagatctatctgtgtatgcttgtttagggtacttaatgtgtttccaagacttcatgtccttagttaggattacagctgtactttttctggtggtgtcatctaaatttctccatagcttgctcattttttctagggcactgagagcatttttgtacaacatattcttttgaaacagcttattcttcatgtggaaataggcaaagagagagagagagagaacacattgtttgttatttactgtagccctaatccccaggacctgtatccaagttgtttgatggaataattttatcttctgtgcttcagatctgcttggcattaaagttacgggtctttgtctcc

SEQ ID NO: 69457 - DNA, 1461 bp, Homo sapiens
taaactcaaattgtctggttccagtgcattatagctttgtatccattttaatgcattttgctccactactttgagaggtgggtggctgctttgatccgtagaagccaatatttgtcctgataaaatgacactaaagtgtttttgctatgtgaaatctattttgggactctcattttgcattattctcctcttggattagcaggttaatccaaaagtcttgtagcagaaacttcgctgttctagatgtagttcattttaccagtcagaaatcagagacacaatctgggtttgatgtgaattaatatgctattggtgtagcagccttcctgaaggtccatttgcataatgctgcattttaatgtcttctggtctgcctgtcccataaacttgaggtgaagctttctcccctggctagttatgatgttttactttgctttggtctgtaggaacgacagattcagctgattcgagagatgctcatgtgtgacacatctggcagcattcaactaagcgaggagcaaaaatcagctctggcttttctcaacagaggccaaccatccagcagcaatgctgggaacaaaaggtggaggaactgcatctgttgttatcctatcacaagcaacacaggctgtcagatattcttgttatctgaattcttaaatatacttcttctagaatgtgtgctgaaaaaagcagaaaaagattttgtggggagagtaggtggggaataaaggcacagggatgtccctgtatattttattttattttatttttaaatctttcctaaggatgttgtttcaccatggatacaattttgatgttggtgctaaattgcacatcaataactaatcctgtgcattgctaagaaacccaaaggtgaaagtggcagttcagcaatactttcagtgtttactctccagagagctcttacagctcttctggtttagaaaggcctctgtgagccaagaccagacaataattttggttccactgcaccactgtttaaaatagtctcaaccaggctttgaatttaacatccccagtacaatatgtagggaaaggtcagctatttattttgttgcctggttgttttatggggaatctttataactaagaagatgtacaggcttaatttcttaaaaagtcagtgttgggtaatactcttgtttgtagaaaccagcacagttgggatcaaattaaacttcattcccttgattttgtgaatttggagtagcctgtaatacaaactcggtagagaatagcacccataaccctgactaactttcaactgcccttataaggtctttgctgaaaaagcaactgtgttgcacctgtactcatgcacacacactcctccgtggaaaccatacaaagtagcctaccacagggtttgagattgtaattgtctctatagtgaagattttgctatgaaattaactgatgttacctgaccagtaggac

SEQ ID NO: 69458 - DNA, 1056 bp, Homo sapiens
cgtgactgtaaaggaaactgtttttgttttatagctgtaactgtcctggtgcatgacagctgccccaaaggtatccccctttgattgccttctgttcaggagctttcagtgttagtgttacatctggagccaggtgactaatgagttacatattccatagcagatgccactggctaagccaaaagtaagtggcctattgaataggaattgctacccacaaagttctcatcagagtgacaaacatatccaggatctgctcctagttattttcagctggatttgcccatagttcagctggttccttaattatgaatttcaaataaagctaaccgtaggactcatttattagagcagttatactctgtttggtgcttgaattattaaagattccccctttcctcagaatttatccagttggcgaaggactttgaggatttccgtaaaaagtggcagaggactgaccatgagctggggaaatacaaggatcttttgatgaaagcagagactgagcgaagtgctctggatgttaagctgaagcatgcacgtaatcaggtggatgtagagatcaaacggagacagagagctgaggctgactgcgaaaagctggtgtgtattgttttccgtgctagaacagtgatgatgcaggagggggaaggcattgtctgacagtttccacttgccaaatatacctagtttcttcttccacattaaagaactgaaagtgacctgttctttaacagcttgcccatgattagagctgaaattgcagactaggaatcttgttcttcataatttgaaatttaaatgtttttgtcacttagacttgaaacttacttaacagacagatttcaaatgagaacttaaagaattagaggaaaagggagggagggagatcctaacgtacttgatctgtcacaagttattggccatccttcattgtttattttaagtgctacccggaatatccatccttacatgagtagctggtactttgtcatacatacaggcaagacaactgtgactcttcttttcatcacccctctctaattcagggta

SEQ ID NO: 69459 - DNA, 1050 bp, Homo sapiens
ctgaccatgtcctgcattttaaaaggcagttgcaacaggggcattagctaaaaatgaaattaaaaatagatattttaagttacattgtaggtcttcaaagcccacaaggaataaactggcaaaattattatattaatcaataggcttgacttgaagaaccacattttcttgttggtcagtcacttgctaatgaactgacatgctctttcctatttgttttctgctccaagtgattggaggggctgttatattcaaaggtctgaaatggttttctaattttcagatgagtcttaaacattccaagtttgtttttataataagaatcacacaaaacatctgttgttagcttgagattcttataatggtagttataaatggaagagtccagatgttggtcactaatggctggattgctatagaatcttttgttgtgggcgagaaggcaggacccctaatgtatatttgatttcttggcagaaagatggatactatgatgctgaatgtgcggaatctgtttgagcagcttgtgcgccgggtggagattctcagtgaaggaaatgaagtccgtaagtcattctgagctggcctgtccaaaggaaaaacagatttcaaatttgggatttttacaaagctgaagtattttccaatcttaaagttgttttccatttgggttacctaaaaagaaagcagtgatcacttacgtggtcaaagcctaatgggcactcattctaaatggtcactaaaattcttttctatagctgctcttaataggttttagccaggcttttttattatctttatttatttatttttttgagatggagtctctctctgtcacccaggctggagtgcagtggcgacatctcggctcactgcaacctctgctccccgggttcaagcgattccttgtctcagcctctcgagtagcagggattacagacacacgccaccacgcccggctaattttttgtatttttagtagagacgggattttgccatgttgcacaggctattcttgaacttctgacctcaggtgatccgcccgcctcg

SEQ ID NO: 69460 - DNA, 1066 bp, Homo sapiens
tctcagtcacccttcctagctcctctctcaccctcagcggatgaccttggctaccacttacttcactgagaaaatagaagcctcagacaagatcttgtccttcttctgggtaccaagccctagaagggaacattcatcttatctaggataaagtctcaacctagaattttcatcttattccctctgcctttttaagatctttctcctgctaattctgtctctccctgctctacagttggtcgctctttctcaagtgaaaccccattgacaatgaaacatgctgaagatgctcttgtcttaaaatacatagctgtaacgacagctaacatatattgagaacttgctatgtatcggtctttgtgctaagataaaaactaaaacatgtgtctctcaactccacagcacctgccagctcctatagtatctctctgcttccctttacaaagttcctaaaagtgatatgtttatttcactgtttctatttcctcatctctaactcactttctgatccactccaggctgccttcttcccccatcatcaccattcctcctaaatggttctagctaaggccagtggtcaccttcatgttgccgaatccagcaaatattttttttattattcttgatctctcaatagcatttaaaatagttgcccaccaactcttctgctgttgttttttttttttttttgagacggagttttgctcttgttgctcaggctggagtgcagtggcaccatctcagctcactgcaacctccgcctcctgggttcaagcaattctcctgcctcagcctcctgagtagctggattacagatgcgtgccaccatgcgcggctatttttttgttgttgttgtatttttcgtagagacgggttttctccatgttggtcaggctggtcttgagctcccgacctcaggtgatccgcctgtctcggcctcccggagtgctgggattacaggcgtgagccactgcgcccggaccccaccacctcttttttgaactattcgctttcctgacaatcatactctctttgttttcctcctatgtctacccactcctctgtc

SEQ ID NO: 69461 - DNA, 1015 bp, Homo sapiens
tgccagttcattttcttctacttggccatttagtgtcatcactactcaaggctcagtctcaagctttaatcttcttttaaatcataagagtacaatgcaccagcttgaaaaatttttacactggtatgtcttacagtgtagtattttgcatattgcattggtataaaacatttccagtaccccagaaagttccttcaggctgtttcctagtcaatgctaccccataagagttaaccactgttctaacagtatagatcaatttccctcattcttgaacttcttggagtatatgtatcctccatacagtgtatactcttttgtgtctgtttgttttgttttgttttgcttgtgattacgtctgtgagatttagccatgttgttgtgtgtggaagtggttagttcttttttgatgctgtatagtatctcattatatgaatatgccacaattgatccattctactgatgctagacatttgggttgttactagtttttggctcttatctataaagctactatgaacatttttgttcatgttttttggttgatatatgcactcatttctcctgggcacatgactagctatggagctatggttaagtcatagggtatgattctgtttagctttagtggatactgccaaatcagacctttttttctatcttttttttaaactttatattctattcttgggcagtctcatcttcactcatcacttcaattaccatctacacactgacaactgccaaatttatgtctcagcccagctctctcctcttagcatcagctccagtcgccaattttcccacttaacgtctctacttggatgtccctaagactcctcaaaacctgcatgtgcaaaaccaaagtcatcatcttacctcccaaactagttctttacctgtgtgcctgatctagtgagccacccactgttcaccccgtcatgcaaaccagaaatcatccctgacactccatctccctcacctgccttgacaggatctgccaattttgcctcat

SEQ ID NO: 69462 - DNA, 1810 bp, Homo sapiens
gatggggtttagcaggtgaaaccatgacatctctgggtcctctcccctctgtagagaccaggtatgttgccaggcagccgaatgacacctcagggaccttccatgggaccccctggctatggggggaacccttcagtccgacctggcctggcccagtcagggatggatcagtcccgcaagagacctgcccctcagcagatccagcaggtccagcagcaggcggtccaaaatcgaaaccacaagtaagatgatcctggggcagagggagggagggagggagcctgggaggacacaggtggtgggagtacctgaaccaagaagtggtggtgctgtgtcagcagatggtgctacagaactcatccttgagaatgcttggtggtggtggtggtggtggtagttctttgagagaagctttgcagtcccttcacattactataaatggacgtgctgacagcttattttcacgttctgactagttctgtcccaacctgataatagtatttattcccaacagtgcaaagaaaaagaagatggctgacaaaattctacctcaaagggtgagtccaggctatatgtcttctggaaagtgtggtgagtttgagtatagagatgatcatcctagatttcaattaatttttctgttcctaagattcgtgaactggtaccagaatcccaggcctatatggatctcttggcttttgaaaggaaactggaccagactatcatgaggaaacggctagatatccaagaggccttgaaacgtcccatcaaggtaacacaggaaagtactaggcagagagccaaaggagaggacccaggaaccttcagcagaattaggatgagaaatcaaaggcacagcacaactctccttggcatttaaattgcatctctcccttccgcctacaaactgagaattacattaggaggataagaacagaatggcaaagggggaggggctcttgatgtctcttgcactacaaatatacccttgtccatgttttcgctgtaactgctctgctaccttgggaacctggcaccttgcatgactttgtccacctggcatcccactatatgcacttgtacttaggctgatggccagtactcctcttctaaatggaatcttcatccacccacccaagggactgggtagacagtaagccagtctgttaggagtaattttggggtttggggagaccgttgtcttcaacatcagaccactgaagccccacgatcaatcctgtttctgccttcctcagcaaaaacggaagctgcgaattttcatttctaacactttcaatccggctaagtcagatgccgaggatggggaagggacggtggcttcctgggagcttcgggtagaaggacggctcctggaggatgtgagttcaaggtccacaatggttggcatctagggtgggagctgctgggaatgaacagtgttgtctggtcagcaggaagcctaactggtgctcacagctccttttgggagcagtaaggagagggacactgttccctgcactgaaagacagtggtcctttgtgtttgcccccacacctttggccctcactggtatcatatggagaaccttattgtcctgggatctgatttgtggtttaccttcctcttggtgctgctggccattggatttagccatatctgtagattatttagttttttttttttaatcgagtttgcacttaatttgaggctgtgtttcctctctgagtccttgtggtatctccatcttctcaactttcactggaggcaccccacagtttaagtaggatagatttctcttgacaggctcttt

SEQ ID NO: 69463 - DNA, 1115 bp, Homo sapiens
gtttgcacattgacctctaggtggcactagcatgtttagttaggaccaagggctcttgtaacctaacttgtcccatctttttaatgttactatcctggtcactgccacctctttcaagggaaagtctactggtggcctcttgtatgtgccaggccatctctgtatcttgcttgttaataatggtgagatgtagttatccatttttcctggcagcagttgctgtaattagagtgattgactgatagggtactagtacttgccaaggttaccattatagatctgggacttcctcttggtctctgctctgtttacatttacattccaattcaccaaaaatcctttattatgatgcctgattgcacaacgttttgaagcccatgttagcaacagtattctttgggaaacaggcaaaaccagaatgacagtccagccagcactccaagtgaacctaacctgctcctttctttgccagtgtagctgcagccccttaacctcaaccactaagagacatggggaggtctttaccatctaataagggaagtaagtcatagaatcaatagaaacttgtaaatatatttaattttatagcagtagagtatagtggctaagaatgtggactgtagaatcagacacatcagagctcaaatggtggctccgccacttactggctgtttgacctaggcaagttactttattatgctgagcattagttttctcatctgtaaaataagtataattgtgcctatcttgtatagatgttcgggaagtgagataatccaggtaaatgtcttagaatactgtcacacatagtaagtactcagtaaatgatagctatgttactgttcacatgtgtattatccattttgtggataaaattatcactggacattgaggcttatttaaatcaaccacaaacaattaaaaggttaatctacttatacacagacagtaatcccaaagccatatgcagttttttaaaatgcctcatgctattactcttctccagtagcctcagtaatcaaagttgaatattcagtcattacagaagctcttccctcccaccccagctcttcctctgggagagcaccccctgacatcttcctctctgtagtggc

SEQ ID NO: 69464 - DNA, 1093 bp, Homo sapiens
tacaggcgtgagctaccacgtccggctagtttttagtagaaatggggtttcaccatgttcctgacctcaggtgatcgcccaccttggcctcccaaagtgctgggattacaggcataagccaccacgcctggctgccaaatattttttttaaagggagaaagatatataggagactgtagcagtgatttcctctggagagaaaggaactacttttcacaggataccttttgtactgcttgaatttttaccattgactttttaaataaatcaactttattgaagtataatttatatataacaaattataccaattgaaagtgtagtttgaagatttttgccagatctgtacaccatgtagctgccacaataaagtgtagaacatttctgtcacacccgaaagttctcgggcccttttacagttagccccttttctcttcatcctgggtcatctttttgaccctgtgtaattaggtcttaggggacaagctctttaccaggctcctttggtttcctgtccagtgttgacccgaatgatcagaaaaagacagcttgttatgacattgatgttgaagtggatgacaccttgaagacccagatgaattcttttctgctgtccactgccagccaacaggagattgctactctagacaacaaggtaggggtctgtgccctggatagttgggtaccaccagcccctatcacagcttcaaggcctccttttgattcttagtgttcattcaaaatacggtgacacccagtatatgtcaggtactgtgcttggtgctggtttgagccagactcaaatgaattctgattgtggggatactctcaacagcactgagcctcggtttctgatttgtggaatagagaccatagtaccttttttttccttttttcttttcaggagtctcgctctctcgcccaggctggagtgcagtggtgcaatcccgcctcacggcaacctccacttcctgggttcaagcgattctcctgcctcagcctcccaagtagctgggattacagtcacccaccatcacacccggctgatttttgtatttttagtagagacgaggtttcaccatgttggccaggc

SEQ ID NO: 69465 - DNA, 1058 bp, Homo sapiens
agagagacagaaacaagggcaaattacttgctgaaagaatgccaagggtcggagcagttggagctctatatgatggtgccagctgtgggcagcatggtgactaggttggaagtggcatgtggagttgtcaggcaccacctgccatttaacttctcatttttctagtttgaaaatggtatgagcttcgttcttcctttcagatccatgagacaatagaaaccatcaaccagctgaagactcagcgggagttcatgctgagctttgccagagaccctcagggtttcatcaatgactggcttcagtcccagtgcagggacctcaaggtaaagaacctaggagaggtctgaagggacttaggtcagtgaggtgcacagctgctttattcatgtagcagctggtaggagacccagaggaaggagtgaggggccagatttttctttagcatgttccagggtccattttgcaattaagcagggaaatgggggcagagccatcaagtgttgatttagtgcttactttgtctgtcactgtgcttcatcttgtcagggatacagagtggaagacctgatctctgctttcaaagcagcctacattctgtctgaagaaactaggctagtatagccgggcatggtggctcacacctgtaatcccagcactttgggaggccgaggccgacggatcgcttgaggtcaggagtttgagaccagcctggccaacatggcgaaaccccgtctccactaaaaatacaaaaacttagctgggcgtggtggtgcgcgcctgtaatcccagctacttgggaggctaaggcaggagaattgcttgaacccaggaagcagaggttgcagtgagccaagatcgtgccgctgcactccagcctgggtgacagagcgaaactctgtctcaaaaaaaagaaactaggctagtatgatacaaagtagtaaaccacataagacattatcaggccaggtgcggtggctcacgcctgtaatcccagcactttgggaggctgaggagggcagatcacctgaggtcaggagtttgagactagcctggccaac

SEQ ID NO: 69466 - DNA, 1252 bp, Homo sapiens
catctctactaaaataaaaaaatcagccaggcgtggtggcgggtgcctgtaatcccagctacccaggaggctgaggcaggagaatcgcttgaacctgggaggtagaggctgcagtgagccgagattgcgccactgcactcccagcctggctgacagagtgagactccatctcaaaaaaaaaaaaaaaaaaaaagacattattagactgaccaggaccaataagatgattcagataagggagatcagtgagactagaatctctggggaaggcttcatggaaaatttgggatttgaagacgttcccagaaaggggagcacagtaagctcagacaagaagataggaatgggcacagagtatgaactcatccgttgtcacccctcctgtgctgactgtgacgagttagagaggctgagcagaggagcaaggaaaaagggatgccaggaaagatccctgaacaaggcaacgacttgttgattgcagaggtgactgggtgttgtatcagtttgctgaggctgctgtagcaaactaccacaaactgggcagtttcaaacaacaggcttgtctcacagttgtggaggctggaagtccaaaatcagtgtgggcagcactgcttccttccgcgagctgggagggagactctgttctgtgcatctctcagcttctggtacctcaggcattccttggcttgtaggtggtggtctctgtgtgacttcacgttgtcttccttctgtatgtgtctgtctccatgtctaaatttcccctctttataagggaacctaccggtcatattagggggtactctaatgacctcatcttaacttgagcatctgtagagaccctatttccaaataaggtcacattcacaggtactaggggttggttagacttcaacattttggggaaggatacaatttacccaataatgggtgtgaaggaaggaaacaagccttttctcctctctcttcctccaccctgcatctccatttccctcagacaatgactgatgtggtgggtaacccagaggaggagcgccgagctgagttctacttccagccctgggctcaggaggctgtgtgccgatacttctactccaaggtaagtacatggggtgcacgggggaaattgacaaaaggcacggggttttcacccctgatgggggtcagtggtgttagataccaacttctggtttgtctcatcttccactcccttcactattttctccttaggtgcagcagagacgacaagaattag

SEQ ID NO: 69467 - DNA, 1610 bp, Homo sapiens
caggtttggaacaaactctcccttcacttgttgccctgtagcactacagaaaccctggttcttgggctccactgagccccaggtcagtccccagccctctgggttggcctgctgtcagtgcttctctcactccttagttggggtccacatcagtattggagttttgttctttattgctccctcccagacactccctgtggctgccctttgtgattccctcagatctgccctaatcccgggcatttgggtgggggaatcttgcctttccctttcagagccccagggatctcatctggggaactgtcattgccagcagaggctgttccttcctgctgtttggagatgtgactcattcattcactcactccaccctgcctctgcatcccttaatggagaaacgggcctaaaaccaaacgggtaaaaagccctgggccatccctgtcttcctgtcccttgtctgcccagttgacacctactggtgacttctagggcactgaggagtgaaagcgcctagggctggagaatagcgctgagttgggtttgtgactcttccctctccctgcctcacaggattgtgactccccagcccctgccctcaaagcttcagacccctcaggtagcagcaggaccttgtgatcttggccccttggatctgagatggtttttgcatctttccaggagagcctcacattcttcttccaggttgtatcacccccgagttagcatatcccaggctcgcagactcaacacagcaagggtgggagacagctgggcacaaagggggaattccgttcagcatgggctctaaacccacagaactgacaaagcccctgcttccccaccccctcctcaggctcctgcgagcacacccccacccccaaatccctccctgttctacactggggacagcagaattttctccccgtcttccccttcctgccattttccctcccttgaaaggttgacactggacaaccttggggcagctgagccctggccgcctcctggctggaaccatgagaaggaagctcagtacttcccacagtgtccctgttgataactgtttttattaactgaattgtttttttcatggaccaaacttttttttgtactgtccccttattgatgttacccagttttaataaaagaatcttctgaaggatgggtcctcctacctactgtgagagagctcttccctgagctcttcttccttcaataccattagccacgcttgtagtgtttgttcattttatttgacaagtatttattgagcacctgctatgtgctagttgtgatgctagacacgggagataaagtggaaaatgagatttctacttttgtggacctcagggtcttaccttaagagattgctgtctgccccagtggtccaagcagcctagttgctggttgggattattgggcttcaccactggatcttaagagccctttcccgacttgctaggcaggtactaacaggttggtggcagtcattttcccccttgtccatctgagctccccagagcacttgttggctggagtgagccatagatgcccgtgatcccttaggtttgacgaacctgagccgcctttggaggagtttcacttcttcc

SEQ ID NO: 69468 - DNA, 1030 bp, Homo sapiens
ggtgggagggtggacttcagcccaggaggttgaagctgcaatgagtcatactcacaccactgcactccagcctgggcaacagagtgagaacctgtctcaaaacaaaacaaaccccagcagtccaggctggtccatgccagtcacttctgtccacaggcatggaaggccaaatgttggctttgatgacattcagagacacctggttccaggcttgtttctgtatcttgtaggcacattttatttgcccttttgaatcatagagttcctaaatgatatcttccagtatccctatgagactttacctagacataggggccattcagtatagagtgcagacagaccaagcaggatgcagaagttatggaatggcgttaaacagggagatgggctgggcagatgaggccttatcctcaggtctaaattcaatctgtctttgtaggggacaagatgccaactggcaagcagctagctgacattggctataagaccttctctacctccatgatgcttctcactgtgtatggggggtacctctgcagtgtccgagtctaccactatttccagtggcgcagggcccagcgccaggccgcagaagaacagaagacctcaggaatcatgtagaactggggggctttttctcctgagcagagaggcccaaggcatgctgtggagagacttcacctgccaccatttccaggtcaacaggactagagcgttgatggttttcaaaccctgttggaagaaagtgcccatggtttctctggttctgccagtttgacagtttatggaggcttttgaatcgtaatagcaatgtgagggtgaggtacacctacagacattaaataatttgctgtgtctgtgtcttggtgttttttgtttacccaaatagcatatggaccacaaaaggggagccttgactaccagttttctgggtatagactggattaccatatcttgagctcttagcacccatgaagtgggtgatgtacagctccaggagtagtatctgccctcatgatcttagaggaaa

SEQ ID NO: 69469 - DNA, 1028 bp, Homo sapiens
agtgggaaactactaaaaaaggcctgttatggatcagctttggggataaagcaaaacagcataaccaatacgaataaatgcattgtccacaaccaccagaagatagaagcattgctgacagtcatacgtattgttcgtgttggccttccctgttctttgaagtggaagaagagaaagggtgtctgaaacctaaaccaggtctcagtgaatgatgtcagttctcttaggctggtcctgaaagacacactcctctaccaaagtagcttcaattccacagagaacagaattggagatgacaagggagaaaactagaaagcaggtaaagcatagtcacaacagtagccatagtccagacaatacttctttgagttagatgtcatcagaaagcagaccagactgggaacacagtgcccacacctgggtctctgagcttaggtgtcttacagttctttcctcacttttctgtctttggtctcatcccacccaggtatcgaaggatgatcgcagtgatgtggagagcagctcagaggaagaagatgtgaccacctgcacaaaaagtccctgtgacagtagctccagcaatggtgccaatcgggtgaatggtcacatgggaggcagctactgggctgaagagtaaggtggttgctatagggacttcagcacacatggacttgtagggccactggcaacatactcctcttggcccttcccatatctactcttctgtgattgggagactgcaaggcactgaggagtatcaaagaagcaaatattttcactttgaaagaaaactgccattttgtatttaatagcctccaggttctttcagtaatgttatttgctctgtgtgtttttgtgtgtttgttgatgtgcgtttgtgcatatgcgtgagtttcattgccggggttggggcacaattgtggactggggccatgaggccttccctggtccccactgaacccaccttagttccacatttggctgcatcttgaattatgccaactccagacttctccttcttttttgcc

SEQ ID NO: 69470 - DNA, 1056 bp, Homo sapiens
tagtcaaagggctagggatttcagcctaaaggaatacagaatcccaagtgggaggggctctgcttgagcaggtactgatactaggaccaagtgatggaatgtggcctagatattgatgatctcctgcatcattattccttatagctgccattggctcagaacttgctcagtgtgcctgtgcatcttgctgtagctactggacatctctgttctctcctgcttttctttcctgactaggtgacctgtccaggaaggattagaccctgtactctccactctttcctcacctccttccttttttctatgcctggcgggagctggacagtttcatctcttgcatgtaagtgtatctgtgcttctagtattcagtgaggcatgtccatctgaatgtggttctctttcctcctgctctcctttctgttcccttgtgtttgtctcagagcatgccctctctcctgacttttcggggccattattgactagagctgcagttgccagattttttcctaaactgaggcaagaattgagtctacttttttttgtttttcttgagtctctgtttacctcaaatctagagacactctgccctctagtggaaatttcctaaaggtcaggtaatcagttagtcatctaagttcagaggccaacagctataatcaactgtagaagacccatccaacacaaattcaaggagctgatccaaagcaaatgcccacctccttggcaacagttgttacagctgtgttccttttcacttccttctctcctttacttaaaccacatttattatccttcagttctggaggtcagaagtccgacacaggtctcactggatttctgttctttactattagagtccagggtaattttttttttttaatttttatttatttatttttgagacagagtttagctcttgttgcccaggctggagtgcaatggcgtgatcttggctcactgcaacctctgcctgcccagttcaagcgagtctcctgcctcagcctcctgagtagctgggattacaggcatacgccaccacgcctggctaattttttt

SEQ ID NO: 69471 - DNA, 1157 bp, Homo sapiens
agatggtgcgtttccttgggattgagggattagggactgagtccctttaagtcatattcagggtatctatttttttttcccccccactgctaagagtcatatgaggtatctattcctgaggcccccatagcaatgaaatccaatgagttttttgttctgattttccccatttaattccccctaattgggctaaaagaaaagcaagtttctggtatttaatgaggtactttctggttcaggtgtcttttttgtatcaagggtaacttggaatcccagtagagcatcttggttgtaacctatactggaaatatgtctaggaactgctaaaggggtggaagagaaggcctatgtgtatttaatcctgtgaaaagcactaattgcccagaatcctagacatactgatttgattgtgttacagtatgtgttaactgtatctcatctctgcaagatgagagctgaagatgtgtgtgcagaggagcaagggaagaggcttaagtctctacaccaatccaaagtctgttagctattgcatatcttggcagataatggggaggagagatgtctaataatttggggtattggtcctccaaggcagagaaagttggagagatggaatgcacctttgactagccggtaatctaactacttctttctctcttccagcctctttcaagtgggctttatcactattatatcatggaattggccttctattggtcccttatgttttctcagtttacagacattaaaagaaaggtaaggacgttggctccctcaattccccaacttattacatcctcctttctagcagcttccatgactgccattacgatgtattatcttccctgagactgcaaaaggagaaactgggtttgatggactcttagcttgtcgtaatgttcccagaaatgagactgaattaatgatgaagtatatttaagacattcagggaagccccaggatgagaacaattaaccagctaagaagcatacttttttccatattcttctttaagcttcttacatatctaaagctcaggaaactagtcagaattgggggatagcaatgccttattcagaaaaaatgtctgattccagaaaagctggatatggctttcacatggcattagggacccttgctctctctgttctcccttt

SEQ ID NO: 69472 - DNA, 1032 bp, Homo sapiens
cttttttttttttttttttgagacggagtcttgctctgtcaccagactggagtgtagtggcacagtctctgctcactgcaacctccgcctcccatgtccaagcgattctcctgcctcagcctcctgagtagctgggactacaggtgcacgccaccatgcccagctaatttttgtattcgtagagacaaggtttcactatgttggctaggatagtctcgatctcttgacctggtgatgcacctgcctcggcctcccaaagtgctgggattacaggtgtgagccaccactcctggcccctgtctttggctttttaaatgacagtagttgcctattctaggaattgatcctctttctcaccagtaactcttatccccaaatttgctatcttgacttccgtagcctcagaggctttggtttgagtggacatttgtctaacctttactctttgcccacccaggtggagattcacattttatttatgtatattctgctatggaattagatttctctggtcggtgagtcttaactttctctagtcctctgttgggttctaatcatgcctagatctctagaagtaagagttaaatacctttagatttttttcttttctttttttttttttttttttgagacggagtcttgctctgtcacccaagctggagtgcagttgtggaatctcagctcacttgcaacctctgcctgttgggttcaagagattctcttgcctcagcctcccgagtagctgggactacaggtgcacatcaccatacctggctaatttttgtatttttagtagagacggggtttcaccatgttggccaggctggtcttgaactcctgacctcaggtgatccacccgccttggcctcccaaagtgccaggatttcaggcatgagccactgagcctggcctaaatacctttagatctttatatttcccccaacttttcctctgtgatgcccacagcccaggtttatatcctaatagattgtcttctgtctggggcctgacttcagtaactttataacttta

SEQ ID NO: 69473 - DNA, 1050 bp, Homo sapiens
ttaatcacctcctttgtgccagggtctttcatatacattatctcactgaattacttacaagattcttatgaagtagattagtggttctcacattttaatggacatgtgaatcacctggggatcttgttaaaatgcagattctgattttgcaagtctgagatgggctcaagattatgcatctctaaaaagcttccagccagcacagtggcccacgcctgtaatcccagcattttgggagactgaggctggtgaacattgtcaccctaaagaagtgataaatgttgaaagtgatggatatggtaattaccccagtttcatcattatactatgtatacatgcattgaaacatcacattgtaccccataaatatgtacaattattatgtgtcaactataaataaaatttttttaaaaagaattggcccgtgggttttctccattacagatttattgccaaaccctgtgcactctgtattggcatcgaggacagtggtccttatcaggcccaacccaatgccatccttgaaaaggtgttcatatctattaccaaggtaagtgggcaaagaaacagagaggaatattcacataaggcgttgctccatggggcaggggaggatagagagcacgtacctctaagggtaaggataggatgggatggtccttcatatttgagtagtccatgtagctatatggagagctttatcccctcagggaaaacctttgggccctacgtatgtcaagtttacgtacgtagtaggtttgagttttaggcccagcagccacccttacccctctttccccagacacataccatatctggtttttgtttttccttgttccagtttctgtcactgcctagttgtgtgatcgagatggagacagtactgatagcctttgcagtttgggttttttgttttttggagagacaaggttttgccatgttgcccaggctggtctcggactcctgggctcaagccatccttcggccctcagccttcaaaaatcccaggattacaggcatgagccaccatgcctggcctgcaatttgggt

SEQ ID NO: 69474 - DNA, 1050 bp, Homo sapiens
ggtggtagcctagatggagaaggagtttggggcgtgggcaagagaaagagtgagggtctaggggaatgctgggccccttcaatgttagatccggagttggattgggggggtcatataggcctcctcccaacctccaagggtcctacagatgaggaaacaggttcagtgtgagctctggcagaggccccgaagagagggataggaaggggccaggagaaccagagctagttgtgaccatggaagccgaggggtcaacgcaagggccagacgttccaagggaaaggaatggactcatcagactcttaagatttgttaggacgcttgagtttccgagaattggggggaacaggattagtttggccctaagagttggtttggtatgtcaactcatgcacgtttgttggtaggagggtagaaatctggttgggatagggtgtggtggagccctaggcttccaaagtaatggaaagatgtcagattagttgcagaacaggccttggggcctgaaatggaaggaggagtgtgttcgaagggatggaggagagccacagggctttatcagaggacagctatattgagccagattcttttttcttttcttttttttttttttttttttgagacagagtttcgctcttgttgcccaggctggcgtgcaatggcacgatctcggcttaccgcgacctccgcctcccctgttgaagcgattctcctgcctcagcctcccgagtagctggaattacaggcacgcgccaccacgcccggctactttttgtatttttagtagagacggggtttcgccatgttggccaggctggtctgtaactcctgacctcaagtgatccgcccgcctctgcctcccaaagtgctgggattacaggcgtgagccaccgcacccggccttgagccagcttctaaatgagtttagcagaattgcagtatactttgttcaaccacatgatttcacctttaagtgaatggatcatatgtttgtccaagataaagatattcactgaggctttggtgtgtgatattataatgtgaatttat

SEQ ID NO: 69475 - DNA, 3191 bp, Homo sapiens
ttttttttttttaagacagtctcgctctatcacagtggcacaatctcagctcactgcaacctctgcctcccgggttcaagtgattctcccacttcagcttcccaagtagctgagactacaggcatgtgccaccacacccagctaatttttaaattttttgtagagatgaattctcactatgttggccgggctggtctcaaactcctgggctcaagcgatcctctcaccctggcctcccaaagcgctgggattacaggcatgagccactgcacccaacccgtgctttgtgttatgataagaaaacaaatgtgctaaaatgggggtaaggaattcctggtcactgaagggcttttaaagatctttttcttacttggcatcttctgaaaatactggaattgccagattttagcctcctggtataagtgagaatgtgaagatttgctaagtttatgctttttttcttttaatgacagtctaggaacatatgcatctttacatggaagaatctattgtaagcctcacttcaatcaactctttaaatctaagggcaactatgatgaaggctttgggcacagaccacacaaggatctatgggcaagcaaaaatgaaaacgaagagattttggagagaccagcccagcttgcaaatgcaagggagacccctcacagcccaggggtagaagatgcccctattgctaaggtgggtgtcctggctgcaagtatggaagccaaggcctcctctcagcaggagaaggaagacaagccagctgaaaccaagaagctgaggatcgcctggccaccccccactgaacttggaagttcaggaagtgccttggaggaagggatcaaaatgtcaaagcccaaatggcctcctgaagacgaaatcagcaagcccgaagttcctgaggatgtcgatctagatctgaagaagctaagacgatcttcttcactgaaggaaagaagccgcccattcactgtagcagcttcatttcaaagcacctctgtcaagagcccaaaaactgtgtccccacctatcaggaaaggctggagcatgtcagagcagagtgaagagtctgtgggtggaagagttgcagaaaggaaacaagtggaaaatgccaaggcttctaagaagaatgggaatgtgggaaaaacaacctggcaaaacaaagaatctaaaggagagacagggaagagaagtaaggaaggtcatagtttggagatggagaatgagaatcttgtagaaaatggtgcagactccgatgaagatgataacagcttcctcaaacaacaatctccacaagaacccaagtctctgaattggtcgagttttgtagacaacacctttgctgaagaattcactactcagaatcagaaatcccaggatgtggaactctgggagggagaagtggtcaaagagctctctgtggaagaacagataaagagaaatcggtattatgatgaggatgaggatgaagagtgacaaattgcaatgatgctgggccttaaattcatgttagtgttagcgagccactgccctttgtcaaaatgtgatgcacataagcaggtatcccagcatgaaatgtaatttacttggaagtaactttggaaaagaattccttcttaaaatcaaaaacaaaacaaaaaaacacaaaaaacacattctaaatactagagataactttacttaaattcttcattttagcagtgatgatatgcataagtgctgtaaggcttgtaactggggaaatattccacctgataatagcccagattctactgtattcccaaaaggcaatattaaggtagacagatgattagtagtatattgttacacactattttggaattagagaacatacagaaggaatttaggggcttaaacattacgactgaatgcactttagtataaagggcacagtttgtatatttttaaatgaataccaatttaattttttagtatttacctgttaagagattatttagtctttaaattttttaggttaattttcttgctgtgatatatatgaggaatttactactttatgtcctgctctctaaactacatcctgaactcgacgtcctgaggtataatacaacagagcactttttgaggcaattgaaaaaccaacctacactcttcggtgcttagagagatctgctgtctcccaaataagcttttgtatctgccagtgaatttactgtactccaaatgattgctttcttttctggtgatatctgtgcttctcataattactgaaagctgcaatattttagtaataccttcgggatcactgtcccccatcttccgtgttagagcaaagtgaagagtttaaaggaggaagaagaaagaactgtcttacaccacttgagctcagacctctaaaccctgtatttcccttatgatgtcccctttttgagacactaatttttaaatacttactagctctgaaatatattgatttttatcacagtattctcagggtgaaattaaaccaactataggcctttttcttgggatgattttctagtcttaaggtttggggacattataaacttgagtacatttgttgtacacagttgatattccaaattgtatggatgggagggagaggtgtcttaagctgtaggcttttctttgtactgcatttatagagatttagctttaatattttttagagatgtaaaacattctgctttcttagtcttacctagtctgaaacatttttattcaataaagattttaattaaaatttgaacttttcaatgtttctcttccattattttcttacgttattactgtctctcaggatctacttttgcagtttgggaagaaaaaaatggtaccacttttttaagttttagttgaatagaagcattatcaatacatctcaccactagatggtagtgttgggctgatcttggatttcaatcctccctgaaggaagacaaatttttctggaaaattgcaggcaacttggcaagagaattaatgtgtgcattcaaaatgaggtattttaccaattcgaaatctagtggtggtttttattgtttataacactcaacattgaataattcaccttacaattatgcctagcatgctgaatggatttccaaatgtctctgctgaaaatggacttgtttttcactttaggcagatgctttttttttttttttttttttgtagaccgagtc

SEQ ID NO: 69476 - DNA, 1063 bp, Homo sapiens
agcagagcagaataaaaggggctttactgaaatgtctttcctaattcccaaagccaaatgctcttcctctccttgaaatttatcccctttagaatctgtcttgtgtttacttggcacttgaatcaaacttctttcttctgtgtgtgataacattttctcctaatccctgcactcccccccccgaccccttcccccatcccctgctcctaacattttttatgtgggtcgtgacttgtctaagccattctttgtaatccagacgtagctccacctatccttggtggctgctacatttagagcagccacacagtttgggaagggaatatcaagagagcctcttggctttaaagagtcagctgatagaattgtagcaggtttagtgctccatgagaattgactgaccagctaagggagcccttagacaaagtaaattctagggtccatctcaagacagtgctaactcatcgctgcccatgctaaagttgtctttttgtttttcctagaagtttcaggcacctgcaagagagacctgcgtggaatgtcagaagacagtctatccaatggagcgtctcttggccaaccagcaggtgtttcacatcagctgcttccgttgctcctattgcaacaacaaactcaggtaagtcagcccaaaacaagccatctgtctataactggaactctagagggagtctttggcttttagagcactggtgctaaaagctactgtgctaatgatattctgttgaaggctcttgaataaagtaaaaagcatcatttagtgacaagtctttcataccaaataatgatggtgtttggaacttcttggtgtattgatatgttaatttacatgttaggaccgaagcttaaataatatgagttgcaggtaaacccccctgtgacctaatttaatagaatgttttcccttggtatcacagaatcacaaagttaagaaatctcaagaggttacttgtttaagcccttacttgtcttaaccactgtataaatgataataatggcaataataatagcccctggagagcatgtctttttctctatgttgcct

SEQ ID NO: 69477 - DNA, 1171 bp, Homo sapiens
gggggcaattacagaaaagtggctgagagcccaggacatagaaaataaaggggaggcacagccgcagccgctgtgagttggcattttaccatgtcgggaccctcttgtctttatgaaactagaaggggcccttaggcagctgctgctgcataaaccttaaataatattgaaaagggttgatgtgagaaatgaataggaataatgggactctgataggtctggctagttagaagctcaaggttagtcaattatgtgagctagcaatctattaacttgatgttaaggaggaagacagactttttgctccatgtgggtgaaggctctattaaagagagagccgatgtgggtcaggtgtgggaggtagtaagccactaaagaattgttaatgagacactccttgtgtgggtgaaggctcataaaagctcgctctcctgagctgggatatgttccagcctcaggtagatacgagtgaggctgattttgccatgattagcagagttacttaaaaaggaaaaaaagaaaaatgtggtcttattcttggatctgagtctctgagtttcagctcagctgcagtaaagctctccagggcacgccaaatgctgtgtattcattgaaggttcctgtttgtctcttccagcttctgcctcctgctcctggtacctaatttctgctcctgccttccactttcctcctaatgtgagctcaactttcagctttctcacaggttctcctttccttctgttccctgggctgcttccccctcccacagtgtgtgcctcccctccgtgtgtttgtgatggaggagtgctctgcgtccttcagttcccctttagcagaacagtatccatctcctcttatcccatgtgaagtttctgtctcctgctgtgtctttactgaccagaatgagcacttactctcctacatctatttcaagtgttaaaaaatacagaattccgggccaggcgcagtggctcacacctgtaatcccagcactttgggaggccaaggtgggcagatcacaaggttaggagttagaaaccagcctgaccaacatggtgaaaccccatctctactaaaaatacaaaaattagccgagtgtggtggtgcacgcctgtaatcccagctactcaggaggctgaggcaggagaatcgcttgaacccggaaggtgga

SEQ ID NO: 69478 - DNA, 3164 bp, Homo sapiens
cctggccaacatggtgaaagcctgtctctactaagaatacaaaaattagctgagcatgatggcaggcacctgtaatcccagctacttgggaggctgaggcaggagaattgcttgaacccgggaggtggaggttgcagtgagccaagatcgcgccactgtactccagcctgggcaacagagctaggctcctcaatctataatctgcttttattacccaagttttaaaagtcgtcttttcctcttctatgggcaaatatatattcccataaaaataagccaaaaaatgtttattaaaaatgcaaaacttattttaggtttgttagctgacttgttttaattgactagcttgctaatgaggggctacttcactcgtttggattacccacacttctttagtgtctttctcctctagtgctcttttaagtagcagggttgtgtttcaaaagttttagcatttgagagaaactcaataaatagaatgagttttaaggtggtttgtgctgctcccaactcatgctcatatctgccgtgcttatacctctgactgtgagcatgattggtccacagataaaagttttactgcacacaaagtatgaagaggaggggacatcagggagggtttggaacaaaaggaggaaaggggagaatccaggatttaaagagtggatttaaaaggtgagcaaggtgaaaaagataaaacatgaaaattttaaaggaggcagagatttatgagaagagtaaggtttattgaaaaggaacaaaaggtaaagaaagcagaaagagaaagcaagtccaggaagaatgggcggggtcatggtgattgaatctgtacatgtgctccgcatggctgtgttctggccttgaaggttggctgatgctgccatcagcactttctttgtcagtatctggagtctcacaaagtagcaaaccccacagggttactttcctctctgacagcaatgctgcctagatgtgagtgctcaggttgtggttggggatcaagaacggctagcaaatctaacttggtgatggattctgtgtaacccaggacctggggaaatacaggaactaaaatctgttcttgtgactatttgaattctcaatgcagtcttgcatccctcgttcaactgcttggccagacttccttgtactgggtggggatccctccccactcaagttccacggggtgagcggatgagtggtgtgtgaaagggcacacctcacttaggtctcctttggcaccagggagaggaaacagaggtaaagctgtctctgtctctgcctcagacccatgcctactcctttggcactggtcactcagcagtagaatagtagtatagtagtagacggccctatctgcatagtcacacacctcgggttttgagcattgtgtaatgaccagagtaaactggcctggctgtttgcctctggtccacagctcagatgatcatggtgtacagagcctggtggaacccagttacatctccactgttatttaagggcaatttatttgctcttcctcagagttcccctttacagtctgcaggcaaatatacagatactttagtaaatgtttataggaagacctgctggcagaactggtctcatggctgcagactatgaacagaagttgtttctccactttgggaaattacatacagctaagaataaacttgttcactcagaatagatttttggatcccacacatcctggaaaaaactgtttcttagtgcctgtctgttattgaaaagaggacatctaaggtagagattcaattcatttcaaattttagcttaataaagtaaaaagaaatgatagaggtctttaaggattctgtacactttgaacactggccacagagcttacttggtaagacttggtaccaatgaagttacaggttcattctcaaaaagggtgtcgttctgagagcagagcttagtggaccctgtgagaagtatcaggcctttctacttcaagagactcagagatctcttaggctttatgtcctcccatttgaaagaaatcatcccctaaacgttcccagaggagaggatagggaaggaagaggcaaggagatgtgactggccctagggaacaactgtctgccctcactgtgtacgggacaaccaagtcccaggcctcctcacagcgttttgctgatgaatgttgagagagaacatggcactctacgtgagagggcagcacacactgcactgcccctctcggtaccctgccagctgttcctccccctgaagacacagtgggaggttttatgctggcttgcaaagctgtcaaaattatgctagaagagtgtctagaatcttttctcactcactcactattactgccttttcagaggactgtcctttcttctctgtgtagagcactctatttaagatatgaatattccccaaaatgctttcatagagtttcacagaaaattagaggaagggttaaggctgcacagggctggcccaaccatttgctgtgtggtgaagaatttcagtttcattacctagatattttacacaaattggaaggaatgaaaggcattttgtggtattctgaggaatagaggcttgacgtcaatacagaattttcatcttctttcactatgtctaaaggctagttaacatcaatgtctgttgtcagctgctcccccctacctcccacacacaccacaactggggcctttattagagtaaaaaatatatgagacaagagggtaaaagaatgtaaatgaagccatgcaaatttgttagaaaaacagctttaagtagatggtaatcaacagagggtctgtaatatccctcaaacgggaaagacagtatttatgaacatcaattatttatagattacctcattcactctagaatatcctgaagatattatctacacatttttatttgaaacaaagggaagaccatagtttgttcaaattgctgtcgtgggattaatttcatttgggttagcatctgctctcctccccaaagagtttcccttggctgtggaaatttaacattccaggacaatttagaaaatgctctcttggtttgtgagtcaggagttctgagtttgtgcagtgagcaggtctatgcagacctacccacaaaggctgagggagctgaaaagccaaagaaagaggctgacaaatccagtttct

SEQ ID NO: 69479 - DNA, 1010 bp, Homo sapiens
agttggttgggaaataagaattaggaaaattaaaaaataagaatggttcctatatttaaatactttatctttccttggagtgggttatggttatacggtgaggagctttgctctccttgatagagggctttgttttgctttgttttttgagagcagaaaaatatggtttagaagttgttttataaagggagatgatgcacacttttggcagttgagtgcagtctgtttctcgggttactctgtaattgagaggcatgttaatatcctcataaaagacattttgctgcctcttgttcaaatgctcagctgttctggtgcccgttatttcccctaggcagccagtgactgactggagtcagcaggtttttatggcattaacagcagtttgctcttttatttttaatatgactcttaatccccctctaactttttttttttttttttttttgtagatttctgcaaatgagaatagcctggcagtccgttccacccctgccgaagatgactcccgtaagcattctttcttagatctggaggatgaggttcttgttttctatctgtatttggttcaggggtgttcccattactgtcagtgctgagaaaataacatagtaaatcctctacttgaatttaagggctaatgcttgaatgtcctttacacacttcatggcttaaggagaagttaaattcaattgaatatagttaacttgggacaaactgaatacttgtaatgcttttctcattgaattcatcctactttttgcaccaaaccctttcagaattgaagctgtataaactaattttgaagtttcattttaacagaagtttggccaatacggattttattcatttataatgttattcataaatacctattctttagtgaataagtatttgaataatctgttaaagatacatattttttccctgtttatctaaatgtatattatagtcaacctcctagccaggttctagggattttcctgctgacagtgaattttgtcacctgt

SEQ ID NO: 69480 - DNA, 1022 bp, Homo sapiens
tcttggatcaaagcagacccacagaaaaatggtctcaaactgatggctacaaaatttgattcaaagaccagaacagaaaaaaatattagaatagtttattttataaaaacatcacaaatgtatgttggaataacaagacaaaatacttggcagtcatgtgttacatggtcatataatcccccataaattgcaaacatccttgcagcagtggactcaggcattagcccatgaggcacatgccatgtattaagtgagttatcttgttaaactgtcttgttttctcatcttttaaatgggagattatttcttaagaataactgactaaatatttttgaagtttttcttatatactgttaaaaaaaaaaaagaaagaaagaaattttaagagaaaaatattcccagcattgaaatatccccatctttatcccaggagcatagtttgggaaacagtcatttgggaaataatgcttgaattgtccctgtatctaaattcatgtttccttcgtcattgtcttcatgctgatttgaaactggaactctgaactgaactggaagattagaacattttaattatagcctaaaaggacattagtgcgactgtgaatcatgaagtgggtggggaagaaaggagataaagacaatacatattcttcaagcacatgctgcaggtttacaaaccctcagctgccttaaaattcgcaatgtttttcagacccttagctatccttttggctgtttgcctagcttttgttaaccaatacctaagtgttatttgaacttcagcttgttaaaaaaaaaaaaaggacatgtgcctggcgaggtggctcacgcctgtaatcctagcactttgggaggccaaggtgggcagattacctgaggtcaggagtctgagaccatcctggccaacatggtgaaaccctgctctactaaaaatacaaaaattagccgggtgtgataatgggcacctgtaatcccagctactcgggaggctgaggcaggagaatcacttaaacccaggaggc

SEQ ID NO: 69481 - DNA, 1144 bp, Homo sapiens
ttcctcaagaaggtgatgtctgagctgagtcttgaagaacgtgtggaagtaggccaagtgaatgaggggaaggttgagttagaaatagaaggctattccaggcagatacaacagagatttggaaaccagagatgatggctgaggaattacagggattgtttgtttgtttggagatggagtctcgctctgtcacccaggctggagtgcagtggcgtgatctcagctcactacaacctccatctcccaggttcaagcaattctcctgccgcagcctcccaagtaactgtgattccgggtacgtgccaccatgcctggctaattgtttgtatttttagtagagatggggtttcaccatgttggccaggctggtcttgaactcctgacctcacgtgatccacccgccttggcctcccaaagtgagggattacagctgtaagccaccgtgcttggccagaattacaggtttgctgacttggctggagcatgaggtacacataggcagcagtgagagacaggtggaaggagagggctagggtaaatctttatgtcacccttaagggtttggatgtagtggtgcagcaggagaaagccactgaaagattttaagcaaatcatatttgtgtgttatgtattaatcattagatgaatggcttaattgaaataagtaacattatttatgtcaggggaattatcatgttctctaccattgcccattgtccaattcttttagtctttcagtcaatatgataatcgaatgttaaatgagatgaggagaaagggttttcaaatctattacagtgatttaatcttaggagaaaagccattgcttctgttacacttattgacacccttgacgccattcttccaaaagacatggagatcattaaatggattaagagcaacagttctcaagcttagttggaatttgtattttttaaatttttttagagatgaggtcttgctctgtcacccaggctggagtgtagtagtgtgatcatagctcactgtagcctccaactcttgggctcaagtgatcttcctgcctcagcctcccaagtggctgggactacaggtgtgcaccaccacatctggctaatttatttttatctttattttttgtatagacagggtctcgctataattc

SEQ ID NO: 69482 - DNA, 1674 bp, Homo sapiens
ataaattgtttcctcccatgcctaaagattcacagagaacagaaaagtactagattactacattattagcagactaatggtgggaaatgtctatagtcatcgacctctatgtttattttattttattttatttttttattttgagatggagtttcactcttgttccccaggctggagtgcagtggcgtgatctcggctcactgcaacctctgcctccctgattcaagcgattctcctgcctcagcctcccaagtaactgggattacaagtgtgcaccaccacacgtggctaattttttgtatttttagtagagacaggatttcaccatgttcgccaggctggtcttgaactcctgacctcaggcgatccacccgcctcagcttcccaaagtgctgggattacaggcgtgagccactgcacccaggttctatgttgattttagatgtaatagatgagttaattgtaatattcaccccagtgtcctttgcaaggaaaaaaatgcaattatccttattccttatgacaataaaatgcatgttcttttatgttgaggctctgttttgagaagtaaaataaattatgtctttagtacaatatatgaattgtatatggaaaaacatgctttttgaaagtcccaccaaaaaggtttctttatggtatcattaaatataatttcagtttttatatgtatacatcatccctgtctctctttccaggccgggcatttatatatgtatggtcagtatattttctattattggcacttggcatctcctttcccctgctccagaatggtcttttctgataaaactcacaagctttgcattaccacaagctctgctgctagaagagtgaatcacaagaatgttgtatgcttggggtgttctgtgtgcctgtgttgatgtgtctgtattctaatgagcaatccagttttacactagcatacagatatttaactctgaggtatgtgtccacaaagctgcttttgtcatttcactagtcagtgggttttgcttgtgagagttagggggttgatttgacccgaggcttcttagaagaattttttaacattccaagtttatctaatagatgtgctatgaagagaacagaatgatgggactttaaaaaaatttttacagttatttttattttgtagaatgagctgaaagccagtggtggcgaaatcaaaattcataaaatggagcaaaaggagaatgtgcccccaggtcctgaggtctgcatcacccatcaggaaggggaaaaggtaggttgaaaagtctgatgtccagttgccaaggaagcatgtgttctaaattagatgcttgaaattagaaacaactctaactctaggctgtagagtgtctgggaatttggtaacagctgccaggacagattgccatttttgcaggtcacataatttcagttgagtagctctgcaacttatagctgaccaaataatgagccttcattggaaaattattttgctcagcagatgctcagaaggcaaagagctgaagtgattttttaaaatctatttggaggctgggcacagtggctcacgcctgtaatcccagcactttgggagggtgaggcaggtggatcacctgaggtcaggagttcgagaccagcctagcccacagggtgaaaccccatctctactaaaaatataaaaag

SEQ ID NO: 69483 - DNA, 1615 bp, Homo sapiens
gtctctactaaaaatataaaaattagctgagcatggtggcaggcgcctgtaatcccagctactcaggaggctgaggcaggagaatcacttgaacctgggaggcggaggctgcagtgagccaagatcacatcactatactccagcctgggtgacggagtgagactctgtctcaaaaaaaaaaaatctgtgtcatccacttttctgtaagtcctggaaatatatggacaaaaaggcatggtctctgcccttagtgagcttacagtgcagtagagggacagtcacccaacagtttgaccaggtaccttgagaacagaggaaagattacctaaatttatgttggcaaggtactcagacttcatagtgcttacactgagtctttgaaggaacaggcatttgtaaggcaacagaaggacaaaggaggctggctcggtagggaccagatctagaacaggacttctgtgacttactaagcacttcgagtttaatttcaggaatgagtaggaatgctgaaagaattttgaaaaggagggtaaaatagatttatatttttggataattactttgtattattggggataatggtagcatcatagagactggattggaagataatgaagaaccagttaaagaggtataatgcagtagtccaggggaaagatgatgaagacatgaactaaggcagcaatagcagaaataacatgagacggagaaaggaaacagcagattctgcatcagcacttggcagtttagaaggacatgtcattgtcatctggtatgtgaggattcccctccaataagtgttacaaagcttgctggttaggaagccatctttagcagagaatattacctatatagggttacttatttttccctgggcacctgtgaatgtgtagtgcttgatatttgtaatttaaaaaaaattctatagaatataaaatataaaatcaaatctggattttatttataaagaaggtttgcaagttgaaccttgcgtcaagatttcccattgtttctgcaaaacttatcgttgggtttcgttttccagattctccgggcccaaagccgaagtgcaagtggaaggaagatctctgaaaacagctattctctagatgacctggaaataggcccaggtaagcagagagttccatgtgtatgaggtcctttaggaagtactcactagtagtaacatcttttggactcgaagccaatgcttttaaaggaagagtggcacaaattaaaaggaagtctgcctattagatgcaagccattctcaaatctcattgctctcgataaatagctttttttttttttttttttttgagacggaagttgacgtgctcccaaagtgctgggattacaggcatgagccgtcatgcccggctgcttttttcatatttttaatccacccttgttagtggtaacctatggtaagcaaagggtactttgaggagctataagtaaagtgctacgatcagttttgcctccagtcatctggggtttgagggcttcagtagatgggctgtgtcccctatcaggtttggttaccctgtattaccagtgataacataacactttgagagtggaattatgttttaaaggggacatatacaggcac

SEQ ID NO: 69484 - DNA, 1471 bp, Homo sapiens
ctgggaggcagaggttgcagtgagctgagatcataccactgcactccatcctgggcgacagagcaagactttgtctcaaaaaaaataaaaaataaaattaaaaagatataattcattaaacattgttcttacatcaaaaggtatgatttattgtttattcttatatattttcagcttgttctcaagattataacaccactagtacaatataaggacacattccccaaagcattagcatttggttttaccatttttgtctacttaaattaatagatatgacttgttatcctttcttttttttttcttttcctaattgtaagactaacacaaagtatttgtagaatgcttgggaatacaaaaaatgtagagaaatcctaccacctggagataaatctctttctatgtgtattattttacttacattaactctctttctaagagagtccctgaagaaagaaatttttctctcaatactttaataaatcaaggctaggttttatctatgccccgatttccatgcatagttcagcaaagctccatttttccctaaaagccaaccttcctctgcccttgactttggtgagatgacagcgtccaaaggaagctgaagttgaaaggttgaaggaagtggctaagtgaggcaggggactctcagtaaattaaagtgttgagaatcagcttttaaagataattttttctgaagataggtgtagaaaagacaggaaatcctgctttgttacttatttagaacctaacttactttatttctgttttaaaaaatacagaaaaaaattctacagactactgtctaaaacttttatcctcttactagtacatcttggtgcgtttgatttatggattcacagagaatatttaagggatgttcatactaacaagagttattgtcagctgacaggaaggaggacttcagggtgggtgaggccaggcctcaggaaattccagaaagtcttaaaagtatcttgtctattctctttccttgacattagaatgattaaggctccctcaagtgtctgagtaaaaagagctaaaatgtgataaaagtctgttacagaagagtattttggtatcagaattcgtgtgtgtgtgtgtgtgtgttttgtgttcctttacttccttgagaaatattggaggaaacccctccttcttcctgtacctcagattaccacttggaaaatgtggatcataaaactcatcttaaatgcatttgagatcatttttgtttgtttgtttgtttgcttgcttttgagacagggccttgttatatcgtccaggctggagtgccggggcacaatcataggtcactacagcctcgacttcctggactcaatcatcccacttcagcctccggagtagctgggactgcaggcatcaccactatgcctggctaattttttttttttttttttaaagcagagacagggtctcaccatgttgcccaggctgatctcaa

SEQ ID NO: 69485 - DNA, 2043 bp, Homo sapiens
aatacaaaaaaaaaattagccgggcgtggtggcgggcgcctgtagtcccagctactcggaaggctgaggcaggagaatggcgtgaacccgggaggcggagcttgcagtgagccgagattgcgccactgcactccagcctgggcgacagagcgagactgcctcaaagaaaaataaataaataaataaaataaataaagcaatatattcaggtaaaatagacatatataaaataacaaaggaagtttcctttgactcatcacccttttctcttgtttgtgacctctccccgtagactcccagcccttcagcttccctctgaatttcagttcttattagcaccaggatcatgatatgtatagatagcatcaaaatgccaacaaaaacttcacttgttccaacatctttgtggtttttcttcttgtaagttcctggaagtgacacttggtattttgtttagttttgcataacactcgtacataagagtgtatatgcgctgatgtagtagaatgagtctttagagagtaaggcaaccaagctaaagtgtgatgatctctgttcatcaggtacttattcatagccaatctgtaatctgcatcaaagaaataatttatataggccttcttgatgaatgggtaggtgtccatagggaatgcccagattgttgcagaaattattcataacatcttatcttcctcttagttaataattgtatgtgttcctttatctacttaacgttaagataaaaaattttcttctgctttctgaatatgtcttatttagaattatatcccaagaagaatacaattctgaggatgttcataattgtattaattgcatagttttgtttgtttgtttgtttgctctgtcgcccaggctggagtgcagtggcacaatcccagctcactgcaacctccacctcccgggttcaagtgattctcctccctcagcctcctgagtggctgagattacaggcgcatgccaccacaccagctaatttttgtgtttttagtagagactgggtttcaccgtgtgggtcaggctggtcttgaactcctgaccttgtgatccccccaccttggcctcccaaaatgctgggattataggtgtgagccactgcgcccagccaaattgcatggttttaagttaaaattttaaagtaagtttggggaggaaaggtatttgaataactattaacatcaatgtggagtctatacagtcatctcaatgtaggggagtatatctttaatttgcctgtcagtgaatcttcacttttaccttgacctaacatttaatcttcaatagatacattgctagtgctttaaatgtggataattggttttgcatgttattgttaattgtacacaagaattgtctttgtttttctatcaatgcactttcttacatatcttggtaaaactaactttttgctgatttagcatattcacctatagtttgtagcttctcttgtcatttcaaaaatgtaaataaggctatcctcagcattattttgactgacatctatttatagtggtacatttcttgtaaagactacatatcagcataaattttttatttactcttaataactctgagtaatctcgtgtgtgtgtgtgtgtgtgtgtgtgtggtaagataataattgatccagggtaaagatgcagtcaaagaattccaatctttttaactgttccttgccctaaatgactgtccttgatgtgccagctagagaccactcatctcttcttctctgcttactttcatgtccactaactatgtactggtttttaaccagtttcattatagtaaaacatatcaacaagcaatgtcaggggactggaatattctttaagcaatgttggctatattagacttcaagggggctagaaagacttcatctccccccagtacaaatattactacctttgtcttcctgctagtgggctcattcctaaattagacaacacaggtgtgtatccagatgaatatatttacaagtcatttcctctagccttctaactcattctaactcatcagtgagttaca

SEQ ID NO: 69486 - DNA, 1090 bp, Homo sapiens
gctgtctgaaacagcagtggaccaggagcagcttggagttttaactttcattttacaaagaacaacatgtttgaatgtttcagcaggcaagttataactggcatctacttcttgttcttctagaacaccgaaaatctctcccagcactttagaaaggggaccctgactgtgttaaagaagaagtgggagaacccagggctgggagcagagtctcacacagactctctacggaacagcagcactgagattaggcacagagcagaccatcctcctgctgaagtgacaagccacgctgcttctggagccaaagctgaccaagaagaacaaatccaccccagatctagactcaggtcacctcctgaagccctcgttcagggtcgatatccccacatcaaggacggtgaggatcttaaagaccactcaacagaaagtaaaaaaatggaaaattgtctaggagaatccaggcatgaagtagaaaaatcagaaatcagtgaaaacacagatgcttcgggcaaaatagagaaatataatgttccgctgaacaggcttaagatgatgtttgagaaaggtgaaccaactcaaactaaggtaagaattgggcgggtttgaaacttgagaaagccaattcaagcactaaacaaagctgtttttccaatctagctattttgagtagaggcgaatatgtggtcagtatgtcttttgattccagttagataagttaatagtctcaaatgcattatttacatagatgctaagatttgtgagtctctgacacaatttcatgttaaatcaggttcacactgggattcaaattggtatctagaaatgaagagagtttaataccgattggattatgtgtttttgtacacttgcccttttaaattgtcttcctgtgttctttatcatttgtagctttgggggtggaattactgctgaatagctctctgcttggacacagctgcagactgagtgttaaggccggagtttaacattaagactgaggcttacttgtctctgctagctgaatcccttctcttcttctcaacttcctcatctgtgccttccaacaaatgttttctatcagctaaaa

SEQ ID NO: 69487 - DNA, 2224 bp, Homo sapiens
aagataatgttatgaacattttaaagagacagttggggccaggcgcagtggctcatgcctataatcccagcactttgggaggccgaggcaggcagatcacctgaggctgggagttcgagaccagcctgaccaacatggagaaaccccgtctctactaaaaatacaaaattagccaggtatggtggcacatgcctgtaatcccagctactcaggaggctgaggcatgagaattgcttgaatccaggaggccgaggttgcagtgagccgagatcacgccattgcactccagcctgtgcaacaagagtgaacctccgtctcaaaaaaaaaaaaaaaaaaaaaaatgccaggcatgctgacatacacctgtagtcctagctactcaggaggctgaggtgggaggatcacttgagcccaggaagtcaaacagctgcagtgagctatgattacaccactgcatttcagcctgggtgacagagcgagaccccgtctctaaaaaaaaattaaaataggatcatgctgtcttataatttgctttcttcattcaaaagtatcctatgagcatcttttcatgtcaataagtatactttgatcacatgataggtatctgagaaaaacagtgtccagttaccaaggcaaagtgccactttgattgtcagggctcctgtgtggttacagtaagggcaggtgaagtcagagacctagatgactcatccattgtgtggcacgagaccttacagagccaagagtgctgctggcagttagggtagaaccagcttctggagctgttctgtaattccttcttttccagcaagaaaactttttaagcttcttatatctctgatgcatacattcttcccccaatggatcattttgtaagctaaaatttaaacactagaatcaagcagttctataatttcttttcaagccttatttctacttgatgaagtggctttcaagagtatattcagaagagtaatagggtgagagacttaattcccaaaatagctgctaatcctgtttaattcctaggttgtttgtcctttctttcttagttgaaagactggtgagtcacagactacaggagagaaggtattggagtttgcagtttgttgggaaggtggtgctgttcaatttatttaggagtacagtcctttcaaagtacgggacatttaatttaatttaatttttctttttttttttgagacagagtctcactctgtcacccggactggagtgcagtggcgcgatttgggctcactgcaacctccgcctcccaggttcaagccatttttctgcctcagcctcctgagtagctgggactacaggcgcgtgccaccacgcccagctattttttgtatttttagtagagacgtggtttcacggtgttggccgggctggccacgaactcctgacctcaggtgatccacccgcctcggcctcccaaagtgctgggattacaggcatgagccactgcgcccagccgggacatttaattttcaacaagcgtgtttcctctattatggaacaacagtgacaatttccaggttgttttcagtctgtcttacatgtataaattaattccatttttggccctagtgaaagtgaactctcttagatatgtaaatgtgtgtcctttgatcatctgagtgataagtagtggtatttgcatttgaagcctgcatattttacaaccagaggatctgtaaaacagtgaatttcttgataactgagaattttttttttttttttggttgggggatggcgtctcactttgtcacccaggctggagtgtagtggcgcagtcttggctcactgcaacctccacttcccaggttcaagcgattctcctgcctcagcctccagagtagctgggactatgggtgtgcaccactgcacccagttaatttttgtattttttttagagacagggtttctccatgttggtctggctggtctcaaactcctgaccttgtgatccgccggcctcggcctcccaaagtgctgggattacaggcgtgagccaccgtgcctggccctgataagtgagaatttatacacagataaacttgtagagaagagcagggaaaaaaaaaagattaaattcttatgaaaaataaaatttgactgctcatatgcatgtaaattatgtcagatataactaaatatttatgcaaatacttggaaagtctggggacttctccagggttctacaaattgtttcaat

SEQ ID NO: 69488 - DNA, 1002 bp, Homo sapiens
gtatacatgtgccatgttggtgtgctgcacccattaactcgtcatttacattaggtatatctcctaatgctatccctccccgctctccccaccccacaacaggcccccgtgtgtgtgatgttccccttcctgtgtccaagtgttctcattgttcaattcccacctgtgagtaagaacatgcggtgtttggttttttgtccttgcgatagtttgctgagaatgatggtttccagcttcatccatgtccctgcaaaggacatgaactcatccttttttatggctgaagagaaggctctaatcccagcactttaggaggccaaggcgggaggatcgcaggaggccgaggtgggaggattgcttgaggccaggagttcaagactagcctgggcaacctagtgagaccctgtatctctattttttaaatgtaaaaaaatagaaggaagagaatgtagaggaacaataatggcaggagcatggagaccaattaagagacaattataatgatttaggccaggtataatatggtttggactagagtagtagcagtataggtgttgagaagtggtcaggatgtatgttgaatgtagagagaaagaagaatcaagaatggcagcagtggctctgccacagtggcttgtgcctgtaatcccagaactttgggaggtcaaggcagaaggatcacttgaggtcaggagttcaagatcagcctgggcaatatagcagaccccatctctattacaaaaagtaaaaaataaaagaatagcaacaatgtttttggcccaaacacaattaaattaaaataccattaattgagatggggaagactacagtaaaagcagattagagagggagaaatagtagaagctcagttttgcacatgtaaactgtaacatgttttattaagacatccaaatggaaatgtcagtaggaacttggatactatataaaaatctagaattggaagagatccccgctgcggataaaatggacatgtgtcaaagt

SEQ ID NO: 69489 - DNA, 1048 bp, Homo sapiens
taaattccttatgtaaagaaaaggaggctggaccgcaaaaaaaaaaaaaaaaaaaaaaaaaaaaaaaaaaaaaaatctgggaaggaaagaggaacaaaattttaattacagaaattttattgtaaatgttttattttctcaaatttggatcttcaaaatggtgcccccattttgtgtccttcacattttgtgtcagaagaatgctagttgctgtaagggcctctgagaaaagtctgaggcctgaacacggaattcagaagtattgagcctcagtcttgtggcaatctaagagtacaaaatataaaagtaccagggatctaacttggaagaaagaggtggtgtagagcctttctccctgttatctactatttagcaggaacttcattacaaataaaaggtggagatatttgagtaggggtttgagaacaggattaaagacagcctttggtgtatacacctggtcttacagatgcctccatgctaaaaggacaaggctaaagatgggaactattttgatttttttttaatctatgtttctattagacactaaagggaagggaacctctgagcttatttactcaactaaccacaatgtaaataccttgccttggagaacagttggctaaatataaacctgtctgccaattggttctagttttcatatattgtattattgctgtaatatactgtagatgattatccaaggggtgtggaaacgcaagttcaaggccagttctaagttcctttttataatagctacaatccactgtatccctgaattctcacttttagggaatctcttagacagatatattagtacaagtgggaaaaatatacgtaaaaggacattccccaaagcgttatttgcaatggtgaaaaactggaaacaatccaaatgcccattaaaggaatatgggtgaattaattataatgagagaggattgtcaagattaccaaacacttccatgttgctaaatcaaagggatgtttcttggcctttatcttacatgaactctcaccactttttccctcccacatttttgcttct

SEQ ID NO: 69490 - DNA, 1751 bp, Homo sapiens
aacctgcatgttgtctcccatgcctctgcctcccgtctcaacctatcactcagaatccttctctgaaatgatgcatttggagaacctactgtttgattggagccttctgtttttccacttgtttaactcttattcccagtgaccctgtgttttgacctcaccaggacacccagccctggatgtcagtccccttcctggcctcactttcttccttgcccagctcagtcacttcagtgaggctctcacctcttccccagtgcctttctcaccactctattctgtcattgtccagcccagccagttctcattaggatttgggtcctatagtagcactaaggagagttaagaggttggaaaaggcttcatctttagggccttcttaatcttgcagagagaaagtgcagagggatctcacaggtccttctcatggtatactgggttcactgtcttttctccatgaaggctgaaaggattgcaaaactgtcaatcctgaacccattaattacaatcagtgtgccaggcaccatgctagacccttgatagaaacacatactattttggctgggcacgctggctcatgcctgtaatctcagcactttgggaggccatggcaggtggatcatttgaggtcaggagttcaagacaagcctgcccaacatggtgaaaccccatctctactaaaaatacaaaaaaatggctgggcgcaatggctcacacctgtaatcccagtactttgggaggctgaggcgggcagatcacgaggtcaggagttcaagaccagcctggccaacgtggtgaaaccctatctctactaaaaaatacaaaaattagctgggcatcgtggcccatgcctgtaatcccagctactcgggaggctgaggcaggagaattgcttaactgggacctggggggcggaggttgcagtgagccgagatcacgccactgcactccagcctgggctacagagcgagactctgtctcaaaaaataataataatacaaaaaaatacaaaaatttagctgggcggtggtggtgcgtgcctgtaatcccagctacttgggaggctgaggtggaagaatcactggagcctgggaggcggaggttgtggtgagccaagatcatgccactgcactccagcctgggcaacagagtgagactccgtctcagaaaaaaaaaaagaaatatataaaatatatactattttgaatcctaacaaaaactatatgaggaaggggctttacccctcttttatagttgagaaaactgaggtaaaggaagtaacctgctgaagttaatatttgagtttgttcctgtcacatatttttcttctgatgtgcttaacacatggaactggtttggaaagatgaatagagttatttggtaggcttggagaatgctgaagacattccagaggaaggggagcaacaggaggtaaaggcatagaagtaggacaggtggtggtatatactgaaaggagtgaaaaccagggaatcagcctggatttctgttctaggttttatactcagtggaaacacgttgctaatattacttaaggtttgtaaggttcactcactgcagcttcccaaagaagactgcaggactattttccgagatcagttgagatcaggcgcgttgagggtggtatggctgtagactacaggactattttccacaaagcatatactaatgtctgtttccaacacctagtggctttatatttatggggtttgcaaatagtgagtcctatacaa

SEQ ID NO: 69491 - DNA, 1058 bp, Homo sapiens
ccaggaaattatgtttttaacaagtatcccaggtaatttttaccttcagggaagtttaagaagcactggtagtggaagggatggacttgtggagtcaaagcagtgagcttgaagtggaatgagtcgagtctaagataggagattgaagcaaaggattatggaagctgaacacgaataaagggaataggaaagcaagcagtctgccatggaaaaatacagaagggagaaggaactggtgtaattcatttagggccagatggaagacctcggatgctctgctaaggttaggatttagtaagaaaaccagggaacgcaattggttttcatgtggggagagtgacatgatcagaccggtattttagaaaaagccttctggcaacagtgtaaagctatattagaaaggtgagagattggtaacatggagacaatttatgaggctctcttgggaacccaagtgaaagctgttgggggtcaagggggaacaggaatagagagaaagggaaggatatcagacggtgttgagatgtgattatgggacttggaaactccctgtcctgcacagaaacttctccacgttcttacccttttcaccctccttagccccacctgtctttaactaaacttggctttcccttgacatgcatgacatgcattctgtgtttgagcagtggctgcctgctctttctttttttttttttttttttgagatggagtctcactctgtcacccagactggagtgcaatagtgcaatctcagctcactgcaacctccgcctcctgggttcaagcgattctcctgcctcagcctcccgagtagctgggattacaggcacatgtcaccatgcccggctaatttttgtatttttagtagagatgggatttcatcatattggtcaggctggtcttgaactcctgacctcatgatctgcccacctcgacctcccaaagtgctgggattacaggcgtgagccaccacgcccggcctggctgcctgctccttctgcacatgcttccctgaaatattttgggggccagggttgctactcttctatatctcc

SEQ ID NO: 69492 - DNA, 1058 bp, Homo sapiens
acatttcactccaaatgtgactttggaacagacttcagttcagggaaaggccaattgatgtttgcacagtggggtcagtcataaaatggaactggaagggaccttaaaggtcatctggtgtagcctccttttataagaaaccacaacccaaagatattggatcatttgaccaaggttacacagtttgggggagaacagtggaggagtgtggtctgcaagtttagggctctaccacaccactgccaatccttggatgttggagaatcctcttctgtgtctaatgttctgactttctttattgcataggtatttcagtgtctgtagacaagatggaatcatctccatttaatagacggcaatggacctcactatcattgagggtaacagccaaagaactttctcttgtcaacaagaacaagtcatcggctattgtggaaatattctccaagtaagtgctgatcctggtccaaaaggaccatctgtctggagcacacattgccacctgtcagggaaattggtgaaggaagtacataatgtaaaataattttattgggcgcctcgtggattttaaacactatatgaggtactgtggagaaggaggaggagggtaataatcagaagatacattctattctttgaatttttgtttagtttgtggaagaaacagttatagacacaaaaattattttaaaaaagataattatgaaataattataaagcaaaatatcagcaagtctaaaatgaataggagtgaggattaggtacagaataagagacagagcatcacagacaggagctcatcaggaaggctttctggttgagatgagtgttgaggcgagttttgatttggttgaatggtgcgttaagcactctctatacctgcactttccaatgtggtagccactatataggtggctatttcagtttaagttaattaaaattaaataacatttaaaatttagttttaaatgtttaccagctgcatttatcacttttcaagtgctcagtaactacttgttggtgactgtcgtattgaacagcacagaaacatttcatca

SEQ ID NO: 69493 - DNA, 1012 bp, Homo sapiens
ttcctgcctcagcctcccaagtcgctgggattataggcatgcgctaccactcctggctaattttgtgttttcagtagagacaggatttcaccatgttggtcaggctggtcctaaactcctgacctcagacctcaagtgatccacccacctcggcctcccaaagtgttgagattacaggcatgagccaccatgcccagcctgacccaggacttttaatgtgaaatggcagcttgagttgctggatttaaatactctctgtgttctacagttgtcaaggttattgaaagcagtacctgatgaaccatacattcaaccagatcagttatgctcttcggttgccaagagctgcaagtagtactttatttttcttttacttctggtaagctgtgaattagcagtactttattattatttttttttagttttcaagactcctggatcagaaacaaagtggtactttatatttttcactcttcaaataaggaaactgttgactcatttctaatctctcgtcttctggacaaaggttggaactcctttcctttggtaattagtggggcaaaataaccaaacgatccagattaatgggtagggactaggtgatatcaagggtatggctttatgtattctttggctgaaagggatgttggaaaatagggtttgtctcctgaacttaaagtacattatacttctccttgataaaggctttaaaatgagaattataacaagagtcaatgataataattatacttaaaatgctcttaatactactgtaatatacccagtattttaaatatattatctccttaaatctatatcaaaacctcctaaagatagatattatccttattttttagctgaagaaagtgaaatggaaaatattacataatatgttcaaggtaacaaagttaggatttccccgaagtctgtctcaccttaaagccctgctcttcctattacaccacgctgcgcccccagctctctccctggcactgagtggccagtgctgcag

SEQ ID NO: 69494 - DNA, 1158 bp, Homo sapiens
atatatgcaaagcataaagttagtgtcttaaaatcttccaagagtcggatttctaactttagctttgaatttgtagtttcctattgtatatcatttggatttctcttgctgacatgtatgtctcaacatgtgtaaatcaacactcatcattttccctcttctttctatatttactgtctctgttaatggaatcaacagccttccatcattcgggtttgatgatgccagctttgattctcttttaccctaagttcattttattctaagaactgtcaatttctctcttcccacttttccatttccacctaccctaattaatttacgaatttaaaccttgattacctctcacttagtttcaggatcttcttgactagtaatttagactccagtctttttccctcttagcaagttgcacactactgctgaataatattttaaaatatgatgttagtcatgttacatgctttttcagaaactttctgtgttccaccagagagactgtggttaatccactacagagatcttatcttacaggtgtggatattgaggatcagaaactttttttgttataaaaaccatgcatgtgctaagtaaatagcacataagattagacctaatctctgatcactcatgggttacttcttcccactattgaaatatggcccaaactccttagcatggttttcttcccagtcaggccccattatgtctttttttttttttttttttttttgagacagtttcgctcttgtcacccaggctggagtacagtggtgcaatctcggctcactgcaacctccgcctcccaggttcgagagagtctcttgcctcagccttccgagcagctgggattacaggcgcgtgccaccacgcccagctaattttttgtatttttagtagagatggggtttggccatcttgggcaggctggtctcaaactcctgacctcaggtgatccgcctgcctcagcctcccaaagtgctgggattataggcgtgagccaccacacctggccaagtcttgtctatcttcaacttctcttgcacctagagtttaactcactccccaaaggtgctaatgctattctcctccttcctcctcctgccttcactttgatgaaattctgcccgttctttaagtcccaagtcatctgatatc

SEQ ID NO: 69495 - DNA, 1976 bp, Homo sapiens
ttttcatttggacaagtcttgttttgttttgcaatccaaagtgttgtattttttttaactggacaacagctgaggtcggtccatctgggttcaaatcaggtagcagtctctgaggagttcggaaggtagcaggacaaaagtttggatactgtgacaaccaggattaagttccatctgagtgcaagttttctaaggtgtttccaggatccaggccactattttcctaccactatagccatctacttcccagattgttactctggattatactagtctatcaactcctattacattttcaaaagccagtgtggcaaaactaaaacccaattactggaatccacaaacaaccagaagttttcttctgttttcattctctaggagaaaaattagaaagctatctagaatcttcaagaaaaaatgaaatgattttcattatacttactattaacacatgctctgaaatgtgttactgtttagacacactgtttagacagtgtactgattagaaagattttcagcaacagctttaaacaaaaggtttcttattaacatctagttgaaccagacattataatgaattagttctaatttctatttcttttcattggttagtcttttttaattccattttttttcttaatgctggcttgaagttttatttaaaataatgctttgtagagtagctgacagttttcaaagtacttttgcttttatcctttcatttagtcctcataagcatcctgtgtgaatcaatacctgtttttgagatgaagaaattgaggcccaaagacagtgatgatctttcccctgccaactgaaagaccactacccagcaaatgcctctcaataactattttctacagtcccgaattaaatgtagcttttagaagctaatcattaaaattcaattgaaacagtaacattaatatgtttataaccaggccaggtgtggtggctcacgcctgtaatcccagcactttaggaggccaaggctggcggatcacttgaggtcaggagttcgagaccagcctggctaacatggcaaaactccgtctctactaaaattacaaaaattagcctgggagagagagtaaggctccctcttaaaaaaaaatgtttataaccaattctttttttttttttttgagacagagtcttgctctgttgtccaggctagagtgcagtggtgtgatctctgctcactgcaagctccacctcctgggttcacgccattctcctgccttagcctcccgagtagctgggactacaggcgcccgccacaacgcccggctaattttttgtattttttttagtagagaaggggtttcaccatgttagccaggatggtctcgatctcctgacctcgtgatctgcctgcctcggcctcccaaagtgctgggattacaggggtgaaccaccacgcccggccctataaccaattcttaataagatacctagcactggtccagataagtagccaaattttatcacttgtgtggcggtgtgatttggtacatctttatgtgatcagcctcagtgatgcttgtcctttattaaggcattgttacgtggtagctgctcagattttttttttttttttttgagacggagtttcgctcttgttgcccaggctggaatgcaatggcacgagctcggctcactgcaacctccacctcccgggttcaagcaattctcctgcctcagcctcccgagtagctggaattacaggcatgcaccaccatgcctggctaatttttttgtatttttggtacagacggcgtttctccatgttggtcaggctgatctcgaactcccgacctcaggtgatccgcccgcctcggtctcccaaagtgctgggattataggaatgagccaccgtgcccggccagcttctcttttaaagaaaggaaggattaaagaacttgcctagagaagagtcactttttagtaaatccattttaattctcctgcttgaa

SEQ ID NO: 69496 - DNA, 1940 bp, Homo sapiens
cactaaggagaaagcttgaggttgtacttaccactttaatacttttctccacccacatttgatcaatccccaagtttggctgattctgccccaggggtgataagagttctttaatcagtcttctaattcagattccccttttagttttttgccagagtccttgagtccttgagtaatccttagagttggcttcagtttttcccttgcagaaaagttatcagagttgtcataaaaaaaaaaagcactgattttcaaaatatggttcctttaattgcctgtgttagaattacctggcagtggttaaaaaggtagagtctcaggtcccacctagacctgcagatcagtgtgtctgagggatgggcctgggaacctgaagtttatcaagtacctcaagagatttatatacaaacttaaggggagacaatgcctaagtaaattcagtctagctttctgacatgctcttcaagacacccacacccccactctgacagcctattcttttaggcttatctcccacaacacgacccacccacctggcactgtgaccctacaataattctctgtttcctggacctgcccagttctttcctgcctctgtgcctttgctcatgcagttaccacagcctcatgctcctccccttccccaccctcttgttgaaatccttttccttaagagcccaaatcaaatgctacctttttaaatttttttaataaaaaaaagccttttctaatttcttctacttgaatcagtggctgcctccccagtctttatacttaacacttgatttttgcttcatttcttaccttacttaatgttgtcactatttataaattattgcttccttgtaagattacaagccttttaggtatgagaacctttcccttccttttcattttgtggccattatgcacatataaacaattaagaactcattttattttattattttgagacacagtttcattctgtcccaggttggagtgcaatggcgcaatctcagctcactgcaacccccacctcctgggttcaggtgattctcatgcctcagacctccggagtagctgggactacaggcacgcgccaccacgcctggctaattttgttttttttttgtattattagtagagacagggtttcaccatgttggccaggctggtctagaactcctggcctcaagtgatctgcccacctcagcttcccaaagtgctgggattataggcatgagccaccgcacctggccaaagtactcatttagtacatgaaatatatctgatcttgcaaacacacttttatataataatgtttggctttgtatcacacatagaataaaattaaaatcctttagcattgttattaatccgtatttaatctgactactactcatctctgtgtcatcgcatgcttctcacttacttcctagctgtattattccttcctcagggcctttgcatttgctttcctctacctggaaaactcccccatctattgtcttcaccttgctggctgcatatgttctccccatcattcaggtttcagttcaaatgtcattcactcaatgaggccttccctgatcactgcctaaagaagctgttcgtgtccctgttcctaccacaactccagttactctttttgtatttccttcacaccactaatcacagtctttaattgtccggcttctccagtggaatggaaatttcatgagagtagagaccatgtctgtcttttttttttttgagatggagcctcactctgtcacccagggtggagtggaatggcacgatcttgactcactgcaacctccaactcccaggttcaagagtctcctgcttcagcctcccaagtagctgggactccaggcacctgccaccacacccagctaaattttttatttttggtagcgacaggatttcaccatgttggccaggatggtctgcatctc

SEQ ID NO: 69497 - DNA, 1058 bp, Homo sapiens
acctggctatttttttttttatttttagtagagatggggtttcaccgtgttagccaggatggtctcaatctcctgaccttgtgatccgcccacctcggcctcccaaagtgctgggattacaggcatgagccacctcgcccagcccgtctggctaatttttgtgttttttagtagagacagggtttcaccctgttgatcaggctgacctcaagcccctgacctcaggagatctgcccacctcggcctcccaaagtgctgggattacagcatgagccaccgcgcccggcccgaatattattttttaatctttactaatttgataggcagaaatgaattaatttgtatttctttgctagtgagagagaacatttttcatacattcatttctgtttcttctgtgaattatgtctgggttaatcccactcccatttttatttgggcgttaacattttaattatgttggttttttgtttggtattcttttatttggagcgttttgtgggggaagcacaggcttttattagaccaaatagagtgaatggagtgacaaagtggaaagtatacagaagttggaattgtggtgttataaatgcccattgttttgaggggccagagcttgtgatcaatgaagcagtactgcagaatggaaagggtgctatttgagagtcaggattcccaacttaatgttgtcatcaaccaatcaggtgatcttggacaagtcattgattcattgactcagagcctcatctgtaaaatgagagggttgggcttttgatccccaagactggacaacctctgtgctgaaaggatgcctttggagctactactgttcactagacattctggaattactttctgtctcatctctaacctttcacctaattttagatatatagagcctgaggaaagactggatgcagtaaaggcagtgtccaccggagtagcaaggggagcctggggacagcttaatttgtttgtgccctttaactttcaggaaaatagaagtataaaaaaaaaattgaatggggttcttgctgtgggggttgggggaagaaaag

SEQ ID NO: 69498 - DNA, 2533 bp, Homo sapiens
ccgcaggagcagtaggtgttagcagcttggtcgcgacaggtgcgctaggtagagcgccgggacctgtgacagggctggtagcagcgcagaggaaaggcggcttttagccaggtaagggccttctctctccacaaccggagagtgcgggaagaccccggcttctctccacaccctctttctccttcgacttttggggcggggggagtgcaaggagtgtgagtccctccccctcgagataaggggtcgagggacgctgatcctccgttctttcctcacttctggggcctgcgctgggtggggagtgcttatgtcgggctgagcctttgctgcccaagggcgggagctgcaaataccccgtcctctcccaccgagaacactgcattctaactgtatactttctggtgtggtggaggaaggtgacaattcattaaaactccaaataccctccttccagggaaatactgtaatattcaactgttctttttccttcattttcagccattccctctcttttcgattttttctcccttccattacgccagctgaactctgtttaagacacttacacccttttgaggaatgttgagaatatagcagtccttgcagccgatgtgtcatccccgaatcgctatcgtgtatatatcgctggcacttgcccccgacatatgttggtgttaatgtaaggtaattgtacacccctggctacacatactaaagcttgaagttgtagctgctaggaacgaaccatctggcacccttcctagcctccttactgatgcttgcaagaacggtttagctgatcctggtgagagatatttgaactactattgtcttgcacctaattccagctttcaaaagtctgccttggacgggcgcagtggctcacgcctataatcccaacactttgggaaactgaggcgggaggatcgcttgagcccaggtgtttgagaccagccaaggcaacttagcgagacccttgtctctacaaaaaaataaataaataaataaaaataaaagataagtctgcctaatccagatctgcctaatccagatggttcaattgacttgacttttcaggttagtcaaaggtaattagggagttatcagtttttaaggcaatgcccattttggggagaggttttcttttgcattaagtattctttcttttgctcttgatttaaatggtttaacacagtaccttttatctgcttggttaccaatactattcacaaatgctaaatatttcaggagccatgaaataacaccaatcctttcttctgaggtatgatgtagacacaaaagaacatgacccctaacaacatgttctaagttcctgtagaggtataacctgggtgcaggatgatcacgttttagatagatcttcaaaaaattatagagttggcgtgaaagaaggcaaaaaaaagtgtgtgttcatatatgttttcttgttttgcattgatagaacaacatataatgtactaggtaattagtttaggaacttatttcattctttggacaaaatattgagtgcctttcatgtcagtcctactgtagattcaaagtgccaaacgtctttaccctaaaagaacttaaaatcaaatgggttagacagatccacatacaatttatggtattagtgaggtcatttctatactagaggtcagcccagggtactgtaggagcatagggaatataggtgttttgttttgttttttaattctctcttctgcttttccttaaaaacaaaaacctctgagtaataatgagtgattctcttcaatctatgtatttgtatcactttcatatttcttaccctctcttcctccaattctatggcctatggaaaatgggattagaccctgttgttaatgtggcatttagtaaatagttggatctgtttccactgttctgtattgggctgggaagtgttgttatcaggtagtccctgggaagagaacagtatattggcaacattagcaaaggagtgccattttgtaaaaattacctcattgtataactttctttaacttggtacactcaagctttgttccagactctggttaaaggtggggctaaatttcaacctaataattctaaaagaaagcttcagaagctaaaacaattcacatcttggtgacaggggatactttttcctgctaagatgccctcaaaatgtttttctctttctttttttcttgggtggggaagacagggtagataggtgggtggggaaaaatgtttttaagtataattttgactagtgtttcttcaggtttcaaattcttatattttctctggtatttttcaccagttaactgcaattaacttagagccctcgtaccaaaaaaatttatcaaagacacacacacagacacaaaagaatattgagagtgtgggagttcattagacatctttggcataatagggcacctaaccacaaattggaagaatttattatttaaattgacagtgaaactagtttcaggcattcttaattccatacactattagatagatgacttttagattagaa

SEQ ID NO: 69499 - DNA, 1037 bp, Homo sapiens
tgtcccagttccgtgccagctgcatgatgccttttgatagtatccttctttcctgtacctcaagcatagtagggtttcagaccacaagttttctgaagcttttcggaattcatgcagcttgatgcgttattagtaggggctgctcgtgggaaaacgcttgtaattacacttcctcaagaagttaatgaaaatgtgtgagaagagagatttccaacaggtgatgaatatgccagccagttattcccttcttccttcaaatatccagcctagactgatttctggataggtattgtagaaataaaaatttcagacaaaacaaacttagattttgaatcggacaacagtcagaaccaaaagaggctcagacacccctgctctagctgcccaggcatcaaactttataggctgaacacgaaagtaaagaaatttgattggctacagctaagcgtttgccttatttgggtatggtcacatgggaggtccctaattatataaccacttggctggttgtctgtttgtgattggttgaaactccattcaaaatcaggtacaaggggccgggcgcggtggctcacacctgtaatcccagcactttgggaggctgaggcaggcggatcccctgaggttaggagttcgagaccagcctagccaacatggcgaagcaccgtctccactaaaaatacaaaaattagccggacgtggtggtaagtgcctgtaatcccagctactcgggaggctgaggcacgagaatgacttgaacccgggaagtggagattgcagtgagcagagatctcgccactgcactccagcctggatgagagaacgagactccatctcaaaaaaacaaaacaaacaaaaggtgcaaggaatacctctaaattttgggttgctttctgggtacaaaaacaactccaaactaatggcctgctacttattttgcattaacagtatcaagtatcaagactccagcaaaagtggcagacagcatgggaatgctaaagagcatacaatatcaatacaggatagtactccagaaa

SEQ ID NO: 69500 - DNA, 1064 bp, Homo sapiens
gatagaaatcacctttcttcaatgatacgttatctttagtgctgtcttcggaaatatcttcagaagcaacaggttgctgtcgtagttcagttaaatctggagttctttcagcttgggctgtatatgaaatagtggagtcccattttatcccagagtccttggtctcttttctttggacttcatctacaatattttcaagttccttgtctaaaatattgtccatattgtcctcagtatcaccaactttgattatcgccctggatgactgtggagaaggtccaggtaacactttcaaggttgatgatgtggacaattttgcatatagttgttctataacaattttggatcgaataagttgttcacatttttcttctgcatcttgaagtttctgctgaagcatttcattttcgttactgagatctcgtattatcttcagagagagctccttttctgcttcacttgtctcatgtgcatacacagtggaactttggaagttaacacattttaattcatcatttagcatactcaaagctgtagaaaggtttactattgttgatgatatatatttaatagcattgttttccaatgtactgaacattgtggtgcctatgagttcctgtagcataccttggatttctgaaacctttgtatttgttgcaagttgatcactaatcatctgatctggtcttaaagcacgggctgttgaaggtcgttttataactctttctttccaagatttccatagagtacctctagatactgaagaacaaaacataaaacagtgagatggcatttttttcttttgcattgtgttctatctatgtttaaatctaaggaatttagcctagattaactataactaattaaatataagataaagattaatctgaaaactttagctctaaaataaacagtattatttttaaagaatgactcttttcacacaatcacctagaagtttttctttctttttttgttgagaggggatctccttgtttcccaggctggagtgcagtggcacgattactgcagcctcaacttccttggctcaaacaatccaccca

SEQ ID NO: 69501 - DNA, 1059 bp, Homo sapiens
atcatagttttttgttttttttttcttgtctacttttcttctgtgagccaccacttttcggcagggttggtttgttcagtacacttcgccaaggtcggctttaaaaatcaaatctagattgtgaactatgaaaactgcggaattatcagtgctgtgtagctatctgacaagtgataaaatgtgtcattacgatttttacacatccccgtgccacagaatggcgtctccttctaatcgttccccccgacagatgatagtacatcccacactgctgctggaaaagatagtgcaaaagttgagcgcgccgagggctctcttttctcccggaaacaatttttccctagacccggaagcagttgttgtttcaagggaggtgggactgggcgggtcaggccgcagcggctgacggcaggggaggagccgggtccactgccgggtggaggggcaaggcgagtgtgtgtccttatcctagcaattggggcgcgggcctgtgagccagttggagttgcggcggcgggaacgattgggctgagcagaggacgacatgttgcttttcgtggaggtgagtgcattatgctagtctcgtcctgctcttaggagagcaggagtgtagaggcgccggccggtcccaccgccatgtgactttccgggccgtacacgccgcggaaccggcagataggctgacacagcacctgggccgagcaggcctgcagcttccctctgcgcgctcacaacactctaggaagctatgggaggtgaggcccgtagtggagaagaattgaaggagaaaaacggagggctgttctggtgtggcggtgaggttcagaggaaggggaaagtgtcccatatggacctcctaaaggaggcagcattggggggttggggggcggagtctgagggaggagagggtaatcaggtgggcgcgttccgggggccgagcgcggcctcgcggggcccctctgggagggaggcgagcaacatgtggggccacggatggagaaaggtgaaatgcggtaagtattttgaaaagaaaattgaaaagttcttttgagcaacttc

SEQ ID NO: 69502 - DNA, 1012 bp, Homo sapiens
tacaaggaaaattccaagaatgagggaaacttattccgggaaaagccgttttttgtaatgttatttgaacaatgagacacttttattacttaaactagaacgtctgctgttggcctattttagttttcaagatagagttggatacctgccttacagaaatacgaaatttaatttcccttaattctgtcctcttgtgtgcagtgagcgtcagctgactgcctggctaatgctttgagtagattccagatcatattgttcttacattgtgaaaacgtcaaaccagcaaagctgcaacttcgcaacttggcatttgttaactatgcccataagaagaatcttttcaatgagggaaggaatttacgggttgtataatgaatctaggagccggggccagcctatggcagatttttttttccgggttgtgggaaaatcttactccgtaatattccagcataaagtaaataaatgattttacggtttttttttctctttaaactaactgatattgtgtcgccgataagcttgatatctttaaattagttttttaaaagactgctacattagagtgtatctaacattcataataaacattcattggaacattccggggaaatcatgaaaagacttaaaattactgaactcattctgtttactgttttctgtcctcattgttgttttccttaggcagaataagaaatcagataagattttaagccagtgccagccagtttttttaaggaatgttatgctatgtaaataccacaggttttaagtgtgtgttttgctgggcagaagaaagattgtgaagtttatattgacaggaactccacaatatacttttgacttccaaattgattcctttggctttattaaaatgtaagttttaataacagctccatttattgtttaaactaggtcttctcctgtctctaaagcgatacttaatatgttttacagatgacaaaaccgagccccagaggttaaagtaactttacttagtaaaagtaaagta

SEQ ID NO: 69503 - DNA, 1272 bp, Homo sapiens
tgcctggccaggatatatcctttgattatttgattaagtatatttatcaatttttcttcctttaaacatactgcatccagcatttataaatgtttaacatgtagtttgtatataattctcatttatatctaacatgaatagattgccactaatttcaagtagtagccgtgtttttgggtccagcatgcaacccatctataataattatatttataaattagtttttatctaccatcattgactctgctatttactcactgttcgaccttgggcaaataacttaatttctctatgcttttttccctccatctgtaaaacagaagcaatcttaattacagcacaggattttctgataattaaatgaataaagtgcatggagtagtctgatacatggataatgctatatacgttttagcaattgttgatcattttagtttatctgtaattgtcaaaacttatctccctcggaatgataactcttgcttaaaaccatgcggacatatttcaaactggtagaaatccttaaaatctttttataggtgacatactgcccagagttcctgagaatagaatttaaataattcccatttactttcagtgtctgtctttaatacaggtaatgcagagctctcagaagatatatgtaaagaatatgaagtaatgtattcttcatcttgtgaaaccacaagaaatactacaggcattgaagaatcaactgatgggatgattttaggaccagaagatctgagttaccaaatatatgatgtttccggtaaactttatggttttattgttaaaatgagaattcagtacaggacaccccccacccatggtctctttatacttgttctgataaacctatggcattattttcttatttgaaaagaaggttacgttaatgaaatgttagttgattgttacattgttttcagataacatgacttttgtaatgttaagattgtttatgagggttctattaaaggaaagcgtgaaattaaagataacagaaaaaaaggcggggtggctcatgcctgtaatcccagcgctttaggaggcccaggcgggcagatcacttgaggtcaggagtttgagactagcctggccaacatggtgaaacactgtcctatactgaaaaaaaaaaattagctgggcatggtggcatgcacctataatcccaagatcatgccactgcactccaacctgggtgacagagtgaaactgtgtctgaaaaaaaaattttgtgtgtctatatataaacaactgcctactttg

SEQ ID NO: 69504 - DNA, 1066 bp, Homo sapiens
ctaatatgaaatgtatctgatgaaagaatatctagattgacagaaattagttagactttgaactgtccaaattataaaaataataaaaaatacagtttgggccaggcacagtggcttatgcctgtggccaaggtaggaggattgcttgagcccaggagtttgagaacagtctgggcaacataatgagagcctgtctctacaaaaaaataaaaataaaaagttagctgggtatcatggcacaagtttgtggtcctagctactcaagaagctgtggtgggaggatcatttgagcccaggaggttgaggctatactgagctgtgatcacaccactgtactctagcctgggcaacaaagggagaccctgtttctctgaaacaatagctttgtggtgaattttgattgtagatactttgtggcttctgagtacaacagtatgtcagatttatcacctctactaacatgctattaactttttttccctcttcttttctaccatcaggagaaagcaattcagcagtttctacagaagacctaaaagaatgtctgaagaaacaattagaattctgtttttcacggtattgctgtttcccctttattgaattttattagtagatgtaaaatacgtgtgaaatagagcgcaaggatggtgattattatttaactaatttttttttttattttcttgagacagagtctcatgttgtcgctgggctggagtgcagtggtgtgatctcggctcacagcagcctccgcctccagggttcaagagattcttgtgcctcagcctccagagtagctgggattacaggcgtgcagccaccatgcccagctaatatttgtatttttagtagagacagggtttcaccatgttggccaggccagtctcaaacatgcaacctcatgtgacctgccctcctctgccttgcaaagtgtcgggattacaggcgtatggcaccacactcggccccttgtctagatttaaaagtgtagggtcgggcgctgtggctcatgcctgtaatcccagcactttgggaggcttcggtggctggatcacctgaagctggg

SEQ ID NO: 69505 - DNA, 1265 bp, Homo sapiens
tatcagatttcattatactcctcaacatagtgtttggccaatgaaagtacactaatttctgttaacatccatttgttatctcctcaatgaagaatttggttattatatacaagaaatttgccttattagatatatgttgtatgctccctgaaggcagtgccaaacttactctgttaagtactctgaatgttttttcaatgaataacatttgacagtgttctttacatacaaatctccaaaaaattgtcatacctataatctttgattctacaacttagtttctttaggatattaacccagcctctgcaaatttactcagttggaaattaaaatgaatagtttctttaatggcattaataatatcactacttgtcacgtttgagtgataccctttcttttaaatttcagcttctcccatggtacaagttgatgagaagggtgagaaagtgagaccaagtcataagcgttgtattgtaattcttagagagattcctgaaacaacaccaatagaggtaaattattaataattgttaacactaaatgttctctgtttaaattaaaagaggtttcttctgcctttcgtggcaaagaagaaaaattggaagaggtacacaagcaaagcataagtcagtgccttcatcagttactgtgaaaaggttaaatactaatttgtttcattaattctgaagtactaggatggtatagagaaaggaaaagatatagttctattttcttagaagggtagacaaagtattgcagtgaaacattctgaatttactagattgattcaatggcaactaatatataaataggctattttgggaacttgagaattcatctgtaagaatgaatgaaaaactagattttgattaaggattaaggaggcagggctgggcgcggggtggctcatgcctgtaatcccagcactttgggaggctgaggcaggcggatcgtgaggtcaggagatggagaccatcctggctaatatggtgaaaccccatctctactaaaaatcaaaaaattagccaggcatggtggtgggcgcctgtaatcccagctacttgagaggctgaggctggagaatggtgtgaacctgggagcttgcagtgagctgagatcaagccactgcactctagcctgggttacagagtgagactctttgtctcaaaaaaaaaaaagggattaaggaggcaggactaaccctattgttcagcgaaatattatataaagcaaagttgcagtcataaagatggtatggtacacgt

SEQ ID NO: 69506 - DNA, 1956 bp, Homo sapiens
ttttacaattcgtgtattagagatactagtacccttgcctgtgatgagctacaatttactgttttgacttagttttttgggaggtttttactctgcttgttgttgttgtttagagacagggtctcgctctgttgcccaggctggagtgtggtagtgcgatcatagctcacagcagcctccagctccttggctcaagcagtcctccccactctgcctcccaagcagctaggactacaggttgcatgccaccatgcccagctttttttttttttttttccttgtaagggatgggtctcactgtggtacccagggtggcctcgaactcctgggctcatgcgatcctacccccttgacctctgaaagtgctcaggttacaggtgtgagccagcacacctggttattttgacgtgtgtttgtgtgtggcggggggggttttaccttgtttactatggtttttataccatgaaaacgtttttattatttattaattaattaaagctgtcattttcttttcttttgctctactgattctactgtaggcagaaatagtatagtcatgtaaaatatatgttaaaatgtaaattaaatgtattttttaaaatatacacttaattctttgttgctataatgtgttcctcttctaggcaaggataaaagccatcaatacattttttgctaagaatggttatcgattaatggattctagtatctatagtcaccccattcaaactcaagcacagtatgcctccccagtctttatgcagcctgtatataatcctcaccaacagtactcggtctatagtattgtgcctcagtcttggtctccaaatcctacaccttactttgaaacaccactggtaagtgagatccttacaataaaatataataatatttttaatttgagctgaaatttgaagaaatcagttggagtgggagctcatttatgttgacattgatgactttttggcctttattttattttattttttgtatttttcgtagagatggaattttgccatgttgcccaggctggtctcgaactcctgtgctcaggcagtccacccgcctcagcctcccaaaatgctaggattacaagccactatgcccggccactttttggcttttaaacagtgatatggatatctaattctccataccaaataaatgcatatgactaagaggtgagctattagagcgcataattttattccataaaatttgctgagtgaattgaaagaagagactggataacttttgcgtgattttaaatgcattttagtgttgcgaaatgtcagaccagacattctttactaagttatgaattgttcataaatccagtggtacttgaagtgaatattgcagaaatgaatcagtaaaatattttaagatatttttggcttgtaaaagataaattcataagctcattaaggttcttgtgaccctcacaccagattttacctttgccattaatattgtttaaacatacatttttttctaggctccctttcccaatggtagttttgtgaatggctttaattcgccaggatcttataaaacaaatgctgctgctatgaatatgggtcgaccattccaaaaaaatcggtaagataaaaaccatagctgtaatgtattttaaacaattcctaatggatcttaaggcattaatagcaatgtttgttgtcaggctcagtaataaggtttggtggattttttgtttgttttgtttttactaagtgtatatgaacagtttaatctagaattcgtaaaaacactttgacctttgagttggtaatgcatgtaacagacttgggattcagattttttttaataataaaagagaatagaaaaaatatttcatgacaccagtctctgacaaatctggtgactaatttccatttagtatgttaaatgggtagcattttagagaatgaattctttgaagatataaatgttgtt

SEQ ID NO: 69507 - DNA, 1048 bp, Homo sapiens
tttaacttaattttttgaaaaccccagtacaacaggagccaattttttacctaaggaaagatgtttttctgtctcgatttactgctttgtgtatatcattttgtatttcctatagtgtgaagcctcagtttaggtcatctggtggttcagaacactcaacagagggctctgtatccttgggggatggacagttgaacagatatagttcaagaaactttccagctgaacggcataaccccacagtaactgggcatcaggagcaaacttaccttcagaaggagacttccactttgcaggtggaacagaatggggactatggtaggggcaggtaagaaaataaagtacctgaaaacctttgataataatgtgatcatcctgaataattgaagaacatgatcttcataataattaaatgagcatttaattattggtatatggttatattaaataaatacgttattttcagaacatgagttggttgctttttataattattaagaaatagagtgcccatacagaatatagctctgaatcagaggtttataaagttattctgaagttccttatagctcatataagaaagaatagcttagaaaattaacatatccatttgccttatggttttaatttcttccagcttttaaactatagaagtggctgggtgcggtggctcacacctgtaatcccaacactttgggaggccgtggtgggaggatcatctcaggtcaggagttcaagaccagcctggccaacatggtgaaaccctgtctctatgaaaaaatacaaaaattagctgggcatggtggcaggcgcctgtaatcccagctacttgggagcctgaggtaggagaatcacttgaacccaggaggcagaggttgcagtgagccaaggttgcaccactgcattccagcctgggtgacagagcgcgactctgtctcaaaatataaataaactataggggtgaggttatatattgccaacttgcctaattaaacaatagtatggttctggtttgaagggatcactactaacaaatgggctcatctta

SEQ ID NO: 69508 - DNA, 1104 bp, Homo sapiens
caaaaaaaaaaaaaaaaaagagagattagatttggggtttattcaatatgttgtaaatgtcatgatggaggactaaacattggggttaaagaaacaggcatgacttccagtaggtaggtcatggtagaggagctcttttgcaggagggagatcttagctgggaataaaattttggatttgtaagccttcacatagtaattggagtgataagctcatgcagagtactctccatagagtggtgaaagtggtctaatatggaaccttggggaataaagcagcagtgttgggttgaaaaatgagattattcagcatgctgtttgaagtattcaagcaaaatctgaatggacatgggtaatggacaaatgttatctcggttgtaggcaaaggcctaggctgaaaatatttaaaacctacaattcaatgatatttttgtaaatttacagagatataccgccatcaccaccaaaaagcaaaacaggttgttttaacagttgcttgcatataggtagtagttgaagccatggatagtggacatcactcaaggagaatatgagaagtaaagagtaataaccaaatggaaaccatcaaaattttagaaatggtcaggggaaaaagagcacatgtctgtcaaatctaaaaaacaaaaaaggtatcacagaagctaagagaaaaatgtgttcccaaggaaaggatggttaacacaccaaatgctatatgtcaggaaatgagaggtcaggaaaaagggtctgtcaggttttgcattgttgaaggcattggtgacacctaaaataattttagtggagtgatgacaaagtggaggagatacaagtaagaggtaagaggcttgtcagaggatatatagggtgttagacaggagggaagcatgagatttttcatatatgttatatagaggagggatattgttttctcttgagataaatagatggagaaagatggtgatgggcgggcacagttgcttaagcctgtagtcccagcactttgggaggccaaggagagaggatcacttaagctcaagagtttgagaccagcctgggcaacgtagtgaaaccttgtcactactaaaaaacaaaaaataaaaattta

SEQ ID NO: 69509 - DNA, 1045 bp, Homo sapiens
gttgtagtgagctatgattgtgtcactgcatttcagccttggtgacaaactaagaccctgtctcaaaaaaaaaagagttgatagcaaatttaggtaaagtgggtgtttttgttaagaaggcatagcaaattatgaaatgaatagtaaagactggttagaaggcttaaggagtatggcaaagtttacaaaagaaacaggtgagagaagtgactaaagaaaagtagaattgataaagactgatgagagctcaagtgagatgtcaaaccaagaatttatgtagggatacagttctgtgcattatagaggttttgtttgcttctttttcttttcttgcacctttcagcttctgtgacacaggattagggaatgagatagccatgtgacctgttttattatttgttcattttagagacctcatccttcaacagctgaatcaaaggctccaacaccaaagtttgacttattagcctcaaattttccacctttacctggaagttcatcaagaatgccaggtgaactcgttttggagaataggatgtctgatgttgttaaaggtgtctacaaagaaaaggtaaacacccagcatctgagtcttaccttatgagaccatatttaggctttatttgcagtgttgttatttaaaattttacttgcacttagtgtacatttctatcatagtttttatttatggagttttcagcatacttagagtgtttttttaaagattcatgatgaagctgcacaaaggcaataaaatgtttcttggcttttgcatgtctttgttttttttttttttaaagacatgatcttagctcactgcaacctctacctccttggttcaagtgattctcctgcctcagcctcccaagtagctgggagtacaggcatgcgcaaccatgcccagctaacttttgtatttttgtatttttttttagtagagacagggtttcgccacattggccaggctggtctccagctcctgacctcaagccatctgcccaccttggcctcccaaagtgctgggattataggcatgagccaccac

SEQ ID NO: 69510 - DNA, 5263 bp, Homo sapiens
gattctaactgctctgctgggattcttttgtcatctttcttggggttctttgtagcaaggaaacaggagcagaaagaaccattttatttcatcatatggctataccattattcatctaatctgtcctttgttaggcatttaggtcgctcccatcattataaacaacgctgacatgaacatccttcagttaaattccttacgtgaaattattgtataataaataaagattgtaccagtgtactctaagcagtatatatgagagtgcttgttgcccttttctggaagataatctgtggttttcttatggttaacacaatcatttttatactttataatttaaagaatgtgtaccataaatgtttttttttatcatcacttcaaaggaaccccgaaagttaagttatgctgaagtgtgccagaagccccctaaagagccatcttcagttcttgtgcagccactacgggaacttcgctccaatgtggtgtctcccaccaaaaatgaagacaatggagctcctgagaactccgttgagaaaccacatgagaagccagaagcaagggctagtaaggattattctggcttccgaggcaatataatccccaggggagcagcaggaaaaatcagggaacagagacgccagtttagccatagggctatacctcagggagtgactcgacgtaatggcaaagagcaatatgtgccacccagatcaccaaagtaaaaaacaacaaaactattcaaaaacttcactctcttcccattaaacttgaactgtggctatattgaactgttttggaggggagggggtagccaggaaggaaacaagagaaagtacgtccatttcattatggattttggagttgtgagtgataggatcccaaaattcatctctaatgtggtttttaaatgctggaggattccaatcaatataaatatatatatatatatacacacacatatataaaaagtataatttttctatttttgtttttggttttaatttgcagagatttgctgccaggaatcaattttgagggttcagatttagcttggaagaaaaaaaagaaacatacatccttcagtataggagatgagggaatgagagaaaatattttttgaagaagcatttctgtaaaattagaaattactttttttaatctatttaaagtttggcttgaagaatgccatctctgactatatggccttgtattgcaaagcggatcagtggctggggtgcctgttgtgggtgtgagtgtgtacaagagcgattgaagccaaatctgttgtcatgttagtaaatgatttgaaaactgaatgtaatacttgagtagatttttttttctagtttgaaatttagtctgtctttttgaccttactaatatttcatttaacaagttgtaaaactctgattgtacttagagatgtgactaccaatcagtttgatactcaaggaaagggggttattcaagaaattgaaaatttcatcttggacctcagtgcataggtcaaatggatttcagaggtttaaacttccctgtgattcccccgaatacccccaaaatgagaaacaaaattttttttcttactccatttgttactctctgttctttgactgcccacccacagaaaagcaaaataaccaactacctactcaattgtgtgtttgtaattgctttgagcagtctagtcaaatcatataaattgttctaaatttcagaattgaacattgaagtattaactcttctgttcacacatttagaattttagctcccaagatggtagggcagactgaccgtacagtaatttatttgtcgttagtgttaaagattaagcatagtaactgactcttaagtgttaaataatgtagaagtaaaaaaattttttttaaaggcttaatttgggaggggggacttatttctgtttacagtgtattaccttccttccctcctcttctccccccacacccaacaaaatacagtttggaattcactgaaacagtaccagcaagtcatgagattttttagtaaagatgagaaagatggttgaagaaaattagtgcataatttctcagtgaataaagttgtagctctcatatactaaatagacaagtttacatgctgttatttagaaaatgactaaaatattaaaaaccgtgttgtgttaatctgttttaagtcataccatgttcagagttctatgtaaggtgggttttatttttcttttaagggatagtttgtaatagtaagaactgtcccatatgttagtaaattacatatgtacaaattgaaactgtaaattgtgaacactggaaagcaccattgtgacatagagtaaacatcttagtaatatattaaagtgaatgtaaatggtggttaaaattacattactgtgaaattcatcttccaactctaagttaagctttggagatacatgttagtggttaactgttaagagctttgaaaacactgcacatatctgtacaagccagaattactatttctttgacttattattagcttggcagttgcttttgatttgattgttttatgacatggtatactactatatttactcagtttgaaactattcatttctacacactatttttaaaaattgcctactaggtgaaacataacaataaaactacctgtgctgaaatttgggggaagtttaggtcctttaaaaaaacatattaatcattgactacatctatgataaaagtgcttattttggtttactaagataatgcagttggtggaaatgataaacgttttaagtgttaacatcctttgaatgcgttggatttcagagaataaacattttgtaaaaatcacttggtaaggattataaacttaattactgcacttaaaatgaaacattactttttttaaacaatgtgtcacaaatgtaggtctgtattacttgtatgcttgtgtgacttactgttagtccagctctaaaaatttaaaggttgtaattgaaatacaagaaaagagccttcttttagaagaaagcaagtatatttttgcttttacttcaaatgttatttaaagtagaaatttaatttgtagatataacctttaaaaattttctcattaagacaatgtttttaatttaatttgcctcattacatctaatagttcccatttgatggcatgtatagggaagagtgagagagtgtgtgtgtgtgtatgtgtgtgtaatatttatatatattcacagtatgtatttagcatttattttattacagcagatttaaagtttgtatctaaataatgcctatgagttgtgtgaagctcttggcttttttccaacgttactttgtaactaatgagggtggatgttcattgtagtttatttatttggttctttagatggaggaatttaaaaaatcaaatttttctcttcacctttatgacttgacatttccttgatctgttggaggctaaaagtaggtataaatgatattgaatgttgggtatagtgatactctgccatagttcttactgcatgaagagaacaagagtcacacaagttcaccactttgcacttcatagagaaggtacatagagacattgcaaaacctgtctccatttgctatcctgataattaaggttttcataatacctagggcctgtctctgagtaattttaattttgccaaatacactgacatttaaaatagtgatccatctaaatttttttcagctgggttttgaggaatataagagctttcaatgataaaggtttgttgtagttgtcttatgtgctgaatttgcagatgatcagatgctgtgcagaattctgatttatttttgtttcctaaaattaagatagcttgaatattatttcacattcctttttcttttttaaataaacaggtttgctttggaaaggcttaatgatggaatgttagcatcttcactagggtaaagaagaacaaaaagaatgttgctggaacgtaaaatagtatttaaaagttaatgaacacttctctagttttcttagttatggccttaataattagtctcttggcttaaatgtccactggttttactttgacacagttgaacaacactggggttaagtctctggtatttaggctggcaatatatatattaaccatattttaaaagtaccaattttgtttttacagaaaagataaaactcaaaagagaacagtgtattccttctgaggggcttttataaattattaactataatatatgatggattttttcctaattttttatatttccttacaattttggtggccattaatttaactttaggcttttgggcatatgctagtctgagcttccgaaaagatacatatatgtttcccttttcattagctgaatgaggatattttaagaagttgaaagagaatttattttcaagttgtgagtaaatcctcctttgaaattcacctgattattagataacttaaagtttatttttaaaagctgacaactttttatgaatcttcgagttgacagttcctaaaagcgtaactcagatattaatgggctgtgtattaaatggttttattttcagttttgcagcacagaacactgttgaaatatccatatcaacttgatttttttaacctaattcaggtgtcctttgcatctcttaaatgttgggggtgggggtcagagccagttatccggcttctgttttgtcgattgcttagatttgttcctgttgtcaaaactgttacccccaaaattggtgtgacacatgctcatgcataaaatgttaaaatgagtacatccttgtatttgtatttgttttcaacatcgccaaggtgctatgggaaattaacaaaattagaaaaaaaataaaattattaaaaagcaggactggtttccttttctctaggtggtgtatgtctaatgactacttctgtctacctttcagtattatatgttgccctcgctaattctattattattattgtctaagttgttttttggatgatgagggcagtgggaagtaatggtgtttcacttaaaacaagggcagagagacaagatacagctttatgatcctggggtattcttttagttattttagtatcagaagcagttattaaagggtgaaaaatggctgggcgcggtagctcacgcctgtaatcccaacactttgggaggccaaggcgggcggatcacctggggccaggagttcaagcccaccctggccaacatggtgaaaccccatctctactaaaaatacaaaaattagccaggcatggtggtgg

SEQ ID NO: 69511 - DNA, 1093 bp, Homo sapiens
tcacacaactcataggcattatttagatacaaactttaaatctgctgtaataaaataaatgctaaatacatactgtgaatatatataaatattacacacacatacacacacacacactctctcactcttccctatacatgccatcaaatgggaactattagatgtaatgaggcaaattaaattaaaaacattgtcttaatgagaaaatttttaaaggttatatctacaaattaaatttctactttaaataacatttgaagtaaaagcaaaaatatacttgctttcttctaaaagaaggctcttttcttgtatttcaattacaacctttaaatttttagagctggactaacagtaagtcacacaagcatacaagtaatacagacctacatttgtgacacattgtttaaaaaaagtaatgtttcattttaagtgcagtaattaagtttataatccttaccaagtgatttttacaaaatgtttattctctgaaatccaacgcattcaaaggatgttaacacttaaaacgtttatcatttccaccaactgcattatcttagtaaaccaaaataagcacttttatcatagatgtagtcaatgattaatatgtttttttaaaggacctaaacttcccccaaatttcagcacaggtagttttattgttatgtttcacctagtaggcaatttttaaaaatagtgtgtagaaatgaatagtttcaaactgagtaaatatagtagtataccatgtcataaaacaatcaaatcaaaagcaactgccaagctaataataagtcaaagaaatagtaattctggcttgtacagatatgtgcagtgttttcaaagctcttaacagttaaccactaacatgtatctccaaagcttaacttagagttggaagatgaatttcacagtaatgtaattttaaccaccatttacattcactttaatatattactaagatgtttactctatgtcacaatggtgctttccagtgttcacaatttacagtttcaatttgtacatatgtaatttactaacatatgggacagttcttactattacaaactatcccttaaaagaaaaataaaacccacct

SEQ ID NO: 69512 - DNA, 2130 bp, Homo sapiens
cgagagccaccgcgcctgtctttttaaaagctaaaactgaaacggaaacagagctcctggcagataggaccaggagccacagcgaaggaggtggcctgtgattaggtttttataaatgggcaggtattaatcagggaaaatggagtaaaggacacgatagacatacattgctaagtctagtattggaaaaagtaaggcctgggacccctaaaaacttgctcgagagtgaaaggtaaatgctatgtgtccacactactgtggtaaagccgacagtccataccatgagcccatttcgcgcagggaaattcgagtggtgggcttgggcccgtcgttctggtagcttcccagtagagggcgccgtaagcatatgcgtcttcagcctgactgggctggagaggcggtgcgtcctcctggccggggggcgggggccgtcgcgctcacgtgacctttgctcatggcggcggcggcggcggcggcggtgctggtggtgctcggcggccggagccggatcctgtagccgggtgtgggcccgtgtctgtccgtccctccttcggccccctctcttgtcttccggagtgtggctggcggagctgggatggcggaacgaggcctggagccgtcgccggccgcggtggcggcgctgccgcctgaagtgcgggcgcagctggcggagctggagctggagctctcggagggtaggagccgggccggggagagggcgcccggggccctgcggatcgcggcgacttgggagacaggtccccgccgcgcgctctggcggccgtgcggcgagggggacgagggtgtagagaacctggcctggcgctccacgaccgttttccctcctctcccaccccattaagtggtttcctgtggctttcattgttttcccatggaggggactaagtaagggcttgtggaaaggtcctcccgggcccacactgcttctgcgcttcctgccccccaaaacccgagacaaagctgcgccctcccgcttctgcccaggcgtctggcccaggtggggtgaggggtagggctgcgaggagggtggctgacagctttctcctttcctctccccttttcgtggagggctccacgccttgttccagcccccccttccccctttcaaaaagagacacatgggaaatccgcagcatcatttcttctctttcctttaacaatgcgcgatgcctccccagtgacaggagtgagacacaagcgggtgagccatttagggtcctaggaagataagaagcaatggcattaacccagagagacacacggtgctgcttttagaccacctttgtcataagaagtttttttttttcctggtgcctgttattcgggccgaattttccgcatctggtcaccttttggagtctttgatgaaggaaggagaggaggctaccgtttacttgcaaatcctggctggcattctttcttttgacaatggattgggacagggagggttcgatttattttcagaattaaaaaaaaaaaatgggataaatcaagccactgttattagagaactccttgtacaacaatgagagaaacacagtgctccgttgtgggcatgtgatcaggcttctggggcagttgtgatcagttctgtgtaaagttcctgtttttatcactggctgcccctgagacaaaagcagcattttctccaagcttgataccagtactttgattgtgtctccagagttgcatattcttactgagttccttgtggaaggccctcttcactagcatttttcaagtggatcaaaaactcttgattggaaaagaagaatgtgaccaactcccaggagcttattaaacattacttattgtttacttattaaggcattatggttccctcccctctgagaatcctttacaatgaaaaaccaaaaatagagttgaatgttataaatcctgttgggcactgaaggaaataattatttttaataacccttttaataacccaatgtgtaggaaagtgctgtttttacctgtacttaactatcaacatgttatttttcaattaatccaattttcaagttattcttcggccagtcccgggaatcactggtattagattagtttgtttctgtgaagtgtttaagaagataggaatcctctggg

SEQ ID NO: 69513 - DNA, 1363 bp, Homo sapiens
ttacatctctgggtgtttctagacatctctagaatgtctagaaacattctgaggaactatttctaggacccacactgattagctcacctctctctccttcagaaaggtgtgaaacttctacaaattgtgaatgccaaggcttaaacattttaaggacaagtgcatggtttgctttccaatgaaggattattttggttggcatctgacttggtttgaatttgtttcttatagatatactacacttcttgtatttcatttgttttagcaatggatgactggaaaaaatacaattgaaaaacttgggcctgcagtgtcagcatattggtcatctttcttgcttaaagtacaggggatggttggctggagaagtggatagacattaggaattcaagtgaagttaaaataatccaaaagtccccatatctgtgtagtatggtgttatttgtgatgcctgtagcatatttggagctaaggtttgttcgttttgcattttctctacagttactctgctctaacataagtactttgtctttttttgttttagatgcttttctttcgtttgttttttttgagatggagtctcacactgttgcccgattttagcttaccgcaacctccgcctcccagggtcaagcagttctcctgcctcagcctccccagtagctgggattacaggcaagcgccactactgccgggctaattttttttgtatttatagtagagaccgggtttcaccgtgttggccaggctgatcttaaactcctgacctcaaatgatccaccaacctcagcctcccaaagtgttaggattacaggcgtgagccaccgctaaagatgcttttaactgtgtgtttatcatgccttgctgacattggtgcactcatttctctattttcattttttctttctttctctctttttttttttaaggttcagcctgtcattggtcctaatcatagcaataatctgagctgtatgctgttaaagaattttctttgtgcttgcctgtattttcagctgcaggctttggtaatagatcagccaactctgtgctgaaatgcaggtttgtgcctgctttgggctctttgctgcagagcgtgttgcagagccctgtgatgtgtctggtgcttcaggcaggtcaccaggcagcttcctggttaaaacctgcttctgtcacaaaaagaacaggctgaaactgcctggaaatcatttaaaaactgaatttccacataaggatgagcttttctatagacgagttgaataggtagaaggtttctgcaagtatttctgtgactgaaatttttaatgatccacatattttattatatgcttgacagctctgttgtttggacttatgtatatgg

SEQ ID NO: 69514 - DNA, 1102 bp, Homo sapiens
ccttttttttttttgcgatggagtttctcttgttgcccaggctggagtgaaatggtgcgatctcagctcactgcaacctctgcctcccgggttcaggtgattctcctgcctcagcctttctgagtagctgggattacaggcatgcgccaccacgcctggctaattttgtagtagacacgggttttctccatgttggtcaggtgggtctcgatctcccgacctcagatgatctgcctgccttggcctcctgaagtgctgggattacaggtgtaagccactgcacctggccctaaacagttctataccacagtgttgattctctctctgaaatctctttcaaatccatcacttatgcattcagttcagcagatgtgtattttgtgcctactgtgtgcaaatgagcaggataccctggtagcttttaagaagctctgagtctgccagggaaatcattgaaaactgccaacaaaacagtgcatgaccatggtggagttatgtacagaggctgccttctaagaaaagaggaagctatctgctttatcgttgtgagagatagaagagaattataaatacgagattggattgtgtggctagtagagcgggctataatttagcctgtgcagttcagccataagtgcaacgcgaagaatgttcctatacttctgtggcatgcaggaaggagctcaagtctttcagtgtctgagaacagtccaaagatgacaactggaaaggtatttaagataaaataacactcacaggaagggatcctcccttttcttgtttgaacacttctctgagtacaaacagtaaacatagtcccatcctccctttctcctgtctgtttcatcacgtagctttgtggtccttaaagcatggcacagggtctgccacgaaggcaaagggataagagaagactgcttcctaggaattgcagtgacttttaatggggaagaggtgggagagttgaagaggaaaaaggagatgttggataaagattttacagtctcagaagggggcagttagacttaagccaccataaaactggtaaattcctcctgctttacctatcatgggaaacggggccacttatcccaaaatccgt

SEQ ID NO: 69515 - DNA, 1031 bp, Homo sapiens
ccgggcgcggtggctcacgcctgtaatcccagcactttgggaggctgaggtgggcggatcacgaggtcagggatggagaccatcctggctaacacagtgaaaccccatctctactaaaaatactacttgggaggctgaggcaggagaatggcgtgaacccgggaggcagagcttgcagtgagtcgagatttgggccactgcactccagcctgggtgacagagtgagactccgtctcaaaaaaaaaaaaaaaaagaaaaaaaagaaaaaagaaaatctcaaaatctcataaagagaatgggaaaaggctgcatttgtcttggaatttataaatgtattcaaaaatttttttcatctttgttgatgcatatttctgtaatagttttttcctgtcttaattttctctcataaaaggaaaagatttgatattcctgagtcatcactctcctgaaatctcagttttactcagacctgtgctatatagagtattatgttcatgcccatgtctgatgtggagggagagacacagacaggagagtgggtgactgactcagatgtaaatgatcttattatacttgagctgcaaccacacctagaaaccttgacaacaacagggcctgtgtttgatatatctcacttgttaaatcctgtctggattttagtatgtcatatgtgtgttcatcagcaaaattgaacaggtgctggaacaattgcaaagctttaatcagacttatgattacactgtttctcgttatgattaaactgtttctcattttggccaaagaatatgacacaataactaaaacaaatttctagttgtttcttgtgttgtttattctgttcagaggtttcttttctttttcttttttatttcttagacaaggtctcattgtgttgcccaggctggagtgcagtggcacagtcttggctcattgcaccctctgcttcccaacctcaagctatcctcccacctcagcctcctaagtagctgggactacagatgtgtgccaccatgcctggctaattttttttt

SEQ ID NO: 69516 - DNA, 1035 bp, Homo sapiens
acttccttaactgattctttttggttttaccctcatatctttaagcaacatgcatacatttcttcttaattttcagtacttttgcatcatatactggcttcccaccttagctacccacccatgcttccataccacttttccctccatatagttatagcataattttgattaaatattagattgatatttaatacttaagttatgactatgtaaatgctgttgatagctaaatcatgtggtatacttttatttttttcttttctgcttagattttgttttctctgtaattgcaagatgttttatttgcttattttctatgtatttgtcattgatatgtctctatactcttagttgcatgaatctgcctctatatgatcgctcatatcaggtattctgtcagtttcaccttgaataggttgttcctggaatcttctgaaatgccttggcttagatggattggtcactgggtgcgtggcatggcggtagaatggatcagccgtctctagtttcttagggatttcctttgctttgtgtattgcatcctgtatattctgtgtctcgtgtctttacctttttgagcttacttcttcactttggttgagtgcatctctgaaagacatctcgccgctccccccccgcccctttttttttcttttgagatggagtcttgctgtctcaccaggctgaaatgcagtggcgccatctcgactcactgcaacctctgcctcccaggttcaagtgattcccctgcctcaggctcccgagtagttggaactaaaggcgcgcgccaccacgcctgcctaattttttgtattttagtagagatgggggtttcaccgtgttggccaggatggtctcttgtctcctgacctcatgatctgcctgcctcaacttcccaaagtgctgggattataggcgtgagccaccgcgcctggctgacatatcccattttttatctcttttttggaatataatattcttgccctcaactcttcctagtgtcccccattctagagaccctctgtttgcccttct

SEQ ID NO: 69517 - DNA, 1034 bp, Homo sapiens
tattctaacatctcaagtagcaaaaagtggaaatgaaaaacaattgagggagctatcagtcagagatggtagaatgaatatctctaatagcccctgttttttcctcatacctcattaaatgacagtaagaaaaagcattaactcagaagaacaaaacagaactgcagaagagagaacagcaacacaattttggaaactggcaagtgggtagatgaacgattactgacttagtggcaatgggggagcaaggccgtttacactttgaaaacccagaaggctcaggagtgggtgcaccagttccctctggaaatgggggcaaaagtgggttgcaaagagaaggattcactgaaagtttaagaaaagactccagagcctccctcttcttctatgaagccaagagaatgtcctttccttaccctagcagaagactggagatttattttctgcaaggggaaaatagagagtctctagaatagggaacaccaggtgcaggtgagggcaaggagagcatactgtcaagctcttccaatttgtatataattctttccatacccagtagcatgtaccaaggtggattcagttctaaactcagaacatgggtgattaggtgatcaccccagtacttccccaagggacagacttcttattaactcctctccactgagtacatcactaaggcctttgggtgacattttatttttccttttctttcttctcctgtaatttagtagttaatcttcacagaaaagaggaagatggtgtaattatttgtcttttttttttttttttttgctgggctggcataacaaaataatgacgtttaaaagattcaagggtagatattttctttggtattataccaattttatctcaacagtttgactaaccaacaattggtccttaaaaaaaatattattaggctgggcatagtgtctcatgcctgtaatcccagcattttgggaggctaatgtgggaggattgcttgagcctaggagtttaagaccagctggggcaacatagcaagatctggtctc

SEQ ID NO: 69518 - DNA, 1041 bp, Homo sapiens
acccagtcttataaccttatcttttaaaatgtgcaatagatgttggaaacagtagaggagctgtgccctgagccctggacagtgtctggaatgatttgtagaaaagcccattgtagcactaatcacttgaggtactgtttcagggcaattttatttttctaatggaatcccatgattggcatagttcaaacagacagaacccagacaggaggcagtctttaaaaatggttagtccaattttgtttacatttcttccctttgcagaatgtgtattttcccttcttcagactaaaaatgtcacagtgtgatgtatgctgttgtggaagtattttgcatgaaatcactaaattcatttattcaaataatttgtcttaggctttttaaaagtgaccagagataaatatttatgaatcatatttaagtatttggagggcatttcaagataagtatatttaagataatttccttgactatgtttgatgatattaagggttcttagaaatcttttccaaaatcttgcaatctgaaagtgaatggaacattcagaattaactgtagtcacaattgtgtctttattgttggttggtcttgcctgtttcattttacaaacaaatgtgaaggacaatactttctccatcaaaatagataagaaactttcatataaaagtaagacaggaaactaatgtaacctttaaaaaaaatcttgaattatcttattaagattacaatagataattagattaatctaaaattagattgttgtttagttaaacctgattttatgatttagaaaggccaataaatagcacctctcttctccacacgggttctggataaatggcaaaaaaccaaactattagcagatgagggccataatattgcttttattactgataaaggtgatggtaaaggaagcagcttaaggttagagccaaattggtttgctaagtgaattccatcattattcagacctaccccgtgggcacagtggtgctggattggagaggtcatatgcagtatgcagaccctccactcaacgca

SEQ ID NO: 69519 - DNA, 1069 bp, Homo sapiens
gtattttgtacacatttatttattttttaagaatctactttttataacggggtcatgagatcagtgagaactaggtatcttcatcccatccctgttcaccagacttcaatccttatgctccctaaggtaaatttaaagagttataacttcatatttgaggaataactagaaacaatctaagttgtcttgtctgttcagaatctctcccaaagtttttttaaaaccttaaaaaaaattttttttgaacttctctagtggaagctcgaaaaaaattttttttagatcgaatcccagacaagatcttgatataggcctttgagactaaacatagtaaatctatttcagagcctcaatatagtgtctctctttctactttcatgttactggtaatgaaatctttgagaacaaatttccccatacttttttggcctaaactacttaatacgtctttggggagattcctaggttgccttatggttgactttgattcacagctgtcaagttgttgagctgttcatactgatcctattccctgatccagattaatattaatagttttcttctcggttttggctaacttctcagagcatttgggtatgctgtgggctcatttactgtgtgtgctttttttcttcacatctgtggtgtcaacatgtttgaaagagaaatagctctgtggcttcaagtgtttctcaaaatgtatcacagggtacctctagccggctatcacagtaagacagtttgtgtctataatggtgcatacctcaaacctactcattgaaaatcttggatggtttcccttccacattagtacagcacaagttgggtcctcatggacaaagggggctctcagtttagtagctattcctttttggcagattacactgcagtgtggctgagggttcagttgcagtaaatggcaaagggtagggagcagcatgacatgtagttcttggaaataatcccctccaaagctgtatcaaagacatgcagtttcagagtaaataggctgcccttatggctttgggtgaaatgtgagaatgcagcaaagaccttgagaatgctcaga

SEQ ID NO: 69520 - DNA, 1236 bp, Homo sapiens
ttcgttatatataagagcttagggaagatgttttatttataagtgataacagtcatgagtttatttttaatcagagcagaatcagtagggaaatgataaatttctattatttaattttgcccaaatttctacaaattcataacaatttcctgggtgacaaattgcttttaaaataatatttaagggaccttgttttgatttttaaaaagatacaatcccagagcagtgctacattttatgtagacttcactacataatcgtcttttaactttacccggatagtttcttatctgtgaccataggttgagttattcatagtaagcacctcatttctcaggtggcatcatttggcacagtattattttcttctaccaactgttagtcagtttctgctatctttcccttcatgtttataggaagcaattagccatttaaattactcttaggaaaaatttcaggttattccaaatcaaaaagaaatacacattccttttaaccattctcctggggattagaagaggaattaatgttgattggccaggtgctatgggctggcaccagtatgggtgctttctgtacagtgtctttgttcatggtctcccagctatggttaggataaaggcaagtttccttagcttgtcttacaaggcccttggtggcccaatgctacctacttgtccagtctcatctccatgactatcagtcttgcatctgtgctctggctagtctctgtttctttaatatctttaaaaagttttctgtcccctccaagctttctcgcgtgcagccccctctacctgacgctgcactctccctacctctgggcctttcataactaatccctacttagccatcaggccttgggttaggtcttacttccttgggtgcctgccttgaactcctctaactcatctcagtcccataagaatagggactatgtcttcttgcccaactttttattcctaccaactactgtagtgcttagtgtgtttgtcaaatggacgaataagtaaacagtcttctcagatgggtaattttatccccaagtcacatagctagtaagaggtggatcctagagtttgaatggaagactgacaccaaagccatgtttttttccactacgctaagctgccccatagttgtaagtcattaaacactgaagactggcagacaaacagggtaactgaattgaaacaatacacctaattgcataattgatccaatatagaaacataa

SEQ ID NO: 69521 - DNA, 1047 bp, Homo sapiens
acaggaatatttgtgtcccggggtacagttgaaatgttagaatattttctgaaaattacacaaaatgctttccttaaaggggtacagatgtgattacttctttttttctttaaattttcttttaatcaccccccttttgcatgatagatctcattcttctttatggacctcatcactttatctctttgggatctggtcactatttatctctccaccctcatttttttcatttttttgccttactcttcaaagtctttgctctatgtacaaagaagtacttgaaatccctgactgtggttggttcccatcctgcgaaaccctttgattactcccgtttcttagcatctgttttattcttttgaaattatctgtgggcttctgtgtctcctgtaagcctttttagggcacttactgtgtcataagcactcatacacttcacaacccctaggacttgacatagttcctggcacatgttgtgattagtactttttaaaaagcaaaaacagtcacaggcttcagaccttcctcaatatgaaataataagttggaggtagtacagaacaagaagcaagggtatagtcattatataactttctgggttttttgtttttgtttttgaaatggagtctcactctgcctcccaggctggagggcagtgatgctatctctgctcactgcaacctccgcctcccggtcttaagtgattcttgtctgcctcagcttcccgagtagctggaattacaggtgtgcaccaccatgcctggctaatttttgtatttttagtaaagacagggtttcgcgatgttggccaggctggtcttgaactcctgacgtcaagtgatccacctacctcggcctcccaaagtactgggattacaggcctgagccactgcatccggcccattattttaactttctctcttgctctggacctgcagaatttgacttctagattagatgagtcttttgtggttcaggttcccattgtgaggtgccagcagttttccagccccattggttatgtatttggctctttgaaccaaagca

SEQ ID NO: 69522 - DNA, 1009 bp, Homo sapiens
gggtttcctaagtaattaacttaatgcttaagatggtttgtttgttgctaaatcaccaaaaggattaagtgaaaaattgtgatgaggacgaggatgaatgcgttatagttcccaaaatgtgtagtataatcgtgggcatgtcggagatctttttagatgtgtgtctctatctcagtaacttaatttcctttagagcagatggctgttaaatagtttgatttattgtgttcatgataaatattacatacttagacagtgacattgaaagcattagtatgtttttattcctctgttaaactgaatatcattatgaattttaggtagccctggtttaccccaacaatgatccagtcatgtttatggtggctttctatggatgcctcctggcagaagtgattccagtgcctatagaggtacctcttaccagaaaggtaacattgctaaatttaagaggaatgtagcctgatgtgacatggcaggcattgggttcttggatagatgtagtcacaacagtaaaaactgttcgaccatttttggaagtactcagcttcactttctaaaaacaggaaatttgtagaaaaattatttattaaatattcacaagttttatgcaaataacatattttgtattaagatagagtttgtatagtattgcatatcatttaaaatatcactggggcgaggccgggcgcagtggctcacgcctgtaatcacagcactttgggaagctgaggcggggggatcacaaggtcaggagatcgagaccatcctggctaacatggtgaaaccccgtctctactaaaaaatacaaaaaaattagttgggcgtggtggcgggcgcctgtggtcccagctactcgggaggctgaggcaggagaatggcgtgaaccctagaggtggagcttgcagttagttgagatcgcgctattgcactccagcttgggcgacagagcaagactccgtctaaaaataaatagataaataaataaaaaataaataaatatcactgg

SEQ ID NO: 69523 - DNA, 1144 bp, Homo sapiens
aaaattagccaggcatggtggtgcgctcctgtagtcccagctacttgggagattgaaacagaagaatagcctgaacccaggaggtggaagttgtagtgagccgagatcatgccactgcactccaggttgggtgacagagagaggctccatctcataaaaaaagaaaagaaaaagcatttctgaaaggaataaaaaacaaattgataacatcccctaatctctagttgttgggatgtagtatccttcatttgatcaggaaatcatatgattgttcttaaattattaagttggcagaatttgtgtggtttcataatgatgcttgtaagatgatattttaatggaaatgttttagactatatcttttgttgtttttgctgctgtttttgtgtaaggcttaaatctaccccctttaaaaacagaaaaataaaaggattatacagatttggtatatccatccattgactttcattgtcagcttggacatttagtatccatttacattatttattttgttcatacctgacttgcttttctctcgaattttggagtgaggctaggggaagataaccatgttagcatttatttaatttgctggaaactaatctaaaataggatcattgctgactcttgaataaaatggttacatttgtctggtaggatttatcatttgtaatgtctggttaataaaatacttgatttgtgctcaggaaatgtttgtattgtggaaattatttggaagaacacattgtgattggattttgacaattgccagatattggtggggctccatgaatgttatcaaacaaaatgccagagcattactaagtgtcagatatgggcatgagtgtgctcacattcgctcccctacctatgttcattatcatttctccacaggatgctggaggtcagcagattggcttcttgctaggaagctgtggtattgccttagctcttaccagtgaagtttgtctaaaaggactgccaaaaacccagaatggagaaattgtacagtttaaaggttagtaacattgtacctgaattatcagttaaaagttaaaactgagtgctttaattagctttttaatttagtaatagctaggtactttacatatatgttctatttaattctcatagtcttatgaag

SEQ ID NO: 69524 - DNA, 1120 bp, Homo sapiens
aggaggcagaggttgcagtgagccgagatcgcaccactgtactctagcctgggcaacagagcaggactctgtctcagataaataaatacatacatacatacatacatacatacatacatacatacatacatacatacatacaccagtcccagctaccctggaggctgaggcaagagaatcacttgagttcaggaattggaggccagcctgggcaacatagtgaaacccctgtctcttttttttttttttttttaaagcatatgccatatgacagcagtactacatgtccatatagggaaatacttgcacaagtccagggaaggaagtaggaatgtgctccttgaaacattttttgtagtagcaaaaaattgtcattaatagggaaatgcctaaataattgtgatatagccaaacaatggaatactgtgccgcagttcaaaaagaattatgtagatctcttatactgatatgcatagatttagctttagaacaatttaaatgaaaaaaacaagttacagatatatgtataatatgatgtcttttatgttaaaaatacttatatatttctatgggaacaaatatctatgaaaatgcattgaaaaaagattggaaggatatctgtcaaatttgtaactgattatctctggcgaggagaggagggaaccaggtttgagggtaggtattaaaggaacttcaatcttatatttaatatttaagattgttttcaaagagtgtgtatttgagtattacttgtataattaaaattgctaacaaaataccagctcaattttaaaatactaagtatgtattttgtattgattacttttcttctttctttgtttttcagaatgtaatgaataagatgcacacaatcagcgtaccctactctgttatgaaaacctgtcctctctcttgggtccaaagagtacatgctcacaaaggtagtcacctgcaacatctgagctttaattatgtgactgtttgaattaagatttcagggatttcagagattttcaaattgcccttgtatgcccctgtcccttaacaaattgtagagtttagttactacagaattaggtaccttgcctgttcatctcactgatgtcctctcttaagcatt

SEQ ID NO: 69525 - DNA, 1050 bp, Homo sapiens
ttttaaatttaatttttgagagatggggtcttgctctgttatccaggctggagcacagtgacacgatcattgtagcctcaacctcccaggctcagatggttctcccaccttagcctcccaagtagctgggactacaagcatgtgccatcatacccagctaatttttgtattttttgtagagatgggggtcccactgtgttgcccaggctggttttgaactcctggcctcaagcaatcctcctgccacagcagttgctgggatcacaggtgtgagacaccacacccagctctaatttggcatatttttgggagagaaaatggagaatttttttggtattgtagccagaggaaatttgtcttcctatgtatttgtatttttcccttgatgttatttcattcaccaaacttgatgggttcttcttttcaggcctggagttccaggagcccctttgccaggaagagccattctctcaatgaatggattgagctatggggtaatacgggtcaatactgaagataaaaattcagcactgacggtccaggatgtagggcatgtaatgcctggtggtgagtcgcaaggagcatcatttggtttttcataaagatttgtcatcagagataatagagcctgataaaatacagaatcccaaacgaggaacccttaattcagtacttaacgcatttaatttctcagagcctctctaatagttaagtcattataattatgctgaccttccagcagtattgtatgacttaccagttgtgaatgcttcaagtccatttctttacctggaaggccaaatactgagagatgttaaagttacctggttttcactgtaattgccaagccattgggactggcagaaaattagagcatactgcttccaagagtgtttgagtttgacctgcctaagggtaacacctcattcatctaacctgtttatttgggctttgcattcatcgttaatatgtcactgtctctacaagctttacatttcaaatatacctatgtagtttcaggtttatgtttagcattcctgtctggtattt

SEQ ID NO: 69526 - DNA, 1050 bp, Homo sapiens
agggctcagaaaaatccaggcacttgcctaaagtctatgttactagtaagtggcagagccagaaattgaattgacaccaacgactatgctgtcctgtcccccatggagtggctgagtgggctaagtcaactcttactaacttggaagggtatctgagatatatttcgtggaaaagcaagttgcaaaaagtataatatctgtttgaaaaaaaaaaaaactcagcacatttatttatatatacatattttttatatgttttatatatatatttatatatgtatcttcttaaaagtctagagaggtaaacaataaattgtaattatttcttatctctaaagggatggaattactggattcactattacattattttttcactgagcatgtattttaataaaactttttaaaaatcacatatactttctaagaaaaagcaaagtttttcacttacttcattttgtctcttaggtaattccagtgaattctgcaggctctcctgttggggatgtgccattcatccgatcaggattgctggggtttgtagggccggtaagtgatgctttcatgttgattttgttacatttgatccaaatatttggactttaattcacagaacagaacaaattctgattagtccaagagtgttacagaaccacttcacttatatttaaagcagttcttgtaaggatgtcataaaatgagttagtgtttatcatttccactacccaagttcatttgactccttcaaactaagacattttttattttctttttttccccgctgagatcagaagacatgatgagactttttttattttaagaactcttttcacttattctcactatctcgctctgatttgattaacatgttgcaataagttagaagagtgctggaaaaagttatcttcagtagcaaagacaaactataatacatagtatacagagcattttcatgtaaatgattggcactatgtgatgtgtaatagtgatcctttgagtgaaaacagtttgggccgggtgtggtggctcatgcctgtaatcccagcactt

SEQ ID NO: 69527 - DNA, 1050 bp, Homo sapiens
ccatgtcagaacaaaaaaagaaagaaaaagcgtcccatacatgtctttttgtttgattttattttattattattttttcttttttgagacagaatctcgctctgtcgcccaggcattggctcaagtgatccttccacttctgccccttgagtagctgggactacaggcatgtgccaccaccacacctgactgatttcttttttgtatttttagtggagaggagatcttgctgtgttgcccaggcttgtcttgaactcctgggctcaagcagtgctcccacctcatcctcccaaagtgctagcgttacaggtttgagccaccctgtccagccccacacgtctttgatgctaagggaattttcactagaattgataacttgctaaggataatctacaaaagcacaagcctttcaggtatgatgttgaattggctgtgcttattactgtttatttcctttctgagctttgacccgcttatcctttctgttgtttaaagggaaccactgtatgcacagccagctgccttcagcttcataagcgagcagagaggattgcatctgttcttggtgataagggacatctaaatgcaggagataatgtggtgttgctctatccacctggtaagcattggattggcagactagagtttaagctccaatactagactgactacaaattataaaaggataggcactcagagctactctctatgacttgcaagcagtgtacttcccaacacttagaagaccatgcacacaggccaaagtgggaaccaatcctcaccccccaagttgtgcagtacagtggctctcctgggaccatgtctgtttttgtacctttagatttctattagtgcctggcacataaaaggcactcagtaaataatgaatgaatgaagtcttcagctacttggcttttggaaaccttcaaaacagatgctttgtttctatgaatgttcaggaatggggcaatttcacccagtccccaaagaaatgttgtgcgtgaattctgtgaacatttttcgtattatgattgatgttactcaggagga

SEQ ID NO: 69528 - DNA, 1010 bp, Homo sapiens
ctgagtagctgggactacgggtgctcaccaccaagtctggctaatttttgtatttttagtagaggcgggatttcgccatgttggccaggctggtctcgaactcctgacctcaggtgatccgcccatgtcggcctcccaaagtgctgggattataggtgtgagccaccgcgcctggcctgacaactttaaattccactttcaaactcccaggagattctggacaactcagctgtgttcacaggggcaagatgtctctcatatatatatatattcattatataatttttccctcagtcttatcaggtaaaattgaaaggtgtcatatatggtagacatgactgctgacgttctggttgggattgaggggagaaggcggggaaatgggctaagtctgggacagatgctataaaagataactgaaaaatgtagtgacaagttaatgaattgtcattgaaatttcagtgccgtgttcacatggaccaacttgcttgtggtggttgtggaactgtgcggctctgaacaggaagccctagatctggtcccattagtgaccaacgtggtcctggaagagcattacctcatcgttggcgtcgtggttgtggtggacccaggtgtcatcccgatcaactccagaggagagaagcagaggatgcacctccgtgatagcttcctagctgaccagttagaccccatctacgtggcttataacatgtaaccagccttgtggggactgcagtgggccattctgaagaatcacaaagacagaagacctctggctaagagcaggcttcaaacgatgtgaaataagctgagatggctacatgatattcttcatctcatcctgtgggattctgcaatcataaaacacaggaaaggggaattctgtgatggcaaatgaaaaaaatgttaacatttggtagacatgtgctttgacatagcgtgagcagcacattactaaagcaattacatgcatgttgcatttttttcatctgttgtacatagttgtattt

SEQ ID NO: 69529 - DNA, 1828 bp, Homo sapiens
gtcctttcctcatgaagttgtgttgcctcaggctgtttagggaccattgcctgtcttggtcacatgagtctgtctccttactttagtccctgggcaatccttgcttaatgcttttgttgactcaacaagggcccgaggccttaggttttctattaaggtctctgccccaggcatggtgctctatatcttggccaaataaattactttccttgaatatccaggaatcttttagtctaaagcaatgaggagttatcacctcatcctcaaactccaacaagatctatgccttagtgttgtttttgttgtctgctttgatgtaaaagcaagagtatttggagcaagaagctgcaatgcgccaaatacacaataggccttttctttatcattcatacgacatttctggtttaggtgtatgtagttgggccatgttacttgtccagaggaagagactaaagatataagaataattttttagtcctaaatgctgttttgtttactttctgtcaagatatttacccgtgtcaaattcaaactacagtactgtgtaattatgtataaagtttttttatttatttgaagttagactagatatacgtttttaaatttaacatctggctggacagtgttctattaactcattgaatgtgtttcctttgtcttgtgttaataaatattgatgcctgattctgtttaatccttcacacattgggtggaggctagggaattgatagattttaaatttaactttagatggtaagacccagtgatagctggggtagtctaaggaaagtgaacacagagatccagagtcagtgctattaaaggatactaggtcagggaatcagggtgtcactttgaaaactaaggagcctgttgtcaggactcttcaaggtaataattatagtttagtcttcctcccactcatgtagcatttggtagttgtattttcttttttaattttttgagacagagtctcactctgtcacccaggctggagtgcagtggcacaatctcagctcactgcagcctccgcctcctgggttcaagcgattctcccaaagtaatccccagtagctgagattacaggcatgcgccaacatgcctagctaatttttatatttttagtagagacagggtttcatcatgttggccaggctggtctcaaactcctgacctcaagtgatctgcccttctcagcctcccaaagtgctgggattacaggcgtgacccaccatgcctggcctaaatttgaattttttctaatctgtaattaggctggattttagcttttcctaaaatgagatttcatttgctcttccaattcctggtttcaagaaacttggtgggagcccatcaaattgtgcatgttttcagacaccgaaagtggtccttgaattatttcattgatccagactactctggcagctgagaacattttttcatgtcacagcactgtgataagagctgaagccagagagaaaaaaatatcaagtcactgctctcaaggagatataggataacaatcacaatacaatacaagggttaagagcagacatgcattgtgagagcaggcaggcaaggcacatagtctgatggtaagggaggatagtgaggagtagggaacctctgacctgggtttcagaggataagacagccagataagatagtgagcaggaaggcagagtcgcatattctgggaactagaattcattattgggattactgtggtttgaatgtatgtgtctgcccaaaattcatgttagaagttaagacccaatgtgatagttttaagaggtggggccttttgggaagtgatcaagttacgaga

SEQ ID NO: 69530 - DNA, 1050 bp, Homo sapiens
tccatctcaaaaaagaaaaaaaaaaaagaaatgctgttttattccttttacatgtagttcacctaaagtaaagtagtctgcagttaccaagtagaagtgcattcatacctgttttagtaaatagtgtttgtgggctttttgccactcctttgaattagtgtattatataaccttacaatagctattttctctttttgattaaagttgccattgccccaaatggagccttacagttggcaagtccaggcacagatggagtacagggacttcagacattaaccatgacaaattcaggcagtactcagcaaggtacaactattcttcagtatgcacagacctctgatggacagcagatacttgtgcccagcaatcaggtggtcgtacaaagtaagtatgctttctgtctacagaaagtctcctaacactgtcagagacacttactaactaactcattcactcttgtttaccatctagctgcatcaggagatatgcaaacatatcagatccgaactacaccttcagctacttctctgccacaaactgtggtgatgacatctcctgtgactctcacctctcagacaactaagacagatgacccccaattgaaaagagaaataaggttaatgaaaaacaggtaggtagtaaaatcgtagtaccagaatgggtaatgtttttacaaatctcacaacataaccagatgttaactggaactgtatacagtcatgggctgcatgacaatgtttaagtaaacaatggaccacataaatgaatgacggtggtcccataaaattataatggagctaaaaagtcctgtgctaatgtcatagtgcaacacattactcacgtttgtggcaatgctggtataaacaaacctattgtgctgccaatcatataaaagtgtagcacatgcaattatgtatagaacataatacttgatactataataagttaatatgttactggtttatgaatttactatacttttaatcattattttaaagtgtataccttctacttttttttttttttttttaaagttaactgtaggcc

SEQ ID NO: 69531 - DNA, 2074 bp, Homo sapiens
cctggccaatacttccgatttctatatgtatataaacttacatatgacttcacagaaatgttttaagaggacatgcacagaactgagtatttgctcaagcattgtttgtaatttgaacttaaataaaagaagtcatgtgtcagaagttaaccagaggacccataatttcactctttggtatttattcaagagaaatgaaacctttctacaaaaagactggcacaaaaacatgcctatgcagctaaccctagaaacatcgcaagagactggatacacaaatggtggttatattcatacagtgaactatgtccagcagtgtgaaggaacaaacccccatgcagcaacatggatgaacctcagatgggctgagtgaagggacaccagagtacatagtgtatgacactcttacatgaggttctagaataggaaaaaaactaatctctggtgataaaaatcaaaacgatagttgcttggaagggggctgaccaggaaggggcatgagggaactttctgggacagtgggaatgttctgttgtcttgacagaggtgtgggttatacaggtatacacaattgccaaaactgactgaattctacacttaagatctatgtattctctgtgtgtagatgatactttaaagagaaaaaaaggtgaccacggaaaattactgaagaacatttaccatttaaagaatgtgaagttttttctaacattgtttttttaatgctcatatttagagaagctgctcgagaatgtcgcagaaagaagaaagaatatgtgaaatgcctggaaaaccgagttgcagtcctggaaaatcaaaataaaactctaatagaagagttaaaaactttgaaggatctttattccaataaaagtgtttgattcctaagaaagaaaatatttttgtggacatgcataaaaattaaatggatttcctagtggagttttataaattaaaaggtcaaaactgaagctttttatttaggcttttccaaatcaaggataaatatcttacgcacgatatctagtgacagaggagaaagtggaaaatgacctcaaggaagctacgggcacaactggaagctttgtagaaattaaacatattcaaggagcaagaaatgaactttcagcagtctaaattttctaaataaccaatagttgccaatctaaaatggcagagaagatgaaatttgataaactgaattttttttaaaaatccatttaccctacaggtttgcatttgtttgctgaaatttacctttttttagttatatatatgtgtgtgtgtgtgtgtaatttctgccaataaattctaaattacaaaggtaagagaaaacctagtacattactaaatatataaagtatatgttctgattatgtatacttgttctagtgtcaagtctttttaagtgggtttttaaaagtttgttattggacttgaatggatttttgagactaggttaattatttttgaggtcttatcctaaaaggcatctaaggtacatgaatggagtatggtgattttataacattttttatcagaatggaaaaagaactgtttaaaagtttgatacttttaaatagttggtttttttgcttactctggtaatgattttctacaaatacataataaattgtttttttgagtctatattctgtatgcagttgaatatccattacttattctgctgtgctttaatagaatggaatgtttacaggcccttaaaatattatttttaaaaaaccttctgaagatacataccaaagtttttccaagaagattttataatcaatttaataatgtaaggtttatcagattctataatagtatagttattaaggcaattttatgttagagactattttgtaatgtagtgagtggtacctttataagaaaagtgactgccaatatatttttatagctgatctttataaattctaatgttgagtttttaatgattattttaaatgtttatatagtttagtaaaatttgcatctcaaagtatcatttttatattatgggacgttttcagattggctaatatttgcattgtaaattttgtatgcagtttat

SEQ ID NO: 69532 - DNA, 1038 bp, Homo sapiens
attgtactctagcctgggtgacaagagcaagactccgtctcaaaaaaaaaaaaaaaaaaaaaaagaagtagagacagggagacagggtctcactgtgttgcctaggccggtcttgaactcctgggctcaagtgattctcccaccttgacctcctaaattgttgggattacaggtgtgagacagtgcacctggccgaaatagctcaagtttctgaaaaacaaatctgaatctatttgttattcttagcgtcactggtctggctttcagaattaacatacaaggttgccacacctagttctgcccagctttatgtcttttattccagtattccaccaaagtttgttttcctgcattccagttctcaagtcttaagataaagattgtacttgacagtttagtatatccataaaactatttgaggtggttaaggttcttgggttcattttccttaatactttgctgaatattgtagattgtaggcaatgaaaaagtctactaaattaggaaaaccttgaataattaggtatcctaggtaagagcccctaaacatcaagcaatctgtgagtctgtaaagaaataaatattttttggattattcttatctaattccacccctgttggaagatgatttctttgttctttgcaactatggaagctgtgaaaatcatcacaagtgcctctgaaagcgagtgttaggttggttagagggtttaatattttctgcaatggtttgtaggaattttaataaatgtagtatattttctgagatgattttgtaaaagtactattttaaatatcaaatcaaccaataaattcacatttgtgttaggaacagaaatatggtttatatctttgctggcttggtttcctttttcttaatgtctctgggaggcttattccttcattgtggaaattttagctatttaaacatgtaaatttttctttctacagccaggtaactataaacacagccaatagattttacacaaagcaatcctagaagtatcagaatgggttttgaaaagttcaagtccatca

SEQ ID NO: 69533 - DNA, 1076 bp, Homo sapiens
ttctccctcttggtacatgccatttcatgtttttgttttttaaatgaaaggcttttctctgctccagtgccaaaggataatagggctcaggattgaaaccattgggaatttgatttctaattcacacagtagtaaaatacaaaagcattctgcttgtttgttcttatcctgatttgaagcacccatccttaggcagagtgtgtcacaagaatagtcagagtgctaattttgctaaggacatttggtaccatctcagtccttaactatttcagctcctacctgttattttgcatatcagaagccattcatgtatgtatctgtaagccatttcttttctgaaataaaaatcaatatagcagtacagaaaaaaaggcctaaattgatgtgctaattataggtacttaaaagctgatttcaataaatacgtgaaaatcagtctaaccctcttccatctttttttccttagtgccatctgggattgacagctcagcctgaactctatcttctgaacaccatggacgctgactcacttgtgtctagatgactgacagcctgagagactctataagaacatgtttttctaagccctttttgtgccaggtgtcccgttaacgtctctgttagttcagaggtgagttttgttcagacgttttgaacaaaaggcaaagatttcctcatgggaagggtgttcaaaactgacagctataaatgtaggtcagagacccacccacctcataacagtcatacactcccagagttaaacgattggcctctgatggccacacacccctatgggcttgtgtcttggactctgggatttaaaagatatatatgtatatatatttatgtaaacctgagcatctcagtttgggtagagttttaaggttatatgaaactgatagaacttttgtattttttttttaaatattgttttgatatatcagatatttgttttgtctggatcacaagtgagaaagaaaagagaacaatgctctttttcacaatgaactggtcaaattgactatcttgtaaagtgatactttactatgtcagtgaaatttcagtttgattttagt

SEQ ID NO: 69534 - DNA, 3817 bp, Homo sapiens
agccaggaggattgcttgaggttaggagtttcagaccagcttgagaaatatagcaagacaccttgtctctacaaaaaaaaataaattagctgggcatggtggtgtgcgtctgtaatcctggcaactcaggaggctgaggagagaggattgcttgagcccaggaattcgaggcttcagtgagctatgattgcaccactatactccagcctgagcaatagagggagaccttgtctctaaaatgtaaaataataataaagattttaaaaaaaaggaaaaccacagacacaaagcagtaagaacagagaaattcaatatttaaaatagtatggacaaactttgttgaggaaggcagctgattttttgaagggggagtggggttgagagaatgacttgtgcaacccttggtggtagaagatgggcacagctggatgttcaaggaagggagcaggtttgcatttgagaagtgctgtgtgagcagtcatggctcttcaaagagcctggtgagtgatgaccatattttgtctttcagggttggcaatgtttgattgcactgggcatgtccttcctggactgtgggcatacggtaagcatctctaaaggcctgctgacagaagaagccacccgtggctacgttaaataacactggattagtctgtcttctgcaggtagccatcagagccagtgtgtttctatggtttactgtgtgaacatagccaaaagtatgtgccgttgcacagactgtgtttatgactcaaccgttggttggaaaagactttgtttcatgtgtatttgaaagatggaattattttttccttcctgacctaaccttagaactggattagggtgggatctttgaaaagctgacatttgctgctatcattccaacactaaattcttaagtagttgcccaagggccagctcagtttatccttcggagagacaaggatatgcatgattcttaaccaggctatatgttaaaaaaaaattggaaaatgcaatacattttttattatacaaactacagaatgagtatgcaagttttatttatcaaaatgtaatggatttttaaaggctgagaaattttccttatacctaccttttcagttattttaattataccaaattatcaactagaatagcttcatccatatgaaatataaaatgaagagacacctagctctatcaggcttaggattctttgaacttatttccactttaatttctcagtggaagttaagaggggtgagaaaacaaagaaggggaaaaactgacaactaacaaaaccagcaccacatcgctaggtggtgcttactaattaccttctcaggattttcctcagattgaaaagcttatgaggatttcttgggagtcttaataacctgcctgttagtacagagctttcctgatgatatttactcttgagcacatgtggttgtaaaaccttaactttctttctccaggagggtggtgatagaaacagatggtagtatttatgaactgatgttctcgtgaaatgttgagggtggggagaaaagactttaagggaggagagccatctattttgttcctaaagccacctctcagcagaatcgtcatgtttttctgatgcaccgctctgcttcatgcccaagatgacttgcgaggcaatctcaggagctgtggacttaaccgttgcaaagcacactgtctttctcagcgttctctgcaagtcagtaggtgttagtatggttgcaaagttcactgtctcagcaaagttgaactgggctacctctctacagctgtttcctcagagggaaaaatcttgagaccagatggtggagctctggagtcagaggaaatgggtgtcttcagcacaaagctgctgcttttacttcagccacttctgacatttttacataccgagcctgagattgtgtgattatctcaaatcaaatcactttgatggagataaataatcaaaactgttttatagtcattgatttggtgagaacagtaatggaaaatggtgttgaaggacttctcatttttggagctttccttccagagtcctggctgattggtgttcgctgttcatctgagcccccaaaagcattattactgatacttgcacacagtcaaaagcgcagactggatggatggtcttttataaggcatttaagggtacactactgtgtttcactgaccatacatttttcttagcccctcaagtaatatagcacagagttatgaatgacaattcccctaaccattcctcttcatatctgcctcttccccttaccatcgtaattctccaaactggtcataaaggcactctgtgaagatattggggactgacatcttaagctctcacctggctgcagtaggaaaggccaaactgacgacaaaaaaaaaattctttataaagatgatatggtaacatgtatctttgccctgggtctgggtgggtccagtcagtctcagatttacaagcatttaggagcctaggtaaaagctgctagtattcttttaaaagttatatttatgacttgcaatgatagaaaactccttccaattaaatggcattttataatattatgtgtgtacttcacagtgttaaaaataccctcatacgttattgcatttgatcttcacagaaagtgcattttaaccagtactctgggtgcaataaataatatgtagaaatttaagtcctccaattccagcatatccagtgagttttgacagtgtgtttatgtggaatgtttaaggatatacaattgtactttatataaattggttcttgttcttcttaaatgtgacatgaaataattgtgctgctacattatactggaaattaacaggggaaaagggaagagctcttggctcccttgaggttctgctagtggtgttaggagtggttacaactgagcttttagtaaccatttaaccgtatgtaaacttggtttctaattaaaaaaaaatttctttttccaatttggtttcctgggtatttttttaaccttgaaataatttattaatagggttacaacaactttgatacaaaaaatactgaaacagcaactaccacctggaatggcacactaagtccacactgttaggattttctccttagaaaggatagagaaataaatggatttagtcctcagaaagcttggattaattgcagataccaggatattaatttccatttacccacttagtcaaatagttttaccatagctaaaggtcacatcattaccatgttgaaacttgggaaaaaaattttattctgcttttctctaagctgactattttctacctgtagcttatttcactgtttcacttttacattctatatgtgctgccaatgaaaaattagtatttgaagagaaaccaaactcatttagcttaaagaccaaggagcattttggcagacctgatataaatggaaatattgacaccatttattaaaaacaaaggcagagctcaggcacagtgaactttactaggcacatgacaggaaaacttgagtcagcacttgatttgtcccaggagtgtcaccagaacttcattttccctttctctgttgcaaggcttccctgtgagtaacacagtggaattcatctaggaagaattttgttctccatgttgtccttcctcatttagtgctctctctttactttggatttaatttcagaactaaaataggattcaaaacaatgtgaggatcctgttttgaaacatttcctttagctctgccctctggaataccttctgctccttcattggtaggaccaatgaatctaaatctgtcagcttctctaagtcccttagctta

SEQ ID NO: 69535 - DNA, 1079 bp, Homo sapiens
ggttaatgacagctctgcagaattcagcataatgcccaagcatgttgggatgataggaataattatttctcatggagtagttgaggcagcatttatgtttccctttcattaattgtgctgttctctagggtgatacaaggacccatagtaatcccatctgatcttctttcttttccagcttccctttgctctcatacccatcctcacatttacgagcttgcggccagtaatgagtgactttgccaatggactgtgagtgtactcctcttcgttcccaaaggggatgctgatatggggaaagggtatcttcatgcagtaggccagtcagacgtgagacacagagggaagcgatatgctttgagaggtgattgctagctgcttcctctttggcttagagaatggaaactgtgaatatagtaaaggaagagaaagcacgtctttcatatgaaggggagagaaagttcagcttttacagcataactcttcagcttcagccactgaagtttgaggcaccttaattctttgttaaatgatcttaacaaaaaaggcataagttagtaccttttatatatatctttaaaggatatgaggtatctgaagtgacttgttgcatttttgggaacgttaataaaatggctcattgcgtttctaggccttgttgcatctctagggacttaaatattagggattatttgttggtgtcttttcccccctctttctccctgtctaccagtatctaactttgggtgatttaacttagacttatgaagaatcattttttttcaaattaagaacaatttttccattcattttgaactgcctctaattcccatcctgtttccttttctgtctgtggccaagttggattattccatcagtgactgtgctgatttcttttacagaggctggcggattgcaggaggaatcttggtccttatcatctgttccatcaatatgtactttgtagtggtttatgtccgggacctagggcatgtggcattatatgtggtggctgctgtggtcagcgtggcttatctgggctttgtgttctacttggtaagtctagcctggaagagcag

SEQ ID NO: 69536 - DNA, 1155 bp, Homo sapiens
cctggccttgtattttttttgtagagtcagggtatttgccatgttgcctaggcttgtctcaaactcctgggctcaagggattctccaaccctggcctcccaaagtgctgggattacaagcgtgagccaccctacccagccccaagaaagtgttcttagtaaagtgtttttactggagtctctcagttcttttatgctggttacattgtgatcctccaacagtagaatatatagtgtgtagcatttcaccaatttatttgatatttccctgtacttctattgccattttccagaatagtgtgtaaaggaatataatttggggaaagtggtgtagacctctttttttttttttttttttttaatatttaagatggaggtttaggagcttggagaagagaaaggactaggcagagaaacgaaggagcatccagtaaagtttagactgaaagcttctggaatgaggtccagacttgagcctagcttctggcacagtgcgcagcacagcacttggtgttggtggtgcatagcaaagaagggagaaatgccacagggaactgctgttttggatattgtctgagcagattattgccacaatcatatccttcctcttggcctctcacagggtgttgtgctgggatgttactttgggcctgctgcactctacatttgggcagtggggatcctggctgcaggacagagctccaccatgacaggaacctattctggccagtttgtcatggaggtacgtgctggtataggatagagggagataacacaacccttttgttacttcttcttcttcttcttttttttttttttttgagatggagtctcactcgtcgcccaagttggagtgtaatggcatgatctcggctcactgcaacctccacctcccgggttcaagtgattctcctgactcagcctcccgagtagctaggattacaggctctggccaccatactcggctaattttttgtatttttagtagagatggcgtttcaccatgttggccaggcaggtcttgaactcctgacctcaagtgatctacccgccttggcctctcaaagtgctgggattacaggcgtgagccactgcgcctggccccttttgtcacttcttaatcccattcttctgaggtctctcctgaacctcccca

SEQ ID NO: 69537 - DNA, 2082 bp, Homo sapiens
tgggagattttagaaacctttataaataggtatatgcacaccttaggactgaaatcaggtcgtttttataggtcagtggtccttccagccactgagagtaactgagagctcagtagtcatttagtctctgttccctatttggggaatgtacagttcaacgaaagggcatgaagttcttttttctccccccatatgaagttcttaattgctcagtgaactaggatgtaggtgagtgttggatctctcacttttcgtctggtcaacttttgtcccctaaatctctcagctgactccaaactcctgaaatgtcacaaggaaacttgttctaactggtcaaaaagtgactgctgttgttatctttctagtctagacaggtaaaccggaacaataagcaggaagttcgagaagccaataagtactttttcattgaatcctgcattgcactctttgtttccttcatcatcaatgtctttgttgtctcagtctttgctgaagcattttttgggaaaaccaacgagcaggtggtgagtaagccagggttatgggtggtagtgaatgtgagggtaaagtgaagactgcaatgggatggggaaggaaaatacctcatcctagtgttaatgttcaggagaaataatctctagcttctcgtctgccccccaaaatcactgtgcaccagtcagagtctacagtatggggctgaccaagcctggaccctctttctcagcttttgtttgggagtagtcaacaaacagaaaacagaaactgtgatgatgacagactttgtcttgtcattttgaattctgtatcaatcttgatttctgattacctatgtagtgttttttttgagacggagtcttgcactgtcatccaagctggagtgcagtggcacagtcttggctcactgcctccacctcctgggttcaagcgattctcctgcctcagcctcctgagtagctgggattacaggtgcctgccaccacacccagctaattttttgtaattttagtagagatggggtttcaccatgttggccaggctggtctcaaactcctgacctcaagtgatccacctgcctcggcctctcaaagtacagggattacaggcgtgagctcctgtgcctggcctgcctgtgtagttttgatcaccatttgtttcccgtctatggaacctctgactcctctgtctgctttgactgaggattctattctgggtgttctctcatgtctgaagccttcttcagagcctctcctcttgtcatcatttaaagtaccccagcgtttgtacattattaccatgcacactgtaactcagtaaagatttttgatgacctgtgggtgtagaaggattatagaggaagatcctagataacattgctgctagtctctgcccacatcacagcatatgtccagtgttttccctccagcctacctcttatagatgattgtgtatgatatgtaggagagctcttatttggtccttgcttctgaaacaaaagttgctgttgaattgctttgggttctaggttgaagtctgtacaaataccagcagtcctcatgctggcctctttcctaaagataactcgacactggctgtggacatctacaaaggggtaagcatgtttggatttgtgatctttgttcctgaatcagtatttttagcatagtatgtggtcttttttgtgacttcacttcagatatgagcatatctcctctggagtgtcatttatttcagagttccagacaccagacaagcattttggattaaatgggaaggaatagaggatcagttgaaaagatatataatacaggccgggtgcggtggttcacgcctgtaatcccagcactttgggaggctgaggcgggtggatcacttgagctcaggagttcaagaccagcctgaccaacatggtgaaaccctgtctctactaaaaacaaaaatacaaaaattagctggatgtggtggtgggcacctgtaatctcagctactcaggaggctgagacacgagaatcgcttgaacctggaaggcagaggttgcagtgagccgagattgggccactgcactccagcctgggcgacagaata

SEQ ID NO: 69538 - DNA, 1008 bp, Homo sapiens
tgttgggaagagagtgtttttcaatgtttcctttctttccgtctctctgacttccatatctcatctctgacctagaattcctctgtggggtggcgttctcatcaccattgcagatacttttgtatttctcttcttggacaaatatggtaaggagagcgggaatgggagggtcaaaggagctgctctctgtcatgtggcagatggggaagtctaccttctctgagctcactgctgccttttttcctttaggcttgcggaagctagaagcattttttggctttctcatcactattatggccctcacatttggatatgaggcaagtggtacaggatattcattagcttcttaaaataagtttttgtggtttttttttttagccttttattataaaagacagtaataatgctagtatgattcacttatagtgggtgtatcaacaaaaagccaatttttccctgggccaattttaaaggaatatgatctatagcaaagattagcatgcagaaaggcctgcaggggctcccaggtttaaaatgactagatattttagggctttccagactagattctttggtcccaagttgaccatctgacaacagaacagccatggatagtgttaattaaggagggggttgcagggttattcttgggtgttaacttacaggagttctgcttttgttcatcctggtttatattaattgcagcttgaactttcccaatattaaaacagttaatgaattatatgaaatatactggatatttcctggtttgtgccccaacccagaaactccttagagtcactaatattatttgcagtactagcacctttctttgtacaattcttataaactgatttctgcttactggtctggctgaactttaaaaaatatatgtaatctatgggttgattatgcctcttggcctaaggcttccaagagaaatactgaaccggggaagagtatatatgagagtgtttaaggatgagtctctcattacacacgtactag

SEQ ID NO: 69539 - DNA, 1027 bp, Homo sapiens
cctcaggggctacatgcagatacttcattggcagtggctcttatgtgtaaagtactttccatttggtcttatttttatccacatagtttccttgaacaaaggagaaactacatataggagaaactgaggctcagaaaggtacaaggtgacttagcaggtcatgtgcaaaatctgttatagaactcaagtcatttgattcttgacctgggctcttttctgaatgcagtatttaccactcatgttgccaaacaactaaacaaacaaacagacaaaaactcagttgttcaatgagtgttacaggagattttgttcttcttagttgctctggatccttctgttggccacccttgtggggctgctgctccagcggcttgcagctagactgggagtggttactgggctgcatcttgctgaagtatgtcaccgtcagtatcccaaggtgagcaatgtattgtcctgtttgtctctcacccatgccataggaatctgtgtgtctggcggtatgtgctggcctcattctatagtgagacagtcaaggacttgggggtcagtggccctgaagacagacggtaccaacggaaatactgtagctcctcctgctgccaggccatgttttccccctctttcaaaatctaacttgagactcgcatttcctagaaggttttcttagaaaaactgtgttaccattcactctggcttccagtatctagcaatgcccagcccaaggggaggaggatgctctctctaagcacttttattcatacctccatgttactccatcagtttgcattttatatatgttctttttttgtttgactttgccatcactttgaaaaagtaattttttttctttttagtacaaactatatgtggcaagatctttggatttgctaataattatttttcagtttcccctcccaccgggggctacactgtcctctgcagcttcttctggacattttgggcctttcttaccgttgcctaaggcaagaatgaacactatgtctggaagatatttttaacttag

SEQ ID NO: 69540 - DNA, 1203 bp, Homo sapiens
attggccagcaatgatcaaaatggcctaacttctcttccacttttaatttcaggttaaagtaatttatattttttggcataaggaacaaattagggtttttagtcttgttttggtgcttattgccgataagtcattttgtgtcaggtttgtgtttgttttggtctcatctctactaagctgatagctgttaaaactcctaggaaatgaaagaagaaagctacaagttaattattaaaactttaccaggtttcaaagagcagaaagaggcttgttaaaggctggagaatcttgtagtatatattgtcttaatttttctttgcttttaggaaaagaaacttggaggacaatatttacttaaagttgttaaggtcaatctacatcatttgggagccaatatccatcattaggaaaaatgggttgaatgtaatctaatgaaaattcttcatatttgccagagaaaagctacttaagtgtgaggacaaaacatattttctgaggcaagaagtaggtataggctggtttaataggggatttttttttttttttttttggaaaaaagtaatttttttttttttttaatggagactgggtttcttgctatgttgcccaggctggtctcaagcttttgggctcacgcaatcctcccgcctcagcctcccaaagtgctaagggattacagatgtgagccaccatggccagtctaatagggaattttcttattccaatagaaaggggtctttgaaattgttcacagagcttggcattgtgttccatgatagaggtgtcagatcaggaggccaggtttgtcccccaaaaggaaacacactgctgtaaacttctggttaggaggaagtttagaggaagctcacacagagttgggaagaacaaagacgaagctatagtcactggaagtaagactttagtgaccctgacttgtgagcattcagggagatttggaagctggttaagcctcaagagtgctgatgggagaaggtgaagagttgtatttaatgggtaccagccccttctaattctgatgtctctggttgatgtgtgatatttttgtttaaaagataagtactccttgacagcctggccacatttctcccaactgttatcgtttttgacacccaggcagctggtttcattatcagctgtactcttcctccttacatcttcctcccccctcctcttcttgcttc

SEQ ID NO: 69541 - DNA, 1719 bp, Homo sapiens
tgtccccgctcaggtggatcgcatgtcctttccatgtggctgctcccgggatggctgtgggaacatggcaggacgcattgaatttaatccaatccgggtccggactcattacctccacaccattatgaagctggagctggagagcaagcggcaggtgagccgcccagcagccccagatgaggagccctccccgactgccagttgcagcctgacaggagcacagggctctgagacccaggacttccaggagttcattgctgagaatgagacagcagtgatgcacctgcagagtgcagaggaactggagcggctcaaggcagaagaagattccagcggctctagtgccagcctggactcgagcatcgagagcctgggtgtgtgcatcctagaggagcctctggctgtccccgaagagctgtgcccaggccttacagcccccattctcatccaggctcagctgcccccaggctcctctgtcctgtgttttaccgagaactcagaccacccaactgcctcaacggtgaacagcccatcctacttgaacagtgggcccctggtctattatcaagtggagcagaggccagtcttgggagtgaaaggagagcctggtacggaagaaggctcagcctctttcccaaaggagaaggatctgaatgtcttctctctccctgttacctcactcgtggcttgtagctccacagacccagctgccctctgtaaatcagaggtggggaaaacacccaccctagaagctctattgcccgaagattgtaaccctgaggagcctgaaaatgaagacttccacccttcctggtccccctcaagcctccccttccgcacggacaatgaagagggctgtgggatggtgaagacctcccagcagaatgaggatcggccccctgaagattcttccttagaactccctctggcagtgtgacaggcgctagaggtcctgcctcttacccattctctatttattcccttattttatctaacaccatttcaaaacaaaactgtagaagcagctgctgctcccatgttattttattggggtctttggggaatgggtgggaaaggattgtttgagtattttttaaaagggaaacagtaccaaggagaccagccctaccttgatctggggatagtcttggggcaaagaaagctgcgtagtgctgaacattaagctttctgggccactggaacaaagaactaggatctcacaggaaaagctgggtaactcaagcagctattctttctgtagggaccagaacacgagaatttgaagagcatggcaaagccctttctctcccaagccccaggcagagtacaagctcatttttctcggtggttattctgatatcccattttggtgtgtcataatacttcaaactggaaagtcacctggtcgagtctagggaggagggagtggaagggtctctgcttctgtacaaaatctccaggatttacaaaaatgtaacctgccttccttcaatcccatatttggtaaataagttaatatttgacatgtttggtgttctctgacctgttccccacactggggattcctggtctgtaacttgaattgtttcttccacatgttcttaagtactagagttaaacttgtctatgtgtcttttttctctccatcctttttccttcggagaaagagctggattggctggggatatggtataacgagcctgagccttctgtacgtgt

SEQ ID NO: 69542 - DNA, 1078 bp, Homo sapiens
ggaataaatagagaatgggtaagaggcaggacctctagcgcctgtcacactgccagagggagttctaaggaagaatcttcagggggccgatcctcattctgctgggaggtcttcaccatcccacagccctcttcattgtccgtgcggaaggggaggcttgagggggaccaggaagggtggaagtcttcattttcaggctcctcagggttacaatcttcgggcaatagagcttctagggtgggtgttttccccacctctgatttacagagggcagctgggtctgtggagctacaagccacgagtgaggtaacagggagagagaagacattcagatccttctcctttgggaaagaggctgagccttcttccgtaccaggctctcctttcactcccaagactggcctctgctccacttgataatagaccaggggcccactgttcaagtaggatgggctgttcaccgttgaggcagttgggtggtctgagttctcggtaaaacacaggacagaggagcctgggggcagctgagcctggatgagaatgggggctgtaaggcctgggcacagctcttcggggacagccagaggctcctctaggatgcacacacccaggctctcgatgctcgagtccaggctggcactagagccgctggaatcttcttctgccttgagccgctccagttcctctgcactctgcaggtgcatcactgctgtctcattctcagcaatgaactcctggaagtcctgggtctcagagccctgtgctcctgtcaggctgcaactggcagtcggggagggctcctcatctggggctgctgggcggctcacctgccgcttgctctccagctccagcttcataatggtgtggaggtaatgagtccggacccggattggattaaattcaatgcgtcctgccatgttcccacagccatcccgggagcagccacatggaaaggacatgcgatccacctgagcggggacaagaaggttggggcaagatgagacctacaatcctaacaatggagacaggagacatgagctggcaaacaggcagttgggatttgaggtctccttgtaag

SEQ ID NO: 69543 - DNA, 1199 bp, Homo sapiens
tcgccgcggggcccgggactcgctcgctcctccctccttcccaccgggctagggcggcggcggcagcgggggcggcagagaccatcacgggaggaggcagctgcggcggggccggtaatgggcctaggggtgcggggcggagggtgccgcctcgtcctttctcgggatcggccctcgggcggccgtggaggagtggtcaagcccagagccgtgcggatggaggggtcagaaatgagaggctcggacgggagcggtcggggggcggggaggtcgggtgccgttgggaaggaaccgagtcgggaagaggcgtgggagcgaggggcaccgaggacgctggcccggactgcgggggcagctcgcgggagaccgatgggcggcttggaagcctgcaggattgcagatgaggattgagttcggaatggagtggagaatgatgtaggatggaggaaagtgaaggaaggggagggggaacagaggaaaatgtgggaggagtggttgggaatttgtgagtagcaggcaggaagggatgcggaaggctgggtaggggctgcagaggattggaatgagcgggaaggttagcaggaatcagagggaagtgggccgagagctgaagggttcggcaggagtgttcattaaaaggaactggtgacttgacatgtcccttcgctccggttcctgatgtctcccatatttctggcgtcgtgtgggaaaatgaaagcatcaattgccctggttgctagcttgatcttttttcataggcccaattacgcagccaactgccacccgtcccttttagtgctgtggtcttgattcatccttttaaaggggttgagagtggcagtgtgacacacaaactgttcttcagaatgaaatgctagaagttatccccacaagacaacactgtccccttgtcctgcagttttcagttcaaggtaaattcatagttcagatttttttcttcactggctttctgtcttgcaaatccacaaagccaggatgttggttgtgccggtgttataaatgactggatatccttgagagttaatgcagcatcatgttccagttcccacaaagatctgtcttccacacgatggtagtttaggcatggaaaattctaaccttgtgttagtgaatgggtaaaaatcggggagtgggggtggtgagtgcacggctttctttaaacacctaacttaagcggg

SEQ ID NO: 69544 - DNA, 1112 bp, Homo sapiens
agaattcttgacataggtgagttaagagaatctattgcctaggaaatgcctttagctatggacccagagttggttttctttatttgacatttaccttgattcatatgcttgagaggctcaattagtataaaccttgaaattatttactaagcataaaaaattttaagtaatacaagttaaaatgatatcaaaattgaagttggaagtgtaaacactttagttccatagcaactataggttgattttgttgttttttaagttgtggtaaaatatacattacataaaagttatcattttaaccatttttaagtggatagttcagtaacattaggtacattcacattattgtgtaaccatcactatcatccatctccagaacttttctcatctgcaaaaccagaagtctgtacctgttaaacaacaactccccattctcccttcttcacagcccctggtaaccactattctcctttctgtctctatgaattggactactaagtactgcataaatgaaatcatacagtatttgtccttttgtgactggcatttttcacttagcataatgttttcaaggttcatggtatagcatacattagcatttccttcccatgcaaggctgaataatactccattgtgtgtatatatcacactttgtttatccattcatcccatgataggcacttaatttgattccatttcctggctattgtgaataatgctgctatgaacatggatgtacaaatatgtgtttgagtctctgcttttaattcttttggatacatatccagaaatggaattgctgggtcatatggtaactctatcttagattttttttagaaaccactatattgttttccacagtgactacacattttacatttctaccagcggtactcaaaggttccaatttcggccgggcgcgatggctcacgcctgtaatcccaaaactttgggaggccaaggtgggcagaacatgaggtcaggaaatcgagaccatcctggctaacatggtgaaaccccgtctccactcaaaatacaaagaaattagctgggcgtggtggcgggcgcctgtagtcccagctacccaggaggctgaggcaggagaatggtgt

SEQ ID NO: 69545 - DNA, 1046 bp, Homo sapiens
tatcaaactagaagtcctacttcagagatttgagttctaatgtcatacttgatatctattactagcttcttttgcttagctgtccatttttagtgtccagcttcctcttcctaatcatattccctagacactcccattggttactgtctgagaagtattactctacctggctctattatttaccaattgtgtggccttggacaagttgctaaaactcttttaagtttcaatttctttgtctgtaaaatgggattgataataccttagaaaagtatatcagttaaatgagataatgtgacaatacttagcacagtgctgagcatcttgtaaaggcttctgattgttgttactaatactaataatattattatactgttgtatattcaaccaactgaattttattctttccgaatctagcaaagttaatttgtggtgaatataatatgtaattactttttcttctaggacagtcttatgaaattcgaatgctagacaataggaaacttggagaacttccagaaattaatggcaaattggtgaaggtaaaacgaataaatcattcttctgtacaatattttttactaatccttttgggattttaaattttgttgttgttgttaatgttcttttgcttccaatggcttaatggtatctcttgcctgcagtaatttgttggcagagtagtaagctgatgtgttatttctttggggtcagagtaagccccagtattcacatgaatttttcagagctgcagaaatagaacgcttaccactccctgtccagggtaatcacccctggctcagtgaagttcttttgggtggagtaaagtaacctccttgagatctttagagaagcctcagtgtcttttttgatacttagtcttatagcaaggaaaacagaagctactttgatgaagagcagttctcttagtctagattaacagttaggattttgataattcacagcacagttgaaacagaggagttttgtcaaaaggtggtgggaggaattaataggcacttctacaaagtaagagtaacaaaagg

SEQ ID NO: 69546 - DNA, 1744 bp, Homo sapiens
acacttgcacgccgggtcctccccgtgatcgcccagcccatctcgggggcagagccgtggcgcagcccgcctatcatcgctgccgagactgacgcggtctcttctttataggcgaacgacagcgtgacgtcatgttcgccgggcaggcgaggaaagaggacgccatgattggttggcgctggggcggcggacggtggaagggcctggcgagtctaggttttacgcctgtgctggactttctccttccatgtttccaggccgtggggggctacagagggcgagaagtcggctcagcggaaacctggatttggttctaagccgtggggttgagaaggggtgaccggaagtgatcgtgggactgaccggaagcgaggcctggaggggaaagagagagcgagacctgggagggagggggcctccagcagaaaggggcgggggaaaaggtgcaaaagcagcgtgggagcgccgggctggcttcctgcggctgctgctggtctgactgggaagcagcaagccaccactacgaactctcaagaggagtgggagtgcgggagtccagagctgcctctgggaagtctgcagtagttgagcaaaggggtcctcacgttcctgagagctgggcaggggggattttggaacctggggcagccaagaacgagcagccaagggtacgggagattagttgtgcacagagcagtgctggtcgggcttgggggtggctggtgggcactgcgtgggaaaccttggtttgtagttttcttggtttgcgttactcctgttgggtagaattaccctccgcgcctttgtacaagacacggtgtctcctggggcaaggaaggagccaggatggcctgggctctgaagctgcctctggccgacgaagtgattgaatccgggttggtgcaggactttgatgctagcctgtccgggatcggccaggaactgggtgctggtgcctatagcatgaggtgagtgagattttcccagaccctacaccttctgaataacaaaggcggatagacactaagaaaaggggttgagtgggaaggaggtgtatagagttttaaaaagctgtttacgattggggaaaagggacttgttcttttgtcgctttgagtagttagtgttgtggaagaaatggaaaaagcgattgtaggcgatatgaagcctgtgcagaatcagtggaagaaggaagtggtccctgattagtaaccagatgaatgttgagaggcttttgtgccaatgtgggagacttggggactgatggtgtatgtgtgggtaagtctgacgttgtgtgaagaagggttacatatagcataggaatggtatctaggaagttgggaaattgggagctggtgcttaatgatgaatattggttcgtttcttgttggaaagatatggaagtccttgatgaagaagtccgtacagctctatcttaccactagcttgctttaagactttacttaattctgggatttctgacttttaaaacataagctgtgaaatgaaaaagtgacgaagaaaacttaagatgcttctggatctttatgtatcaagccagttgttgataacagatgaaaaatctcctttcggccgggtgcggtggctcacgcctgtaatcccagcgctttgggaggctgaggcgggcggatcacttgagctcaggagttcgagaccatcgtggccaacgtggtgaaaccccgtctctactaaaaatacaaaaattagccgggtgtggtggcgc

SEQ ID NO: 69547 - DNA, 1056 bp, Homo sapiens
attcccaacccaatactggggccttctcaaaaggagcaaattaaacaataaaccagacagcaaggccctgggggaaaggacaacatcctgaaataaatgatggagcccaggaaggtctcttgtggaagttgacttaactctaattttctttgtaactttaagccttggatacgggaggagaaatctcattttgtcgagtctcagaccatgtctgtgtgtaagcaatccccacagtgtcctctgagccaaggacacccccagatcagattgagttttgcttctagacggggtagctatggtaccttgggggttagctctcatccaagctgttaagtgagtttccagcctcactgtggctggaaagcccctaaaattcagtatgtaactccaggaagtcaggagagaactgagatttgcctagatgaccacaggcttgcggtgtagattatccctaaagggccccaagtcacgggggtcaaccacccctgtcttcagtactcttatccttacagaggctggtctctaacagctgcctccagtggacctcccatgatccaccctgagggaaggaccgtcagctggggacacatcaccacctctgtcagtcactggtgcagagccacctcctagcctagcttcctctggtgtcctgtttcctttcccacttactgttggtgcctcccaggccctgcagtgccagcgtggccaccctcttggtagcctggccagtaagaggaggacagttgtgtgctgaattagcacacgcacgtgcagcgcgcacagacgcgcgcacacacacacacatacacgctctgctgcatttggacaaaccatgcctgccagagtgtagcagaggtgaggaagcaggtgggcagcttgcctgacccagcttttcaggagagcgtgtctccaacagagagtctccacactctagttcagggttatcgacctgcctcaatgagatgacagactcatttgggaggggtgttgcaaacaagttttcagtgagaatagttaagttccagagcttgtaaaggattcagtgactgacacttc

SEQ ID NO: 69548 - DNA, 1008 bp, Homo sapiens
ccaggtgcagtggctcatgcctgttatcccagcactttgggaggccgaggcgggtggatcacttgaggtcaggaattcaagaccagcctggccaacatggtgaaaccctgtctctactaaaaatacaaaaattagcctggcgtggtggcacatgcctgtaatcccagctactcgagtggctgaggcaggagaattggtttaacccgaggggcagaggctgcagtgagcacagatcgtgccactgcactccagcctgggcgacagagtgaaactgtctcaaaaaaaaagaatccttttttttttttttaacctctacagatacttgggagaacctaacttctctgtcttctgtgattctattctgacttttctagatggtatagaaattgtattactgtgtcacatcaccctttgcctttccaatcccatcttacccaggatgtgctaggtgtgggccggcccccacccgaccctgacaagtgaccatggatcctggagccgggtcagagacatctctgactgtcaatgagcaggtatcttctggggtgggaagtgggggggtaagggtgatggagtgaggggtgtgggcaacagaggaggactccacagggcccttcactctctgtttcttaccagggttcaccatcacttcacctgtccagaggtacttgccatttaggatttctcagggcctgggtttggggagttaagctgtgactttaagatgtaaaatcaaagtgtacataatatgtttaagtttacatggggaaaggtttgaacatcaggtaatttactccttagtttttcttcttgcttacacatattttctaatttttttttttttttgcaaattactattacttatatcttttttgtttgtttgtttgtttgtttgttttgagatggagtctcactctgtcacccaggctggagtgcagtggcgcaatctcggctcactgcaagctccgcctcccgggttcacaccattcttctgcctcagcctcccga

SEQ ID NO: 69549 - DNA, 1033 bp, Homo sapiens
tccagcctgggcaaaagagcgagactccgtctcagaacaaacaaaaaaccaaacctgatcccccgcttttccagtgaggatattcctcctcacccctcagccctgcacccttttcccagtctcacggttcacttccatcattcacaccctttgtttggaagtcgaccttgaatagtaatctgtaaggaaaatcagaactgctgttacccacgaagtctgggctggttgtagacaggctgtggagactacctagagcagaggcacccttgataagccagaacagcagcaggccagaaccccagacctgtcctgcattccggagggaacttgggcccaggtagacttaaccccttacttcggtatgttagtaggagcagtgagcagtgcctttcttgtctcgttagaatccagcaccttccattttaagggtgcaaagacaatgcatattttcttagttccaggaatcaggccctctggggcagactatttgcaaatccccttctgcttgctcccactaagttagctacccgatatgacctgcctcattttggtagctctgtgtagtaggcaaccttcatttttttcttgtctttcaggtcaatatccaacacagccaacctaccctgtgcagcctcctgggaatccagtataccctcagaccttgcatcttcctcaggctccaccctataccgatgctccacctgcctactcagaggtgcttccagtttgccagatttgaactagctgggaatactcttagggtggtcctttagtccttagctaaatctgacttcacatatttactcttcacaaatgctaacatgaataatctaaaacactatataatttggcaatttttgtcggagttgaaagtgcattatttgatgattttgtgttatttggcacaggctaaggtgcagaagatgaatttgcgttctgtgagcccaacattagctatagcagaaagtgatccaggagaatattgaaggccagtggaaaggcaacttgtataatcttacaaaaagtataacct

SEQ ID NO: 69550 - DNA, 1059 bp, Homo sapiens
aggaagatcaaagttccctccaaacctaatttgatgttttattactaaaagcaaagaccagtatggtacagtattactccagagaaattaaaggaaaatccttagggcggcttcacccacattcattttatgaatggatacctcccctacctcaaaatgctttagggaggtactgctaccattacatggttccttattaaatttgaaaagtgcctgaaagtttgggcaccagaaagacaccccaacaacatgtgtctaaactgcaacttcaggttaatatgactaaagcagttacattgtgagaagtgctgaaggtatgtgatgtctttcccggcacagaggtggccttggttcctcaccagatggtgtagccaccatctgaaccacccatgaagaagttccccttccgctgagttacgaggacgttggctccctgcatgactgcaagctgagcagcattgggagggcatccaggaggtggaggctgaaaggaaatgacatgatagaatgggcacagggcagctaatataagcgaaggggacataggggaagcagaggcctgttaggatgaggcaatgtgctaaccagctgcgttttaaggagctagttccgccaccaatttgagttctaaagtaggtctatactttatgtgaacccaaagatacaaacaggaaagggagcctaccactcattcaaagggttccagctctaagatgaagcctatggctaccttctgaacatgaacagaccagaccaacagtcattttgagggtagagaaccactgtcctactcacattcccaaaacagggacagggtgccagtccatgtatgaatcccacatggtccctacatagtttttaatttttaattttttttttttttaatttttttgagatagagtcttgctcttgtcgcccaggctggagtgcagtggtgggatctcagctcactgcaacctccacctcccaggttcaagtgattctcctgtcttagcctcccaagtagctgggattacagacgcctgccaccatgcccggctaatttttgtatttatagta

SEQ ID NO: 69551 - DNA, 1588 bp, Homo sapiens
ttgaggtaggggaggtatccattcataaaatgaatgtgggtgaagccgccctaaggattttcctttaatttctctggagtaatactgtaccatactggtctttgcttttagtaataaaacatcaaattaggtttggagggaactttgatcttcctaagaattaaagttgccaaattattctgattggtctttaatctcctttaagtctttgatatatattacttgttataaatggaacgcattagttgtctgccttttcctttccatcccttgccccacccatcccatctccaaccctagtcttccatttcctcccgccagtctccattgaatcaatggtgcaggacagaaagccagtcagactaatttccttctttcctcgcacttctccccactcgtcatcttttaactagtgtttcacaaggatcctctgaaaccctctctgtgccccaagtacagatgccattacttctgctttcgtatctcctcaggcaaaagtggagggtgccttatgggccctcctcataggttgtctctgcatacacgaacctaacccaaatttgctttggtgccagaaaaactgagctatgtttgaacaaagatgtcgtgcaaactgtactgtgaacaacagttggtttaaaatatgaggggcaaggaggaggatgcatttcaaaagcttgattgatgtgttcagagctaaattaagaggagttttcagatcaaaaactggttaccattttttgtcagagtgtctgatgcggccactcattcggctccccagaattcctagactgggttaatagggtcatattgtgaatgtctcactacaaaatgacttgagtccagtgaaatctcattagggtttaagaatatttcagggatccttaatgttttgatttttgttttctgaaattggattttattttattttatcttataatttcagttcatctaaattgtgtgttctgtacatgtgatgtttgactgtaccattgactgttatggaagttcagcgttgtatgtctctctctacactgtggtgcacttaacttgtggaatttttatactaaaaatgtagaataaagactattttgaagatttgaataaagtgatgaagttgcattacacctcactgcaaggattctttacttagcttgtttttagatttcttctatatatattttatttatatcccatctagaattcagctaggtgctgctgctgctctgtttcctttgatgacgctttgaaataaaggcaggagtacaagcctaagacttgatcatttcatgaattccattccagatgttcaacttttcatcattttactccaacctcttacaaattttggaatttcggacctaaacttagaaatgagggaactattgattctcctaacttgctctaaagtttggcttgaagaaaaggttctggtatagcaatttgtatacgttgaggatgacctttagtttctccaatgttctatgtggagaaatactgaaaactcatagaatctaggttgccaagatagattcctcagctcttttatttattttttgagacagggtctccctctgtcacccgggct

SEQ ID NO: 69552 - DNA, 1093 bp, Homo sapiens
agaaggtgagcccagtgccatcgtccagatggagagtgacttggccaagggcagcgagaaagaggaatatttcatctaatgactcccaggccccaaggagcttattcctggctccatcgctaacacgttgactgcttattatgggaaagttttctctgaagccagggagaagcattgattgatgtgggcaaatccaagctccagccaggtcgcagtcccaaatgccgacatcactgactccagggaccagggacatggagaaagctgtttatgatatctttaaccaggccctcttactagagctggtgtttgtgactggccaacaagatgtggctatgccaggggacatctgagtatgtgcccagtcatcttttttcacaggttgaagggagagaaaagattttgagttaaggtcattggctgctctactctgtcccctacctggtcacctagtgatagccccagtggagatactgtccatacaaggtcttcccagaggctggataccacagtaaaaggccaggccaggaggggtaggagactatggagatcttacctcctgataaatgtgctacaccccctaatctgagcccttcctttccgtgttccccaacaacctcatgcttacgtgatttttattcaaattaaaaattttcattgctacagaaatcagattctcatgtgcaagaagtaactacattttgacttatttttgcttaaacatttttgacattttcttttccctatttaacgcctttacatatgttctcttccaagcaataagaaccctaggaaagttctagaagtttgcagaactatctcagggatttgagacaaagatggtgcaggaaagcttgttccaggggaacatcattagaaacataccctgggagggccgggttcggtggctcacgcctgtgatcccagcactttgggaggccgaggcaggcggatcacaaggttaggagatcgagaccatcctggctaacacggtgaaaccccgtctctactaaaaatatataaaaaaaatagctgggcgtggtggcgggcgcccatagtcccagctgcttgggaggctgaggcaggagaatgg

SEQ ID NO: 69553 - DNA, 1039 bp, Homo sapiens
gagggcagatcacgaggtcaggagttcgagaccacctggccaacatggtgaaaccccatctctactaataatacaaaaattagctgggcatagtggtcggcgcctataatcccagctactcaggaagctgaggcaggagaattgccggaacccaggaggcggaggttgcagtgagctgaggtcgtgccattgcagtccagcctgggtgacagagcaagactccatcttgggaaaaataaaaaataaaaagagaacttgaggccacatcggcccctctatattttcttcattttcttcctgagacgccatggggtggagtagagcaatgtagaaggtaggtgagtgtgtgtgtggccacaggcagggttcttcaggcttaaagggtatttggtgatgactgatgtaaaaatggggtgacaggttatggttcgtggctagctctgccatggctgaagcatttttaggctgaacccaattagaagaaggtgaagagtcattcatagttcctgcttgtcctctgtgtcctaggctcaaagctaggcactcacatgcctgggtccagttaatctttcagaggctctttccaagcaggaatagtcactgtttctacagatgagctggagccggaggaagcccagcatgtctgtgactggcccaagacccatcactagtaaatggcaggcctgggatttagccccagatgggtctgacttgaaagcacgggctctttccattacaccacactgctccaggatatgccatgtaaccgccaccatgctgagctcaagccagcaccccaagtgagcctccctactccaccccagcttaggaaagaggaacctaacctggaggctgcagggaagggagcagtctaaacataatccaaggcagaaaattggaggtggagcagtggccctgggtctttgagcctggccatctgggggtgcgggaggccctgaaagcatttttctctcagcccatggtcttgtctttcaccatttcatccactcagtctgaagctagggatggggatttggca

SEQ ID NO: 69554 - DNA, 1047 bp, Homo sapiens
agtgggggcaactaatacctaactcacagggttgtggggaggattaaatcagataatgtaggtaaaatgtttggcagagcacctgtcacactaagccctcaataaatggtatcaactatttctattattatgataaatccctgcttcacttcccagcagttatcctcaagcacctggcccttggccaaagccacgttcattactccctgcatgttttgcttaaaaataactctggttgtactatttaatgctattgtttaaacgcacaagctcctgcctgtggagaggcctggtgtctgagaccttgggagtatgtggccatcgtgatctcaagtggggaggtggattcattctggactggggtacaaatgtggcttcttttataacatcagattcagcagcaccgtcaaaaatcaaacaaaagaaatctctttgagcatctattttgtattaactattgtctaggagataggagagatttgtttattccaccagtatttactgaataactgcctctaccaggtactctgcaagaggcgggggacacagagaagtgcaaggccagccctcaaggatcctacagtcaattgggggcatcagattttaaacagagattaccctgtgagaagcagaatcaaagaggtacccttgagtgctgaaggagccggcatgcaggaaactcagcaaatgggggagggcaacatctgtgaagaaatctcacgggggcagaaatgggccgaacactaactggcgagtaggagtcagcgaggcgaggtgagcacatttcaggcagaaggcacagtacctgcaatggtctagaggtgggagacagaagagccagtcacagaactgtaagcagtctggtatggcaggagtagcagaaattgggcctacagaggtggctgaaaccaagtcctaagggccttgttcatcatgctgaggagcatttgcccttgacccaaggcatggggagtaataaagcgttaagctgggagcccagcattacaggaagagcaatatgacagcggtggagggtatcttggaaag

SEQ ID NO: 69555 - DNA, 1056 bp, Homo sapiens
gcaggcttttcagagaggatttctggcatcatctcgggatcaaagccaaggatggtccaaagagttgcaggcccaagggtagctggaggaaaaagacttgggaagaagtgctgagccacagcgagagggaaatgagtggatgggggctgcgggcacacttgccaggaaagcaggaggccaggtgtgggagcccaaaggtgagggagatatacaagacaccaggggcggatctcgtgaagctttgtacttgaaacaatagcaaagaatagcagctattctttctccaaggctggtggaggggcgacctccacgaccttgctaaccatacttctgggaatcatctcctacacagggagcagaaatccttaaccccaaagtcctgtggcttgcactagattctgtgtctcttctaagggactcttcctgttgccctcatgctaagcaaacaaactagagaatgagtgcctcaccaccaaggctaatcccaggtgtctcatttcggttcaggatgtggttagtaccttgaggaactgtaggtttgagagagaaagcttcaggcagccagatgggattgagagattagatgcctaggaagagctcaatttaaccctatatttctttctccagggaaaataaaagaagcaaaaacaggccctgctgtgagggaccacgaggcagtgccaggatgaaagagttggagtaacctaggtgattctgagtgaatcagtcaggaggccttcctggagggggtgagtcttgagcactggcaacagttagtaactacaatcttaccatgcctttgtttctaactgtgctccctctttcttgctggagtgggaaggtagatggaaagtagcagggaagacgaagcctgcaggacggttcaaagctgtcatggcaaacactcccccattctgcaggcctctgtgtgggcttagccgggacagttccagaactgatgaggtgtctagctcaagcaaatccccctgtgctagccccagcatagctcaacctctgtgacaagaaactcctgctacactgaatccccatttcctc

SEQ ID NO: 69556 - DNA, 1050 bp, Homo sapiens
aggggctgggccaggctggtccctcctgccttcgctctctgctggtcgcggtggcctgtagctcctccctcggtaggacccccctccaccttggcgcttacgagatgaatgaggagcccagacctctggaacttggaggggtgagagggggacaagccagagccagggctccacaccctcttcccctcacccacccatgccctgcattccttctgtgccccgtctccccagatcgggccaccccatgtgctctggtacggcaactcttgcagagaggtttcctcctgccctgccacgttgcgcctgagcagaaggggacagcaaggagaagcctcgctggtggaggtcggtctgagccctgcttggttgaattccctccagagcctgggggcttttgggggtgggaagggatctgcctcctgctgtggggaaatggaatctgctgggtgttcatgactgtgactgtcaccgacttccctatttcctcagttgttcagattcccaggctgacaaaaaggagaaacagcttttacttgcatccagggccaatcatcgcagacccagacgtctgcagagggtaggatggggctcttctgtgtatgggggtggagggtggtcagtttgcccacaaagcttacagcagaccccttctagcagccgacaacccattgcagcactctcagaaaggatgttaactctgtgctctgagctcgcccccaggcccacacacacaatttacaggcactgggtgaggttcatagttctggacacaccaaagagcctcgaggacttttgcgccttctaccagagatgtgtgtgcaccacacaggccctattctccgctccagacagatgagctgtctcccttcccatcaaaggaaaggttaagaaggatgagacagggaaattcatgtgatgatgaaaaccaggtcaggtgaggggtttgaaatatgctttggttccggccacatgtggtggctcatgcctgtaatcccagcactttgggaggctgaggctggtgcatcacctgagatcaggagttcgagacca

SEQ ID NO: 69557 - DNA, 1120 bp, Homo sapiens
ggactcagtgatgactttttttcctctcagagtgcaattgaatccttgtttggagcttccatgactgggattgcttattccttgtttgcgggacaggctctcaccatcctgggaagtactggaccagtgcttgtgtttgaaaagattttgttcaaattctgcaagtaagacatttgtttttctgaaaactctaaccagatttagtgattatgctgccaggattaaatgtcagggttctactcagtacagacaggcaatatcattttggattgtaagaaacctgaaaggagaccatcatttggtctgttgtcctgcccccgggtagcaccatacccaaaatagcagatctcctattgttaaagagcttgattaatattcctcagccattattgaagtcttgactttttatctttaaaaagactttccctagctaattcaaacttctccatttccattgtgagtcaatttttaatttggcctaatatcctccccctgctgtttttttttgttttgttttgtttttttgctattgatagtggggcacaagagtgctctggtttccctaattttcctatacaatcttttcttttttccttttatatttcaagtagcagctcatgggactatggccagcccctttttttcttaactgcaagaataagatcataattacattaggtagtaatggcaggaatgtatatgagacaatttctttttttagttttcgtatccttgcgcatatcctgtgaggcaaatctgtatcataactgtgccagagcactatttagaaggaaaatacaatcagaattagggataaactgggttccagtgcttgtttagatgaaatgaattaaccacatttctgactccttgtctcttaatgccatccatccatgcgttctgatgaactttggtcttgtttcagagactatgctctttcatacctctccctgcgagcttgtattggactgtggaccgctttcctgtgtattgtccttgtggcaactgatgccagttcccttgtctgctacattacccgtttcactgaagaagcatttgcctccctaatttgcattattttcatctatgaagcaatagaaaaactgattcacctggcaga

SEQ ID NO: 69558 - DNA, 2356 bp, Homo sapiens
ttaattatactttaagttctagggtacatgtgcacaatgtgcaggtttgttacatatgtatacatgtgccatgttggtgtgctgcacccattacctcatcatttacattaggtatatctcctaatgttatccctccctgctccccccaccccacaacaggccccggtgtgtgatgttccccatcctgtgtccaagtgttctcattgttcagttcccacctatgagtgagaacatgcggtgtttggttttctgtccttgtgatagtttgctcagaatgatggtttccagcttcattcatgtccctacaaaggacatgaactcatccttttttatcagccaggcacattttcaatacagggtacataaatgggaggactcagttaattagatatttagtgtacacccatatatgactagaacacattcttagacttcagtgagcctacatggcagtcacgggaggtacatattaagtaagttctgggtctttgtttcctgctaggacaaatagttaacaagtggctgttctgtactgactacttgctcaggcctgggttaagtgctagggaggtgcaacagaaacttaaaagatagtatctgtcatcagataggaaggaaaaacacatgaaacaatcagatgctatatgcaaagtagtaaacagttggatgtcccctgggatgtacgtgccgtaggagttcagaggagaaaagggccactgggccccaggatggtcaagtgggcttcatgttggggatggggaggcagtggatactcagagaatttatattgcattcagagaagaactaacaaaaccatggaggaggaactggaaaccttgggcttcaaagcaaagtgaagtcaggctaaggtaccggtgatattacgtgtggctaagatatgttttgctctcactcttttggaagcttagattaaggcaggcacgggtcatttgccaggtactgtattttattaaagccacactataaagtgaggcagtccttttatgatggatcctaaattggatgggaatctccaacaaaatagagatatgtgccatggaggaaaataaagcagtaaagaagtacaggaagtgctggggtggagggaggtggccaattttaagtggtatcatcagagaagagctcaaagagaaggtgatatttgagttgaacctaaaagacgtgagggagctgcccaagaggttacctggaggaaaggcatgttaggtagaggcatgaacaagtacaaataccccgaggtgggagtgagcttggcatgtttaaggaaacagcaacgcagtctgtgtgtttggagcagagtgggcaagcaggagagcaataagagctggggtgggagatgtgatgatgccaattgtgtggccctcataggccaagaaggccttttgaccagaagccatttcagggttttgatagaggagtgacatgacccaacttatgtttcaaataattactccagtgactgcatttaaaaaacactgcagggcaaaggcagaagcaagttaggaggctgctaccattacctgaacaggagctggtggtgacttggatctgggtgggagcagtggcggtggtaagaagtgatcagactcgggatatgttctgaagggagagccaataggacttgcaaatagactggctattgggtatgagggagaagtggagttgatgctgctgctgaggtttttggctagcactgaggaccttggctgatcccagaaaatccaagttctcagaactagagtcccaacctggccctaaatgtcccaaacagaactcttcagaggatggtctgggttatgttagcatttgtcagagggttcattctccctcatcatatccacactttatgagcatcagttgggcaattaacatattcctgttgtttaaatttgcttgcattaattcaactgtaagatgaaaacattcttctgaggatttttaagccttttacaatactaacctcttttctactgtatttaacctgccaaaacatgtgtccacttctttctcatgccaggtacgctccatggtgagtgactttgctgttttcctcactatcttcacaatggtgattattgattttttgattggagtcccatcaccaaagcttcaagttcccagtgtgttcaaggtaaacagatctcagagtacttggtgcactcatgtaatttcatacattctgatgccaagtaaatttcaaaggccttttcatatcctaatcctgagttttacagtcccctaaatctgaaccttgctcctcataccttgtcatgtagaaaagcaaacttcagacttggttgaattcaagacagaaaagccagagaacagaaaaacc

SEQ ID NO: 69559 - DNA, 1110 bp, Homo sapiens
attcctcaaaccagtgctccttctgcctttctttgccaccttccaaagatgaaaaggatgtggtctttatttccagagagttctcagcctagtaggcatgaaatccaatgcttgggcaagcttttggggataggcagaaatagtcaatgttagcctggcttgtggcatctgtagttctgggagcaagggggaattgaactgggatcatgaaaattccttacttctgccaatgattttagcccctttctctatcaaacctattgctcaccacaaatgacaggaagctaaattggtccattcatggttttactcctagcatcttgtttctgaattggaagagatacacatagcacttgtgtacctctaggtaccataagctgaaaaacctagaggtcaagagggagcagagcaaaggaaaagagcaggatatctgggtcattgagattctgaagaatttactgctgcatcactgagttggttgtggtttatactgtgggggaaattaggacagtctttttcgtaataatagtcttggttcttaataaactttctacgtgttgttgtggaaggagccgtgagcttgatttatctggtggcaaagtaggaacaatgtttcccctgtaacaggatgctgcctcctctcttggcattttagaaggagataatctggcttgcagcaaacatcaaactattctgtttctaggaaaccaagggctgggttcaaggtcttgattctctacttgctgttgtttgaccttggatagtcacttagctctgagagctttcatttctgcaccttcaaaatgaggatgttaataatctctgttgctatgatagttaagatactaggaaagtcctttgtgaactatgaatagaagagatttggctgtttaaatgggaaaatgaatgaaaaatgcctggcatgcagcaagtgctccgtaagtggtagttcctgatgctacactgttgatatcatagtgttgtcagcagcatctccagtgaggcccttcggaggagtgcacagttgtgggagcaggactggctgccacctggcacaccagcccagctttcagcaccacctcatgggccaccttgccattctgacctcag

SEQ ID NO: 69560 - DNA, 1031 bp, Homo sapiens
acatcctctctggctctccagtgctcttagtgtctacaggctcctaggcagccctgggccttggtttgattacctcccctgggggatgctggtcagacccagaggttgtcaggaggtcagctaccaggaagatccatgatctgggcattggcagtgcctgccaccacagccaggaagatgcctctgacctgggtgcatctccatcactccttagcagcagcctgcataactggcaagaatcttggatgatacaagagccaagaagggacatttgagttgtgtcgcttagataggaaagggatccagggaaaatcaacagtaagtgaggatgagcagtgtctcttggttttcattgaggatagagtaagagattgagtttagattgcaacagaaggaattagtttagataccaggaagaacttcctagcctgaagatttgtcatagtgtctgctttctagatatctgggaaagatttgataatagttgtttgtgaatagaaaggaggatatgatgtttttattggccattttgcgggactcttcgacttcttgctgctgtctcttgaggatacattccaattccatcctggcgagatccaagtgcttacgtactgtctccttagctgccttagagtaaacgatcatcagttcaatggaccaaaatcaccttcagccatgtggtttcttcatcatcatggatttcttttggttgacaaacattctggctctcagatgcaaaaagtcacactgggaaatgaactgtaagtggtgaaattagttttggtatttaatttaaaactacatttatagtttttctcttctcttctatgttgcaatgaatgtaaagtatttgggatccagtgcttataaacctttccttcctttgtgcacagaatgtaactagcaagcccattagcacccagataattctatcatgttagtttcccatcctggaaaatctttgtacagtgggaagttccccgatgtgtttttctttcttaggtgaagggttggctatatcactttattga

SEQ ID NO: 69561 - DNA, 1038 bp, Homo sapiens
agagatgattttcaaaatattttaacaactggtacaggacagatgccagccactcagaagggatgcctgctgtaaacaagcagtatgtatggttgtaccaatgcctattggctgaacattatgctactttcagatattaaaatggtgttcctttgaatcgtgggtattgttcctggtttgtctcatttctatcacaaggctgttttgggcacagccttagcttcctttcatatatatatggtgcagacaggataggtcatgcttcttggaacctatatgggcattaaaatcttcatgagccaaagcttcacattttagcactttaggataactgtagtaattgtactcatttacctacctaattgggaagaattaaaaggcagcccatctggaggataagctttcttgcagacttttcccttgtccctctctggctgcctccttgagcttgccactttttcatcttcattgttccctgagaacatctcccctttcttgctctatcttgcccctcccatcttttcctgccacctctgtgtggggaggttgatgaccatttcacctctttccctagcctcagcacagctgtaaggagtgtatcaaaactgggtgagagtatcactcagaaaaatgcctcccctaacacacggatgtcttgtgctgccttgaccgcttgaggggaggagccttcattaactctgtgtagtgcaggtacaggaccacctgtgcactttagggtacttctcgagctagaccctcctggatcactgcgccttaggaatgttagctactttttaaaaaaaatatgatttggtgcgttgttggggtgaactccatggggaagattgtgagtgaagatgggaaggaatttgggtggttttgccacgaggtgatggttggggttgggcgaatgggttggatgatcctggctctgtgggtgtggtgctcggttgcctccgtacagttgcagttcacctttgtgcatggtgattaccagtcactctagggattgtaggtcccaacagcggttccagcagc

SEQ ID NO: 69562 - DNA, 1316 bp, Homo sapiens
tccagagtgagatcagttaccataattataaaaatacatacttattgcagaaaaattttaatatatgtaaaaacagggaaaaagtcatccttagttttaccatccttaccatctttgcttctaccataagcaaaacaattatctgtgttttattatgtttttccagtctttttttttcccatagagagggaaagaagcgcttgtaaagttatccagaatgatagtattttaaaactgagccctttaagctcttaattttatagttcacttgctagtcatttagggacttaaacagattgttgtatctcaatttacctttttcttaatcctttagaaatgttccaaaaaaaactgtaatgtgaaagaattcactcatagaattggacttcactcgtaaagtctgtttgtttatatttagcacattaactgaggaatcaataaaccttttcttaatcaatgaatcaacaaatagtctcactctgcacctactatatataaggcactgaactgaacactagtacaatgcctctctaagctggcgagcacccgcttaaaaaataatactgtgctcaaaaactgtggctattaaggtgtcgaaggaaacagaactcttaccctgtaagtttattaattgcggaaatgtatggcagtctgttagggccagcccagtgatttaacctaaaaaagaatagtttgtgcaagaatgggaagtaaatgcagtcaaaagacaaaggagaaggtttctggaaaaattatccctttgtgaagttatggagacacagccaggacacatatttaagtactatgttagagattaaggtgaaatgaaaacccaagaaggttgctatagttacactattgagaagaaaatgtcagaagcagtatgggctttggaatcagacaaaactagattcaaatcccgactctgctatgtattggctttgtgaccttgggcaagttatttaatctattggagcttcagtgttcctatctataaaagtgggaataataatacctacgttgcagggtatttgtggggattaaatgaaatctctgtttccttatggtttctgacacatagtgcttaatatatattagcccccttgcctctagggatttagcagcttaatgtgtatttatgtatgtatttgacgtagtatatatgtactgtattgaatttcagtagtctgaaaagcagacggatgctttatcttcagtctggcatagaggatggaacccgtaggtaccctaacttggatggacattgctaagaaaagttttactgtacaattgctctgctggcttccaccaacaca

SEQ ID NO: 69563 - DNA, 1032 bp, Homo sapiens
cttaatgaaggaagttgtccaagctaaggactatctaactggtgtagtggagactggtacctaggttggtcgactcatgtttagtgacttctttctgttaaatggtgttatattctgatgttcatataaccaagtaatgtgaacaattttggttttattttaagatattattagcttaggtagctaaacatatcttagtgagtgggtataatgaaagattctgggatagacagagggagggcaaaagtgcctttgaaggaaagcattttggaagcaggaaggatgaggggaaattaacagaggatgtatcaataagtagaatatggatgaaaacaggaggcaccaaagtaacacacttgtgttccttctgtggctatcctagctacttttaaaaaggtcatatcttggtgtctgcttatctttcatccgtgtctcttgcatgtaaacacatatacttggctattcatgaaatctctcccattgccaacctaggttgtaaccaggactgtagggaattatgaccattgttacctggacttctttgcttatgcaaggctgaaactggtgtgagactcagagaacagaatatgctggggattggtgatgggtacgggcagcaagttggggccaaagaagttctgggaggactttgggctagaagtagtacaaaggttggagaggctaatagttaagattttccttgggtgtatggagatgtgtcatactgaggagaatagaatgaaataaaagccagaagcctgagggtctaagaggtacttttagtttggtgctgaagctctcttgatcctggaaggagttgattggggtgggttgactaaaataggcgatggagagatttggatcactttatattcactattgatggtaggcatcctgtattcactgggcatgtcccaggatctggaagtggaaagcactgaactccctcaaaaggcacattcacaggctcctttcatattcagctgattagtgtagttttttgtgctataaatttttgggggttcctgggga

SEQ ID NO: 69564 - DNA, 1055 bp, Homo sapiens
aaatcacatttgctacagatttctcaattggatttcctgtgatttggtgaatactctaaagaggcataatgccttgtttgtaggaaagatgtcttgaagataattagtcattttttaagatgagtattgtgatagggagggaagaaagtgtttggagtgtgacgaatcatcatagggagaaagcaaaagaaggtgaatgacagagtgaaaatgggcaaggggatttggatgtgaacgtggggaactgctcatattttaagagtaggtattcactcccctccaacaattcctttgggtacacctccgtattactgaaccagatcctcatctgctggacagggcacagaaccttgggaaggtggtttttgttgttgttgtttagttttattttattcttagctctgctagaactttgctgcaaattgctttctttatctgatctctgcattgagaaaactggagaatattttcttgctttatggaaaaaaatgtaatattcttaaacgtttctttcatttcctcttgatttttagtcatttaatacaaaaacattttctcagaaggctctgttgacagtttctcttccattgtcttgaaatgtttgtttgaatatttaacagaggcacaaaattcaaaaatcaaaaagttcgaagttaagtcttcttttactgtctcccagtcatgcagtatgcactccataatagcaattactgttactaatttctcttgtaatgcttcctgcatacatacatgcacatatacatattgtctccccctgctcctcacagttagttccattgtcttttaaggaagacttaaaataatttgaggatttggattctcattctagatcatcttagatcagttagttaccccttttccttaagaaatacataatgcctctgttttatttttcttagtaaaatttatattctaatttcttggcttatttaatgtgcaagttagtttgggctgaagcagcctttcctactaacctacattgcttttagggttttccttatagaattacctgttaaaaataaaagtgcaggggg

SEQ ID NO: 69565 - DNA, 1069 bp, Homo sapiens
ttttagtagagatggggtttcaccatattggccagactggtcttgaactcctgacatcccgtgatccaaccgccctgcctcccaaagtgctgaaattataggtgtgagccaccatacccagccaatttgctaatctttttgttgagaagttttgcattatctgtgttcactaggatattggtctgtagttttgtttttttcttgtcctgtctttgtttagttttggtatcaggataatactgaccttataagataagttgggatatgttccctttaacattaaaaaaatattttcggaaaaagattttgtagaattctccagggaaaccatctgagcctagggttttctttgtgtgaaggttttaaactataggttagatttctctaatagatatagaacaattcaggttgtcatttcttttggggtgagttttaatactttgtggctttcaaggaattggtccatttaatttttgttgtcaaatttatgtgtatagatttgtctgtagtatttccttattcttttaacatctatggaggtctatggtgatatactttcttttattcctgatattgatagtttgtatattcattcttttttttccctttggctagaggcttattaatgttattcatcttttcaaagaaccagcttttcctatattaattttcctctatttttctgttttcaatgtagttgatttctgttctttattttctttcttctgctttctttaatttactcttccttttctgtttttctaaggtggaaacttggattgttgatttgagacctttcttcttttctaatataatctcttaatgctacaaatttccctctaggtactgttgtccctgcattttacaaattttgatatgttgatttttgtttcccctgagactttctctttgacctgtggattatttagaagtatgttgtttggagtgttgggagatttgtcagtgtctttgttttattgatttctagtttattccattatgattagagagcatactttgtattatttcaatattttacaatttgttagggtttgttttatgaccaaga

SEQ ID NO: 69566 - DNA, 1013 bp, Homo sapiens
tcccttgaaataatttcagatttatagaagtgttgcaaaaatagtaaagagagttcttgtattttcttcacccagcttcccctaatgttagcatcttatataacagtgatacatttgttaaaactaagacatttacattggtataatactttattaggtaagctacagacttcatttggatttcaccaaattttctactaatgtccttttttctgatccaggatccggtccaggataccatattgcatttaacattctatttttaacttacatttatcgtatttaatgtgggtttctggtagatagcatactgtatgttctttttttttttttttaaatccattctgacaacctctcttcttcttattcctttttgaaaaaattgtattgtggtaagaacattttacatgagatgtaccctcttaacaaattttaagtgtacaatacagtattgttaattatatgttcaatgttgtacaggagatctccagaatttattcatcttacttaactgaaagtttatgcccattgattagtaactgcccatgacaatctcttttagttggtatgtttagaccaccttcatttaatgtagttattaatatgtttgggtggtctgtcattttatttgttttctatttccttttccttcttttggattatttttaatattctattttttttttactgttttcattatatagttattttagtgtagcactaggaattacaatgtacatacttaagtgttcagtctacttagaattaatatattaccactttaagtggaatatagaaatgttagtaccaccaggtgcagtggtgcacacctataatccaaacactttgggaggccaaggtgggcagatcgcttgagcccaggaatttgagactagcctgagcaacatggtaaaaccctatccctacaaaaaatacaaaaattagtgggcgtggtggctcatgcctgtggtcccagcttctctggaggctggggtgaaggattacttgagcct

SEQ ID NO: 69567 - DNA, 1515 bp, Homo sapiens
ctaatttaaaattttccatttggttcttttttaaaaaagtgttctatttcttcattaagactttttatttttccatttatttcaagactgtttgcctttccttctttgagcatacttagaatagctgcattaaagcctttgccaattctaacatcttgcattgatatctgttgattgtctttttccttgtgagatgttgagattttcaagtttttttgtatgttagtttgaatttgtatcctgaacactttcaaattgttagaagactttgggtcttgtttaaatcatatagagaatgtttcttgcttatttgttttagcaggcaatccagttagattcaggttgcaaattccttcctgccttctgtgggctggggtccaaaatcagttcagttttcaaagtatttgccattctatttctgtttattccaggtatgtcccagctagtggccagtttcagatctgggcagcagtatactccagagattagttgtcaaaacctttggtgtgctgtttagggccagatacatgcatgcacagcttggagatgagccccggaattcatatacagccttattgagctcctttctcttgttgtttcccagactttccagatctgaagggtttcccatcctgctaccctgcctagaagtcttggacttttagtttctctattctgccttttacttcctatgaccacatctcccttgagaaccaaatggcaagatacggagagtcaacgaagcaagggaggctttcctgtgctcttgggatcccagcttccctggtcagggaagaacttttgctattgactgccactgctgcttaactactgtgaggtagggcaggagagagcaggaaacacacacacaattcagattttctcccttccctttcgtgtctaggggctcccttttctgtttcttggaccagaaatggaggtcttctcctgtagctttttctgtctgtgcttggggcacagttctggatttggctgccttttttgagtccaggccaagagataccagagcaacacacacacacacacacacacacacacacacacacacacacacacacacagaaagaaaaaaaggcaaaactctgctggttttgtgatactttgaattgtgggtttcttttcctaaactatctgctatcaattatttttcagagtcattaagtaatggatggagcagctctgtccaaggattttagttgaatacagtgggagatacagggtagagtgggcttacttcatcttatctggagtgagaaactttggttatttgagagaggaacaaggctggcaggtgtgagaaaggtggtggctttgaggcaggttctcaaccttgagagatcaagtgactagattgacaggcctcgaggtcctgggaggagacaccctgaggaatgacttcagtatttttgatgcaggatgccctctcctcctcctttttaatttttaaatttaagtaaaatgttttttaaaatatataatatctgcacttagcac

SEQ ID NO: 69568 - DNA, 1048 bp, Homo sapiens
gtgtggtgattcacgcctgtaatcccagcactttggagggccgaagcaagaggatcgcttgagctcaggagtttgagaccagtctgggcaacatagtgagacaccatctctatttaaaaaaaaaaaaaaattaggtgtggtagcacacgcctgtggtcccagctactcgggaggctgaggcgggaggatggattgagcccaggaggttgaggctgtagtgagccatggttacaccactgcattccagcctgggtgacagagtgagaccctgtctcaaaaaaacgtggggcctcataggatcagaaaccacggtggagcagactatgaaggagaaatatgatggttcttataatggcttcagtggggctggctttctggaagatgttcaggtatttatccttggtctctcctcagctgctttatagagtaatgcagtagaggaaagactgtcaagaaattttttattacttaggtgctatatcgtttgctttttaacttcataaaattttttggccatctctgcttagtatataaagcaagttgagcaagtgtggctcttgccaactataaacttaggtcacttgggtctggaaattccctcttgaatgctatttcctgaatttgatttagagatcagagtttacgtggtcaatgtacgtctttcccacaggatagccaatgaattcttagagttttaaaccatcactctaaagcatgctaatttgcatttagaaatacaaagtgcatcatattggtgaccccttttagatagtgggatgggtatcagatgttacccattagttctgatgtcttaggcagagcctatgcagttatttggccacagactaggacattgctagtatattatctattcatgtatatgatgatgattcttggaataatttcctctggatgtggagagactagggcagtacagatttctttaattctgtgtcagagcagtagtgagtaagaaggaaggggcagagtgtcagccacagctacaggcctcttacaggcagtctagggtccagaccagacacgatga

SEQ ID NO: 69569 - DNA, 1082 bp, Homo sapiens
tcaatctttggaaatttgagtttgttctaatactgccttatatgttcagattctctttaatggctctgagagtccttcactacatctcattgtcacacttttctctaaaataatttgttacaaagccttgctaatggcagcttgctgtgcccagggtcctgaggtcccatcatcaagcgttttgattcatctgccattcaaaagactattgatatcccgagggcaagttttagatacacttggtgaatttcattgctttgttcctttgacttcttcctttaaacacccaggctccctccctctgtgggaaggcgtatttttggctggcccttttctatctgtgccatctgtcacaggggtcattgctcagaggctggcttcctccctgctgggagcaggtggtcaaaaccaatggctattgacagggtcaggttggggcagcttaccaatatgccccccaagcagtatgcatagttgttctccttcagaggaacaagagaaaaccttacttgggggtctttttctgcattaaagaggaaaagatgcagatgtgattctaagttgtttatttattcttgtggtccagccacttgtcaactgtcctgtctgtgctcttgtctctgcgtacttcaactggcactgtactttaagaccactacctgaagcagcctccagtgtagcaagaaagcaacatctgtgaaaattatggatgatagaattactcaagctggttcatgtctaagatgctagaggtgatgatcctgacccttgatcaaacaaaataaaatatccctgaagtcttttgatgatctctggtggtaaagacccttgtttcaaagtcttatttaaagagatcatacttccaagcacttaggattctgggcctgactcacaggagagccagcccagtgctgagtcacttagccaacttcattcattgatcatgtgcttgtgcacagcttggtggcaaggtgggagagaattactattttcaaatgttccttcctgaggtagcatagtccagaagtaagccgagagacaggatgctagagttctattcttggcccagctatgcaccttca

SEQ ID NO: 69570 - DNA, 1049 bp, Homo sapiens
gggagtggagctttaggaaaggaaggtgacttgaactgtaaggacttcacagctaatatatgcccctgggtaatgttacatagtccttatttgtttagaatagaagttccttgagggagtagaatatatcctttttgtcatatgtggttcctaatagtgagttgcatctgagtgaatataataaataactagcaattcaggagactcctgatctttgatctcccttggcagatcagtccatgccacagatttcctgaaaagaaaaataagcatgtcatggaagaaactatgtgttttttttgcaaaggttgtgaattaaggttgagagtgagatggtttagtctggcctctttttagagcagtgattgattaatgctgtctgtgttgctgtttcttccagagctgacctgtcctggacgcagcataactaacgaagctgctgcaggatgagaagatggcagcgcggctgcttgcaccaccaggccctgatagtttcaagcctttcacccctgagtcactggcaaacattgagaggcgcattgctgagagcaagctcaagaaaccaccaaaggccgatggcagtcatcgggaggacgatgaggacagcaagcccaagccaaacagcgacctggaagcagggaagagtttgcctttcatctacggggacatcccccaaggcctggttgcagttcccctggaggactttgacccatactatttgacgcagaaagtgagttggaggaggaggagcagctgcagatacctgtttcctaacaggcttagggagatgggggagaaagaactgtgtctctttgccaaagtttggataagtagttaaccttttgtttcagttctggcttgtggggattatttttcattttaattgctactaagggtcatttgtggtcttggcactcatcaactctattaataagacttctgattttggctccaggccagatcagaaaaaggggatgtaaatgaaatgggactatttaaaagagtctttaaaagatgggatagtaaaagatagtacagcctccctctct

SEQ ID NO: 69571 - DNA, 1028 bp, Homo sapiens
tcaatagcagatagagagggaagcacaaagatagaatcctggagagggcagactggaatgtggtttactgagaacctcaaagaaggtaaattcatcttcaccacttacaaatttgggccatggagttggccagtaaatcagtgccctaccaaagatgaattcctatatttttagcgatggtagctgactccctatcaaccaaaggctgggtgtcagttggagtatatacttcttggcaaaaaactacaaccttaacttaccaagatttagttcctagccattttaaatctgcttaacagaaagctcagctcattctccagacagcctcagatagctcattgatggtggcctaatctttaggcaagccctgtcttattttttgaggcatctggaatgccacatctttactttcctttttcctatggtgtctctcctcctctggccccttttaaatatgatcttgtgttttctgctcacttccctcagcgtactctgcaaggcatctgtctctttatgttcctgtgatctcaaaacttctctcccagaattaaattggaaagctgtattctattcactaactagggcagcagatgctgtctctagtctagctcatagcttctgtctctgtctctgctatatggttaacttttgaccatggcatttctgcaagataactcttgattggtgtcacgttatttattctttgtatatatccttaatatgtcatgttatttatcctttatatatatatatatatctggaatatatgcagtatctaacacagtggtgcctggcccatagtagtgctccataaatgattgtagtagcagcacttatgattataaagaaacctaagccaatagaaagggtttgtatcaagatttagacatcagcttcacagtttgaaatagagtcccagattcctatttctagaagcacccccaattgagctggctttgggaggctaactggggtggaaaataacattaagggatagtaaagcgaataatagatcactgtcagtaaat

SEQ ID NO: 69572 - DNA, 1056 bp, Homo sapiens
agtttccctcatgggaagttttctctcatcccatgggaaattctgaaattgctgattatgctttctcccatagagggctgttgtgctattcctacctgcctgctatgcagtctccttccaaggcgggagcaccagtgtatgagtcagtggatctgggccatctcttgcttggaagtatgtcattttgattcttgtgtggtagagctggcccatgattcccccttagtaaaaaccattgttctgtataccaagttttctcgtggatcacttcagtggaattgttgttctctttgtcttctcctcttcccagtttggttatagactactgccaagggtgccaaaaatagaatgtaagtgagagcaaccactgacctggagcctgcaaggtctcacaaagctccctgtgtatcaacttcctttatgagagcttttcctttcctagagcactcacccacccccaacctgggctgatactgtccttcctctttgtgtctttggtagatattctgagtatgtcagggccgccaggactcctgaagattggacagtaaggtgcatcagttagctctgcccttttctgtaagaaatgctttgctttacagctttcttgtagctcagaaaagaccaaacccaccttctgaccctttttactttacttgacttggatacatactatttatgctttccgttttgctccagaggcagcaacttggagaacagtgtacacaaggtctgtgctaaaagggtcggttatagaggagaccctttctaaattttctttagtctggaatttgtcaggttcaccttgacattgaaatattctgcctaaaagtttatatgtcttaaaactttgttttcactttgtatttgtctgagtcccgcataaagtgaacttctaagtgactctgtcagaagttttgtcctctgcatgctttgatcatgtgccacagggctgacatgcccaaagaaagggtgggaatctcgaaagagtttctcaggttcttcttagcagcatttaatagtataagtactaatagaactggttgagagaaactc

SEQ ID NO: 69573 - DNA, 1031 bp, Homo sapiens
tgggttcaagcgattctcctgcctcagcctcctgagtagctaggattacaagcatgcgccacaacgcccagctaatttttgtatttttagtagagatggggtttcaccatgttggccaggctggtcttgaactcctgacctcaggtgatccacccaccttggcctcccaaagtgctgagattacaagtgtgagccaccgtgcctggcaaattaactttatttataatctggccatccagtggtggaagactttgaccccaatatgcttgactgatttttctggacatagcacataggcaggcattgttcatttgttcacaggattcctgggcattgtgaaacgtgacaggagattcagaagtacctttggacatagagtagaattcttcacctgcttcttaaaattccttaaatatccagctttccctcttgtcactgaccgttctctacattgaatccagctgtcttttcttggcctgtggtaaatgtattaactgtttctactcagacacgtaccaaagcgagctaatgttagccttttccaagagttctcactgtccaatttgcccccacgtggcttctgttgcacactctgttgtgtaggagtcttttgaagaagcattctgctgttttggataattggttttcagtcagtatcttgcttgttctggaatgtgatgttgtgagccaatagaataaaaagacagtgtctctgtatagccagaatgatggcattctacattctggcttgtgtcaggtcaggaattctactaacaactttttgcctttattgacaggtgttgatggtacgagggagcgctttcaggcagtcacagctggcaagactgtagagcttgagcttaggaaatgaattgatggcatcatctccataaattggcattgatgtctgcaaatatggccatttgcaatttatcctaatgcaaggaagaagagtcttggctgagaccaatgtatagttcagtgactgtttattatttaatattgctgtgtgatcatgtgccttcctttac

SEQ ID NO: 69574 - DNA, 1614 bp, Homo sapiens
tccttgcttaattaagatttatctgaccctctgtgaagtataagcagctgaataccatttccaattaagtttctactttaaacatcttaaaagctaactcaccaatgagatgatctaagccccagacttcaaagctgaggcttgaaaaagtgtctttttagcttccttgactcatgtttacacatttctttagcaataacatctggtttatggagaagagatgttaaaccagctgattgtgagcatttgggtccatctccaggaaagtgaattccatgcaggcttgacatatcagattagtgggggtcatctctggttgcaagtagcaggacacaggaataattcagggaacccaagggctggaatgcacttgtgcttctgggaagccagtagaaaccagaatgcagagccagaaagccacaggtacaaggaagtactttgtctccatctctcttctctccacgtgtccatttctctctctcagcatactaactgcctttactgctcagtcacatcttaatataatgacagaatatggctaccacttagcttccaaatttatttattaccattctcaccacatgaaaatattactcaactgtctcttatcctgttccaaattcctgtaggaaaggatctggatttaggtcagatgtccacccagacatctgcaactactgagagaaggtgaccttgtacagacatggctgctgagagctcattcttaaggaacaggggatagttggagctcatggcctagaatttccacttatgtggacctggaactgtcaaagagctcccagcccaggaaaatcagattctactcatgctaaaattgtatgcttttcaaattatttacttacaaactcagtggtttggctattttgtagtattatactcttgttactaatacaaaagacagcttacagctcatttctcaattcagtaaaatagcaatggtaaagtcctttaacagtcatctggtgtttggaaaggtgattgtctgaatcgtctggagagatggctgtataggcttcataaaaaagtccaggaaaaagaaactgtacaaccatttttagtgacccattcaagtattattttttaaatcagtctatgactttgaaaacagtaaacttgcgtaattttagaagcctaggattgaattattgattcaatataggcccactccaacccagtcaaaatataatgaggacttctctgttccttagcaactaaatgaaaataaattccattacactggaacaatttttatttcttgatggctgccttctactttattccaccagtaccttcttacctagctgtgtgattatgatacgatttcccagggccttaggtttaaaagatagcttgaaatttcaattacttaatctcaatcaaagaaacatctctgccttattttgaaagacttttggagaagattcttcagcttctccactactgcccactgctgtgtagtggtgtgtttatccatgttctgtagatgagaaaatgagactatgagaagtaaccttaaatttgatttgaaacacaataggtcaggccgggtgcagtggctcacacctgtaatcccagcactttgggaggccaagg

SEQ ID NO: 69575 - DNA, 1077 bp, Homo sapiens
tttacagttcctctaatgcatttgggacgactgtctcaaagtaacctgcagctttcctgacagctcctcgcgctctctcctgctgagaactgtagcccttttctgctgtttttagaaccttctgctactatatccaccacttccaccactagatgcataaccaccaccatagggactgcccgagcttcttccaccaaaacttccccctttcatgggtccataatttgattgctgttgtccactataatttctaaaatcattatagttcccaccaccaccatagttaccaccgccaaaatttcctccttcattgtaaccatcatatcctccaccaccgctaccatatccaccacaccaccttggtttccatatcctggtccaccaccaccatagccccctctactactataaccaggaccaccagcatagttgccaccgtcacttccaaatccattatatccaccatcacctcctccataactacctctgctgccaccacctccaccaccatagcctcctcttccaccaaagtttccaccacggccaaaattacctccaccacctccaaagcttcctccgcaacccataaaattgccagatccacctccacgacctgtccgtgatccagcggactgcatctcttgtttagaaagggcctttttcacttcacaattatgcccattaatagtgtggtatttctgaacaacaattttatcaactgtatcatgatcatcaaaagttacaaaagcagatcctctcttttttccactctgcctctcttgcataacttctatggtttcaatcttgccatacttttcaaagtagtctctcaaattatattcctttgtatcttctgtaataccaccaacaaaaattttcttcactgttagatgggcaccaggcttcacagaatcctctctagaaacagctctctttggttccactacatgcccatcaaccttgtgtggtcaagcacacattgctgcatccacctcttcaacacaagaataagtcacaaaaccaaagcccctggaccattttgtttgggggtctctcattaccacacaatctgtgagt

SEQ ID NO: 69576 - DNA, 1050 bp, Homo sapiens
ggaggttgaggctgcagtgagtgattgcactattgcactccagcccaggcaacagagtgagaccctgtcttgaagaaaacaataaaaaataaagtagagcataaatattctgaaagggggtttggtgctatggaaagattaaggaagttagtagaggaagaagcagaagggctggatcatggagaactgagaggatttccccagctgaaaatggagcgtgcactggaaacagaggaaataaagacctgcggtagggtggctgcatggtagggtgtatgagaaaacagtgaaagatgaagtagaataagtaaattagagtcaaagctgggagggtcttgaatgccatttttatgacggtgtgatagtgttaaaggtgattgtggcatttagcaaaggggccatgagtacctgagtcctgtgttttcctggccatatttctccgcagtgacgccctcaagagagatatatgtgcccaaggcaccggttattaacacctgggcttgtacgctgaacctcagtgttctatgttacgcttgccttcaaacttgtttttcatgtacagatcaaccagtccaaagcccacattcccaactacctcctttatctaactcactcactaagccaatatttcccttccctaaatcaccccatagccagataccagacaagtagttaccacctctgtaggccagagccttccaaaattattcaaactccccaatcctaaacttgctcagacttacctatcctgcctcatcccttccttcctgaggaaaccacaggctcaggctaaactttccccctcactccttctgcttcctgaccaacacttatatttccccgtatggccctccatggcatggcaagcccactcctcttgggaacggaagtaacgaactcttctttcaaaggcagttgcctctgtgtctgtcaccttaccgtgatctgattaaaacaaaatcccaagtacatcttaagacaccatcttctggccagccacattgtttagagcagtgtttctcaagttacctgtggtaaaggactcatttc

SEQ ID NO: 69577 - DNA, 1035 bp, Homo sapiens
agcctctgtctgatagcaaagcttttttcctcacccccaacccctctgcccatgctgtatggtcccctaacactgtcaaaatgacaaccaggtatgatgctagatgactgaatatcagctagttctcctgaaatttcttgatacctcctattcctgctttggtgatactccacccaaaacaatacaaggtgttgtcaccctaccaacttagaaacaaggtgccttcttggtgccattttcttgtctcttttggtttaaacaattgtgcgtgtgcgtgcgtgcacgcgcacgcacgcgcacacacacacactaaaaagtcaatttcttaaaatcaaaggggcaactggctttggtggtaatagttgtcctgtggtgatcagagagaggtctgttatacttaacgagaccaagaaaactcgcttcaattcagatgttgaatacatgcaggagagcaaaccagaggatatatttttaaatgtgcaaacgtcagaatgtaagaataaaaattaaactgttacgatagtctacgtgaagcaagaccgattggaaaaactagataccaggacagtgctgctacgttcattcctcatctgtgatccctggctgttactccgtgaagccacccacagttgtataggaagatgaaaacttaattgggacttgggaattttattatgttaatttatccagacaaatgctttttgcaacaaattcatgtttcttctgtagcacagtcacagtttggtgtactaaatgtaagctttctgcaactctcctgaaaccatctgcaggaagggcagttccacagtagtgtaaatttattttaatttttcaaaaaacttgggattttaagactttgtcccacagataagagaggttttagaatgtgcgcaataaggtcattgctatgctcaggctaaatttaggaagagagtttattacacaagattcagtggtttagacagccacggtgagattgaaaatgtggttaaaatgttcttctctgctccctgcacctttgcatgttttccagag

SEQ ID NO: 69578 - DNA, 1014 bp, Homo sapiens
tgggctcaactgtcactgtgctgctccaattacagactcagagcttcgcttgagagggagcatatgacccaagcctgtcctggggcactgacttcagtctcctcttcttcctcaaaccaaagaccaggaaaactgaagcacttgtgctataggcaaaggaatacttaatgtagttctttgcttttctctcctccatagtaatcttcatttaaagatttcgctgtgctgttaaatttttgagggtatataatattagtgccatgaaacatgcatgcatttttgttgattgtcagtacatagttgtccattaaagccatgttccctctgccagatattaaaagccagctgacagattttatagtatttattgagcaacaataatgtccgagacattatagagaagacaaaaatactgtaagaattaatatccattggaattttctcatcaattaaatgggatttgtatcaattgccaagtataaacttccattgataaaagtaactttttatagattactaaaacctagctttgagtgatatttccatgtctagttcttaacaataatagatttcatgataattaaaggcaatgtagagtaactagagaacttgagaagagaggatcaaattcattaagtgactaccagtggaaatttgaattatcatttataatatatctttagtgtgagagttcaaaataagaaatatgatctcttgcccagtggttgctgagaataacagcacaatgatcattacatatggagcacagttaaatagtttctgcttaacatattgcagcttatcagctaatgttcaaagcaaggaagaattattagtacgtttaatcaactctgggctgggcatggtgtcttatgcctgtaatcccagaacttttggaggccgggatgggtggatcactttgaggtcaggagtttgagaccaacctggccaacatggcagaactccacctctactaaaaatacaaaaattagctgggcacggtagcacgcacct

SEQ ID NO: 69579 - DNA, 1051 bp, Homo sapiens
taggattttatatcatatcagagaaaaaggctctgaatatttttgtatattgattcatttgatcaaatggatcaatatgtaaaattttctatatactttatgagaataaaagttcaaagagatcacgttaatgtttcttccctatggtaaatattaacccatatttaactgtaacccatagtatgtgggacaggttagactgggtttgagtagaagcatagtcagaagagttcctggaggaagtaggttctgaattgagattaaaaagcagcatgccttggtttcaagtctttggggcctacttcctgtgccacatttgtaatggtctaacagaaagtcacgatctcccacctaaggtctgctgtgaaatgctgtcacatagacttgagcttttgaatctttacctaatctactcccgtattgtttgagaaattatttttccatttgtggatcatcctccttttgcctgttcttttgcacatttcattgctttttggtgctcccgccaaagggtgagcaactgtagaatgaggaggtaaattcaaatctgggtacatgacaaatttggtaacataaataaatatgaatatcattctccaaaaaaagtgaagattttccagatttcagatatcctggctttccttgctcaacttaataaacaaagtaataaacactttaatgacagagctgtcagatctagaagagatttcttggtctaagaattaagaaataactgcctctcagtctaaaggccctaatatatgaattggagaaacacaaaatgaatattttaatctaaaaggaagagtgactccttagcagaagaatatcattgcattttttacacaagatagaacaggtagctctgatcagccacatgtcctgatgagtgacaatgcagtctaaggcaaaaccagaagataaggaaaccctaaactctaaattgtgtgctgctctgactgatactgtaaagcaaaatcaaagttgaaaacaacccagaaactttgattcctaaggggtttttttcttttgctttttttttattcctgag

SEQ ID NO: 69580 - DNA, 1024 bp, Homo sapiens
agagtctctgcctgtcgcccaggctggggtgtgatctcagctcactgcaacctctgcctcccaggctcacgcaattctcctgcctcagcctcctgagtagctcgggttacaggcatgcgccaccgcgcccagctaatttttgtaccttttttttttttgagatggagtctcactctgtcgcccaggctggagtgcagtggcgtgatctcagctcactgcaacctctgcctcctgggttcaagtgattctcatgcctcagcctcctgaatagctggaattacacttggctaatttttttgtatttttagtagagactgggttttgccatgttggccaggctggtcttgaactcctagcctcaagtgatctgcccacttcagcctcccaaagtgctggattacaggcatgagccattgcgcccagcctgatactggtttctgattcacgacttgcagcacaaaatctatcagctcagagttgaaagtcactcctgagagtccctttagttttctaggctagtttggtagactagggaggtagggctatgggaaaccaaagatgttttttcagagcaaagaagaagatactttgaaaattgctagcattagagaataagtaagacatcaaagttaaaggataatgaggttatgaggtgtagccaggacctctcatttattgtttgtggatatggaaatttgattccattgtggagagtatcagtatcatcttggaaaatcatatgtgcacaaatctggaaaaaaaacctaatcattcttgagtagaaaaacaagtaaatgaggacctattcataaaagggactaccactcaattgttagaatgagtaatctaaaattatttcaacatgagggatcagtctcacaattgtaatgttaaatctcaaaaacaaggtagagacctaaatagatggacctcataagacaaatacagcctggatgtggcagttcacacccgtaatcccagcactttgggaggttgaggagggaggatcggattgcttgaaccc

SEQ ID NO: 69581 - DNA, 1154 bp, Homo sapiens
gctggccaaggtgggccctagggcctctgccaaggaactggactcgttcgtggagtgggacaaaatgtacggctccggacactgacggcgcgcgggggaggccgcgggagccgcagtccctccgtccccgccgcctccgcgtgggagggatgtcactgactaaacccggctggcaggggctggagtggtgaatgtgggatcggggacaggaggggtctgccggtggatattttttttttcgtgggaaggaaaatgcttctgccaggcagatgccatatgcgccgtgtactcaggtttttcctatttattgtggactggaagctcgccatctccgcccggcagaccgggcagatccggcatgggctggcacccggggccttaagaactcctgctctcttgccacaacgcttttgtctcctcgctatctgaatggcaccctccttctccctcactctctccatcccattctctgcattctcttggttttctctcccttttgctttgtcgctgacacccctgcccaccccatgctggccctgtttctctcctgcccctccctccccagctctccatccctcaccctctgtgcttctgtctccatccctggctctccagcgtccctggccttttggtccctgagctttaatgcctttccctgccttctgttcttatttggactgcagtggccctttgcaggagctctggaggcccaggggctgaggaggagggttacccctctacccatctgaaacctagggtctagggggatcaaggaaaaaaagtccccaaagaaggggaattttttgtttgtttttgaggggagatcccagaaatgtagcttgtttcatattttagtcttcttatttttgtaaaatgtgtagaatttgctgtttttctttttcttttgacaactcaggaagaaactgacctcagaaagaatgttagactttggctgctctcctgtgtgcccctcacacctgccccctcccccccactccatccaggggaccaaattctcccagacactcaaaaaatgagacttacggggaaggggagaggaagacccagaggcctcagtgaaaccccagctattcctggtcagaagcagaatgtattcctaagggcttcctccccagggccgaggcctaggcatg

SEQ ID NO: 69582 - DNA, 1054 bp, Homo sapiens
agcttggtgacttagacaagttaatcgagcctcagtttcctcacctgcaacatgggaataacgtcctcactcagattaaatgaactgatgtgtgtgaagcactcagggccggacttggcttgtgttgagaatcccatatgggagcaggcagacaggagctgctgtggttgctcagtcttttcctagcaccctccccccagtatctttttccctctgtgttcctgtggccctgcaggtgtagggggccacccccttgaggacagccctgcccactcacacccaggtggaccggccgggctgcatagctggagttactcggctcagcccccccagggctgggaagagggcaggaggggctgaggcagctgctggggactcctgggtgggctgcctgggcctgtttcctcgcctttggtaaggcctggccctgtgggggcatgtctctctcccacccccatgcacgggaaggggccatatttggggctagggcacacaggatcacccagactttaaagcttaagccttttggaggccacatgccacccaaacagactcaagtcaaccttggatcctaaaactggctacggggaggggaagtgtggggccctccaagagactctaggctcttgggctgagccttgtggtccatgaccctgaggagttcctgcagataactgtattccaatgtttttgtttttgtttgagatggagttttgctctgttgcccaggctggagtacaatggtgtgatctcggctcaccacaacctctgcctcctgggttcaagcaattctcttgcctcagcctcccaagtagctgggattacaggcatgtgccaccacacccagctaattttgtatttttagtagagacagggtttcgccatgttggtcagggtggtcttgaactcccgacctcaggtgatcagcctgcctcagcctcccaaagtgttgggattacaggcgtgaaccaccgtgcctggccaatgttattaattccctttgtagccccatgtatttttcttttatgcattgaggaagtatttttgagaacag

SEQ ID NO: 69583 - DNA, 1066 bp, Homo sapiens
gtcacttgctcctccctccgtggcctgcacctgtgctcccttccgcctttgtggcggggtccactcagggctttgactgaaatggagcatgtactccctggccctgcccccagtgggcttgccacagggcttgacaccttgtgggtgctccataaatattggttggctgaataaaaggggttttgtaagggcctttagccaggcagtctgcatagcatggaatctggccaccttcaggtaaacagctctgtgctcttgggtggtggagacccctgggtggggctcctcctctccctttcccttatttgcctccttctcctccccatgaccctaccccacccccccaagtccggggaggactttgccccttcccttccccacagaccagcattctttccctgccattatcattctgttaaacagagaggccagtcaggatccatatggatcacattaacaattgcttattatctgggccaggactcccccgactctccccccaagctccgactgctgccattgctggacccttaggagccctgccttcccctccccctgccgtcggtcagccagggagggcaagagacaggctggtctccctcaccttccctgtgccttctagcagaactttgcctctcctggacttggcggttatcgactcctttacccgatttaatgaaaaccaggttcctggaaggagcatggctctgcaaagctccagggctgcagcagggagatgtggactccaggccccagtgcccctgtgctctgcagccctgagacccccttcaggggacagagactgtggggggggggcggtgagccacaagaggtcaagtatggggtgctggcatctgctaccttagccttgggctggtcctgcccccttttgggagctggctgtctggtgagggagatcagggcagagggaccctgccaggctctgtggtgttgggctcccagcctttccctgcagtcaaagaagcaagaaatctgttagagcttcccagagcagccactgaattggccttgaaggatggggagtgtacttcacgtttaaacccat

SEQ ID NO: 69584 - DNA, 1070 bp, Homo sapiens
gaggtaaagtatcttgcccaaagttcaatgctgtcaagtgagctgatggagctgacggaggtggcatttggtctgtggagccagcattctggttccctgatctgtatatttagctgtgtggctgactttactgtctaggagtgaagcaaccacaggtcccctctgggacccctggcctcgaagccacagtggcagcacttagcaagaaataaggaaagatacctccctcccccctggcttcagatatgtgctcctgaggggttggctttcccttcttaactgcaggggttggtgactgtactgggttgaatagtgtccacccaaaattcgtgtctaccaggaacctgcgaatgtaatcttacttggaacgaggatcttagcagcagatgtaaccaattaagatcatttgcactcatactggattagggtgggccctaatccaatgactggtatccttataagaagagaggaatgtggacagagatgtagatgcagagggaagataaccatgtgaagacatggggttatgcttccgcaaaccaaacaacaccaaggatcctgggaaccaccagaagctagaagaggcaaggaaggattcttccctagagccttcagagagcacatggccctgccaacaccatggtttcagatttctagcctccagaacagtgagagaatacatttgtattttaagctacccagtttggtagtaggaaactaacacagtaacctagcactgtgtgcaccacagcttggtggatagagcatggattggaaaccacttagacggactgggtggggtgtgcctatttgggggagatgagggagaggagaataagttatttactcatccagctacactgaccaacttgtagacaatgcctccccatgactttatgtgattgtgtgtacactgtgtctggcgagtgtgtcttcagctttattttttccggatatgacgatgggagttcttcaggttggtgaaacttagaaggtgagaattccatttaagcaactgttctccctatctcttggccatcctttccacccctagatctcagatggtgaag

SEQ ID NO: 69585 - DNA, 1056 bp, Homo sapiens
cagttatattgaagcgattattgacccacagatggatctgggagagatgatcaggattgtattcgctcctgacgtacaaagcctgatgctttgacttctcagcagcccctaaccttccagcaatgggagataaagtgtgttctgtggctctcttctcttacactaaaaataatgattctcaggtgggttcagtcgtctttaataaaccagacagtcaagaaaagacaccatgccactttggaatctcaaaaacaagttcattatctccggctttgatatttgttcccagtggtggagcctgtgcagcggggtctttgttcacgggctaatgcttctcctaagcacctcgtgtgtgttcttcggcctcactgctctgtggcttaggtatctgtgctgtggggtttgagaaacatggtgaaggtgtatgaacagagcttgacatttgtggtgagataatgatttgcatgaataaggatgttcgtcgggccttattaagggccatgtttttggaatgtgtaacataatgttctctactgggtagtaaaaaaaaaaaaaaagggagattgaacctctaggtttgtcattttatgtgtgtatgtataaatctttaaatcctcatataggaatttttatcctgcccctaatatatccaggatttttaacagtcatttccctgctgatttgatgtagtgtttgtggggtttttctggttgtgagcctagttaagaatgtttgataatccaagtggttctgaatggggcagagttcatttttttgtaaccttcctaaaatggatgtttgtgggggttaaggtgggtgagtaaaatagggagttcgtttctttttttggtaaattggaaattaggttgtgtgtccagcaaacattctccagggcctttaaacttcttggccagacactacagttttttccaggacacgtctagttgccaatagtgtatgctatggagaccactgctgcaaagggcttaaagtaaaacgtcagttctgggaaaatagaggctgtgggataacaagaagttgatttttttcccctcc

SEQ ID NO: 69586 - DNA, 1034 bp, Homo sapiens
ctgttgttgtaggagttggtgtaagagggtcttaatctcattttcctctctgtattcataaaaagggaatcctagagtcctttctcaccagtgcttctgatgctggacataactgcaggcagccacagcccatcagttccacttggactgggaatgcgggaaccttttaagtccaacttacatttctctcactctgcaggcactgcctcatggccaggttcagatacctgctctgagtttctgttctcagtttttcactctcatgcaggtttaacttgagctttggcttcagaggcaccatttctgtccatgtctgctctctctcctctgttatggagaaatggtgtgctaagcaaaaatatgatttcagagagtatctttctttcctttactctgtagagttgccatactttggtttagctgtgaagtttccatcccaggcaatctttatctgctctctagggttcagagacagtgccactttaggcaactctgggctttttggttttctttagtgtccacccagtcttaagcctgcatttgtctccctaaatattttgaatttagcataatgaaagtaactgcctttccctttaaaccataacatcacacctaatatttacacagttaacatataggagatttctttattcattggattgggtatgtgcctggaacagtttttggcatggggaaataacagagaacaagatgaacaaaagtccctaaatctctattatggaacttataattgcaatggcttagactgaaaataaataagtaaacacaattatcagtccatgagtgctgtgaagaaaataaaacaggatgctgtgccatagtgtgcctggagctgccacttcacctctctatcagcttcattgttttatctgtaaaatggggctaatacagtcttgttatttgtggtagttccataaagttgaattgtagaactgaattaccaaatcttcaaccattgctcctaggggaaatacagggctaggttcctgcgagcctctggtcactttttcaac

SEQ ID NO: 69587 - DNA, 1032 bp, Homo sapiens
caatcattcctatccctcttctcactcaaaactgtgacatacacggtctcctctccattcgtccatactataataaataggtcaggaagaaaataccagggataaatatccttccctgctctattgagccagaagtatgtttattcagactcaacaaagaaaacagtggttttacatgttcatcataaactgatatcaaaggagaaatgcaatttcctgattgtctaaatatgacagctgagtctgcacacataggtcccaggaacattggacacactccctcataatgaggcccactcatttcagtcttaccttgacattctcttgggcagcaggtgggcccttgctagatgttcaggtatttacagtcagccataaattaagttgcaatgacaggtctccttagcataaacatcaaacgtctcttctgagtgagaacaaagctttcattctctaactgagacttaaggttgaacttgtttaaacagctctctagggctgggtttgtctccaagtagaatgtcagaaaggcagtttgtagaatggatatagtgtggagctggctttccaaacacctttctcttatgcaaaccccattccaagaccttttcccagattggaattaaataccaagcttatcaagtgtcttattgttaaatctgtgtttctccccaccccccaccatacaaatagcttcctttattaagtcagttatattttttttcataagtactttttaccagtacatttgttgttgttgttgttgtttttctgtataccaccattggcacctgtaaaatttgactttattatggcttgtgggtacttgaaagctttttgttttaatgtatttttaaaatctaattttgatgattgtaaaaggtgaaaatgtaacttgggtctttttttcttttaaccaaatagcatgtgattgctttactgctgcaagatttttctatttaggctagttagaactttgctagtacagtatcagttcctagttattgccttcctgccccccaagaaagccac

SEQ ID NO: 69588 - DNA, 1065 bp, Homo sapiens
tagaactacttaaggaaatacactgaatttgatcttgcatgttggatgaaatcgattacagactaaatttcaagtagtctggaagagggaatacttagtcttttctagactaaagatgtgtgtgtgccagaatctgtgtagctaatggtgttgggttgaggaggggagtgtggagatagagggaatacctacacaggacctggaaaagtagaagaggaaaatactactaaaaaaaaaagaaagaaagaaaaaagaattaacatcacaaaaagagacaactggaagttctgtgccttgtgagggatggtagggatggtattcatcacttgttagtattctagccagaaatttgagcctgaatcacatcaaacctctaactctagctaatagcttatagaaaatacagaggagagaggaacatgttaaatgacaccttggagagtcaacccaaaaaatccagaatgtgggaagctgcaggacaaatggcctagattcttcaacagataacttgcaaggaaaaataacagtgcaagcgggaacctatagattgaaaaaggttttaggagatctcttagctgagtgcaatggaagaacctcatttagatctggattttcattttattttatttttgaggcagagtctagctctgtcacccaggctggagtgcagtgatggagtcacagctcacttcagcttcagtctcctgggctcaagcaatccttccacctcagcctcctgaagagctgggacgacaggcatgtgccaccacacctagctgatatgtttactttttgtagagacagggtctcactgtgttgcccaggctgatctcaaactcctgagctcaagagatcctcccacctcagcctcccaaagtgctgggattacaggtgtgagccaccgtgcccttcttggatctgggtttgagccagttgttaattttttcaaggtaataaaggatttttgaacactgactggatatttgattatattaaggctattattgtcagttattttaggtatgataatgatattgtgggaaactgcaatttaaaatataactt

SEQ ID NO: 69589 - DNA, 1032 bp, Homo sapiens
aggtggctctgcatgaagtggggggcagccccacattctccaaaaggaagatgctttcctcttgtcaggcatctcaatttgaagaaaaggtagttcctctgtctctcacaggcataaagtagagcacttagaggataatagtggagcttcaaaagccttgtttgtgagctaaataaacaggtgaagttgtgctcagttaaggatatctttttggccccatctctataaaaactgttttggaacatcaagtatgctaagggattatattctaagtttggaaaaggacctgcaaaagatctcaccattgatgtcaatgtctgctccccaatttcctgcagctctgctgtgtgcgtgcaccagctgcctccaggccaactacacgtgtgagacagatggggcctgcatggtttccattttcaatctggatgggatggagcaccatgtgcgcacctgcatccccaaagtggagctggtccctgccgggaagcccttctactgcctgagctcggaggacctgcgcaacacccactgctgctacactgactactgcaacaggatcgacttgagggtgcccagtggtgagtgcatgcccttgttgggctagtggctcagcttggagatagggtaccccgtcatttcatttttttctactcttgcccactcacttggtttgacgataaagatgccttttggatgttcccgaaggtgacaaaggctggggtttctcagcagttgcttttgtagattagagggtgaggaagcagattttcaagttagtcccagaggtgcccgcagtgtttagagtagtggcttagcagccataggcagcggtgaggagtggaagaaccaggcagggattcccacgggaggatgtgggactgatccagaaagagatggccccagagccgagcaaaggtgactcctcaagggaggatgatggttagatgtgaggagggaccagaataggaaaaggccagtgaccaaagccgagaaacaccacataccatccttttgcaagcctaccattcagga

SEQ ID NO: 69590 - DNA, 1016 bp, Homo sapiens
taagataagataatgggttcacagaaaatctctcattccgtgggattcccaaggtctagtacacaattatccactacagaagtcctgcctctctaagctttgcaactgtacgtacatctattaaaattcagctggtcccacctgagcagtggagtgctcaatttcagggccccttttgagaaacaggagtgtgccagattcctgtgaggtggtgacagctaatcattgatctctgagcaaccacaaggggagtttaaggacatccagtaaagcttagagttgggatttggtgaatcattgacttgtaccagttgcccaagggtttttggtgggggtgaaaataaaggcagtgtgggcctccagcatagcatcagcactatttcctgtactgccttttgttgaccaagtctttctcagatgagggaaatgaaccaaacactggaccttggcataagacgagaatttaagataaaggagctcggggttgtttaggtctcagggtatagctcagctagctattaaatgtgaacatgaatgcaaaagaatttttttacttacttatttatgtatttatttatttagaaacagagtcttgctctgtttcccaggcaggagtgcagtggcgcaatttccgctctctgaaacctccacctgcctggttcaagtgattctcctgcctcagcctcctgagtagctgggattacaggaatgcgccaccacagcgactaatttttgtatttttagtagagacaaggtttcgccacatcagtcaggctggtcttgtgttcttgacctcaagtgatccgcctgcctcgtaaagaatttttttaatgaagataaaccattatttttgtgacaatggtattgcattcctttttttttttttttttttttgttttaagatatggtctcgctctgttgttgcccaggctgcagtgccattgtgcaatcacagctgactgcagccttaacctcctgggctcaagagatcctccaccttagtctcctgagtagct

SEQ ID NO: 69591 - DNA, 1172 bp, Homo sapiens
gagggcaaagaacattccaggccaatgaaaataccttgagtaaaaagacaaaggcatgaaggtccactgtatgtttaaagaacttttatgatgaggagaccagcatgatgtgcttgtgctggggaagcagggggacgtcaggctgccccaggtgtacaggatcttgagggctgacctttatcttctaggtaaggggcttctactgaaagtttccatgtgggaaatgaatgttcattttttcctttggaaggaattctggcagtggtgtggaggatgaattcattcactaccagccttctgttgggaagggtggggtgaggcggggtgtgtgtgggtgcacagggcaagagcaggctgagatgggaggcaaaagacctgttggaagtcttttagagaaggtccaaaagtaggacaggcggacggagatggagaggcgggggctaatttgagaaacattttggtggttctatactgttgtcattaaaagcatagattatagagtcagacagtcctagattttaagccctgctttgccacttactgcttgtatgaatttgaatattacataacctcctctttgagccttagttttcttgtttataaaatggggatgataacagcgccttaccttccaggtggtttggggaagtgagataatttatgtaaagcccttagcatggagcctaatacatagtaagcatgcagtaaatggtagttcccatctaccagacctagggattaataatgtattaattatttgattgggggtgggagtaagacagttaagagtcacttgtgatggtaagggtgattggatatatagagatacattgaatgagtcaaatgaagcaatgttgagttttataaagacagtaaagttaatcttagactaaacatagatggtcctccattctacatctggagttcgcttgtgagcagagcattgctctctttggagatgggaacccatgggccgcacagcactgccctctagtggctaataagcagaacagccagaaggtggcccccagcacatgagcccacactttcatgttctctgccctctttccttcctccaccaaaataaagcagatgtgggtggatcggcccacaggtggctggctgaagagttggtaaatctggtcaaacatttacattcaaatctatcatcc

SEQ ID NO: 69592 - DNA, 1034 bp, Homo sapiens
aggcattgcagcaacttcccttcagtccctcagcacttctgtacctgagcatatttgctcagggaaggcgagtagtagtagtaaatattaatacaaatattagctaaatacacatgtccttctatggtcgtaacttagctacatgaatgcatttaatcctcacaacagtcccatgaaataagtagtcattctgattttatggatgagaagactgaggtacagagggctaaagtcacttttccagggtcactggattagcaggaggcaaagccaggactcaaacctatacagtctggctgcatagtctatgcttttaacatttatatcatctctttgtaaagatccctgtttttttctctgccagggaagcctggaattgctcatcgagacttaaagtcaaagaacattctggtgaagaaaaatggcatgtgtgccatagcagacctgggcctggctgtccgtcatgatgcagtcactgacaccattgacattgccccgaatcagagggtggggaccaaacggtaggagggcctgggactctgcccttgctaagcagcttctactgagtatcccatctgtgccgtttcccatatgcgcaggagaaggaggtgttgaaaaaggaggcgaggaccttgctctcagcccactgaaagttgaattgaacatgcactccccacaatggaaagttgcatcactgcatctaacagatacaagtgctgagagcacagctccataaactgtatgcacattggtgttggtggtattaaggtcggagggtagagaaggacaatctagagcaggatttagaaggatagcaggcaacaggtgtggctcgggaaagagggaaaacactgtcatctcctgtgcagagagctgtgaaggaggcagggagcatgtgcttagggactggagaccagatttgccaaactatagcaaaggtaacccaggatagagatttggggcacccttcaagattatgggcctgcttcccacttcatgcagaagtgaggtaagaagtaaggagctgtgattgc

SEQ ID NO: 69593 - DNA, 3977 bp, Homo sapiens
gcgcggtggctcatgcctgtaatcccagcactttgggaggccgaggtgggcagatcacaaggtcgagagagcgagaccatcctggccaaccaatatggtaaaaccccatctctactaaaaatacaaaaatcagctgggcgtagtggtgtgtgcctgtagtcccagctactggggaggctgagacaggagaatcacttgaacccgggaggcggaggttgcggtgagccaagattgcgccactgcactccagcctgggtgacagagtgagactccttctaaaaaaaaaaaaaaaaaaaaaaaaaaaaaaaaaaaaaaaggaagagccagggaacaaagggagccttgcagagcatttccctaaggtcggccgccgggtggatgtggatctgccagactgcactgagcgggaggtggcagggaaatgagtgagagcctagggaccagaaaggcttctccagggcatgaccgagctgatggctcctgggtctctgcacaggcactgcgggtgatggggaagatgatgcgagagtgttggtatgccaacggcgcagcccgcctgacggccctgcgcatcaagaagaccctctcccagctcagcgtgcaggaagacgtgaagatctaactgctccctctctccacacggagctcctggcagcgagaactacgcacagctgccgcgttgagcgtacgatggaggcctacctctcgtttctgcccagccctctgtggccaggagccctggcccgcaagagggacagagcccgggagagactcgctcactcccatgttgggtttgagacagacaccttttctatttacctcctaatggcatggagactctgagagcgaattgtgtggagaactcagtgccacacctcgaactggttgtagtgggaagtcccgcgaaacccggtgcatctggcacgtggccaggagccatgacaggggcgcttgggaggggccggaggaaccgaggtgttgccagtgctaagctgccctgagggtttccttcggggaccagcccacagcacaccaaggtggcccggaagaaccagaagtgcagcccctctcacaggcagctctgagccgcgctttcccctcctccctgggatggacgctgccgggagactgccagtggagacggaatctgccgctttgtctgtccagccgtgtgtgcatgtgccgaggtgcgtcccccgttgtgcctggttcgtgccatgcccttacacgtgcgtgtgagtgtgtgtgtgtgtctgtaggtgcgcacttacctgcttgagctttctgtgcatgtgcaggtcgggggtgtggtcgtcatgctgtccgtgcttgctggtgcctcttttcagtagtgagcagcatctagtttccctggtgcccttccctggaggtctctccctcccccagagcccctcatgccacagtggtactctgtgtctggcaggctactctgcccaccccagcatcagcacagctctcctcctccatctcagactgtggaaccaaagctggcccagttgtccatgacaaaagaggcttttgggccaaaatgtgagggtggtgggtgggatgggcagggaaggaatcctggtggaagtcttgggtgttagtgtcagccatgggaaatgagccagcccaagggcatcatcctcagcagcatcgaggaagggccgaggaatgtgaagccagatctcgggactcagattggaatgttacatctgtctttcatctcccagatcctggaaacagcagtgtatatttttggtggtggtgggtttggggtggggaagggaagggcgggcaaggagtggggagggagtctggggtgggagggaggcatctgcatgggtcttcttttactggactgtctgatcagggtggagggaaggtgagaggtttgcatccacttcaggagccctactgaagggaacagcctgagccgaacatgttatttaacctgagtatagtatttaacgaagcctagaagcacggctgtgggtggtgatttggtcagcatatcttaggtatataataactttgaagccataacttttaactggagtggtttgatttctttttttaattttattgggagggtttggattttaactttttttaatgttgttaaatattaagtttttgtaaaaggaaaaccatctctgtgattacctctcaatctatttgtttttaaagaaatccctaaaaaaaaaaattatccaattgaacgcacatagctcaatcacactggaaatgtttgtccttgcacctgagcctgttcccactcagcagtgagagttcctctttgccctgaggctcagtctctctcgtattttgtccccacccccaattccttgagtggtttttgctctagggccctttcttgcactgtccagctggttgtaccctctccaggcatttattcaacaaatgtgggtgaagtgcctgctgggtgccaggtgctgggaatacatctgtggacaagacatgcttgggtcctactcctggagcactgtaaaaagagctgattcaagtaagtagatgcctgttttgagaccagaaggtttcataattggttctacgacccttttgagcctagaattattgttcttatataagatcactgaagaaagaggaacccccacaaccccctccacaaagagaccaggggcgggtgatgagacctggggtttagaaccccaggtgagacctcaaatcactgcattcattctgagcccccttcctgtccccaggggaggtgtattgtgtatgtagccttagagcatctctgcctccaacccagcagttctctgccaaagcttgtggaggagggagagccctgtccctgccctcaggctccccagtgctcctggcccttctatttatttgactgattattgcttctttccttgcattaaaggagatcttcccctaacctttgggccaatttactggccactaatttcgtttaaataccattgtgtcattggggggaccgtctttacccctgctgacctcccacctatccgccctgcagcagaaccttggcggtttataggtaatgatggaacttagactcctcttcccagagtcacaagtagcctctgggatctgccaacacacgtccactcccaagccactagcccactccccagttggcccttctgcccttaccccacacacagtccaactcttccacctctggggaagatggagcaggtctttgggaagctcccacacccacctctgccactcttaacactaagtgagagttggggagaaactgaagccgtgtttttggccccccgaggctaaccctgatccatagtgctacctgcacctctggattctggattcacagaccaagtccaagcccgttcttacgtcgccataaaggcccccgaacggcattctcggtacttctgtttgtttttgtacattttattagaaaggactgtaaaatagccacttagacactttacctcttcagtatgcaaatgtaaataaattgtaatataggaaatcttttgttttaatataagaatgagcctgtccaatttctgctgtacattattaaaagttttattcacagagctgctctggtgccatctgtcccacatacgtagtacggccacccagcttttgtcaggggagttgggaatggggtggatgttctaaggtcagggtctcgtgctcacaccagctgtagcagaccccagcaagaggaatgctgttcccaacatcctgggtcttcctgagactgttgctttgtgttcctagagggcgggtctggcatgcaagggacagaagacacaaagcatccttttcttgggctttgtctgaatttgtcttctcacgttttttcctgtttacaaaagagggtcatgttcctagttagtcacactctctcatgtcttagaggcatgagcgctcctcctaagctgaagtgaaattgtgaattctgggatgcttaggtgact

SEQ ID NO: 69594 - DNA, 1045 bp, Homo sapiens
gtccttcctagcctcggcccgccgggtcggttcctggctggtgtctgctgagggagtggggggcccagccccttctcttctcccccgccaaaccacagtgggagctggggcagggggagagccaggcaatcgggggccaaagatgggggtgctcgcctacagtctgcatctgtagtgccttgtggggtatccaggaacaccctcccagcaggggatgggaaccctgtcccatgaagccctctcctcagctttacttgctcccccgcccttagccttggggagaaatggcccgtggtgggctgaccccccaccctccacacacacagttccatgacccagcgggcccccaggggcatcaggtgctggtcctcctccctcctggcctcgacccctaagggcttcgcccctcccaggggcctgtaactaagtcgggtcctgccaggcagggggcctgtgttctgtgccccttgggagacaggaactggcgagttcaggtggggtggggacagcacagactgttccaccgttgtgcatattgttgcttctgaaccacaaactgtataaatggatggttttttgcatctgtgtcagtgtggtgactgcctgagggggaggattgggctggggcaagctctgactccaccatcccaacccccgcccaacgcacacacatcttgttttcttgcagcctgaagccagggaaataggctgggagatttaaacttacatgtatgggcctgagctggaggccccacgcttcttcacaacttgagcctccctccccagatacccaagcaggtggtgaccaaggcttgcctcaagtccttagccatccctgtagaaatacgtgtgcttggcatgcctttcttcccagcttctgaggtctcccttgaggggcacaagccagatctgtagggacctgaggcattaccacctggcctgtgaggggcccaatcacggctcactctgttgttctagcagtcttcagcggtttcccaccccaggatgagatttttcttttttgagatggagtctccctctgttg

SEQ ID NO: 69595 - DNA, 1073 bp, Homo sapiens
cagaccctccctacctgtcctgcaccatggttcttgctttttgagtgggtcccatttctgtttctgcttttgctccttgagcatcccttctgcacacagcagtcagcgtgatcttttcaaaaaggaaactggatcacaaccctcctctgcttaaacccattatgcctttccctggaataaaagaataaggtccaaactctttaccatggcctatccataacacgtccctccggggagacaaataacaacacagcttccctttctccaggctgacagcagccacataggcccaacagtttggtaactgggagccttttgtgcagtacccaacctctgcaactatatcctgatgccctccatgaatccctctagaatctggtccctgcctctccctctgatctcaaattgtttctccttctatgtcacttgttacatctaagcacactatcccttctgctcctattcctcaaatatgtcaagctctctcctgcctctggccttcacccatgctgtcttctctgcccggaacactcttctttgcaagaatgatttctctatcctcacacctcagctgaaacatcacctcctcagagaggtttgccttatcaaataggaacaagttcgctgaccccattatttattatttatttatttttttgagacagagtcttgctctgttgcccaggctggagtgcagtggcacaatctcggctcactacaagctccgcctcccaggttcatgccattctcctgcctcagtctcccgagtagctgggactacaggcgcccgccactaggcccagctaatttttttgtatttttagtagagacggggtttcactgtgttagccaggatggtctcgatctcctgacctcatgatctgcccgcctcagcctcccaaagtgctgggattacaggtgtgagccaccgcgccctgccgaccctattattctttatcttgagtcttctgggtttgttagtttgtttgtttgatttttgagacagagtttcactcttgtcacccaggctggagtgcaacctctgcctcctgggttcaagcaattcccctgcc

SEQ ID NO: 69596 - DNA, 1068 bp, Homo sapiens
aggcgtggtggttcatgcctgtaatcccagcactttggaaggccgaggcaggtggatcacctgaggtcaagagttcaagaacaacctggccaacatggcgaaaccccgtttcttctaaaaatacaaaaattagccaggcgtggtgatggatgcctgtaatcccagctatttgggaggctgaggcaggagaattgcgtgaacctgggaggtggagattgcagtgagccgagatagcaccactgcactccagcctgggcaacagagcgagactccgtctcaaaaaataaaaaaaagaaaaggataggtgacttctgtgtccctatgtgctgggctaacacttccacatccattaccttactgagacctcacagtacatctgaaagctctctatttgacagataaagagactgagaattaggttaaggcagcatagctggcgcctggcaaggccaggatgctctcatgcctgtttgtctctatagcttagggtggtgagaaggaagtcttcctggaggaaggggtgtgaggacagggtggaagagatggtgagtaatgagctgaacttctcaggctaggggcctcgcctgtggaaaaagtggtattggcatggtgggtatatgaggtatatgagaggtaggacccgaaagagcaggtccaaggtttgccagggagcagtaggaggaggggccagcccagagagttcccggttccatgcatgcaggtgctgtgctggagggagggagagcattcccatctaaggggagcataggggggctctggagacttggtggggtccacaaaacaggggaggtgggcttggagaagagctctgctaacacatgtgggaaaacttattagaaggagtgaacctctggaccctcccatttcccctggaaaccaaaccagagaccttgcgctgaatggcagcaggagaagaggaaggacagcaggaggccccttctgctgcccagcccaagctcatgaggctgggaagtgagggaggctgtgggattccccagctcaggagagacgtcaggctggctggctgggaggctgcctggtcctgca

SEQ ID NO: 69597 - DNA, 1051 bp, Homo sapiens
gtgggggcgggggtggtctgtatttccagacctcctccatggtggtctggctgtgtggagggcagggcacagttccttgacttggctcattcccccccaacgccccccctttcttttttttttgagatggagtctcgctctgttgcccaggctggagtgcagtagcgtgatctcggctcactgcaatctccgtctcccgggttcaagcgaatctcctgcctcagcctccagagtagctgggactacaggcacccaccaccacgcccggctaatttttgtatttttagtagagacagggtttcaccatattggccaggctggtctggaactcctgaccttgtgatccgcctgcctcggcctcctaaagtgctgggattacaggcgtgagccaccgcgcctggcaggctcattccctttttatgccttcgtttttgatagatgacctggggatgggagaaatgctgcagaggtggtttatttacagtgaattgttaatttggttgtggggctagtattaggggcacattgggaaaacacaggctgggcagaggttggtaggttcacaacagttatgcccactgggtgctgatggatttgggggctgtcgtcggcctggcttggggccctagtggtggggctacaaggcttgctcctagatctactccaagtgaacatttaagatcagtgacttggatggagacttaaaaaggaagtcagctgactccgtgtagtcatccagagctgtgaggaatgacaagtgcacagtataaaatcaagattctaattgaaggtaactgggcagaaggatgggccgagattaacggtgtgaatgtgactgacgattcctgtgctgaggcctctgctggacttaagaaagtcagctgaggagttcaggccctgtgcctggctcaaaggcccagggacccaggcccttagcttctgccctgctctctggatggaggctgtgggactgctctgtgcagtgtgaagcctccatccgctacacaggtccaagtgggtggcagggggagcgagaatgcctgattctgga

SEQ ID NO: 69598 - DNA, 1554 bp, Homo sapiens
agaggccaggccctgcccctcccaggcagcctggctccttctgctgggccctgaaggcagacgggataatgtggttggccaaggcctgttggtccatccagagtggtaagtgctctgctattgtcctttgtacacccctccagcaggtggggttggggggcagaggtgggggtggagctgcccaaagcggatgtggttagggggatggaggggaagccctggggaggtggcagccgaggtgctgttcagtgtgcgggatctgatttctttagaggttggggtagtgtgagtgtggggactggggaagccttattttcttggcaggataggctggagggctctctgggcctaggtgacacgggctggtgggagtaggggatgacagctgctcccaaggcagcatgtgcctgattccaggaagcagatagggtagaatagggtgtctgggggctgggctgggagcatcatggggcagacgtggcagcggggaactggcctgtctcccaggtgtagacacttctccaggtgagtgcatgaagggaaggctgggacctccccttcctcgtggaaagcatggtgcctgcccctcctcactgtggcaggccagagggcctatggagtctgtggtgtcgggggtggcctctgtgaatgggaaggcagggacagcccttccactactggtgttctagcacatctccttcacttacagaagaggagacttaggtacagaggggagaaatgacttttccaggggtcctgcagtgaggatgtgtagagccaagcccagaaccatgcctcctgggtggctggcaagcacaggcacctggtctgactgtggaagacataccttccttgactgagggtgcttccggagaaggcccacactgatctggggctgagaggtggaggacgggaatgggattttcagcaggcctttcctggggacatgagatggggccaagggcactgtagtcctggttctgtgcctaaaggagctggagctctgccttgcaccccagacaggggtcatgagattcccttcctccttccctggaagagggccatctttgggcagcagccctcccaggccttgagaaatcccggatgaagcacgcactggctcagtatctccctcagcttcccaaacactgttgcctcatggggggtcagcgttcagggtgcagagagccccagagaggtggctggggtggggaggatggggtgtctggtcccagcctggagggaagggggaagccctgggaagcagggcctcctgttctgggggcagggctgggtgtgtgcctggcctcctgatggcagcaggtgctgtaccaccaacctcgggctgaagacagggagaggaattactgtaagggggagaggcaggtgttctctggtcagctggagatctggacttgggaagcacgtgagtgaggatgacagcagtggccaggtgtccctccctcaactcggcccctacatccgcccccagtccagacccagcttcctgagcactcagccctccctctgggtacacagcagccctggtgggca

SEQ ID NO: 69599 - DNA, 1130 bp, Homo sapiens
gcttaagaggagggtcgggctcggccggggagtcccagtggcggaggctacgaaacttgggggagtgcacagaagaacttcgggagcgcacgcgggaccagggaccaggctgagactcggggcgccagtccgggcaggggcagcgggagccggccgggtaggttcccttcggggaacgtgcatctgtttttaggagcggtgcatgaaggagatgggtgtacgcgcgggcagagaggatgttgtagggccggcatgcaagagggtaggtgtagtgtgcagctgtagcacaacgggatgagaacccaggtcagactggaaactactgggtgcggggtaggaggtaggggaggttgactacctgcaaagtggaagctgtagggggttggggttggcgccgggagtagggacttgtccagcaggcggctggccttagttcagtctcctagggtgcccaactgggcgcacggtgctctgaacttgggtgggtgtggatgggggtcacagcaccgtgggggaacaggtacacagagctttggcgctgctgggatccgtacgattctaactgggattggatttccaaaaggccctccttcctcccagcctgtcagctccctcccagtgtcccggttgttttcttaacactttagaggctgtggctgagttggcaggggttccccaccctgaactttctgtctgaggtgcgttaggaagcctccggatcattgaaggaagtgactggcttggtggctgacctgtggagggctgcttgctgtgtattgaataaaggaggcttcttggggtcggggcagggtctctgtaagcacagggagaattgatttcgctggggcttggatcacgtgtgtgtgtgtgtgtgtgtgtgtgtgtgtgtgtgtgagagagagagagagagagagagaaagagagacagaggtggaaacccttgtccttggggatcctggatagaagttgccagtgttggagtcttggggcggtgctgcctagaggatacctcccaaccattccagctccagatgctgatcatccctatgccccctcccccagtagtctctgttggatcttacaggtagggtgcagcctgaggcttgttcagcagaacaggtgcaagccac

SEQ ID NO: 69600 - DNA, 1041 bp, Homo sapiens
tgccttcttaggcaggtgggctttcacttccagctcctcttccattttcacgatgtccttcttcctaggcactgcgaggggaggagaaaaggggctttgcagaggcctgggagtattcccaggaagtgcctggttggcgaaacaaccagggagctgctcctgggagctgggctgaggctttgctgggctgcctctcccactcacccttctcccggcccccaccatgccttccccatgggggaggggcagggggctggaggaacacagcttccccctgttctagcagagaaatgctggctgtatgcctcccctagggttcccaggctgactagggtgtggctggccttctgatggagcccactcatgctgggccgctgcccaggggctttgtggcacctaggtcgagatggtactcaggccaggggtcaggattcctgggtgctctggtcccggtgcctctgtctcatctttaggctgggattcctgccaccttgctgctctggggcccaaatactttgagacaaggctataggcttgtcccactgactctcctttccctccctggggtctcctctctctccagagatgccctgtatccaagcccaatatgggacaccagcaccgagtccgggaccccgtgaccacctggcaagcgaccccctgacccctgagttcatcaagcccaccatggacctggccagccccgaggcagcccccgctgcccccactgccctgcccagcttcagcaccttcatggacggctacacaggagagtttgacaccttcctctaccagctgccaggaacagtccagccatgctcctcagcctcctcctcggcctcctccacatcctcgtcctcagccacctcccctgcctctgcctccttcaagttcgaggacttccaggtgtacggctgctaccccggccccctgagcggcccagtggatgaggccctgtcctccagtggctctgactactatggcagcccctgctcggccccgtcgccctccacgcccagcttccagccgccccagctctct

SEQ ID NO: 69601 - DNA, 1047 bp, Homo sapiens
cgagaaagtgggctcagagaagtgaaataacgtatccaaggtcatcatagggtgtggtgattcagcagcaactctgtccccaaagcccttgttcctaatctttgagctgcattggatccctctgtgcacctagtattggtgcacccagttcctttttcaggaactttgccctctccctgaccctgactcccacctgctcctctcctctgctgcccctgtcttataccctaagaaaggctgttgtggaaaagggggctccctgtgtgcagagacagggcctcaccacttgccctcttcccccacaggagatccgggagctgcagtcccagatctcggacacatctgtggtgctgtccatggacaacagccgctccctggacatggacagcatcattgctgaggtcaaggcacagtacgaggatattgccaaccgcagccgggctgaggctgagagcatgtaccagatcaagtatgaggagctgcagagcctggctgggaagcacggggatgacctgcggcgcacaaagactgagatctctgagatgaaccggaacatcagccggctccaggctgagattgagggcctcaaaggccaggtatgggccgggttgggggtgggaggggttccttggacacatcctggtgagaggagataatgtaggaagagtgaagtttctgggagtcggggaaggaatcctagaccagggttcaggagttggaggggcagccacagttcagcttctcagtctgcttctgagaagcaaagggatgcagggaaggtcccttgggccaggacagaggtgaaaggggactggggcaggtatgttggggctcgtgatacatgctcccaagcctgctttaatcagtcatatgcatcagggtaaggttgagctctgctgctttaaggaaagtctagaacccagggatctagtccagttagggtagggggaccttacagtgtcgcaggtgagaagggtgtggaggggaagcacctggaaactgctcatgtctccctgatctgcttccttagtctcgtttatttattta

SEQ ID NO: 69602 - DNA, 1065 bp, Homo sapiens
gcccggttggccaccccgtttctggggggtgagcggggcttggcagggctgcgcggagggcgcgggggtggggcccggggcggagcggcccggggcggagggcgcgggctccgagccgtccacctgtggctccggcttccgaagcggctccggggcgggggcggggcctcactctgcgatataactcgggtcgcgcggctcgcgcaggccgccaccgtcgtccgcaaagcctgagtcctgtcctttctctctccccggacagcatgagcttcaccactcgctccaccttctccaccaactaccggtccctgggctctgtccaggcgcccagctacggcgcccggccggtcagcagcgcggccagcgtctatgcaggcgctgggggctctggttcccggatctccgtgtcccgctccaccagcttcaggggcggcatggggtccgggggcctggccaccgggatagccgggggtctggcaggaatgggaggcatccagaacgagaaggagaccatgcaaagcctgaacgaccgcctggcctcttacctggacagagtgaggagcctggagaccgagaaccggaggctggagagcaaaatccgggagcacttggagaagaagggaccccaggtcagagactggagccattacttcaagatcatcgaggacctgagggctcaggtaaggggtaggagggacctcaactcccagccttgtctgaccctccaattatacactcctttgcctctttccgtcattccataaccacccaacccctactccaccgggagggggttgggcatacctggatttccatccgcgcacctagccacagggtccctaagagcagcagctaggcatgggagggctctttcccaggagagagggggaaggggacagggttgagagctttacagaggaagtggacagcatggagggaggtaaggaaaggcctgtaaagaggaggagacactggctctggcggaatggggactattggagggttaagcggatgtggctaaggctgagtcatctaggagtaaacaagaggccttcctttgggagg

SEQ ID NO: 69603 - DNA, 1042 bp, Homo sapiens
tcacctccactcctataggtatgagacagagctggccatgcgccagtctgtggagaacgacatccatgggctccgcaaggtcattgatgacaccaatatcacacgactgcagctggagacagagatcgaggctctcaaggaggagctgctcttcatgaagaagaaccacgaagaggcaagcaggggccactggccaggccagggattgaggggccaagagaagtctgggtcggagaatagacaagacaaaccaactgcaagtagccttgctaagacgtttagaaatagcagcctgggctcttcttaaataagaccgttctgatgaagagcattctcagggggtcgagtacaccctggctcacctgaattacaggtcaaaatgatatgggttagaaaatgagatgagaacagaagtagaagcagctaacactaggagctgggggtgataaaggaatgacagcagatggagttggcagcgcttcctaaaagatggtagaaggagcaggtttgtgaaggggagggtggataaaggaacagggtgaagttacagagaaaccatcagtgagtgggtggcatttctacccactggagtagaaaggccagaactggcattgccctgagtgcaagccaaggggttcctcctgtctcttctccaactgtaggcctcctagaagaggcaatcacagaagaaaggccttgttggagctctgaccctgaaccctcctcacttttgcccctgtcacctttaggaagtaaaaggcctacaagcccagattgccagctctgggttgaccgtggaggtagatgcccccaaatctcaggacctcgccaagatcatggcagacatccgggcccaatatgacgagctggctcggaagaaccgagaggagctagacaagtactggtctcagcaggtgcgtgaggggaggggatggctgccaaggtgtgggagggaggcagacggaatgaggggcctgatggactgtccccatcctgcagattgaggagagcaccacagtggtcaccacacagtctgctgagg

SEQ ID NO: 69604 - DNA, 3145 bp, Homo sapiens
catcaccggctccgtgcagagtaagcagaagcagcagcgaagccccgcccttcccgccactcttccggcaggaagtctgtgcgtcaggaggccggccaggactcagctccagccccgcgctcgcgtgtagccctacgtaaagcgtgaggggtttcgcgacaacccaggccccgcccctttggccacatgtcgcgcatgtcttcccgtcggacggcgtgccacctcgccgcgcagctttacgaacctagagcagcgccgccccgcctcctgtctccgtcctcacctccccgccccctcccagcttcgcgtctcctagctcgacgcgcccgctataatcacgtgattgcctcatccgggtcttttgcgttctctttccctctcccaacatggcggcctcaggtgagcgagcagccgagcgcggccaaggactgggctctgaaacccccctccgagcgtgatccactgatttcctgaagtcggggaattgctggcactggttcctttctgaattgagggctgcggcaggctggcggcgtggccctgttaggttactgcctctggatgtttgggggggaggggaaggacaccttcccctccccctcacactcttttcaccctttctgcgcgagattggaataggcagtaatggtagactctggcttgaattggggaaggaggcgcagaaaggtgtgcgggtggtgcgaggccttttcgtagacgtgaatcaccgtgcccgcgtgaaggcgtggaggaaggaaggaggcggttgctgcgcggacgagtgcacattagactacgtctccaaggcgcgaggctgtagcggaccggagtggggggtaggggagtaagtgtggtgggggggagcagttggaacgcgagcgcgagttggtggaggggcgggggaaggcagcggtgcgcgtgcgcggtaggagacacgagggtagtagagacgggcgcgccttcaatgcgtgcgctagaacccagatgggaagctttttaacgcgcctgtgttgcgcacttatgtccttttaggttgtctcttccctttctagagtgtgggccctgtgcctgtattcttctaagggtgtgtgtgttagccttggaggttggtgctattggcgttagatgggggtggggaatccagttaggtgcgcccacgtgttggagaagcaccggtgtgcacctagatttccttctaggcttttttctcatactcaattggaggcattttttactcagcgcagctatatgccaggatcaggtttcgcttccggcgcttccatgttggttgaatttggatagctccaatggtagatttcagccttttttttttttttttttttttttttttaaggtaactgtgcaactaccagcaggtacttttaaaatagtgcttactaatggctggagttgcttacttctttagacaaccttggaggggagtatcagtgccttgcaagtctaattacatttctaatgggcttataaaagcagtgatgacccaacatcttgtagcattgattttagtttgaggaatatagtttgttttctctggcatgaccttgcattcttcaaaacattatttgaacttctatctctgggtgctcatttcttacctagtaattcatcgtctctattacaaagaagctaagggttttggttggctttggaaaatgttgagaaatttgaggtgcatttgaacatctttcattggtgtaacgcttgacagttgaccaagcacttttgtgcatgttgtctccttccatcctgaggtactgcagagagctagtggtatttctcagctaaggaatattatttaaggccacactgctctcagctggcagagcaaggtcataatctttgagactccttagcaacttaaaagtatcaaggtgtcatcatcagtttaggacgctgcccgaaagcatctgaagtttacaaaaatgttcatatttttttctccagtgggctagtaaaagtcctaaatatattttaaactaaccattgcttaaagtacttacttggtctggatttgccaccttaacagtttagtatcgtaatttagtgaagaaaatctgtgttttcttaacttttgtgtaatttttagaggcggaacataggacagcaattcatgtccttcgttttaccgagttgagggaaatccagactgataaaagggatttactctgacgtcccattctcttgttcttccatatttactctacccccttgaaaaccctcatctcctttaattcacttcagtaaatctttttagctggtactggtatctgagcacaagtcacatctttcagtctgttcttgaggaatctggggtttatcggattgtttccccgctcctctttccagtcacactggctttgtgaagtaaccagtattccctgatgtgggaaatggatgttatgtgttctgtgtgaaaatacataaaacaacttcatacgcctcttttactgttaaatgagaccaaaaaattctttgcagcaataccagtttccagtgtgatccattattgaccttcaagaactaaggtaggtctcagaactaactatagaatgaggatagtttgaattcctagaaacttgatacattgagccagtacacttaattccttgctttgcttcttaaaaagaattcttaaaggccgggcgcggtggctcacgcctgtaatcccagcacttcgggaggtcgaggcgggcggatcactaggtcaggagttggagaccaacctgaccaacatggtgaaactctgtctctactaaaaatacaaaaattagctgggcgtggtgtcgcgtgcttgtaatcccagctactccggaggctgaggcaggagaatcgcttcaatctgggagggggagattgcagtgaaccgagattgtgccattgcactccagcctgggcaaaagagcaagactccatttcaaaaaaaaatcttaaaaatacgaagtttttcatttttcttaaattttcattgtgactactttagtagacttgccagtaataagccagttaccgcttgaatctcagtttctttatctggaaagtggtcattatttatctgctgtccccttacctagagggaatcaaatgcgtttgatacaggttaacatttaaaatgctttcaaattgg

SEQ ID NO: 69605 - DNA, 1069 bp, Homo sapiens
cccagcactttgggaagctgaggtgggtgaaacacctgagaacaggagttcgagaccagcctggccaacatggtgaaacccagtctccactaaaaatacaaaaattagcggggttttgggctgggcgtggtggctcacgcctgtaatccaggaggcagaggttgcagtgaattgagattgcaccactgccctccggcctgggcgacagagcgagactccgtctcaaaaaaaaaaaacaaaaacaaactttaaaattggaaataacatatgtaagctcatgcacaggcctttcatttccataatgcttcaaaatgcagtcctgtgtgacatcttatttgattatttttatagggagaagatgctctgcagtggttgttttcatacactgctgactctcacagtgaaatggttttaaggggtgccattatatattgcttacagattccctagtgtcaagttccatcctctatcatgtatatgttattctgtgagtaagatacccagaaggccaaaattaaaactctttatgaaagtttaaatacaaatacagaatagtgtcaattaagataaagcagtgtttctaagtaatgtcattgaaaaaagaggtatatttcatctcaaaacattctggaattctcttttcgtgatggtagaggaaataactgaacttgagtacagtattttaagtaattatttgtaattaggtttgccttatgtacatttatgagccagtttcttaaatttgtagtagatactgctatggtcctgatagtgggaaagtaccaaatcaagaagtttaacttgaatttgtgtacctcctgtctcccattttgtgtaatggttagcatggcatgcattgggcacttattttgtttgattatgtatatgatcaaattgagtatccctggagggataaggaaaaggtagtatggcatcttctgtcaaaatgaagtaattgggcacagagaggtcatgtaactgaacccgtacgggggtcaagatggtggagcttatgagttttgactcagtctttactatgctaaacttacccaatccccaactaaatcaa

SEQ ID NO: 69606 - DNA, 1011 bp, Homo sapiens
ttggatattagctgatggtactagattaagccccatgagggtaaggatctgtagctagcatcatattaatcccagacactatttttgaattaaatgatatgaaaaagtctaaaataagcccacgcactgtaagtggtttacctcatgtcttactcgtgttcgcttattaaaatctcccatagatctttgcatatgaggctgggcacagtggctcatgcctgtaatcgcagcattttgggaggccgaggtgggtggatcatttggggtcaggagtttgagaccagcctggccaacatggtgaaaccccatctctactaaaaatacaaaaattagccaggcttggtggcacatgcctgtaatcccagttactcaggaggctgaggcaggagaatcacttgaacctgggaggcagaggttatagtgagccaagatggcgccactgcactccagcctggacaagagtgagactccctctaaaaaaaaaaaaaaacctttgcatatgagctgcagcaataaaagtgctatgagacccaacctctctgtaaccgtattctttgaaagctgtggaataaggccaagtgcagtggctcacatctaatcccagcactttggaaggctgagacgggtggaccacttgaggccaggagttgaagaccaatctgggcagtgtagcaagacccctgcctctacaaaaaattttaaaattagctgggcatggtggtgcatgcctatagtcccagctactcaagaggctacagtgggagaattgcttgagcccaaaaggtcaaagctgcagtgagccacgattgcaccactgcaaaaaaagaaaaaagaaaaagcaggccgggcgcgttggctcacgtctgtaatcccagcactttgggaggctaatcacgaggtcaggagatcaagaccatcctggctaacactgtgaaactaaaaaaaaaaaaaaaattagcctggcgtggtggcacgcgcctgtagtcccagccacttgggaggctgaggcag

SEQ ID NO: 69607 - DNA, 1442 bp, Homo sapiens
ccaggaggcaggggttgcagtgagccgagatggcaccattgcactccagcctggacaacaagagcaagactctgtctcaaaaaaaaaaaaaaaaagacagttgtgattccttccctatatggtttgtttacaagtgtcaaaacagtcttcaaaactgccatactgaatatgttatgtgagatacgaatttttattgatcttttttatccaaagagcagtgaaagtagtaactgaatagaagtagttacaaaattaaagatctcaaatgataagtgaatatagtagaaaataaaaggttgcccccacactccaaacatactctccagggtgtatctcaaacactcagacccttttccgtacgtaaacatgtgtttacacataataggtattctgcaacttttaaatttcttatttatgtctgcatagtaccccttcatggaaatgccataatttaaccatttgaggagcgtccatgttatttctttctaaataatgttttacaatattgcattgtacaactctgtaaatacctgagtattggtgaataatctttctcttgccttttaaaacagcaaaaaagaagaataagaaggggaagactatctccctaacagactttctggctgaggatgggggtactggtggaggaagcacctatgtttccaaaccagtcagctgggctgatgaaacggatgacctggaaggagatggtaacttttcttttgtcatcgtgtttggaatgtttattattttctagacaaaacctattacataataattcacatcgtttgtaatctgaaaagaacttactcattttttagcacctgaaatcttacatattttatagaatctaaggtttaatctgaggtttgggctgtcagactttgcagtgaagactgaagtggtcatttaagagagctttgctagttcttgttcttgcattaacagacttcttaagttactattcttttgggcctcattttcttcattttaaaagtaagaactagatcatcttttaaaattccttttaggtctaaaattctatggggtcctcataaagtgatgtttcaggctgctcgcgatggcttacacctgtaatcccagcactttgggaggccgaggtgggcagatcacatgagatgagaagttcaagaccagcctggccaacatggtgaaaacccatctctactaaaaatacaaaaattagctgggcgtggtggcatgtgcctgtaatttcagctactcgggaggctggggcaggagaattgcttgaacctgggaggcggagggtgcagtgagctgagatcatgccactgcactccagcgtgggagacagagcgagactccatctcaaaaaaaaaaaaaaagtgatgtttcagtgtaatctgtaagctatgtttactcagagccaaggaataattagttccaggtgtcattagtat

SEQ ID NO: 69608 - DNA, 1086 bp, Homo sapiens
tttttttttcttttttttttttttttttttttttgagacagagtctcattctgtcatccaggctggagtacagtggattacatgcccagctaattttttgtatttagtagagatagggttgcactatgttggtcaggctggtcttgaactcctgacctcagaggatccacctgcttcggcctcccaaagtgctgggactacaggcatgagccactgcacctggcctgaattaatctttttttttttttttttagagttaaattcatacagttcaaaattcagaaggtataatagggcatttagtaaagtttctactatccctctgcatcagttttcctcctgagacaaccatgttcttgtgtattcagaaaaattcatgcacatacagtaatgcttttgtagtcctctcaaaaaatgacaaatgaagaagaatgctgggaaactttgttgttgattcttattccttcagatcagtgcagtgcgtttaccacgtgaacccagcaatccagagaggttgaaaggttttggttatgctgaatttgaggacctggattccctgctcagtgccctgagtctcaatgaagaggtaaagaaaataagagtggggatatgaggggtgtaagttcacaaatctcatgtttattgatcaaactggtattttttaggttgagaggctcacttcaaagattcccatatctacaaataaaggcctgcattatttaacagtgtatcacttaacatcgaacatctagcaagtcacacttcagcaaattcagtaggccccaataatttagataggtacttaggtggaaagttgtggaagaaacccaccacacaccaggtctctaattaagtcttacactgatttacccacagtgttgcctcaactcttatggcattgctttttcaaagtaatctggcctgataaaggcaaatagaaaaatcaagtttgtttagtattaaaggcatatctcattttcagggaagtgttgtaatggtatatttgttcatttaagaggatttggaaacatttcctacaaaggaatattttacaggagagtgacaataaatatctagtccttctgc

SEQ ID NO: 69609 - DNA, 1778 bp, Homo sapiens
tttttgtttttaagagacagtgtctcgctatattgcccaggctggatttgaactcctgggcttaagtgatcctccagcctcagcctcccaaatagctgagactgtaggtacatgccactgcacctggcttctataaattttgataaataattgttgtggcaccaaatatgccttttattcagctagttatgtgagaattatttttaatttactacacttgacaaattaccttggatagttaaaaagttaattctattctgtgaaattaagctttgtaaaaatagtataattgacctaatattcaaggccagcttaaatttgtttaacttttaagtcttttaaaggactctttagcccacaaattggagtgttagctagattacagtgttttcctttatcttccttcccctagtgcttctgctatgcccagacgttcaaggtcactcaagggatttgtgcataatggggcaaaaggttggttaatatggtcctatgctctcagtctctaggtaacaggagaattcgagtggacgttgctgatcaagcacaggataaaggtaaggaaactggtagagatttctgtttggtaatggtcccaggatgacaccaagccatcctttcccagaaaatttgaataggggtagtggtgggcctgcctgaatctacagtaacagttttcaatcagttttgccccacaggggacttctggcaatgtttgaagacattgtagttgtcacaattggagggagtgctgctgacataagtagaatccaggggttaattctatagggaataggacagtccccatcaacaaagaattatgcagcccaaaatgcatgtcaagattgagaagactgattgatctagatgaacattaaatagatgataaatagattagctgcctaacagcacgttggtcacaaaggggacctaatttgtatatgtttcagggactcctggcccatacagaatttgagatagctaagcattaaaccaataggaaaaaacgggaggaaaagagccacctggggttgaattggagcatgtacttatggggcctgaggtaactgggatgacagtgtgacgtgaaagtgaaaaatagggtaaaatgggggttttctatgtgtgagaaatattgggcaaagtttttatgagataacttacggtttttgttttaatgtatctgtagacagggatgatcgttcttttggccgtgatagaaatcgggattctgacaaaacagatacagactggagggctcgtcctgctacagacagctttgatgactacccacctagaagaggtgatgatagctttggagacagtaagtttgtttttatgaagttagcttcctctgtgctttgggaggctatttagtaataggacaaatgtgttacagatgatcagatcacattaacagatagaaggaggaaagcagattaagaaaaattttggatagtatctgaaagaactgatagatgcaggaaacgaatttgataaattaataattttttttgaaaacttaaccaaacaaagggacagacatttctctttttttggagacaattgtttataaagaaacccaaactgggcatggtggctataatcccaacgctttgggaggtcaaggcaggtggattgcttaaggccaggagtttgagagcagcctgggcgacaaaacaagaccctgtctaccaaaaagaaaaagaaaaagctgacgtggtggtacgcacctgcagtcctagctgttcagcaagctgaggcaagaggactccttg

SEQ ID NO: 69610 - DNA, 1408 bp, Homo sapiens
gcgtcaccacgcccagctaatttttgtatccttagtagagacggggtttcaccatgttggccaggatggtctcgatctcttgaactcgtgatctgcccacctcgggctcccaaagtgctgctgggattacaggcatgagccaccgtgaccagctaaaaaaatttttttaattaaaaaataagtggtctttgggatcaaacatgggagattcccaactgtattgttttagtgtcttgtgctttgttttgttttttgtttttgcatgtaaacctcttctccttctggaaattcattatggaatatttagggattttttaatttccaacccacccttcccaaattattagctgagcaacaattatttcaccagggaaactttttgaagaaatcagatagaaaatttaaataaacagattcttccaaattggactgatagcttaccgtgtttctattaatggtgtcagagaaaaggggatggtgttacttgtctgtttcctctagagtatcgagatcgttatgattcagaccggtatcgggatgggtatcgggatgggtatcgggatggcccacgccgggatatggatcgatatggtggccgggatcgctatgatgaccgaggcagcagagactatgatagaggtaattgtaaaacatgtcgaattgctctttcagtaactttgccttttttttttccccctccgctgtgatgattataatttgggatatatttacaggctatgattcccggataggcagtggcagaagagcatttggcagtgggtatcgcagggatgatgactacagaggaggcggggaccgctatgaagaccgatatgacagacgggatgatcggtcgtggagctccagagatgattactctcgggatgattataggcgtgatgatagaggtaatagttttctttttacgtacttcatggagcagaaactgggaaaactacggaaaatttgtgattgtgttacgaactactgagttgggcacaaatataatttgcacattgtacaggaagcagcaaagcatagtagaaagagcattggctggccaggtgtgggcagatcacaaggtcaggagatcgagaccatcctggctaatggtgaaaccccgtctctaccaggtgtggtggcagacacctgtagtcccagctactagggaggctgagagagaagaatggtgggaacccgggaggcagagcttgcagtgagtggagatggcgccgctgcactccagcctgggtgacagagtgagactccccatctcaaaaaaaaaaaaaaagcattggctaaggatgacatcagtggaaacacagcagtcgaattgttttcatctcatatgccttcacagatagatttttcagttaaaatttattgaataaacagtagaaatggaaaa

SEQ ID NO: 69611 - DNA, 1863 bp, Homo sapiens
accacgcccagcctgagctacctattttcttttttttttttcttttttttatttttgagacggagccttgctctgtcaccaggctgaagtgcagtagctcgatcttggctcactgcaacctctgcctcccaggttcaagcaattctcttgcctcagcctcctgagtagctgggactacaggtgcgcgccccaacgcccagctaatttttgtatttttagtagagacggggtttcaccatgttgtccaggatagtctcgatctcttggccttgtgatccacccgcctcggcctcccaaagtgctgggattacaggcgtgagccaccatgcccagcctaaactacctgttttctaatgatctatttgccttctgtggattggttaggccactaacttgaatctcatgtagcatttcataggagttatatctgagaaatctggctttcagccatcagcttctggtgattggaaaactattacttaaagtttcatttaacttaggtcccccccaaagacccaaactgaatctaaagcctcggagtactcctaaggaagatgattcctctgctagtacctcccagtccactcgagctgcttctatctttggaggggcaaagcctgttgacacagctgctagagaaagagaagtagaagaacggctacagaaggaacaagagaagttgcagcgtcagctggatgagccaaaactagaacgacggcctcgggagaggtgtgttgtcttgatggatatcccatctaggaatccggtggttcgtaatgggggcattacatccccaggggcatttgggaaatttgtgtcgttatcacattagtggttgtcactgatgggcatttagtgggctgtggccaggggtgttaggcagtatgcagtgttagggacagttttacacaatgaagagttgttccctgtccattacaaaagtgtttactattaaaagctggtattgtatctaaaaggctagagacctactataataagtaattgccctgaaaaactaggcctggtaatgagtggcttgtagaactgtgttgattagtaaagaagggcagtattgtagattatgtaggatactgttcttaaccatattagttgattcttgctgaagtatttagggccaaagtgtgtcttaatgtctgtagctttcaaatagtttgagggaaagataaatttatatgcatatacacatatagatgaagtaagtgatggttcttgaggggtcagcatgggtctaaggtggccttcactgagccaggcataatgtgtattttgtgaatctctcgtacagacacccaagctggcgaagtgaagaaactcaggaacgggaacggtcgaggacaggaagtgagtcatcacaaactgggacctccaccacatctagcagaagtaagtcagaccagggtgggtatcgtgttattgccgttttccataaactatccataaccaaattatgcagagaccctgcaatatttaaattcagtcatgaactctttatttgggttgcatgggccgattggagtttcatatcttctgctccaaagaatctgaggaatgggtaccagagtagacctagatgatctgcttaataatctaccactgaagtgtatacttggttgttaggtttgtctctctcttttttttttttttttttttttggtatattttcattttatgtcttgacatctttgaatgttgtttattcagaacagtcaacggcttggagtttcatgtgagctgtcccaagaccagccttttttgatgttatcatcaccagagcagtgttctcaagcagtgttattactggttgatcaagcacttttagtgttttggaaacctaaatggttc

SEQ ID NO: 69612 - DNA, 1318 bp, Homo sapiens
agcaacatgatcacagctcacctcatcatttctagtagctgggactgcaggcacatgccacatccagctaatttgtctattttttgtagagctggggtttcaccatgttgtccaggctggtctgaaactcttaggctcaaacgatccgcccccaacagcctcccaatatcctaagattacaggcgagagccactgcacccagccagtaggtggtttttcataaatatgattgcatcatagtccatgtgtgttgagttttaagctgaagttgagcagtggttactagagtttggggtttcattgtaggtcctcttcacatatgtatattctccaggtcaagacacttttaacattgagaatgcagaaaggctgtaaaggatactcattcctaaaaaggtcacatggctgggtgtcccttaagttgtatacatggtcattattttttctatttctctgtgcatcagtaagacattgttctggaaatacttgtaaaccactggtttagggataaatccatctttgggagccaaaacttggatgtggaccattttccacactgttgagatcctggtagatgcgtgagcatctgcagcctgataatttgatattttcactctggcttcacagatgcacgaaggagagagagtgagaagtctctagaaaatgaaacactcaataaggaggaagattgccactctccaacttctaaacctcccaaacctgatcagcccctaaaggtaatgccagcccctccaccaaaggagaatgcttgggtgaagcgaagttctaaccctcctgctcgatctcagagctcagacacagagcagcagtcccctacaaggtgagtcagtttggaaacagtagttggttaactgcagattctaaaatactgtgatgtaatgatggaagatctcctacgggatgccagcgttgtatagcaccttataagttatgctggctttagtctcttagtgtgctggaactggctcataagacctagttgttccattttctggagttccaccactttgatagcttgaaatcagctatgatgggagtactaatgccgcacaaatctgcaaatactgtaagtcagaggcttcccttttgccacatattggcagtatggtagggggtaacttcctttcatttctcttaagtcttctcatttgtaagcaaaatagcaacactattagcctggcgtggtggcaggtacctgtaatcccagctactcgggaggctgaggcaggagaattgcttgaacctgagagcggaggttgcagtgagccgagatgtgccattgcactccagcctgggc

SEQ ID NO: 69613 - DNA, 4158 bp, Homo sapiens
ggcacaattttcttcagcttaagggaaatcttaggagagggacattgatacttttacttgcctttaatttgtttacattactgcccaagcagatgaaaataaagtagatgggatgaatgccccaaaaggccaaactgggaactctagccgtggtccaggcgacggagggaacagagaccactggaaggagtcagataggtatgcttgttctctttctcatctttcctctgatccacatgtttgtgtaattaagaaattaagttcttggttctcagagcactgccagatcgctcattgtgagcaaactaaagtcagccaacgtagacagttaagattctgaaaatctagaagtaatacatcatccagacaacaaggactgttgactagaggtgcctgttcagtgccttgaaactgcatgcatacacatgtttgtattaggcgagtcctttcctaaagacatggttttatgcttacgtctctgcaggaaagatggcaaaaaggatcaagactccagatctgcacctgagccaaagaaacctgaggaaaatccagcttccgtaagtgttgaaggctgctcccaatttttcattctaagaaaaattcttagaattctaagtattcttactaagaattaaaaattcttagtattctaaactttttgccgttggacttctttccatttggaatacaaagtgtttggaaataagacattggtctttactgaaatagcgaaagaagtttagctttttcctggtttctgtcttcctttgttctcatcccttctgcaaggtgtagaggtggtatgagactatagtaagatcgcatgtgcctctgaccctcttccctagctcctctccaatggacaatgctgatgagcaagcaagtgggtgtcatctgactgtcatcccccattgccaaaggatcagtatcctgtgtcttgggttttgatgtgataattcagggccttcattatcctgtcactctcgttgtgttacagaagttcagttctgcaagcaagtatgctgctctctctgttgatggtgaagatgaaaatgagggagaagattatgccgaatagacctctacatcctgtgcttttctcctagtttctctccaccctggaacattcgagagcaaatcaaaacctctatccagacaagacaaaataaaactcaccatctcctgaagacctttcttacctttttttaaaaacaaaaaatgaaattattttgcatgctgctgcagcctttaaagtattgaagtaactggagaattgccaatacagccagagagaaagggactacagctttttagaggaaaagttgtggtgcgttatgtcaccatgcagttgccagtgtgattagtgcctaggggtctccatttagcagaaatggtaatgacagtgatataatgcctggaacctggttgggcagtaggggagggaggtagaaggaaaagtgtgagatttctaccttttagtttttatcctattgtggcatatatgaattctcaaacattatctgaataaattttccactcttggaaaggtagatttagcctcaagttgttctagtctccaggaggctgccagcccctcctcttatttaattctgagttttgggggccagcctagagggaattccttttttttttttaaccccccaggggggtagttgggagtgagactataggccataaagaatgggactgcattggaccaaaataaatgggaaaatcgtggtttgaaaagaagcttttgggaagtgatgagtcattttgcaccaggtaataggggaaaattgtgtgacctccagcaaacacatgaatggttatttcctggagccggaagcacttgggggtcgtggtaattcccagtgttttctgtgtcctagttttaccctttctaaacactgtcctttttgaaagttttgaatatatccacattctattgaaaccttgaaactaaaaatttagactcttatcatcatcttaagttcttcatgctactcttaacctcccaaaaagcagtatctaagtcacatacatgatgtcttgggcattttctcagccatggagaactctgaaaggaagaatcgctgcttttctcaagcaaatcggtttcttgatgtcttttggttctccttgcctgctcctgatgcttggaccccttttattgatcagagtgctctagaataatggatggtcttggatgatggataaatagggacagggacagttaaattgggagcctttcttacaaccttgatgggatttttccccccaagtttccttctccactgaaatgccacactaatgcttgttggattcatgaggtggccagaccaatgtgttgttttgttgttgtttttttaagcttcccttgagagaataaatggtaatggagagaactatttaacaaggtcctggtttctcttgcaacacagtagctaaacttgcctgcttttatatgcatttttgtagggatcagcttggtagacagtattagcggagaaacaccttgatcttggtttgcaagcccttctcccatcagtcctagattaggccctgttcagccatgcaggggtgttggtttatgcgtgctgcagcagtgggcataatgaatataatttacccagtggacaaaggtgtgtaccaagtgaatttaaataattggtgtggattggccagtagctaagaagtgggcttttaaagagtattgaagattgaaagggtttttctttcttttttaaaaaagaaaaacaaactattgattgtagataatgaaaagctagggtttgccctcttcatgtctactctccttccaaatagttatatccaaaactgtttttccctctcccctaccttgtcccccctattaaaatagaaacagggattgattaatgtcccgctcctgaatacatgtaaaatttgtacaaaaatatcttctatgaaaatgatttgtaatctgtagacttattacctgggagatgtcttgatgtaaaatcccatcctttgggttgtgggttttttgttttctccaaataaatctgatctttaaagttcattgtaatgctgaagttctttgacaaatactctgcactcccagtggtttttactgtagtcattgaccacctgctcctcctcctcctaccatctctgaagttttcattcagtattggataccatattgtccaagattagagggtggggttacaagggaatctatttcagtgtttattgaggcccaataatagagtttgcatcctagctcccctctggcttttttttttttttttttttttttttttgcctggtgttaaattttttaatcacctggatgtgcctgcagtctatttcctgtactgtttattttaatcaagatgtgggaactctaagaatgaatccttgtgtccttggggcagttccctcataatctccctccctcacttcagcaatctggagagatgctgctcccttgagttacaccgcactggtggaccagagatactggtgacaggctggtcgaggttaccagaacagaggctcacagactcagtgggaattttccaaacagctagggacagactggtcattgttgcaaggcgggaaaggggttaggacagtggcagagaatccttaaggtcacaaggaggtggagcatagaaaggagcccgggaaacctcagtcaacaattttggggatttaagagccaagatgaggagccagttaaatgatttcccagccaattggagcagctgctcttctagtttctggccagtgcatttatctctgttctccaaaactggtaaagttgaaggctatgagactcagctgtgatgatgtgaaggcttttcaatgtgggtttaggtgcccctattgtccaggctgcctggaaacctacaaggtaatgctttttcactgcctctccaccacaggaatcagtttcactcacattctccaagcctttgtttcaagccactctcagctgtgcaataatgaggtctaggtaaatgatggaaagaaggaacataaaaataggaaaggcttgttgaaagaggtttatgatggctgtgtacagaaagggtagagaggaaggccctatgtcccaaaaggtactctaaagtcagagaaaacctgggctgtaatatggccacatcc

SEQ ID NO: 69614 - DNA, 1083 bp, Homo sapiens
gggtggcacgactcaaacctgccctacggcccattagctccattccatgaagttcctatccagtaccaggcactgcaaaagaagggaatgaggtcagaccatagaaagaacttccatctccatttggaaaggctggactcaagttaaatgtaaggaagaccttctcagaggtctcctgcgaactgggaatgacggtccagctctttaaaatagggcaatgggccgggcacggtggctcacgtctgtaatcccagcactttgggaggccaagaaggggaaatcgcttgagctcaagaattggagaccagcctgggcaacatggcgaaaacccatctctacaaaaaattagctgggcgtggcggcgcccatcttgtagtcccagctactcgggaggctgaggtgggaggatcgcttgagcctgggaggcagaggttgcagtgagccgagatggcgccactgcactccagcctgggcgacagagacagactcccgtctcaatgaataaagcagggcagtggatgggatggctggagctgcttgcgggtggagatgggggcttgagcctgacggaaaggtccccagctgtgaatcctttgagaatactagcccaggagaagtctcctgtggggcagaggaccagggaagggtgtccaatgacttgggccaaaagtaacaccaggtgtcttcacctgattcaggcgcccgcctgggtaggggacgctagcaccaccaggctaagccacgggtggtcctctcaggtcaggcccaagcccaggcacactcctgtggggagggtaagaggctgacgctgcgcggcagttccctgtccccttgttcctagtcccttctagacctacgcccaccgtttcttctgcgtctgtctggctcgcgtgtttctttctgcctgtgtcccgccgggtcaggctctccccgtctctcagactttcccgtccccgtgtcctccgcggccgtctctctccaactctctccccctctcagccacttcctgtctccagtatgtccctggcgcggcccggctggccgtctgcgcaccctctctcccctcggctctttgtgagtgtg

SEQ ID NO: 69615 - DNA, 1059 bp, Homo sapiens
ggcttcctggaagcggcctggcggaggcagccgcttcccctgggcggagggtaggctgtctggctggtgtgaggagaagcccggccctggaagtggagggaagtgcaggcgggaagggggcaggtcgctgctccaggaagtggaggggggaggatgtgggggaggccaggagatcagattcccaggatctaccctgctgggagtgtcagcctgtgatcttttgctccccctactcccccaactctggagttgtcccacacctgggacaccacactctccagggatctgcagggatccatggtcttgagattctgcccccacccccggtggggccgggtgagaattctggtctcggggcagggctaaagggcaagtggggaacagtgtgtcccagccaggctccagcctgaactctcaagctctcgagggacttccgctggggagggagtggagctgggaactactaccagcaggcaggcccaggatcccgagtgtgtcctgagagtcaggtaaaaatgggactgggggcccccttcctgtctcagtttcactcgttatgaagtaggaaaaggaaagcatgcaccgcccacctttaccctcaatacaccttgcaaggccaagttccagccacaagactgctttgctcaggtttggggagtaatccattctcctgccacagcctaaggcatatgaggcccttctcctgaaagcccccaggtttctgctcctgacacagtgccccccactcacccattccctggctttgtttcagacatgatctcacagatccctagccctctttccagccctgcaacttgggctctctacccaagggctgcaccctccccccgcggcaaccccgaagcctgagtactaccttcatggctctcctgggtctgctctccttcctcagcagctgtcccagggcctgaggactggacaggaggtcccccctcccaacacatactccacccccatccatgggcctccggcctccctcctgggaacatggccaacttcccgtcctgggagtcaagggagggaggtggatggggcctt

SEQ ID NO: 69616 - DNA, 1038 bp, Homo sapiens
aaatctctgaaccactcaaagcagcgcagcactctgcccaggtaagtgagggtgctggggtggtcccacgtgaccccctttccgccggccccacacctcagcccagggcactgccccgcaacagagctccccgggacagccccccacccccaaagcggtattctccctccagaccgatccacccaccctcaggacccagcaggcttcacctgctgcccaacagacagccttcccgtcacactagccacctccgggtgccccgcccctgcgttcatgcgtaggctcctcctccccaggagcttcagcctggacccgctcatggagcggcgctgggacttagacctcacctacgtgacggagcgcatcttggccgccgccttccccgcgcggcccgatgaacagcggcaccggggccacctgcgcgagctggcccatgtgctgcaatccaagcaccgggacaagtacctggtgaggggcggggccatcaggagtccgccaatgagagggatgtagggtccagatgggcgaggctaatcactgacgtcaccagcggaggcgaggccgccagggggcgggaccagagtggtggggtgggggcggggcccggagcgcggcctggagcggagcggagaatcctggaacgctggcgacttggctgtgactggctaggccgggccttagctacctttttattttctttatttatttaccttttttttgagacggggtctcactttgttgcccaggctggagtgcagtggcacgatctcacctcactgcaacctcctccacccgggctcaagcgattctcccacctcagcctcagtagctaggattacaggcgtgcgtcactcacgcccagccaatttttttttttttttttttttttttttgtattttttgtagagacggggtttcgccatgttggccaggctggtctcaagactccagggctcaagcgatccacacccggcaaattgttgtaattttagtagagatgaggtttcaccatgttggccaggctggtctcgaactcct

SEQ ID NO: 69617 - DNA, 1036 bp, Homo sapiens
tctttattattagacaaaaatagactctcttttttcccctattcatgtgatcctactctgaatctctgctcagaggaggcagtgactcgctccccacccctctcccatccctgccgtgctggcacctgcagctgggtggaactggcaggggctgatcccctggagggctgacgttctcctgcaggtggggctgcctgatctccttcggggctcaactgctgatgcctcctcacccctcacacacccatctctgccatctgctcacatgcaaggtcatcttgtgggcctgtccacttaacttagcaggctgggggcggggaaggagagcagtgtcccaggcctgatgcccactcctcattcctaagggagggtgctttctcctgggtctcctgggtccaggccaggggatgtgagggctgtggggtgctgggaggggggcagtgttgatgtgggctctgagcttgtggccttccttcattttctctggcccagtagaactttggtgatgaaggtgacaatggcgccagcaggctgatctgggtcaagctctgcaaagaggtgacacacattctcccaggggcttcccggcttcttggccacgaaaccaaagatcctagggggataaagggtggggaaggggcttaacattccttccacaagggaatgtagctggccttggtgagacaaatcaaatgccagcattgagaggacagcagcgccctggtcccttggaaggaagaggctgaattcgtggggaggcttacttggaggtggtcccgtctgggttggtccatctgcagaaggagaagaaggtgaagatgcacaccccaggggacagctgctgaaggggggccggggccggggctggggctggggctgggagctgggacctggtgggaccatggggatttggggcaaagggtttggagggagagtcacctccggtcttgagggtcagtgctggagaaggtgatgctgttcactggataatggcggcgaaagaagagcctgcaaggaggagggtgaggaaggtcac

SEQ ID NO: 69618 - DNA, 1132 bp, Homo sapiens
ctctggtctgcagccgccactctgtggcactgagtcatgtctttggcttcttggggctttggtggtatgtgtgtattagggggagacccaaagaaagggctccatcttcccccaccaaaaatgcagagaaacatttctgttgattggacattgtttgagaggagacacatagggtagagttgtctggggagtggccatcgtcctggttggcctaagggaccattgtagttggaagtaagggctaagatgaaagatcatttccttctttgtgatcggcaattccaacgtaaccccatttacactgatttagggagaggcagcaatgtgtattggtcacttcattaagtcttcccacttgtttttggaaattcaggtaatcttatcccagtttactgttgaagaaaccaaggcttaaggaggtgaatgtcatttgcctgaggttagcggctgttaagtaataggagttaggatttgaacccaggtctgttggattctgaggtacaggttgagggaccagcatcaagatcctaacagttcagactctaagggttaaccttcactcctcctctaggttcctaacagctatagaccaaggaggcagaggaatgtactcaagaaagaatctgtcagggaggccaaatattccccccacttccacccctctgagttctctgggaaggctcaggaggggtcgggggagctttgtccaggagcaggagagtggatcaggaggtttatgatggctttcactgtgagggctgggcggtcccctctgaagagggcacgctgtacaagcctcacctatacactgtacaagtacctagtcgtccaggacatcagcattctgtccgaagtgctctgtggttggcaggtagagagtgggttttaaagacccatgttggggtagtccgtcctggcttttagcgtgagaaagcacctccaccctatccagagacagaaatgcagcagctaccctcttctgagctgaggcaaagggaggggctggccgggtatttcccaaggatcagggtctggatcggctgtcttttggctctggaaatggagaacactgtgtttcctacaccgaggccagttggatagaatgggtcaaaggcagctgtggggtccccca

SEQ ID NO: 69619 - DNA, 1063 bp, Homo sapiens
ggccattgccatggtctcagttcagaccatctgctccccctccacatcagcctcctaacccatctccctggcacccagatctttcctttcccatctacccctaacactgctgcccaggtgaactttcctactgcaactaatcattccctaccctccttcaaaaactctagtgataagtcaatgctggcacttttggatcagatatgaacccttgatgtggcatccaaggctccttcccacacagccccagcctatctgggggaagatatgtgcttccatgcctccaggcctttgcccatactggcccctcagcttgaaataccctttcctaattttcagccatggaatctagttgcttcttggaggcccatggttgagatgccccctcctgtgggaagccttccttttgtagccatcaattactatgacccacctgtttctctgtactcacaggcacatcaatgccaccatacttagctcccattacatttgccctggacacatggttggacatctttctgtctctgtctctgtgtgtgtctcacttcaattactctgtgaactcccaatggccctttgagattcatctctatcaccaacatctggcacaaagtgatgccaagtaaatgtacatgaacaaatggatgaataaatgaatgcatgaggccaggcacagtggctcacacctgtaatcacaacactttgggaggccaaaggaggaggaccgcttgaggccaggagttcgagactagactggacaatatagtgagatctcatctctacaaaaaacttaaaaatagccaggcatggtggctcacacctgtaatcccagcactttgggaggctaaggtgggtggatcacgaggtcaggagatcaagaccatcctggctaacacggtgaaaccccatctctaccaaaaatacaaaaaattagccgggcgtggtggcgggcgtctgtagtcccagctactcgggaggctgaggcaggagaatggcatgaacccaggaggcggagcttgcagtgagctgagatcgtgccactgcactccagactgggagagag

SEQ ID NO: 69620 - DNA, 1022 bp, Homo sapiens
tcttgaacccgggaggtggatgttgcagtgagcagagattgtgccactgcattccagcctgggcaacagagcaagactctgtctcaaaaaaaaaaaaaaaaaaaaaaaaaaaaggccgggtgcgtggctcacgcctgtaatcccagcactttgggaggctgaggcgggcggatcatgaggtcaggagatcgagaccattctggctaacacggtgaaaccctgtctctactaaaaaaaaatacaaaaaatttagccgggcgtggtggcgggcgcctgtagtcccagctactcgggaggctgaggcaggagaatggcgtgaacccgggagacggagtttgcagtcagctgagattgcaccactgcactccagcctgggcaacagtgagtctctgtctcaaaaaaaaaaaaagaaaaaaaaaaaaaaaaagcaagaagcccggaggactgggtgcgcgtgcagggatcggaagccggttggagtgtgtgaggttttctcgctctagggagattcttcaagcaatcactatgtcaacagacacaggtgtttcccttccttcatatgaggaagatcagggatcaaaacttattggaaaagctaaagaggcaccatttgtacccgttggaatagcaggttttgcagcaattgttgcatatggattatacaaactgaagagcaggggaaatactaaaatgtccattcatctgatccacatgcgtgtggcagcccaaggctttgttgtaggagcaatgactgttggtatgggctacttcatgtatcgggaattctgggcaaaacctaagccttagaagaagagatgctgtcttggtcttgttggacgagcttgctttagttagacgtctcattattgaagttactattattgttggaaataaactaatttgtatgggtttagatggtaacatggcattttgaatattggcttcctttcttgcaggcttgatttgcctggtgaccaaattactagtgactagtttactaactaggtcattaaaggaagtca

SEQ ID NO: 69621 - DNA, 1041 bp, Homo sapiens
ggaggaaagcctcggtggagagggtagggtctgacaatctcctcacccccacacagaacctgctcaagcgctgccatgggtcccaggccagctaccttttccagcaggacaagttctacgatgtggctctggacacgggagacaaggtggtgcagtgtggccgccgtgtggactgtctgaagctgtggctcatgtggaaggcacagggcgatcaagggctggagcggcgcatcgaccaggcctttgtccttgcccggtaggcgggaggaggtggggggtcgtccctgttcccctctcctgggtccatgcccctccctctttcctgctcccgggattacttttctctcggtctctctgtggctcattctacgtgggcctcttctgtctggatctctgcttttcctccccgcctatggtttctcactctctgttcacaggtacctggtggaggaaatgaagaagcgggaagggtttgagctagtcatggaggtaggacccctttctattttgtggcccctgccccagcctagctcttttgcagcccccaagccccaactaaagccctagtggagggaaaagggcagggagaggggaaaggggcagggagagggaaaacggtccccctttctcagctcacaccttcctctttctcattcctctcagcctgagtttgtcaatgtgtgtttctggttcgtaccccccagcctgcgagggaagcaggagagtccagattaccacgaaaggctgtcaaaggtaggcgtgctgtgctgctctctttacccgttagggagctgatgcaactgatgcgcttctgccccctgttggctgggagtggcatggcaggtctccttgctggtctcttgctctgaggcgtggatgctctcttttcggtaggggtggggatggggaggaaggtatgtttctgggaagtaagaagcagcgacgtgtgttacaggagaagtcagagaagtcaccagtgtgtagtacacagagccttgtgctggcaattgggctgggaactcaggcccaggacagatatga

SEQ ID NO: 69622 - DNA, 1011 bp, Homo sapiens
ctcctgggctcaagcaatcctcccatctcagcctcctgagtagctgggactacaggcatgcccactacacttggctaattaaacaaaaaaatttttttagagatggggtcttgctattttgcccaggctggtcttgaactcctggcctcaggcaatcctgccttggcctcctgaagtgccgagattataggtgtgagccactatgcctgactcaattttttttcaatagcattggatcttccagtaaaacattcaagttctttgagagtatgagctttggaaatgaaaacctaggttcgaagtccatctctgcagcttctgcttggatctttgaatctcagtgtccctggctgcacattaaaaaggacagtaacacattgttgtgaggttgaaatgggccattttaggcatgcaaagagcttagagctgggcccagcatcaggctctgagtagcttttgagatgactttacatctttctccctctacattttggcaacagggtgctgtgccgttcctggtcagtgccacctctggcaccactgtgctaggggcctttgaccccctggaggcaattgctgatgtgtgccagcgtcatgggctatggctgcatgtggatgtgagtgggacttcggcttgggggtgcggtggggtgggctgagccaaggccaaggcccacgttgttcctcctgctccacaggctgcctggggtgggagcgtcctgctgtcacagacacacaggcatctcctggatgggatccagaggtgcatacagtccccttcttcccaaatcccgcccttcaaaccattggtccagagaatcatcatggactagggagtttaacatggctggggtaggaggctgaggggagggggactggagagaggattgattggagctgggaggtcagacatggcagttcttcctgatgctggggtgagggtgagaccaaagcccctttgctggggacctggaaaaggaggaagggctctggttgggcagctggaggagg

SEQ ID NO: 69623 - DNA, 1217 bp, Homo sapiens
cacccaggcgattcgtatgcacgctgacatttgagaagccctggtctacaggatcccatttgttggagctcacacttgacttttaccttctctcccctcccccatcaagttgtgctaacttgccctctgccttcccccacagtgtcactactccatccagaagggagctgcgtttctgggacttggcaccgacagtgtccgagtggtcaaggctgatgagaggtgaaggtccttctgcccacatggctgtgacctagctttgcacagcgtaacttcctgccgccagaaagctctggcatcagacccttaccgctggtggacctctctcccctcgctattcagtagaattgctgttcctgtctaccagagcctgccagcgtctcccacctctgccctgagatctgtttcaccccctgagggaaaaactagcactgttgtctctgcattgctaaccccaccttaccctgccttcaacagagaacctgtccctgctctaccctctgcattttctttttcagagggaaaatggtccccgaggatctggagaggcagattggtatggccgaggctgaggtgagtcagtgaggctcgctggggtgatatagcctccaactgtcttggagggttatttgggctctcctttctcaaggcatccttcatccctctcgtctccatgcccatctcccctgtgggctgaagtgaccatggagagcctgggggtgaggacactacattgctttctggggctctgcccagacacctacgccgggttggattctgagaggcagggctgagtgagggagcgagtcccaggcagcaccacagggagggtgctgggggcctgcgctgtagtgtggaaggttcctgtgggctgtgagggtctgcgcagggagaggctgaggaggggagaggcactggtgaaggctgtgagtagtggggatgaggggacattagcactctcctctacttcgaggggtatgtaactgctacagccaccttggagggcattttggcaccatctatacaattttatttatttttattttttaatagtttttgagacagagtctcactcagtcacccaggctggagtgcagtggtgtgatctcaaaaataataataataaataaataaatataaatgtaaaaattttttttttttttttgagatggagtttcactcctgttgcccaggcaggagtgcaatggcgtgatctc

SEQ ID NO: 69624 - DNA, 1061 bp, Homo sapiens
ctgccctctctctactgcttctgggaatccctgtcggcagagagtttttcctcatatcctttggacccactttctccaaactttctcaggcctcctgacccctgttttctctttcttgcttccctggttctgtcaccaactcgttcttctccttggactgttgctttgctcactcttcactgcctcctttttgtgactcctgtgcagtttaagggcctgtctgggcagtccctccccatctctcctttctcgtcgttctctctcctggcaggtacacatatgaaatcgcccccgtgtttgtgctcatggaagaggaggtgctgaggaaactgcgggccctggtgggctggagctctggggacggaatcttctgccctggtttgtgagaaggaggaggacctttctttgccctttttatgagttcctcctcccccaccgttctcttgctctagtgtctggcagggagggatgattcctctttgattcctctccagctggacccaggccaggccagggaggcggctgcctggtcccttcatgctcatgtttgtcaccattccctggggtcagtggtctagttcctgctatctccggacgggggctgtctcttgggggcagccccagatgtggagaggtgtggtcaagaggatctgctgatcctggatccattctgggatggtatgatcctgagaattgtggcctgggagccagtcatacctgcttctttgatgagctcttctggtagaaagggaagggaggcaagctccagtcttgacccactgctccttcctcttgccaccgccccctccctgtgacaggtggctccatctccaacatgtatgctgtaaatctggcccgctatcagcgctacccggattgcaagcagaggggcctccgcacactgccgcccctggccctattcacatcgaaggaggtggggaagaggcacaggcccaaccctgggctcctgattctaatctccagccagctaagtagagaccttccaggtcttctccctgccctccctacatcctccaaggccagcctgcccccaggcggat

SEQ ID NO: 69625 - DNA, 1039 bp, Homo sapiens
ggtgatgaaaatgttctggcgttagatagtgatgatggttgcaacaactttgtgaatttatgaaaaaaacacttaattgtacacttttcaccccacttcctctgccatcttggtcctgctgtcctgaggagctacctgtgcaccctgcctccggctctcctgagcagagaggtaagcttgtctctgccttaggtggaaatggccactagagtccacttgctcagcactgactgccttttctctcccacctgttcccactggttttctccctgggcactctcacttgcccttgtctgtgcactggaggccgagactgagctgcagggtttgggcctcaggcccgtttgggagaggaggctcctgctgggtaggtccgggaagggttgacaggctgagtagggaatgactctgctctgccacagatcctgatggctgactcagaagcactcccctcccttgctggggacccagtggctgtggaagccttgctccgggccgtgtttggggttgttgtggatgaggccattcagaaaggaaccagtgtctcccagaaggtgagtcctttcttcctcctccttcccatcaagctttctttcttttcttttctcttttcttttttcctttcttttctttctcccccccccttccttccttctttcttccttccttttttcctttcttcctttctttcttgacagagtctcgctctatcggccaggctggagtgcagtggcacaatcttggctcactgcaacctccgtctcccgggctcaagcagctctcctgcctcagcctcccgagtagctgggattacaggcatgtgccaccacgcccggctaatttttgtatttttagtagagacggggtttcaccatgttagccaggctgctctcgaactcctgacctcaggtaatctgcctgcctcggcctcccaaagtgctgaggttacaggcgtgagctaccacgcctggcccaagccttctctttctctttccaaatctggctcagaactttcctcctttgataagatttctcccca

SEQ ID NO: 69626 - DNA, 1056 bp, Homo sapiens
agtttccctaccttcgggcggacggggagaacgcacacgtgtgggcactgccagtcccgtttctgcccgccaccgaagcacccagcgatggcccttgagctttcctccaccctagtcttgccgcctctgtaaagtgcgagcttttcgggccggcccactgggcacaaaagccccaaagggtctccgcccccttcttccattcctgagatggcaaatccaagcaactttccttttggcagagttcctccataggaggccccaattacttttgctcctgttggcttccactccttgcccaggagaccagttcctcctattgacctagaaagaaaactcttcttgactcatgtcctcgttctgagcttcacagagagcgcccagcaaaaaaaaaattcatatcgcacgttgtaatggcctgaagatgttgcatttagcagcccccctcttcctttctggtttcaggtttctgaaacagatcgtgagcttcatcaagagaattcaactggaaaaccaagactggtagactctctttttcttcagacaataggcaggagccaggcagagtccagggattcttggaacacctatcttttcttcggaggacactaagttctatttgaagacaaagttcaatatggcaacaggactgatgggacacgaaggagtcgctaccgtgatttggtgacagttcttcaaaacgacagtgtctcaaggaaaggtggacctaggaactcctgaacttttgggttgccttaagtgagaaatcagcatggctcaggtaaaaagctctagagtcctcctccaagataactgggaagcctgtttgcagtttcactcttgaatgctgccttagtcaacatattgaccaaccccagtgatccaagctctgtattaagcaccagggggagatctagaggaaggaaaggagacaggccacagcccctgccttcagggagcttccagtcaaatgaaggaggtaggctatactgcatcacaggcactgatgggacatttgcaaagcaacgtgtactcagtttacatttggtacattaagtg

SEQ ID NO: 69627 - DNA, 1508 bp, Homo sapiens
agtgagcttccaggctagttggggtcgggagagggatggaaagccatttatttttatattcacaatgccttgtatagtggctggctagtagtagagactctgaatctgttgattgaggaatgtgcaataataggggtatgtacataggagagaacagtacttctgcttggatagaaaaagaagatggaggttgaaagatgcataggattttgctaaacaagcgagaagggtgtttggacaaaaggaacagcatgggcaggagcttagagtcatgggaaaatgtgatgaggttccgagtactgcaggttgtttgatagttacggagtaagggatttaaatggggatagttatggaggtagtattgacagtgataggtgaggaagttgttccctgcagtaagcagagtgtaacccaaaggccttttatgcctcgctaagttaagcagcagagtagcatcagatcagtgttatgtagaaggtcattattgtggaggtagaggatggactggagagacagaatgagcagataggctgttgtagtcatctgagtagaatagctatgtgcacacatctccagagcttctcccagcttgcttctagggaacctccctaccagtctcaccaggatggcagtctgattgtagtataattggctttcctccagctgcttctgaatgcacagcttcctcctttccatatagaataggagcctgtcagtttcttcttcctttgtgttttgcaacccacttctcagcattgtattcagtcttctgagaatgctgccttccactaaggactgaactttgtgctagacactgttaagcgttttacgtcttagtttacttttcatcaaccctgtaaggataagcattatgacaggcatttttcatgtaaggaaactaaggcttgcaaaggtggaataacttgcccaagattatagagtgcaaacagctgagctaagattttaactctggatctttcactccaaagtcccagaaggtggagggaggggtcccagaacgtactgatcatctaaaaggaatttcttcataaatttgtgagtttgctgaccaacgatttcttaaaattttttttttcagtaagaaaagtattttctttaatgccggctaaccgaagtcagtttgaagaatgtagcagttttctggaaatttacttaaacataccttacttaagtaattgtttaaattatatatggagcaaggaatgtgaaaaaaaatgtgatcatacaagcacacatataaatggcctaagaggtcaagagaaatgctgaactccaaaaatcatatcagttgcaattggtaaatacttagggagtttaaaatctaaagggagaaatagcctgtagtcccaggaccttaggagactgaggctggaggattgtttaagctcaggagttccacaccagcctaggcaacatggtgaaaccccgtctctataaatacaaaaaaaaatagccgggtgtggtggcattctcctgaagtcccagtt

SEQ ID NO: 69628 - DNA, 2004 bp, Homo sapiens
tgtttttgccctgccctgccaggtgacctgacacctcatctcctttcaacttaggcaagtctcctggcttgtgaaggcctagcaggtgtgagtttggttcccactgcagccagcaagaagatgatgctgagccagattgccagcaagcaggccgagaatggcgagcgggcaggtagccctgatgtgctgaggtgctcgagtcaggtacagcgcttgagtccattgtggcacctggggatcgggtggcccaagctctctgccaggagataccaagctctgattccttgatgcttcctcatagggaagtggggcaaggggatccaactggggaatggatgaacattggtatttcagaaagctaaggaaggtcttttgtgtgccttcaactcttttaagaccaggtgcttggagaggaaatagttgtatacttcctctaagctttcggggcaggtggtttactctcatttatgaattttgtctgagagctgcattgggtctcatctcatgttccgagatgggctatgagtttagatttgatttgtcttcaaagggtcaccgaaaagacagtgataagtcccggagccgcaaagatgatgacagcttgtctgaggcctctcattcaaaaaagactgttaaaaaggcaggtaatggggtgatcccccaaactcatacagtttggtaatggggtaatattcctccttcttccctctaccatgtaacctggagctttccctagatgctttgatctctgatagccagtgagtgagtcccccagatttcatccagagactaccttggtagttgatctcctgccttgctggaacagtaatggtacaggttggggagcatgagatcccagatcccgaggcatgggagcaggcaggctccagctcaagtcatactcagactgctgggtttgacaggatagacagcttacccactccacctccttccccaaagggtctcttacctccatggagtacaggagatggcagcacctttagacagcatcagagaggttcctttctccaacagctggaagtggacccagagtagaacagtgtctccaggaagagggcagtggtggcctcatgacatgcctgattattgcccccaggtggtggtagtggaacaaaatggttcttttcaagtaaagattcccaaaaattttgtttgtgaacactgctttggagcctttcggagcagttaccacctaaagaggcacatccttattcacactggtaagtctcttgtttatattcaaaagggggagaatagtctatcgcttgtattccatgtctgtttgtggctctagttgggtttattttaatgggtaagtattagaaatgaaggaagaagataagtcaatgaagcagagagattgcatggctttgtatctggtgtcactgagaccagcacctttggggacctctccccatttatgatcacttaggtgtctacacattactaagagttaaagtttctgagaaaactggaatgaggtccctactgtacatacctccccacattcacttctctgtccacctgggccaggtgagaagccatttgaatgcgatatatgtgatatgcgtttcatccagaagtaccacctggaacgccacaagcgtgtgcacagtggtgaaaagccttaccagtgtgaacggtgtcatcaggtaaggctcatccctgctacaataccccacacacacttttccttccccaagaatcagggccaccctccactcctgcctgacaaaagagccaccagcgttactcgccataatagttaacacatcggggtgaagtgcatctgtctggccttatgcagctgatcatggggagcagcaattagaacattgtaataataataataatagcattccatatcacttactctatgccaggcactgtgagagcatactttacatagatgattttatttaatcctcacattgactccctaaggtagctgtattgtccttatttcacgtatgggaaaattga

SEQ ID NO: 69629 - DNA, 2549 bp, Homo sapiens
cagagctgggattcagtccaacttcagagctaatgcactttggaggaagagatacaatctttgccctgggggtcagtatctgatctgatgagaatgtaagagctggggccaaaacaagacaagaacaagagatgagaaatgataatagctaacacttcctggatgcattgctaggtcccaagctttgctctgcactcttacactgaatcttcagacgctagaataaaagctccatgagggcagagactttgttcctctggttctctactctgtatctgccttgagatagatactcaataaatctttgatgaataaagcagctgtgctgtgagtaggtacttttagcctcgctttgcagttttgcagatgagtatgcagattctgggctgttaggtaacttgcccaaggtcacacagctgctgagtgatagagccaagattcagccccaggcggtctggcctgagagcttggattctccaccaccgtgtgctcctgctgtctgtgcacgtgctgaggggatggagaatgtggtatctgcctcctgtgagaggaatgagttagccaacaggtagctgcgtttgtctgctcaggcacttaaccctccctttcttctcagtgtttttctcggacagatcgattactcagacacaaacggatgtgccaagggtgccagtccaagacttccgacgggcagttttctctataggcgcaaggggccccgggtggtgggagtgatcagaagaacctgccgaagagcacaccccctctggtctgatggtcccaccaccgccccatgtgaacctgtcccactcctggaggagtggacccaggagaccagaagagtgcatcaggggacagtggccccagaacctcagctctgtaaataatctgagactatgagtatctcggggaagttcttacagcattcctgggtaggggagctagtccctggacccttggctgaggtcataggtggggactcaaggtacaggaccaagactgaagtgtggctcccacaaccttggactccagctggcagctgaaatggaaaagattggggaaggggatttgtttgttctgttcttgtttttgtttatccaaaagcaacttcagcgggtaaactgtggatacaggtaatccagaggcataagagtcctggtccaaagtagggactatagctggtccagctctccccaaaaattgggtttttagttgcagtagctcctcagtgtttcacaatcctgcacttcgcctcctttttgaggaagaataaggtcaggaatggcagctgagcttactttggcttccttatacactgtagggacaaaaggaaaaacggggtggagcagacaagggctggatccaaaaagtggatggcacctcttccttcctcaagggaaaaggaagagttgtgccagtgggtgttgtcatggcccatgtcacattggcacctgatggcatcagctcaaatgcctttaggaggaaacttgggtgagagtggcccatgaagcccttttcttctttttttggggagtcggtcttggagatggtatgtggctacctcgctgccattgactcctaaagtgagacagatgtgttgagcaaggagtcatggaagtcaaagtgggttctctctccttgtgccctcttaggaacaacccaagactggtcccaagttggctaacagctgctcaagaaacaaaggaatctggggtcttctgacatgcctgttgagcagtaggagctgttctccctccccaagtcctatcactgtattcaggtagaggaggtagggaggggtctgtcctttggtcccaaaaaacaagatctcggcttgcttcctgatggccatccctacccaacagagtgtgggggatgggggtgggggtgctgcagagaaaagactaaagaagaaacctaatgtaggttccattcttaaccatattctttgctcctctctgctccaataccaccaccttgtccactcccaaaaaagtaatcgggtgtgtgtgtgtgtgtgagagagagtgtgtgtgagatatgaatgcatgtatttgtatgcttgcaggagatggcatattattgagccaaacccttctctggccctcaccttcagggaggatgagtggaaaatagcctcctcttgcccaaacatgaagggtgcttgaggtctcagcaggagctgaagaacacaatttggggaacagaagggcttttgttttggagggtttttttttttaagatgaattcaacagcctggtggttaggatgtttctaacccaagccagggcttgtgaacatgaattttctaaggtgaaataaaccttttctttctgctaaagaaagaatccttatgggaagttttggggtttggttgacccccactgtaacctgacctgacctgtggcgggtacgggaactgtcttagtaatcatggagactggctgaacctgagtgccaagctgtcagtagggtctgagatgggaaactcctgaaagtatgatttcatttcccagaaaatgtaaagaatggataccagcaatgattcc

SEQ ID NO: 69630 - DNA, 1052 bp, Homo sapiens
ttgggcaagaggaggctattttccactcatcctccctgaaggtgagggccagagaagggtttggctcaataatatgccatctcctgcaagcatacaaatacatgcattcatatctcacacacactctctctcacacacacacacacacccgattacttttttgggagtggacaaggtggtggtattggagcagagaggagcaaagaatatggttaagaatggaacctacattaggtttcttctttagtcttttctctgcagcacccccacccccatcccccacactctgttgggtagggatggccatcaggaagcaagccgagatcttgttttttgggaccaaaggacagacccctccctacctcctctacctgaatacagtgataggacttggggagggagaacagctcctactgctcaacaggcatgtcagaagaccccagattcctttgtttcttgagcagctgttagccaacttgggaccagtcttgggttgttcctaagagggcacaaggagagagaacccactttgacttccatgactccttgctcaacacatctgtctcactttaggagtcaatggcagcgaggtagccacataccatctccaagaccgactccccaaaaaaagaagaaaagggcttcatgggccactctcacccaagtttcctcctaaaggcatttgagctgatgccatcaggtgccaatgtgacatgggccatgacaacacccactggcacaactcttccttttcccttgaggaaggaagaggtgccatccactttttggatccagcccttgtctgctccaccccgtttttccttttgtccctacagtgtataaggaagccaaagtaagctcagctgccattcctgaccttattcttcctcaaaaaggaggcgaagtgcaggattgtgaaacactgaggagctactgcaactaaaaacccaatttttggggagagctggaccagctatagtccctactttggaccaggactcttatgcctctggattacctgtatccacagtttacccgctgaagttgctttt

SEQ ID NO: 69631 - DNA, 1172 bp, Homo sapiens
tactaatgtgtgtactgggtcagaaggtgccctgggttcccacagaccttggtttcctgcctgggtgggtgggagggagggaacttcagagagtatgtgcgaacagccatagcagagccacccctgccaaggacccagtgagggaaactcaggagcaggtggttggttcagttcccgcgctgatgtctggggcagtgcatgtgtgagaagagaggcgcaaagcagtgaaaggagtgatttggcatccagagggcccgggagccccacggataccccagggaagccactgactcacaccgctgcagaggctcctgggcccaatgcccgacccctgctggccagcatggggcctagcactggaagatgcctcaggtgtgtttggagtgggggaaacggaagtagggcacgctctcagagaccaggatagagagtcagggaacctgggaaagagtagtgccagttccgggtaggctgctgcaccaggccctaccagctcaggctataaacagtctgctttgccccaagtcttttccgtccacccccaacagccttgtcatcacttagctactgatcacgcccatggcttgacattggagggttacattagtggagtccgccacagcttcgaaccctctccccagatgccctttgcctctgctgtggccctggggttttatcaactgtccccttcctatcctcctctccaccctgttttttgttttttttttttttaaataatattttgctatgggggaggggaatatcaaatggacaagatcacttttaaatggtagtttttataagatgttataaacttgtatctttttaccattaaagtgcagtgtatgttccttcgtgatatatttaggatatttaaataaaaggaaaatggggcttttctacatactatctcctctttggggaagctttttcatactggttttagttgttttccttttttctccctacataatcaccccacaacttccagcaccctataagccattttaaaaccccttctccacagaggaacaagcaagtaggagcaaaaacagggcatcagttctgagcaagacgaaaaagcacacgcagcaggacggaaggaggctagacaccaacagatgcagtgtctctgacctgggacccccctgcatccgcagcacttgagaatt

SEQ ID NO: 69632 - DNA, 1062 bp, Homo sapiens
ggaggacagctctgccacagagcactcacagagccgacctaggcggccaggggcacagctggaaggggaaggcaaaggagagaagtaggtcagagggtttgatcacccctgacttgtctctcccaggaacctctaaacccaagttctcaaaagagttggagacagacaaacagctgaaaggatgttaagtatagtgaaacactgaggggtgagagagtggagggagccccagtcagggggagggcctggacatacatgggaagcttcaagggatgaaactgagtggggagtcgggatgtcgaggagactcctgtgggggggatggaaagcagcggaggaatacgggccagggttggttggttgttgggagccaggtggttgaagggaagaggaggccctcacctgcatacaccacattgtaggtgtccctggccatcactgcagtggggagcctggggctgggtgtcactgcaattacagtcacacagcgtgtgcaactccacaatcagctcctctgagaagccaagggcccggagcctcaggagatggggctctgggaggcagtgggtggcttggagagaaacccagaaagtcacctgagaagaggcaggaatcaggccatggttatacacatgcacacacacataccccaaactcaccaatcatccagaacctcaccccttagtaaatgaagggatggggtcatgttaacacccaactcctagaaacatgcctgaggaagccactcagactgctccaggaaggatggatggaggactacctcaggctctcatgtcactccctgtacctgccacccatcttttcctgcctgcttaatttcccactcccacctccccctgcccgccttctgcctgtgcttgctggctctcaccgtctggttgattcggacgtggttgcactgtcctcgatcctcagccttaccctccctcttctcaggaccctcacactgggattcgtaagaaatgtggaccccaggagggagtgaagagtgttcaagggtcacggtggaagacaggctctatgggaagagagcgagtggat

SEQ ID NO: 69633 - DNA, 1077 bp, Homo sapiens
cacaaccataaggggcagtcctgttcccaaacagacctccaggctcagatccccgccccacctcctcacctggcagagtgcagcctgcagaatggcatcgaagccaccttcaggcgagtccagattgccggacacactctggcgccccacctcccgctcgaaggcttgtgcgtcccccgtcagggacagcacatggtgaaagctgaatggtgactggcagcgctccagccgggtggggcaggggtggcgcagtttggagggtactgtgctcacaaagggcagcaccgttttgtccacaaaggaaccaaaacctgggagaggagaggaatgaaggttgtgccagaagtcgcagggcagcaacagaggacccatgagagcgctctatgggaagtggggtggggaggacggtgatgggagagggtgcacctagggggcagggacctggtaactggcaagcaaagcagtgagaccactggctcagggaagtggcaggtagaagacattaagaggaggacacaacttcctgggcaaatgggaacttccagaaggcggaagaaggcccgggtataggatatggtagcagcatgaggcaaaggaaggaaatttgaatagaggagagttggcacagaatgtggagccagggacagtggcatctaggtcttgtccagggagacttgcatcagggcaggttccaggttggtaggcccagggcagctgtccaggcccagagagtgcctgagcacagtctctccagacgctgggtctcaggcctgtaaaacggatagtctcttgagtcctctccagctctgacctagaagatgggtgtctagggagagatgcaggaacgaacctgtggcctggctaggcctgtcaacaactgggagggcaagttggggcccttgtgagtccaggatgttggcagaggctagggcagtggttgaataggcaagggctaacagggcgggaggcagcgctcggctcaccaatgcgcacagaatgggtgacttcctgcagccggaccagcagagcgtgcccgagctggcgcacgcgttccaggtcgtccttcatggagtagct

SEQ ID NO: 69634 - DNA, 1061 bp, Homo sapiens
ggtgtgtgctagcctctgtgccccgtccttgtgccaggtcaaggtgggggcaggctgggccctgcatttctggggcaggaacagagggtgaaagggacagatagatgcaggtccattctgcacctcttggctcgggtgcagagttcaccctgtgccctccgttataagtccctcccccagccctgtcatgtgccttgggctcctcctgccctccatctcagccattggggcagggaccctcctacactacagaggggccaggggatccctctctccctagtgccttccaccctttactccccagagcagcttggcccagggaggggggatgctgcttagctgatcccgccctgacccagaggaagcctctatttatttattagcttttgtttacaccgtggaattgaccccttcctccaggggtcttgggtgggggagcccagggcccctgtgacccctcctttcttcctccaatccccagtttgtatttagctgccaaataagattcccattggctccctgtgttctcttggggggtcagggtgctgtcccctcccctctgtttacatctcccctctaccccgctgtatcgcatattgctgagttttctatttttgcaaaataaagtgatggaaactcatgagatgtggctccctttaggaggtggtagggaaatgaccagctgacctggtgagggagctgagtgaggagggaaagcttgtaattgattggactttgcagctttcttggtagaagaaaacaggatgaagtgtgcctggattgtggtggggacaggatgggggaaagggagcccatggggactcaccctgagtgaccgggtttcccacaaccaccaggtgtgggttcagaatctcactctgtcgcccatgctggagtgcagtggtgtgatctcggcttactgtaacctccacttcccaggttcaagcaattctcttgcctcagcctcccgagtagctgcaattacaggggtgcaccaccacgcccagctaattttttttatttttagtagagacaggtttcgccatgttggccaggctggt

SEQ ID NO: 69635 - DNA, 1050 bp, Homo sapiens
gcagggagggcgtcagtgccagagtgagcaccaccccacgcacaggccttgggcagaacacgtgcccttggaggacacagtggtgggtctgaggagtgaggagaggttgggaaaggcgttccagccctcctcacatctctcagcaccagcccctcctggagcccccatccctagtcttgaatagactccaggcacccttctttcccccctctcctctctcctttttctttgggtaatctcactctggcaggattcttatgctaattgattgtatgtgtgttgggggtgggtagggcttccctcctgtggggtgggtggagctagcgtggaaccctggcatcctgggcattccttccgcccttctggctgcgttggggcgggcttctgaccaggtgggctgcagagggttagaagggagaaggtgttcatgaggtgggtgcgtgggacacaccttagggagggtcttaggaatttttttgcattaacttgggccctccaggtttgggcaacaggtcctacaggttgaataatttacaaattttccgagcctctgaagaccaaccacacgcgcgcgcgcgcgcgcgcgcacacacacacacacacacacttacccagcagccttttgaacagagcagagcatgtcctccccatactgtggggctgagaccccttttgagctgcaattgggtattttcagagtgaagacataagctcagagagggtccagaaacaggttccctcccccatcagtcctgtttacctactgtcacctgacttctccagtttgctacacctccaacggcttccagacctgagaaactgagcaaacacctcagcctctgcttccccagcttctctgactcacagccacttggatctgctggtggtgtggcactgagctggtcacttcccctctcgtggcctcagtttcttcaggcgtgaaccaaggctgtggtgcatcctctcactcactcccctgagacctttgccccatttgctccactgtctctgatggttattcaggggtagtgtgagagagataagcctgag

SEQ ID NO: 69636 - DNA, 1050 bp, Homo sapiens
gcttctggccctttctatgtaaggtactggccctttaaacgtgggggcctcagcgtctcctttgcgtgtgtgcagtagtgtttggagtgtgtgtggtttttatggtgggtgtttagctcgaacctgtggttgatgccactccagagttcctggggatagggagagaccgaggtgtgtgggtagtttgcgccttcacgtccgtggccctggaaggatatgacactcaggaccgtgggtggcgtttgtaaagcccatgtgggaagctggcagtgttaaaaatatcgtttgcagagcgtgtgaatccctggagtgtgcagcgccttgcctaggtggtgtgggtgtgggagcaagggtctctccaccagtgtcgcctgcgacagctgccaggtccacatggcctgtgaggggatgtttgtggcgtgaggccgggagggcgtgtgcccctgcgtggctgcgggggcggttttggaaagtgctgtgttcgagagtgcatcctgtgtgttctcatgccgggtggaaaaggttgtgcacacaagagggagaaggctgagttttgtacgccacccccatataaaaaaagaaatgtttggaaacgtgtatgcggttatatgcagagattactttttcctatggctccaacacacaacaacttcagcaggaagcgaaaagtttaaagcaaagtctgtgtgtgtggtggggggtggcctgaagttgacagcggcagggcgagcaccattactgggtccccaaatatctatcttccccctccgtgaaatgggagatgccaggcctggggccctggaacccctttccagagcagtaataaaaagctggggactgagaggcagtaaaaatgaagtccagatgagaggcggctttgaagcttgggccgcagtgcctggcgggggtggggtgtggggaggggccaggagcgcagcctggaacaccccccaaatttaccctgggctgggatgtgctcgctgcctgggtgcggacggcccggggatgaggggcttgggggcacgctgggaagggtgggaaggggcgggc

SEQ ID NO: 69637 - DNA, 1039 bp, Homo sapiens
tctagctgggaggggggtatgccctggtggtggggatcatagggaagggggtgagtcaggcagcagccccccttcatactcccaccaggatggtggagaacatctggttcccatgaaatgctagaaggctaatgggtctaattgctgcaataagggctggggaaactttggggaaaagagggggcactagatcccccaccctcttaccttctccccaaggctgtactaagtctgtctagaatgggggggtcagggttgatggggagggcgggcctgacaccgtaatgcctggtcctaaggaccccctccatgcaatgcctgggatgcacacacagatggggtgatgagtggggtgcatctggtgaagagaaacgggggctattgaggactcatggcttcctggagccctcccccaactcctcctgtgccctcctcccaacccccctccctgtggcctggccacttctggttctaattaccaaccaggcaggcctgacttaattgggacctttcagatttctgagggggaaggggggtactgacagcttgaagttgactaatcaaggctctttccctcttgttttcggggtactccctattttgcacttaactgtttttgttgttgtttgctgctggtcagattctgattcagaaagttctttctttctctctctctctctctctttctttctcctcctttctctttcttcctttttctttcttctttctttctctttcttttctttctctctctttctttcttttttttgtggggttcgggtgactggattcagaaatgggtatttggggttgggggaggagaagggagtttacactgggttggaaagagcagtgcattccctctccatccctgcttcaagccccctagtcagccttgccaccccgaggtttcctcgccatccacaagtcaggccttttcccagccccggcagccccccgcccctcccccgcgcccgccatccctcgcctactctggcaccccttcctgccctttattcttccaacaggcgccccactc

SEQ ID NO: 69638 - DNA, 2320 bp, Homo sapiens
cagcaggtgaggcggagtctgggcgaggtgcaagtggatgtggcagggctgggcaggggctagggggcgcagtggggtgccagtgacctggaggagtgggcctctgagatgcacacgcatgaccctgaagcaactcgagaggcctgcgcgggtgggagggatgcccgggacagaggatgagacactgagggcaaaaagaggctccgcagcgaggacgggaggtaatagaaggaagtgtacgggagctgctgtgggaaagggcagtagaatttgcgggagcgggattattgaaagggactccctcttcacaggcaaggatgggttgagtgcccagtcctctcccctgtcttcttacccctccctgccccacagtgtcctaggagacagctttggcgtggccactcctcccacccacccaactggtccctccggtctgagatcttggggagtggagttggcagcggggttgggtggagctgccatctgcttaagacagccccttgaccgtgctgcccgaaggatggatatggctctgactcccacctctcttcccaggtcgtccgggggcccaccatgctggtgactgcctaccttgcttttgtaggcctcctggcctcctgcctggggctggaactgtcaagatgccgggctaaaccccctggaagggcctgcagcaatccctccttccttcggtttcaactggacttctatcaggtctacttcctggccctggcagctgattggcttcaggccccctacctctataaactctaccagcattactacttcctggaaggtcaaattgccatcctctatgtctgtggccttgcctctacagtcctctttggcctagtggcctcctcccttgtggattggctgggtcgcaagaattcttgtgtcctcttctccctgacttactcactatgctgcttaaccaaactctctcaagactactttgtgctgctagtggggcgagcacttggtgggctgtccacagccctgctcttctcagccttcgaggcctggtatatccatgagcacgtggaacggcatgacttccctgctgagtggatcccagctacctttgctcgagctgccttctggaaccatgtgctggctgtagtggcaggtgtggcagctgaggctgtagccagctggatagggctggggcctgtagcgccctttgtggctgccatccctctcctggctctggcaggggccttggcccttcgaaactggggggagaactatgaccggcagcgtgccttctcaaggacctgtgctggaggcctgcgctgcctcctgtcggaccgccgcgtgctgctgttgggcaccatacaagctctatttgagagtgtcatcttcatctttgtcttcctctggacacctgtgctggacccacacggggcccctctgggcattatcttctccagcttcatggcagccagcctgcttggctcttccctgtaccgtatcgccacctccaagaggtaccaccttcagcccatgcacctgctgtcccttgctgtgctcatcgtcgtcttctctctcttcatgttgactttctctaccagcccaggccaggagagtccggtggagtccttcatagcctttctacttattgagttggcttgtggattatactttcccagcatgagcttcctacggagaaaggtgatccctgagacagagcaggctggtgtactcaactggttccgggtacctctgcactcactggcttgcctagggctccttgtcctccatgacagtgatcgaaaaacaggcactcggaatatgttcagcatttgctctgctgtcatggtgatggctctgctggcagtggtgggactcttcaccgtggtaaggcatgatgctgagctgcgggtaccttcacctactgaggagccctatgcccctgagctgtaaccccactccaggacaagatagctgggacagactcttgaattccagctatccgggattgtacagatctctctgtgactgactttgtgactgtcctgtggtttctcctgccattgctttgtgtttgggaggacatgatgggggtgatggactggaaagaaggtgccaaaagttccctctgtgttactcccatttagaaaataaacacttttaaatgatcattgatttgatttactcatccttacctgtagccttatcagtagtttctggtgagtgggcagctagaggttttttttttagtttttttttgttttgttttgtttgtttttgttttgagacggagtcttgctctgtcgcccaggctggagtgcaatggcgcgatcttggctcactgcaa

SEQ ID NO: 69639 - DNA, 2717 bp, Homo sapiens
cctggcgtgggttttctccccgatgaaatttctgatgtgattctttgcctccttccacgaccttcagccctcttcccttcctccagttagcttcattaacaatcttctctaattggtctccttttccctagctctccggtgtcatgaggagcttcaaaagagtcaactttgggactctgctaagcagccagaaggaggctgaagagttgctgcccgccttgaaggtgggggtgctgcctggctcgggatacacctggctttccaaactgagctgttttgtgtttgccttttgaagagatggataagtaggcgaccctctctgagtaaccctatttctagttactttctctacctctttcctgcctttgctagccccattcatatctttctctactcctaggagttcctgtccaaccctccagctggttttcccagcagccgatctgatgctgagaggagacaagcttgtgatgccatcctgagggcttgcaaccagcagctgactgctaagctagcttgccctaggcatctggggagcctgctggagctggcagagctggcctgtgatggctacttagtgtctaccccacagcgtcctcccctctacctggaacgaattctctttgtcttactgcggaatgctgctgcacaaggaagcccagaggccacactccgccttgctcagcccctccatgcctgcttggtgcagtgctctcgcgaggctgctccccaggactatgaggccgtggctcggggcagcttttctctgctttggaagggggcagaagccctgttggaacggcgagctgcatttgcagctcggctgaaggccttgagcttcctagtactcttggaggatgaaagtaccccttgtgaggttcctcactttgcttctccaacagcctgtcgagcggtagctgcccatcagctatttgatgccagtggccatggtctaaatgaagcagatgctgatttcctagatgacctgctctccaggcacgtgatcagagccttggtgggtgagagagggagctcttctgggcttctttctccccagagggccctctgcctcttggagctcaccttggaacactgccgtcgcttttgctggagccgccaccatgacaaagccatcagcgcagtggagaaggctcacagttacctaaggaacaccaatctagcccctagccttcagctatgtcagctgggggttaagctgctgcaggttggggaggaaggacctcaggcagtggccaagcttctgatcaaggcatcagctgtcctgagcaagagtatggaggcaccatcacccccacttcgggcattgtatgagagctgccagttcttcctttcaggcctggaacgaggcaccaagaggcgctatagacttgatgccattctgagcctctttgcttttcttggagggtactgctctcttctgcagcagctgcgggatgatggtgtgagttaaggacctggaggtagggtggggacgtggtctgtggactcactaccagcctagggtatttggcaagatctggaggtcctggctccctccttgttaagctgctctctggacagtgcctagcgagccagcaaacagcctagtctatcctgagagggcagtggcccttctggatgtccttcctcgtgctccctgggctctgtcagctctccaggactccgggtcagtcttcagcttggagccctctttatctctactcctcataccaaccttccgcttccttcctcaggtgtatgggggctcctccaagcaacagcagtcttttcttcagatgtactttcagggacttcacctctacactgtggtggtttatgactttgcccaaggctgtcaggtactgtctgggaatcaaggtacctggactaggctcatagggtttggggttgctccactgccctcaaacagctttggggttgctccactgccctcaaacagctttggggttgcttggctttgggtgtggagtgcggtggaggtcatcttggacccagcatgactcctcactctcaaacccttcttgtcccttcagatagttgatttggctgacctgacccaactagtggacagttgtaaatctaccgttgtctggatgctggaggccttagagggcctgtcgggccaagagctgacggaccacatggggatgaccggttagtgccctgggtcccaggcacagagtttgtgggagggtcatcacccattaggcaggtgaatagtacttgctgcgtggttctgaccactgtgagggttccttatggttcaaggaggcagtgagagaaatgtttataagtaccagctactctgtgtttaacaccagtagagaagtgatgaagctaacttacaacagcagacactatttcctcgactggaatctaacttggcattaacagttgcacctaatatgcaaccttatgacctttcaacatatttttttatttctatattttttaatgtttttttttccttttcttcacttatcagaatccagaaatcattacaaatgacctttctgtatatttaagtgtttttttttttttttttttgagacaaggtcttgctctgtcacctaggctggagtgcactggcacaatcacggctcaacacagtctcaacctcccaggctcaagcgatcctcccacctcagccccgcaacgagctcaccttgcaggttcaagcgactctcctgcctcag

SEQ ID NO: 69640 - DNA, 1036 bp, Homo sapiens
gtgagggagtcagccatgtgggttcctggaaaagaacatccctggcagaagaaacagccagtgctgaggcaggagggggtctcgtttgtaaaatgagtgcagatgggctgagtggtgtgaagggcatgggcctatttggggcaggaaggggagagccgccccttccccattcctagcagtaggggttcctgtctgatctggaagctgctgaactgaccacagatccagctgatctctgctgcctctccaggaggagagggtggtgggagcctttcctatggtcaattgtgccttttctcccctgcagcttcttacaccagtaatttggcctacagcttctatagtcacaagctctatgccgaggcctgtgccatctctgagccgctctgtcagcacctgggtttggtgaagccaggcacttatcccgaggtgcctcctgagaaggtacaagggaatgagagatgcaggaaaggagcttatgtggttggggagcggggggagcggggaagggcctcaccagcaccctgccttggagtgggaggttaatagcagcatgttgacaccagtatctggagcagtgtttcccaaacctcactgtactgttacttactgttgactcatttttttttttttttttttttgagacgagtctcgctctgtcgcccaggctggagtgcagtggcacaatcttggctcactgcaacctttgcctcagcaaaggttcaagcaattctcctgcctcagcctcccaagtagctgggattacaggtgcccaccaccacgcccagctaatttttgtattttttgtagagacggggtttcaccattttggttggccaggctggtctcaaactccagacctcaggtgatccgcctgcctcagcctcccaaagtgctgggattacaggtgtgagccaccgcagccggcctgactcactttttatatttagcctggtcctaagctactggtttccagccaagctgcacattagaatcacctgagtgacctttaagaaaattctaatgtctgccccga

SEQ ID NO: 69641 - DNA, 1001 bp, Homo sapiens
tctgaatattttcaaagatcccccaggtggtcctttgagcaaggagagtgagaacctgggttcttggttttttggttttttttttttttttttttttttttttttggagactgagtcttgctcttgctttgtcacccaggctggagtgcagtggcacgatctcggctcactgcaacctccacctcctgggttcaagcaattctctgcctcagcctcctgagtagctgggattataggcatgcgccaccatgcctggctaatttttgtatttttagtagagacgggggtttcatcatcttggccgggctggtcttgaactcctgacctcatgatccacccgcctcggcctcccaaagtgctgggattaccggcgcaagccaccgcgctgggcaagaaccagtgttcttaagcaagaatacctgtgaactgatgcattggcgggattggcaagcaagatgagtcatagaggggcttgggtttcatcttaactgagatgataagcctctaaaggatttaagtggaggcatgacagcagacaggcattttggatttccctgacttcgctgtgatgaatggagtgcaggagaaaagaccgggtaatcaggctgctatagtattctaggcagggaagggtgggctgaactgaagcagctgcacgagggatggaatgcagtggatcggtgcgagaagccaaggattaacctggtaggtgactggcgggagggagagcgagagaagggaacatcagagatggccccacatttcttactcaggagaaggcagtgccatttgctgagaaggattacaggagaagcaggttttcaagggtgtggatgatgaacataggggtggagtggattgcagcctctgagttgaaggcactcagagtatttcattcttaggtgtctcctgccttgggtgggtgtggctcaggaggcccacctgccaaccccgccccctcatgtggtgtatgtacctattgcatgcatatccccttccac

SEQ ID NO: 69642 - DNA, 1123 bp, Homo sapiens
aagccaaggccttttgcttggaggccctaaaacttacaacaaagctgcagataccacgccagtaagtacagggccagaggatatggcaatgatggcaccaaagtgccatgcacccttgaacatggattccaaactgttccacagattacatgctatgtttagatacattcgtggaaaaaggcattccacagctaaataagtgggaaatgctgagttaatcaaggttagatgtttttatttcctgtaggactctcgtgtccttcagtatgcggatgtgccttgcaaatctccaaaagggagatctagtgtacagtgtttccctaagaatgttttcccacaggattcttttattgaggaatgcagtttgggaaatcctgtcccaaggcacaaggagagttgggattagagagaagtgtagagggttttccccagggagcctttaagtcagcttaagggagtgaatgccttttggaggcagggaaggactcaggtagcttggcctgggaaagaggcaaagagaaagactctccaggaaaacaaaggattcctctgattggttctcctctcctctctcaacaaggtgtgccctgttcctggtgctgaagggcgagctggagctggcccgcaatgacattgatctctgtcagtcggacctgcagcaggttctgttcttgcttgagtcttgcacaggtgagcagccatgtccccatgaccataggcggtgctgaaatgacacacactacagcacatctttctatgtaaaggtttcgttgcctttttttatttttgagacagagtctcactttattacccaggctggagtgcagtggcgtgatcttggctcactgcaacccctgcctcctgcctcctaggttcaggtgattctcctgcttcagcctcccaagtagctgggactacaggcatgcgccaccacacccggataattttttttatttgtagtagagatgaggtttcactatgttggccaggctggtctcgaactcctgacctcaggtgatccacccgcctcggcctcctaaagtgctgggattacaggcatgagccaccgctcccggcctttgttccctttttaatcagatactgacttctggtcccagggcaa

SEQ ID NO: 69643 - DNA, 1694 bp, Homo sapiens
aaaccccgtctccactaaaaaatacaaaaaattagccgggcgtggtggtgggcgcctgtagtcccagctactcgggaggctgaggcaggagaatggcatgaacccgggaggcggagcttgcagtgagctgagattgtgccactgcactccagcctgggcgacagagagagactccatctcaaaaaaaaaagaaaaaaagaaaaagattttacctaaaaaataataagccatactaatatttgatatgttatacagtaatacatatatatacacacatatatatacacgtacgtatataaaacacatatattagagaattgggccccaaggtcgctcaggaagtgcttgatgccatttctccccgttttgtaattcttgttctgccttctccccagagtttggtggggtgactcagcacctggactctgtgaagaaggtccacctgcagaaggggaagcagcaggcccaggtcccctgtcctccacagctcccagaggaggagctcttcctaagaggccctgctctagagctggtggccactgtggccaaggagcctggccccatagcaccttctacaaactcctccccagtcttgaaaaccaagccccagcccatacccaacttcctgtcccattcacccacctgtgactgctcgctctgcgccagccctgtcctcacagcagtctgtctgcgctgggtattggtcacggcaggggtgaggctggccatgggccaccaagcccagggtctggatctgctgcaggtcgtgctgaagggctgtcctgaagccgctgagcgcctcacccaagctctccaagcttccctgaatcataaaacacccccctccttggttccaagcctcttggatgagatcttggctcaagcatacacactgttggcactggagggcctgaaccagccatcaaacgagagcctgcagaaggttctacagtcagggctgaagtttgtagcagcacggataccccacctagagccctggcgagccagcctgctcttgatttgggccctcacaaaactaggtggcctcagctgctgtactacccaactttttgcaagctcctggggctggcagccaccattaataaaaagtgtccctggctcagagccctctaagactcagggccaaaaacgttctggacgagggcgccaaaagttagcctctgctcccctgcgcctcaataatacctctcagaaaggtctggaaggtagaggactgccctgcacacctaaacccccagaccggatcaggcaagctggccctcatgtccccttcacggtgtttgaggaagtctgccctacagagagcaagcctgaagtaccccaggcccccagggtacaacagagagtccagacgcgcctcaaggtgaggtgggactgttgctaggtggtggtgatggtgttggatggggttagtcctggaggagagtgttttatagagcaggtgtccctgtggaatagctccccagggcctagtggaactttaatctcctgctatctgcagtaccccaatatcttgcttttttgttttttgttgtttttttgagaaggagtctcgctctgtcgcccaggctggagtgcagtggcgcaatctcagctcactgcaagctccgcctcttgggttcacgccattctcctgcctcagcttcccgagtagctgggactacaagcgcctg

SEQ ID NO: 69644 - DNA, 1030 bp, Homo sapiens
ccaaagtgctggggattaccggcgtgagccaccatgctcagcctctttttttttttgagacggactctcactctgtcgcccaggctggagtacaatggtgcgatctcggcttactgcaacctccacctcccgggttcaagcaattttgcctcagcctcccgagtagctgggattacaggcgggtgccaccacacccagcttatttatgtatttttagtaaagacggggttttaccatgatggccaggctggtctcaaactcctgacctcaggtgatccgcctgcctcagcctcccaaagtgctgggattacagacgtgagccactgtgccaggccaacatctttcacagcaagacctatttccaagtctccctttgtttcagacagagacattttccttaactctaatgtttcttttaccttttcatcccaccttctgttccctcattttctccctccttccacacccaagagtcgctgcccctgatctagagtgttggctgtcatgtgagaagttagttctgaaatcttccagggtcctgtgtgatggtgcctgatggtgcctccactacgccacctgctgtcacaaggtgtcttgtcactgaagacctcttagcccttcaccctttcactctgatctcaggtgaacttcagtgatgacagtgacttggaagaccctgtctcagctgaggcctggctggcagaggagcctaagagacggggcactgcttcccggggccgggggcgagcaaggaagggcctgagcctaaagacggatgccgtggttgccccaggtagtgcccctgggaaccctggcctgaatggcaggagccggagggccaagaaggtggcatcaagacattgtgaggagcggcgtccccagagggccagtgaccaggccaggcctggccctgagatcatgaggaccatccctgaggaagaactgactgacaactggagaaaaatgagctttgagatcctcaggggctctgacggggaagactcagcctcaggtaggacagcaagggtga

SEQ ID NO: 69645 - DNA, 1082 bp, Homo sapiens
accccacttggcacattgcccttcataaatggtagttgctgtttgccatgtgggagatgagatagggactgttccttcttggaaagttcctatcaactatgaaataaggaattcagctgtaccaagtgtcctgacgttcttctaggtctttctaccctggactccatctgtgactccctgagtgttgctttccggggcattagtcactgtcctcctagtgggctctatgcccacctctgccgcttcctggccttgtgcctgggccaccgggatccttatgccactgctttccttgtcaccgagtctgtctccatcacctgtcgccaccagctgctcacccacctccacagacagctcaggtgggtgctgaccatccccaagactcctgctggggcagactagagagaaggtccagactttgaaggaatgggacctcacccctccccgtgttgcttgcagcaaggcccagaagcaccgaggatcacttgaaatagcagaccagctgcaggggctgagccttcaggagatgcctggagatgtccccctggcccgcatccagcgcctcttttccttcagggctttggaatctggccacttcccccagcctgaaaaggagagtttccaggagcgcctggctctgatccccagtggtatgcgggcagccttctggccggctcctctgtcctcttctgcatcttcttacttgggagctgggtgaaggagttttaggcattggttagtttacatagatttatgacccttatgtcataccttttcacctgttagcatcttacatcaggaaggtttgttgttttttttaaacctcaactttgaattaccagcaaattcagtgtctttcctcagaggtgagttcagatgactggggtcttctgtgctaacatgaaacatattcacatgatttgagtgcctcactttgttagttgctgtgagggacacaaagtacaagtcatggtctctgtgcacagggagctattagagcaagggagagcaccttgacctctagtgaccagggaaggcttcttgatgctggcttgagtgatggataggaattgagtgcccaa

SEQ ID NO: 69646 - DNA, 1650 bp, Homo sapiens
ccctgccatttccatgccgtgctgggaggaacatttgaaatcgggcctggcggggtaccagcaggcagcaatagcaagcggggtggagaggagcagggccaggcccccgagccgtcgccatggcaatccagcctgctttccagtagcttataccacccacgtggagtagcatacactactttgtaatatcgtggttgtgtcgtgagaactttaagattttgcagttccttgtaggcaggagtcctgtttgctgctactttacaatactaggcttaagacattttatgaaatgaactcacacaacagtctctgagaggctcaagcccctccttcccttccgggacggaggatcatagagctgtctggcgcagcgaggcctcccggcgccaccgagacgcgcagaggacggctagagcgttgctcgccgagagacttcctcttcgttaagtcggccttcccaacatggcgcagtctattaacatcacggagctgaatctgccgcagctagaaatgctcaagaaccagctggaccaggtggggacgggccccagaggcacctctttcctgctctacatcccccttgcccacgcgtacttctcgcgcccggttccaagttggcagcctacctttcccaggcgaaacctctatccgatcccaggacctgccccctccccggccgcgctcctttctccccttagtcctctcattgacccgctatcccggtcctctgtaggaagtggagttcttgtccacgtccattgctcagctcaaagtggtacagaccaagtatgtggaagccaaggactgtctgaacgtgctgaacaagagcaacgagggtatggggtaggcgggtgagggtaacctaaagtggcgaacctgcttctctcgtcccacctcctaacccagtttttcttacctgaaacgagaaaatccattacatatcgtataccgcttcatgaaccctttgcatgttgcctgcctagaattgaaaagtacaggacattcctctgctcctattgcccctgtttccgttcttttcacactgtctgtgggtgctgtgccctgttggaactctctttaacgtcttacgttggagccgctaaccttccccaggtgtttgtcttcattgctttcacagggaaagaattactcgtcccactgacgagttctgtatcctttccacaggaacggctacctgctgccttctccctttctccttcactcccccaaaaagcggggagggggattgttttgattacttcagattaccctctcctcacaatgattttgaggataccctttttttttttctttcttttttgagacggaatttcgctctgtcgcccaggctggagcgcaatggtgagatcttggcttactgcaacctccgcctcccgagttcaagagattcttctgcctcagtctcccgagtagctgggactttaggtacgcgccaccacgaccggctaatttttgtattaatagtagagttgggggtttcaccatattggccaggctagtctcgaactcctgacctcgtgatccgcctgcctcggcctcccaaagtgctaggattacattacaggcgtgagccactgcccccggccaagaatactcttattacacactttgtagctcttttatctgact

SEQ ID NO: 69647 - DNA, 1007 bp, Homo sapiens
cacccctgtatacccggcaccgcatgctcggtccagagtccgtcccgcccccaaaacgatcccgcagcaaactcatggcaccgccccgaatcgggacgcacaatggcaccttccactgcgacgaggcactggcatgcgcactgcttcgcctcctgccggagtaccgggtacggtccgcgaaaagtgaccctgggactgcgtgcatgcatgcctccggggtggatggcattccgccaacagggtcactccgatagcgcccggcagcccaagcacccttcctacccttcctgcctccctgaagtccagcattaatcccctacccggcgacacccggcagccccttcacccctgtgtacctcgcaggatgcagagattgtgcggacccgggatcccgaaaaactcgcttcctgtgacatcgtggtggacgtggggggcgagtacgaccctcggagacaccgatatgaccatcaccagaggtaggttctcagataccatttatttaacttccttgacctcagctttcctctgtgctccaattcagccatccactgccgtagtccgcgtcagcgaaaagaactgcttcatcactgaaatcaaactcccactaggactacatcatccttccggccctgcctgttcttcacccatctccctggcctgggacctcctttggttcccagggagtccctcaggccccttatctcatctccttccttagccaaggctttttttccatcagcaacttcatcaccccaactaaataaacccatctgtgattaatccattctggtgcccttgctgctgcacctaactgctgggcccacatgattgtggcagttggtgacagttcagatgtgtgaagttttctacttcatttacacccttccaaagggaaatccttcttgctcaagggtagcccattccaatccttttcttctccctcaagcctctaccgcatcaaactgagtgtccctgcctcttttcaaaagaagttgagcatttcctca

SEQ ID NO: 69648 - DNA, 1067 bp, Homo sapiens
ctcatcattcccaggcagggttcaagcgtgcaatggatctggttcaagaggagtttctgcagagattagatttctaccaacacagctggctgccagcccgggccttggtggaagaggcccttgcccagcgattccaggtataggccttggaggaggcattatggcttgaggattactgactgccaatcaacaggaactcctgcttcttctaccctaaaccctggagtgcagtggcagacaacctcaacctcttaggctcaagcagtcctcccacctcagcctcctgagtagctgggactacaggcacacaccacctcacccagctaatttttgtattttttgtagagacagggtcttactttgttgcctaggctagtctcaaattcctgggctcaactgatcctcccacctcagcctcccaaaatgttgtgactacaaacatgatcaccatgcccagcctaccttaaaccttctagctatgctctccctctttcaggtggacccaagtggagagattgtggaactggcgaaaggtgcatgtccctggaaggagcatctctaccacctggaatctgggctgtcccctccagtggccatcttctttgttatctacactgaccaggctggacagtggcgaatacagtgtgtgcccaaggagccccactcattccaaagccggtgaggccctagggaaccactctgcagaccttcaggcttgtctcagccttgttaagagaaggctgccaactctgacccctgctgtactccctctttctgcccaggctgcccctgccagagccatggcggggtcttcgggacgaggccctggaccaggtcagtgggatccctggctgcatcttcgtccatgcaagcggcttcactggcggtcaccacacccgagagggtgccttgagcatggcccgtgccaccttggcccagcgctcatacctcccacaaatctcctagtctaataaaaccttccatctcatactgacccagtccttgacttattcttgccctacaccattccagaaacttgtgaaaagtgaaacaactatttatgtgta

SEQ ID NO: 69649 - DNA, 1715 bp, Homo sapiens
ttttcatatttttcaacatgtttcaccatgttggccaggatggtcttgatctcctgacctcgtgatccgcccaccttggcctcccaaagtgctgtgattacaggtgtgagccaccgcgcctggccttttctattcttttttttttttcttcttttttgaggcagagtctcactctgtcgcccaggctggagtgcagtggcacaatctcggcttactgcagcctccgcttcctgggttcaagtgattctcctgccctgcctcagcctcctgagtagctgggactacaggtacgcaccaccacacctggctaatttctgcatttttagtagagacggggttttaccatgttggccaggatggtctcagtttcctgacctcgtgatccacccacctcagcctcccaaagtgctgggattataggcgtgagccaccacagccagcctggccttttctattcttatcactctctaatctgcagccagactgctctttctaaaatgctgctgtgtgatctgtttattcttctccttagaacccttccatggctttccattcattgtcttagagcaagtcccaactccttaacctgctcacaaagccccaaaagtcctctgagccttggttgtctcatccgtaaatgggtagaatctcgttcagatttgtgagatatgtaaatgaaaggacagcccgtagagtgcctggtacatagttggcactcattaaatgtgagtgcccatatttttaatacatgtatattgaatgaatgaaactggtagagagggacagaggggatcagagtaagctgacccacattttcctcccttatcaggcgtgatgtgggcctttttggggtgctaaatgaaattgcaaactcagaagaagagggtaagtatttttccctccagccttccctagttttgtggttatctcctctccatattcttgaactcacccccgacacctgttggctcagcctcttttagccctatttttcctgtcctctcctctacctacccaaataacccagagtgggtgtccagagtgggtgtccagagtgtggtgttgagagcacttactgggcagaaggacctggggagtgcctgtccttccttgtctttcacctagaaggtacctggtaagaggcctgtgaatggtttaatcagagctgcttcctcaaccctacagtgtttgagtgggtgaagacggcatccggctgggccctggcactctgtcgatgggcctcttccctccatgggtccctgttcccccatctgtctgtaagtttggcttcctccccagccctctgcatttgctgtgtccccatcctactctgccctcattcctatccttgcaggtcagggttgggtgtgatgacttcagagggtaggagtggtccagctcccctgttggaatattgaggagatggactccttttgccccagtgtgtcctgtgtctatcttgttcttacagctcaggagcgaagatctgatcgctgaatttgcccaagtcacaaattggtgagtgcacaagccctggagctttgtggaaaggaagtcctgaacctcaaaactccctttggggagaaggcaaagactcctactccttttctgattgctcaccatattctcattcctcctgttcccccaaaaaagaatacaagaaaaagtaggaaaaaaccatgtccttactggaaatgaatgtgagcttctgggct

SEQ ID NO: 69650 - DNA, 1099 bp, Homo sapiens
ggggcagtgaaggcttccggaagaagcgctgagaagtcaggtgtcaggcctccacgaacttcagctagcttcttgggctcgagggagggagggcgcgcaaagccggaaggaggggtttgcggctggggagagccagagggcccacccctacccggaaactgggggtggagaggccccaggccagctcacgccagtcttccagctccgggctgggcctgaggccggcaagccccaccccattcctctgggcacctcgtggcccgggcaggtttgtttacgaatccggctccctcctcctccagcccggccctccgcccgcccccagggtggccccagttccgtgagagggggaaacagagccagcccctggtccgctgccctcctctcgcctccccttcccttccttcctccagcctcttcctagaatgcccacggagggcaggtccttttcccacacctgtctgggccatgctccttttctgggaatggggtggtgtccctttctcctcaactctggactctggagcggactcagggctacttgtctcaggagacgaaggagaaaaggaaactgcttcacttctggttaaaagaggaactttttttttttttaaatgctgagctgggccgggccgggccgggcgtggtggtccacgcctgtaatcccagcactttgagaggccaaggcgcgcggaccacttgaggtcaggagttcgagaccagcctggccaacatgttgaaaccctgtctctactaaaaacacaaacatcagcgggacgtggtggcacacacctgtaatcccagctactggggagtctgaggcaggagaatcgcttgaaccctggaggcagaggttgcagtaaatggagatcgtgccactgtagtccagcctgtgcaacagattgagactccatctcaaaaaaaaaacaaaactaaatgcttagctgccaggcaggacttcatcccacttggggtgcaggggtctgggtttgtgtgggtaccacaggggttagttgacattaagcacaccttcctcaggggtgtggcaagcctaggctccctgagaagccttaggggtttgggtatttggggaagggaa

SEQ ID NO: 69651 - DNA, 1067 bp, Homo sapiens
gaaaagagacaggaaaggacgcatattgacgtgaactaaaagccaattaaacgccgaattaactgagggcggaaacttggagtggcagaggagaattggcggctccctcagttattcaatccaatgaggggacgaagtaggcctggcaccgcctcctagttagccaatgggcgttactggagctgcccatcatgagggagggaagagggctatgccaagaggagaccgtcgccatattggccctcctcaggggacgttgttacagtcattaggtgggacgctttagcggagtcctgcagctcaacaggtgtcagagccaaggcattcggcgcgcagttccgcatcaacactaggacttgtttgcgtcttcatttaactgcccctataaagtacctctcaaatcttacccccctcccgggtggtcggacaggcgggcagatgcctcaatgtcgctgcaagccctgggaatgcaggcgggacgagatctggtgacagcactcaccgaataagttaatactgagctgaccaatatgcagagtctccgtgagactccagaaaacgcgattttattaagttcccccagacaaaggcgctaaccacttaaacgactggttaacttttcaagccttgaggctaaagtgcggataagtcacttccattttttcccccttaatagtaaataccgcctatgcataaagcaagatagctgagctccagctttttgcaatcacgaaggttaagaaactttactgcaggcacctggatttctggcctcctctttatccgtgttttggtggagccggccttaatagcttgtcaatgacacgatgaggtcatgtccttcagtatttgtatcttatatgttgtcacctgcttatatgttcttatgttttaaaatgtgaattctcctaaactattttaagccctttgaaggtaagaactgaggcctctgctgctttaaacaggtaaaaaggtgaagtgattgctgactgcctaccgtgttaggtgcctaagtcagggaggcagttagtattccatgtcatccttaaaaggaagattttattaag

SEQ ID NO: 69652 - DNA, 2834 bp, Homo sapiens
ccaggtgatctgcctgcctccgcctcccaaagtaatgggattacaggcgtgaccaccgcgcctggcctctccatctcttttaaacttaattttagcaagctttccatgcacccacatgttgttttatgccttacctgtccttttcctttttttcccttaggatactttttcttatttagaaactctcaccatgcctaccgtccttcacatttcctatccccaaagcactttttgaatgttttcttagtttaattttgtacaagggagaattaaggcccacttttggcacattgaacctagttcatgtcctgcatgccctgcagctcccctctgccctccaatccattttctttatactggtggctttcgccttcctgttagtcattgctatttcatcatagcctccttttatccttcctacttcatttcttttcttccctcaagtttacgttgtttgttttttaattattttagaccaagatcactccatggatgaaatgacagctgtggtgaaaattgaaaaaggagttggtggcaataatgggggcaatggtaatggtggtggtgccttttcacaggctcgaagtagcagcacaggcagtagcagcagcactggaggaggagggcaggtaagtgataatcatagagtggggaaggtgttgagaagatgtaaatattcttagataattgccttactcttcacagaaagcgttttagggagagactaaaccattttatagataaggaagtaagagaatggagatccccaaagacaaaggagtttcagcaatacagataggtcagctttttgtttctgttttttgctccttgtctgcactacgttgctgtttatttgttgtatactgccccctaggctggcagctgggtgtcactaactcctttcctctcccttattttcggccaggagtcccagccatcccctttggctctgctggcagcaacttgcagcagaattgagtcacccaatgagaacagcaacaactcccagggcccgagtcagtcagggggaacaggtgagcttgacctcacagccacacaactttcacagggtgccaatggctggcagatcatctcttcctcctctggggctacccctacctcaaaggaacagagtggcagcagtaccaatggcagcaatggcagtgagtcttccaagaatcgcacagtctctggtgggcagtatgttgtggctgccgctcccaacttacagaaccagcaagttctgacaggactacctggagtgatgcctaatattcagtatcaagtaatcccacagttccagaccgttgatgggcaacagctgcagtttgctgccactggggcccaagtgcagcaggatggttctggtcaaatacagatcataccaggtgcaaaccaacagattatcacaaatcgaggaagtggaggcaacatcattgctgctatgccaaacctactccagcaggctgtccccctccaaggcctggctaataatgtactctcaggacagactcagtatgtgaccaatgtaccagtggccctgaatgggaacatcaccttgctacctgtcaacagcgtttctgcagctaccttgactcccagctctcaggcagtcacgatcagcagctctgggtcccaggagagtggctcacagcctgtcacctcagggactaccatcagttctgccagcttggtatcatcacaagccagttccagctcctttttcaccaatgccaatagctactcaactactactaccaccagcaacatgggaattatgaactttactaccagtggatcatcagggaccaactctcaaggccagacaccccagagggtcagtgggctacaggggtctgatgctctgaacatccagcaaaaccagacatctggaggctcattgcaagcaggccagcaaaaagaaggagagcaaaaccagcagacacagcagcaacaaattcttatccagcctcagctagttcaagggggacaggccctccaggccctccaagcagcaccattgtcagggcagacctttacaactcaagccatctcccaggaaaccctccagaacctccagcttcaggctgttccaaactctggtcccatcatcatccggacaccaacagtggggcccaatggacaggtcagttggcagactctacagctgcagaacctccaagttcagaacccacaagcccaaacaatcaccttagccccaatgcagggtgtttccttggggcagaccagcagcagcaacaccactctcacacccattgcctcagctgcttccattcctgctggcacagtcactgtgaatgctgctcaactctcctccatgccaggcctccagaccattaacctcagtgcattgggtacttcaggaatccaggtgcacccaattcaaggcctgccgttggctatagcaaatgccccaggtaagatttccaatcttgtgcatttattgggaaccaactctagcatcgtagctgaaacttgagtctaaagaaaggaatagagccttttgagataacactttcttgagggttagtcatttaggcaaataaatttgagaaatagagattctgtttaagtaatttggaactgaagtaaaggaaacttctccagttagtttgaggaaggagcacttctgggcaatattctggagtctgtaatactcagtgtttttggtgctgcagaataatggttgacaagctttctgtaaagggccagatagtaacgtaaatattttagacattgtgggcctcatgtggtcacattttcttttcttttttttttttttgagacagagtcttgctctgtcatccaggctg

SEQ ID NO: 69653 - DNA, 1034 bp, Homo sapiens
ttgcctcctgggttcaagcaattctcctgcctcagcctcccgagtaatgcccaccaccacgcctggctaatttttgtatttttaatcgagattgagtttcaccatgttggccaggctggtcttgaactcctgacctcaggtgatctgcctgcctcggcctcccaaagtgctgggattataggcatgagccactgtgcccagccgctaatttttgcatttttagtagagactgggtttcaccatgttggccaggatggtctcgatctcctggcctcccaaaatgctgggattacaggcgtgatgtttctttttttttaaattgacacccctccctcttttatcaacagcttttcctttcattttgtagtcatattttcccagatctttattttattttattttacttttcatttaaagcctcagatgtttttcttagccgctgctgaatcctgaaactcttgccgcaggttgacggggagttggcttttaaagatttaagtttggatgacttcttgtgagttctgtctaataaagagtgcagggctgggctttggcaggagaatagaacatatttccttgatgggtataattcattcacaaaccaaatttcaggtactaaaaataacaatttcacatctgctgggttttattggggtcaggaaaatgtcttctcttagaagttaagttgaatgtgataccagggttggtttgccaagggtgtcactaaacttggagtcagattgctgagagctaatttgttaaaaagttgtgttttagagcagtacatttggacattaatgaaaagtaggtttagatgatttaaatgtcttaccagttatcatttttgtgcaaaaggtcatatgaaagaattttctattttaagattatattttatcaaatataatgttgaatgtttctgcgtcttttgtctttccctagtattatacttgtttctctttttaatttaaaaaatttattttctagagatatcagcacagaaagatatacttgtttcttagggtgtttggtgcttt

SEQ ID NO: 69654 - DNA, 1140 bp, Homo sapiens
ggagtacaatggtgcagtctcgctaactgcaacctccgcctcccgggttcaagcaattctcctggctcagccttccaaggagctgggattacaggcatgcgtaccattcccagctaattttgtatttttagtagagacgggatttctccgtattggtcagactggtcttgaactcctgacctcaggtgatccgcccacctcggcctcccaaagtgatggaattacaggcgtgaaccactgcgcccagccactcttggtattttcaatgatgattcttgagatttcagtgagtcttcaggtgtcagtgaatggaatggctaaacataaaaaggcttcaaaacttgtgatactgtgaatgtaggatgtcagttcaaaagaaatgatgttgtgactgtagggtatcactgagatgccagtgataacctgcccatgtcacatgttgacccttttctctcttaatttcaggtgatcatggagctcagcttggtctccatggggctggtggtgatggaatacatgatgacacagcaggtggagaggaaggagaaaacagcccagatgcccaaccccaagccggtcggaggacccggcgggaagcatgcacctgcccctactgtaaagacagtgaaggaaggtgagttgacccagccagtttcttacaaatataaagaaaaattaatagatttggagataagaggaagaagattaattttttttttttttgagaccgagtctgactctgttgcccaggctggagtgcagtggcgcaatcttggctcactgcaaactccacctcctgggttcacgccattctcctgcctcagcctcccgagtagctgggactacaggcacctgtcaccacacccagctatctttttttatttttagtagagacagggtttcactgtgttacccaggatggtctcgatctcctgacctcgtgatctgcccgcctcggcctcctaaagtgctgggattaccagcgtgagccaccatgcccggcaaaggttaatttttttttttaggatttaagactcagagctggatgcatataatcccagcactttgggaggccaagataggaggatcacttcagcccaggagtttgagaccagcctcagcaagaaagcgagagccgat

SEQ ID NO: 69655 - DNA, 1108 bp, Homo sapiens
gtggctcacgcctgtaatcccagtactttgggaggcggaggtgggcagatccatcacctgagctcaggggttcgagaccagcctcgccaacattgcgaaacctcatctgcactaaaaatataaaaattagctgggcatggtggtgtgcacctgtaatcccagctactcgggaggctgaggcaggagaatcgcttgaacctaggaggcggaggttgcagtgagccgtgatcatgctactgtactccagcctggacgacagagtgagactctctcaaaaaaacaaaaaagaagactttttcaaaaaataaaagtttgggttagtttggtgtcgattgggtgattgctgttgatactttgtggttctttagttttctctagaatgaatgattaacagttgtgtcctcactttcaggggctcgggggatcctggcaaaaagaaacagcatatttgccacatccaaggctgtgggaaagtgtatggcaagacctctcacctgcgggcacacttgcgctggcatacaggcgagaggccatttatgtgtacctggtcatactgtgggaaacgcttcacacgttcggatgagctacagaggcacaaacgtacacacacaggtgagcaagagcctatgggagagaaaaatagtaatagactagaatgaaaaacacaaaatatacctacaaaataactaaaatttctgagcaacttaatttgaaactgaatatatgggtcacaaatggaattggagttaatctggaaaatttttaagaaggaaggaggggctgggtgcagtggctcacgcctgtaatcccagcacttttggaggccgaggcgggcagatcacgaggtcaggagatcgagaccattctggctaacatggtgaaaccccgtctctactaaatatacaaaaaaattagccgggcatggtggcaggcgcctgtagttgcagctactcaggaggtggaggcaggagagtggcatgaacctgggaggcggagcttgcaatgagccaagatcgtgccactgcactccagcctgggcgacagagcgagacactgtctcaaaaaaaaaggaaggagccaggtgtcgtggctcatgcctgtaatccca

SEQ ID NO: 69656 - DNA, 5896 bp, Homo sapiens
aaggaaaatatacttgaagttttttgttttttgttttttttttgagacagagtctctgtcgcccaggctggagtgcagtggcgcgatctcggctcactgcaagctccgcctcccgggtccacgccattctcctgcctcagcctctccgagtagctgggactacaggcgcccgccaccacgcccggctaattttttgtatttttagtagagacagggtttcaccgtggtcttgatctcctgacctcgtgatctgcccgccttggcctcccaaagtgctgggattacaagcgtgagccaccacgcccagccacttgaagatttttcttgtttttgatcaccttctcatactggccttactcagcttagtagagtaagcactgaattgggtaaggtaacctcacttcctaacatgtcagcttcttatcttttcttcctttacctaggtgagaagaaatttgcctgccctgagtgtcctaagcgcttcatgaggagtgaccacctgtcaaaacatatcaagacccaccagaataagaagggaggcccaggtgtagctctgagtgtgggcactttgcccctggacagtggggcaggttcagaaggcagtggcactgccactccttcagcccttattaccaccaatatggtagccatggaggccatctgtccagagggcattgcccgtcttgccaacagtggcatcaacgtcatgcaggtggcagatctgcagtccattaatatcagtggcaatggcttctgagatcaggcacccggggccagagacatatgggccataccccttaaccccgggatgcaaggtagcatgggtccaagagacatggaagagagagccatgaagcattaaaatgcatggtgttgagaagaatcaggagagggatacaagagaggagatggggtcccggcacccatctgtatcatcagtgcctctttgaaggtgggaaacattagtgaaaattctgttggtgccacgctttgatgagcatttgtttgaccccagtttcttcttacacttcttaccccagcctacccttcctgcatttctcttctcagctcttccatgatggattcccccccctttcctaaagccatcatgccttgataaatatatatgatcattgaaatactttttaacaaaaaacagattctatattattatatatatatatatatatataaagatatatagagatgcattcacaggggttggctgggaggaggaagaccattctgtgaccaaaataccttggtcattttttttatattgccttatttccctatggctgagccttgttgtgacacatcaagcttttctgtagatgttgtcttggcttcccaccagcttaagcgttcatatgctctgcttttagttcatatatacatacataatgtttttcctttcttaattttgtctttttgtttgggatcagcttcttgcactccttccctaactcaactgttgccgtctcatcttctctcatctgatcacttcatgttttgtttttgttactgcctggatgaggcacttctgtcaattttttcaggaccttagttccagcagcagaatggaaaaatccttgaagcccaggctgatgcttgaagtaactgtggagggagtgttcaaaatactactgacgcaggcaccttcttggcgctggagagtcaaaggcatctcccttcattagctgctctgagcatcaagaattagaagtctttcagtggaattgtacaagagtccctttgaagataataatcttggctcagtttgtataaactgtcaaattttcaaataataggtagggggctttcactaggaaaatcatgtgctcagaagaggaaatgactcgtagtcaggttcaggagttagtggagtatttggactttggtactgctgtcttccaaggtagctctaagttttgatgtgtgggcttctgagtttatattctgaaaggaaatacacttcttttgaacatccccactaggttcttttccattgtcaataaggagcatcagccagtgaatctgtttcaggtttccattctgcagaactcctccaaagcatgtgctagtggcaagacagtggttcttatgatgttttcccttaacttttccttgtatgttcttgggtggttcctaagggaaagggaagcacatgatcatgggaatgatagcccagaacaaaaagaaatcttgtcttaccacagtgttttataggagagattgggagaaatcatcctgttttctctgtgacctgatttcagaagagactgatccaaaaattataacggcagggaacctagtgcatttggcactgagatttaaatgcaaccagaattgtcctcaaggcccagccataaaagcattgtctctctcgaccttctggtatcttgttagagagcttttcactgtgaggaagtgtggaaaaatagctctgtgtgtgtgtgtgtgtgtgtgtgtgtgtgtgtgtgtaatctgttaggttggggataggttttctgctagccaatattaaaagagacctgcaataaaaaaattaccctgatctgatagaaagcaagtgtttttgtatgtgtgggtgaatgtgtgttcatgcccgtatatgtctacacacagatgacaaattatatttgaaatcgttggaaaataaattcagatcaaaatgcctttcaggcccattacctagaaatctatcttaaaacctgggtatgttcctaaggtcatttctttgcttatgctaaattaattacaattatgaatggaggatattctactgtacttttttaaaaagaaactatttttgtgtttgaaagtgaaaccaacatccagatctatagcagagtccttattcttctcataaatctttttactttggctacaaatagatgatggtatgattctattatatattttatataaaatccatccaaattaagttttgggtaagtgtgttgtttaatctgaactatagtaacttaatactctaaacaatagttcactccatttggtcctttctccacagatgtaattatgttttcaactcaggaactatggcaaggaactttccccagatcaaattctattaacgctgagatacaagtcatccatgcacagccactatcataccctttattctcactgaaaggcagaactcagaacctgttattttatgtctgtaatcatgtactttggcatcttttggaggaaaggggcaggataactcactggaatgtacagtattttgctagtgcatttcaaggaatggaatcttctccagtatgaaattaccagatataaaataatgtaatgatgctgaggatataagcttttagaaggtaatttgatggtatttctttctcgaatgaaaagctgctggtttaccctcaaccctattcattagcattaccatgagtgaatttatatctaattatttccacttgccctgttctcttcacaccaaggaagctccagatccagtatcttgtttggcctcaaaacagaagcagcttcttttgtctcccagcagtagtgagccactcagtctcttccacaggaagtttggagcctacattccttgagtcaggagcttattacagaaaaaccccgtttccctgaacttttggctaacagaaattaatttaactgacatgcatattgattctgaaatttttttcctaagtttttttcatttttttgaatgagttttttaaattttttagatgaccaaaacttgcagggcaggggatgcccagaagagtggtgagatagtaaaacacttattccctcatcctttcaggttttcaggttgcccatttatattcatttacatgtcatttgactgtctcactttttacccagaacagtaacaacccacaccgtcttccttcagggatttccaactggcactctgtgggtgctacacagaatgcaatttaatggatatttctcagcctggttcagaataaattgatcctttgatcccagaaagtatatactgaagtgtgggataaagattatgattaggggagggttggagacaaaagctgtaaattactatggctgatttatttctactatatacatatatattttttgcttttgtatatcctatataggaaactaagcattgtattttttttaacaaatctaaaaaagcactatgaactacaggtgtttgactttcaaaatatattttgtattgttaatatcttcacattgtgtgaatactggaagctgcagatctttgctaggacgcaataaatttatatactttttgaggggttcttctggggtgctaatcaggcccctgttatgcttagggggagccctggtgctacttgcttgaagttttcagtgtaagtaccctgatgccttttggaccttgggatcagatcaagagttttggagatcaggtaccaaggaaataaggacagtctagctgcctcaagtgaggggccctttgcatagctctccttccccctcactgaagctgggtagcctattggggttgagagggaaaatgtgaaatctcagaatttatctcccttagaagagagccagtaacttatgtacaaggatgaaagaaaggtcgcagcagtagctttggggaaagggaggaagatatggcacttctccaaccccggaaaacattgcttttgaaaactgctgataaaatatgagccggttattacttctgtttgggagactgtgctctctgtggtgcctctcttggctctactccacagataccagacctcttctaagaggatgagcagaccagctttgaggttgacctgtttctctttgtctgccttcccaaaacaccagcccccaggaagacattaagcagccttaagcttaaattcctactccctcttccaaatttggctcacttgccttagatccaaggcagggaaaggaaaagaaggggggtctctggctttattactcccctaagtctttactctgacttccccaaacccagaaagattttctccacagtgttcatttgaaagaggagtattttgtcccattttccccttcctcattatcaaacagccccagtcttccttgtctctgctaagaaagtagaggcatgatgatctgcctctcaactgccctaagtcctagctaagtatcaggggaaaaaaaaaaaaaaaaagcctaacaaatgggattagactagggctgcaagtagtgaggattttgttgatacctctgctgggatgtgtgctttcccatatcttgccttcaggaattacactgtgccttttccccagggatatgggctctgtctacccagtgctccagtttcccggtaactgctcttgaacattgtggacaagggcaggtcttcatatttttgatcatccctttctcccagtgaaatcccatagcccttacctagagtctagggcacaaagacttcggggaagatacactgagattgacctgaggagacatctacacacaccagtggcagctgccccagggcctgcttccccttcctaagtctgtcatcctctggaagggatgggtggtgctccaatctctggtgcctaaaaacccaagtttatttctctcttaacactggcaataaccagtccacaccactgttgccttttaaaacctcttaataatctcatgctgtgtttgttttgattccaatccaattatcaccagggctgtgtgggtaaatgcttttaaatgctctctcatcttgttcttccccctcaccccccactcttaggtatgtatgatgctaatcttgtccctaagtaagtttcttcctgctccttttgtatcttcctttcttgtctttcctcctaccttttgtctcttggtgttttgggacttttttttttttttttttggccttttgtac

SEQ ID NO: 69657 - DNA, 4647 bp, Homo sapiens
cagtccactaggggccactggtttcctttctgcccccacgctccctctctatcgcaattcgtcgcttgctagcagccgttgtctcgctggtgcctacgctgtcaaaggagccgctctaggcttttgggaggccgtctgcattgcgtggggaaggcttggacgacgcaatcgcctcgccggcccccggggtggttagcgcttccggggtcgaagggtgcgcggggttgaaagcaggccgctccgccccgtccccctcccagaccagcagaggcagcagccggagcagccgcagcctgcgccctctcccgcccgcccgccctccgcccgcccgcccgccctccgccgccctccacccgccccggggtctctttcccccttcctcctcctcctcctccacccccccttcctcctccgcccgcccgcggggcccccctcgccttcccgcccgcccctattgttccgcccccggcctcccgcccttccccttcccgcccgctccccttttcccctcagtcgcctcgcgcctgcaggtaagcctaaaaatttcccttgcgcccccggctatggctacaatttccacttttgtcttcttcttagccggctcgggtcctagtcacgagccgcggtctcgcgtagtcccgcgtgagcgcctaccacctcactgtgccaggccggtcattcacgcgaggccctggctctggcgcggcctagtaggcctcgcgcaaggcctattcccccctccccccgccttttcccggtggcggctgcgcaggagtcagggagggcgcgcgcgcggtagggggggcggcggtggatttgttggttgtggggggttgggggaggcgatggccggcttgctggccgggcgggtgagcgcggctccccgcgggggtcaggcgctggcgcagccacacggggaggcgctattagtccggcccctccccctgtatcgcagcgcccccccccgaccgaaccgtttattttttcccccctctttctagtcgagggaagggggggctttttttcttaagtggaaaatgcttggataaccgaggggagagggggctgcggagttaaagaaagggtagacgggctcccagttgccgagttaatcaggacgtttctcggggtaacgaatttttaaattacaaaatgcctgccgatgtaatcccagaccgagctatttatggaaggggtattggacagcagtgttagcagctggattgctggaatggggtacctttatcttgacctagtcaggagggaaattcgacaaatttcttggattacttggtttggagttagaaatgcatctttgtactttacctcaagaaatggcttcaaataggtttcctgttttgttttttttttttttgccttttcgaagttgcgttattgtgatatttgtaaagggcttcctattacatctgcaagagggtaaggaattaaactaccaggtctttaccacatcttattaaaaaaagaaagtcattcttacagacctaacgcttcttcccccaccaagcactatttttccatgagtgaaaagtgttgaattctgggattttgccagcaattaattgtattctgaaaatggggaaatgatgtgctttggggatgcacttatataatcacttacattcttggagtagccagaggacagtttgccatatacagaatggtgtgacagacacttaagcacctaagatatttagggtatgggctttgtgttagaggaaagttaacacagtggctggttttgtgaaggaggaaatctagctgtgggaggagagagatgacatgttgagttttaaaaggatggatacttaaaatgtcattggggacattctacaacttgggagaggtcctttctaaagctgttacgattaggtgctaaaggaggtattgaaggcaaaggcatatccaaaaaaacaaattttctttctacacataactagttactctaaagcagaaatgttaggaacaatgttaggaattgtttcataggtgggaaaagggccatcttgtataggaaaggtgcatttgctgctgttcttaaaaacaaaaaattttagcaatgccagttttattttgattgttttctttggaaggaaatttaagatttaatagacttgaaataaaaactggatggtaaacacaaaagcaaggaaaacatctcaaatctgagtaacaagttgggttggaaggaggaataggagaaaaagactcaagtgtacttaatgtatcgagtcattttctaaaggggaatatggaaccccagcctgcgtggaaggcatctcagataatgccttttcagtgagggtgttgatctaaatcttttagaaatcatttggtgttagccatcaacggttgaaatttgtaatgtgggatacatctcaatttccttatctacaaattgctactacaaagaaaatttacatgtgttctctctagttttcaacttaaactgctccccagcagggaaacaaaaggtcatttgccctcgctgtagttggagatttgcactcatgatttccaggtgtttctgaattctttgaagctttttctgctgaaggacaagtggtgcacgttcagcagtttccttagaaccattgccaattgaaagaaccttgttcatcctgagagtcagcggaaaccctgtcattaatgagaggaactggaaagttgccttctatactgtgtaacagaacctgagctgtatattttgtcatgcagttgtgcttggtgtgtatataagtctgacatactgtcatttaaggaaaagtgtaaagtagaaaatattgataaggtgaaaataacttgggaaataataaccttgttgttttcctcctctgattttggtcatgtttgcattttagtttttggctttcacccccaaccagtgaccaaagacttgaccactcaaagtccagctccccagaacactgctcgacatggacaccggtgtgattgaaggtggattaaatgtcactctcaccatccggctacttatgcatggaaaggtatgctctagcttgggaaatggggtcatagtaactgctaggggaggggccaggaagagcagacatgcatcttggagctcatcagattagcactgtggggcatctggctttagcacatttccctaatggagtagaagtgagtgtagtgggaaaatggacagacttgactaggaagctccactgagcaggaaaggcataattagaggctggagccaaaaactctccatacctggatggtaaggtttttctcatggtgattgcttatagcaagtccactccccccaataaatcttcaaatctttccaatcttttggggtaataattagcatagatagcagtctgttggctagacagttaaaattccttttcataatgaatacttcattagaacatgtagaaaaaggaaaaataaaatatatttttaaaaaggaatacttctgagtttcctcttactgacgttagttttctccattgcaggaagttggcagtatcatcggaaaggtaagacaatttcacttcaacttcaattaccatttagtaattctggattgaagtagcagttggagctcatgcttgacttttcctttacagaaaggagaatcagttaagaagatgcgcgaggaggtaagttatgaaagactgagattgttaactttgggaagtaaaaaacctttaaaacaagtgaaaattctttttcagaaattaggaaggtctcaataagggaaatatgtattttttttcggcttggttatttgtagtgataatctggggagtgtattttttttttcccctttttgggaagtgtggttttgacaagtcagaattctttcaagacttaaggcagctgctgtaggctatctttgaggatagtcatggagcagtagtgtttggaatgatgctgactttgctttgcatcaggatcatgtacattggcagtcttataagggactgtagatcctgtacatactcagatcttctttgttttaacttcttttggatcttgtttcctatctagagtggtgcacgtatcaacatctcagaagggaattgtcctgagagaattatcactttggctggacccactaatgccatcttcaaagcctttgctatgatcattgacaaactggaagaggtttgttgtctcccactccctcattcttcatttttaagtgcttccagagagcttgttgattttctaagagctttttaaattcaaggacacactggaccttgagactcgctgtaaatgggtccttagcttcctgtagcctcccacaaaattcgagcatttgtagtttaaaaaagagtcacttgaggctgggcgtggtggctcatggctgtagtcccagcacttttgggaggctgaggcgggcagataaacgaggtcaggagttcgagaccaacatagtgaaacctcgtctctactaaaaatacaagaattagctgggcatggtggtgtgcgcctgtaatcccagctactcaggaggctgagataggagaaacgcttgaacccgggaggcggaggttgtggtgagccgagatcacaccactgcactccagcctgggcaacagagtgagactctgtctcaaaaaaaaaaaaaagtcacttgaatcatcaaaacag

SEQ ID NO: 69658 - DNA, 1050 bp, Homo sapiens
cggggtctcactatgttggccaggctggtcttgaactccctgacctgaaatgattcacctgcttcagcttcccaaagtgctgggattacaagcttgagctaccgtgcctggcagtatttgatttaattttgacatcatcttttttccccattgcctggccaagtgtaactgcaaaacagattattacttttatccttagcaagtacattccttcagggtgaaggaaaatatatttatggctaattttgaggaatttttcatgagcttttatctttacatcaaaaatagtttgagaggggcatggtatttgaaccttttgtctatggtggattatgacctcgcatgtcctaataagatcacttaccctaataagggtaagtggttctttaatggcagttactagtttccagggatctgcttattgtggtgttctttctttctgtaggacataagcagctctatgaccaatagcacagctgccagtagacccccggtcaccctgaggctggtggtccctgctagtcagtgtggctctctcattggaaaaggtggatgcaagatcaaggaaatacgagaggttagtgacttttgtcgtccttttagaaatgttaactatttgttccaaattggctctttgtatggctaggaaaagttagcaatgagatgaagatttttattgaagtaacagttctagaggattacaatgtgattgtactgaaaataaaactcatgcaatagaattattttgcataattcataaattttaataaatcagaacatgagaatgttaatcagaattttcaactattacatatgacaagtttctatttttttttggcaacttttccatgaggctacatagttctttttcatgtctcaagggatgagtttgctatagtagcaacggtttttctattttttaatttttaactttttttcttttttttgacacggtctcactctgtctccccaggctggagtgcagtggcgcagtcatggctcactgcagcaaaacatcgaccttcccagcctcaggcgatcctctcatct

SEQ ID NO: 69659 - DNA, 1313 bp, Homo sapiens
cctcaagcctcctgagtacctggtaccataggcgcgctccacaatgcccggctaatttttcttctttctgttgttgtagagacgagtctcactgttttgctcaggctggtctccaactcctgagcttccgatgattcgactgccttggtctcccaaagtgctcggattacagatgtgagccactgtgcctggcccctacttcctgtttaactatggaagttacgttgaattatggaagattttaattgtatctagatgttactgaatttggtgttggaatgaaactcgaatggctgcttgagtttttgggagcgtatcgtacatggcacgacagagatcttaattttgttaattgctatattcgaagcacttctcatggtacctggcacatagaatggccttgatgtaaatattttttcagtaacataatgaaaggtgggtgatacttgtggggcttttgcttcgcccagagaactatcattagttgaaaggcaactatttagaaggaccttttgcttgagagtaggttaaatttaggctgttattcacgcttattcttgtctttcagtggctaatttatttttaactctaattcactaaacagtcctatctggaataagggaagagtgggacaaagaacaaaaagggaagattggaaatggataaatatctactagagttttaggctctgaaattgctgctggaggaattggaagagcatgaactgtttttctctgattttgaatttctttttactccaaagagtacaggggctcaggtccaggtggcaggggatatgctacccaactcaactgagcgggccatcactattgctggcattccacaatccatcattgagtgtgtcaaacagatctgcgtggtcatgttggaggtaagccctcaggctcatgctgaaaatggggggagggccattctggggacagagggactgatctatatttagtaagactagaattaagtgaggctgttaaggcttccagtgggggtggggctaaaaggttccctgagttcatattttccttcccctagctttgacttttcttatggtctgtgagcaaaaatagaaactgctaagcagcagtgatcttttggttcacagcagttgtagcagagtcggggagaagatgcactgcatggactaaggaggccagagatttatttgagttcctgagtagctgagttaaattactttttgaattactgtattttggttacatggaaatttgacatgttctttaacaacttgtcactttgtaggagggtattcaaagtgttacatagagtagaaaaat

SEQ ID NO: 69660 - DNA, 7248 bp, Homo sapiens
ttattctagacataacacttgagtactttatttgcagttttgaccttatttcctattcaggccaaaaaaatgtgagatactaaaaattatcaacaaaaatatacgtttaacagtttttcatgtccattaaatttatctaaaattttggaaatagtgccgaagattattacatggacatctcccttgatgagaatcagtttgaattgtgtagtccttggacttactgcattaaaggcaaataactttcagtagataaattgagattagatctagccagagacaatttggtaggtaaggggatggaaatagtttttaatttaactgacctgtgtgagctaaagccacacagctgaagcagctttgaaaccttatctctttttgtttttttcccctctgactctctcccagtcccccccgaagggcgtgaccatcccgtaccggcccaagccgtccagctctccggtcatctttgcaggtggtcaggtaagaaaattctcatttgtgggctagaatgaacagagattatatttgaaatgtcaactttgccagcatcacaccaagccactctgcatgcttgctgaaacctatactctggccatagtttgaccggcttttagttttatttttgtactggagaaagctgaatgccttaatttttagcaggcaatggaagttttgtaggcactcggaagaggtaacttacttgtgggttgggttagaatataagagttgaattgacttactgtctctacttctctccctgtccccaccccatccatgttttatgtgtgtggggtgatatttagaggtctaaataaaaggtagcaaagagttggacctctgaaggagattctggatggtggtctcaaaatttgggggtcctgaatttgagtgtcctacaaacttccccttccctccacctcacctcccctactcctaccccttcactcccaaactccagtgtgttgtcccctaggctcttaacctcataaacactggtttgaacccacatggcataactgaaatcagctggggtaagagttcagtgtgcaagaatagaaggggggtgagcatgttgggctgtggtgccgtgacctttggtgttagagtaagaacaccaaagcaccaccgtggcctctctgctccttcctcatcaacctaaactcttgatctttggcacgtggactattctgaagttagattattatgacagaagcattgaaggaccatggtagtcctatgctctgattgtatttgaggagtaggtagatcaggttttaaaatacagttggccctttgtgggttccaccttcaacctacctcagatcaaaagtattcagggaaaaaaatgggtggttgtatctgtactgaacatgtacaggctttgttttgtcattaaacaatagagtataacaagtatttacatagtatttacattgtattaggtattataagtaacctagagatgattaaaatatgtgggaggatatgcttaggttatatgcaagtactataccattttatgtaaaagacttgaatatccatggatatttgtttctatggggggaatcctaggactaatctcccaccaataacgtagggacacctagggacaactgcattgggattcaggttgaaatagtgactgattttggtagctgcctaagcaagtgcgttgctcaaaacaccttttcccacttggggctggtctgttacaagcatatttagttaactagttccatcttacctgcgtttgatctgggagccatttagagggcaagcataaacttgggagtccatctctttcacattgtgttgaattggcataaaaatgaacaagtttttagaggtttagtttgtcgtgtagttatgagaggtttcacaggaaggtcggttatgtcacagtgttaaccttgagtcagtttagtaccttgcttttagaaaagtacaaactggtttgttcaaagggctctcagtctagttagtcagagttgggcaggataagcaaaggcccagagtcagtgtcgccagaaggatttagccttaggagtttttctttcccaggaactccaggttcctgctcttctggattctcccactccccctttggaatagagtcccatactgggtggcagcaatcctctgtacttaaaattcttccttcacttccttttttttccactccccatcacacctcccccttcatacctctttgcttccctacccaccctccctccctccctcccctttatttagttgatgaccaccgtctaaaaatttgcagcttcttctatgagtggccctgtcatggattgttcccacaggcctttttaaatatacaatgtccacagatggacctgtgtcttttgttcctttgtggcaaagtgggctctgtaggggttcaacttaatcccacactgaccaggagctggcatcagctctgttgccccaccccttcattcttattgaaaatagcccaattgtgcagtgtgaaatctgccactaggtaacttttttttttaattcactgattacagctcgtttcaaattgtgtctgagctcctttttaaaggaaaaaggaaaaaaataaacaactttttttgtgtgaatttcatgctggtgacaaggtgccggattgacagccctggagactgaaatcctctatttatccacaggacaggtacagcacaggcagcgacagtgcgagctttccccacaccaccccgtccatgtgcctcaaccctgacctggagggaccacctctagaggtgagaggggatgttcagtctccaaggctcactcaatccttccgcctcagccgagactgccaacacacggggggccagtggcgctggtgatttttggtgctgtggacaccacctgtccacggggacctggactgacccccccaacctcatttcacccaggccgcgtagcccaccagatggtaacaccaactttttttttttttttaattttttttttgttcaacccctcttcccctctcccactcctcccaccccattttcaccttccttccacccccacctgggtgtacttttgggggtactggccactgtgatgtgagaaacttcacatcctgttaaccagccactccttccatcccctccctccctgttcccttttcctttcctccttttccctaccccattgccctgaagacccagctccctttttgggaggttatgttgtgggggggaggagggcatagtgggagctgcaaatgcctatggaggggaggtgggagaagacaggaattagaacccagtggtttttgtttacctgtgatcagctccctactgttagggactcagctagcatccagtgttcttaaggtctttaggcagatagagaaataagttggagaaagggaagtgttttaaaacataccatgtaggtttgtgcagttagagatcttccacatcaccacaattggtagaagggttggggtggtgagggaagagatcattattcctcctaggctatcttgtatacagggaggaagagtggggcttggtcagtcgaggcattgctaatctcacttcccacattttcattaagaaacagttatgtatattttgcctttgattgcagggaacttggctacctttataggattccccggaacaaagtcatatttagggttcaaagaaggccaatttgggtctgaccatatttgtgagattccatctactgcctcaatctctggcctcccccattctctagttcaactctggcttcctggctagttgaaatgtctttttccccccactgggtggctgtccgtgattggtttttaataggaactgttttcctccttttgtaggcctataccattcaaggacagtatgccattccacagccagatgtaagttttgttttcacttcttgttttgaaaagctccctctcccatccaaaattgtctcactcctctctcccaagtagccagaagtgagttgggtcttcagcatttgcagtattaagttgttttcttcacaaggtcaatcccatattttagccctttaatcagggtaatgccttgtttgccttttaacatttaacccctgaaatttaattcagcacattagcttctcctttccccctgtgtttcagattaccctgtttctaaaagggaaatgttccatggtatactgtgatttgttatctcagggcatagtttaaattgacattgggactgtgcttccttgcatgcagttctcttttccatgagggtaatgggaggttgggtttgcccttgggaactcctcaatctgagatgacaatttgaaaagtatttggagggatggggaaggggcttatgttacacagagagggataggaacctgaacatttcagaattcaactcaaacctttcttgctgctaaaacctcctatttaaaagtgccggtatttagacttcaagggcatttttttctgcacttttcttttatccttactaaccttttcaggtgctgagcattattagacttgggaagttgagtttcggtcttggttagtggtaggccccaggagagagggaagtagacgtgaagaaggattattttatgacagtcaggacagtttatatagatgaataaaaatagctgtagtagtcagtggtggcggtgatgggactaaacccagtatggtttcttcacctctctcctccttgcagtctccctgcccccctcatctccttccctctccccaatactgatgaaaccctgcatggtgtgttttccctagcaccactgcacagtttgtttacctagcctgtctgtgcttgtccctgcggcaactgttgcaatggctgcaaactaccttcattaagtagcctccaagggggatggtcgttgggcaagtgctgttgcttttctattcccacacccaaaaggcattcattctcttccaggcacccattctatttctaacccttacccttcatattctgccaatccccaggattgtgatgcaagccccatccctaccctctgttgtagtttgagtagtagagtcaattttgggaatcaggacctgcattttcaaattcgaatgtgcttgagccctggctctgttaaatcttctaatgccaacctcctgtttcctccttgcagttgaccaagctgcaccagttggcaatgcaacagtctcattttcccatgacgcatggcaacaccggattcagtggtatggatacctcagtgtttatttctgtaaggtgtagtgcaagagagaggccagtcccaaggtctcagcttgacatctgtttaaaacaaacttcgttatccagcatcctgctggtttaaacttgcctgtctactatggctaagcccaaggaggtaatgtgtttgttaacgtggttttcatttggggtcagttattctaaaagaaaaaaaaagccctggaaggtttgggggtgaggtttggggatgcttgtcaggcaaagggtaggctgatatttctttgagcccatcctgactgctgcccccttgatctgatcagcaccccctttctctccaccagcaattcacaggcttgggtagagaccatccatttgtgccaaattgtgtagtgttttttttgtttttgtttttgtttttattttgtttcgtttttggggcttttctgtataaggaataacttgtccgatagggttaggatgagaccaccaaactcattttcacttgtatcttaacaggcattgaatccagctctccagaggtgaaaggctattggggtaatgattaaaaaaaaaaaaatctgtagtattctactgttatattaataaactggtgggagtcttgtttcactgcccatgaaccataccagcaacatgcacatggcagagaggagctgagagagcaaaggggtgggcctggagcccccgagggtcccttgatggatctggccaacccccttctaaaaatgatgagacagcagccatagctgagatcaggactaagcttgagtgttagccagctggcctggttcagtccaggtgttgttaaagatgggtacgggtatttgctgatgggatttttttttctttctttttctttggaaaacaaaatgaaagccagaacaaaattattgaacaaaagacagggactaaatctggagaaatgaagtcccctcacctgactgccatttcattctatctgaccttccagtctaggttaggagaatagggggtggaggggattaatctgatacaggtatatttaaagcaactctgcatgtgtgccagaagtccatggtacccattaacaggcataatattggcactggtgctagtgagcatcaggtgagatacaatttggaacacaacaggaaaggggtagaagtacagaaggacttgtttagacattggtcctttttgaggataccacactcccttgcccttgcttccatcccccatccctaataggctgggctttgcaggaaatggcatgaaatcagctcttctgagtgtacagaagaacctttcgagcattatttctacacccttctcccccactctttcctctttggaggcttccaagttagtgatgaatcccaacagctaatgatgctgggtttccagtttatttccttctgttagtttaatgtgcaagtcagtgaggttttgaatgctgtgcattgaatttgcttgctctcttctgtcttttagcaggtttggatgcatctgctcagactacttctcatgaactcaccattccaaacgatgtaagtgtagttaggttgcatgggatgaaaataagaaaatagactgtaaagaaatagatgtcgtttcagcagtgtcctgctaccctttttttttttttttttttaaacagcccaggctgtagtgcagtggtgcgatcttggctcaccgcagcctccgcctcccgggttcaaccaattctcctgcctcaacctcctgagtagctgggattacaggcatgtgccaccatgcctggctaattttgtatttttagtagagatggagtttctccatgttggtcaggctggtctcaaactcccgagctcaggtgatccactcaccttggcctcccaaagtgctgggattacaggtctgagtcaccgcacttggcctacatgtcctgctacttttaagccctagggaaagaaactgggaattttattattttatctttatttttgtttttgtttttcataccccaggaatggaaaatgggaatttttagacacaaaaataagttgat

SEQ ID NO: 69661 - DNA, 1954 bp, Homo sapiens
agcacagagatacagaggctgagattcgaaaatggcttaaaccaaggagtttgagactagcctgagcaacatagcgagaccctcggtttttttttttttttttaaagggccaggttcggtggcttatacctgtaatcccagcactttgggaggccaaggtgggtggatcacaaggtcaagagattgagaccatcctggccaacatggtgaaaccccgtctctactaaaaatacaaaaattggctgggcatggtggcatgcgcctgtagtcctgctgaggcaggtgaattgctcaaatccaggaggctgaggttgcacagtgagccaagatcaggccactgcactccagcctggccacagtcgtaggatttggggtgggggggtgggattcttagacctagccatgcaactctaattcggtgtgccttgtttttctttctcccttaagttgattggctgcataatcgggcgtcaaggcgccaaaatcaatgagatccgtcagatgtctggggcgcagatcaaaattgcgaacccagtggaaggatctactgataggcaggttaccatcactggatctgctgccagcattagcctggctcaatatctaatcaatgtcaggtaagattgctctaccttttgtcttatttatgccaacacagtaatgtgtgtgttggggagagctgcagtgtattaaatatgggattacatgggcgatgggtaaagatggccaaaaggtttttttttttttttgctagctctactttcttagagtgtagcagaaaaagtaaactgcagtaagttttcaaggggttggtgggggggggagcacagattgcccgcatttaacttgatggtttggtaagagggaagagtggtccttgtcttcagtaagagtcctctggctagagcactcacaaaatcaaatgtgggtctctcttgttctacatagcatatagactactatttctttcactgatttgatttggagtccaaagcacccttaattgtaataaggacattggagtaataggacagcaaggcagtttctgggaggcagcaattaccatttattctggaaacacccatttttctcacactgcatgtgtgttttattcagagcttgtgggaatgtgggaagcacaggtattggaatgtttcggaagtgtgaagtgtgttttctatctcactcctcccccaatctcatcccttaatgacttcctgagggttttatttcccttatccatagctaggtagtgttactactctcaattttaggacactgttcacagtcaaatgggatcctacagtcatttatattacttgctttctcaactcatgggctgaagtcacacccttaattgcttactaatatttcaaagcattgttagccttgaggcccttaggtctcttttaatagggaatgttgtctagttatcatttacctttcttataagtgtttaatctctttgtcataaaagttttacatgagttcctgaatctagtacaggggaaaggaattcctaagtatgtggtctgtattgtgcttgtactgaccatgtatatatgctatggttatttagtgctagctaagaacataccatttccccagtagcagtctgacttttgccttaagacttcatatcttgaggtgctactactctttgtgtagaaaagctttccctttcctagatttgttttcttgtccacccaccaagcacactaggtccttaatgttgagaatgaaatggtagtagtaaacttttgcaccaaggttgtttgcaaagaggtctttttcttttttagagatagggtttcatgttggtcaggctcgtctccaactcctgacctcaagtgatatgcctcccaaagtgctgggattacaagaattgtttttctttcttttttttttttttgagacggagtcttgctctgtcaccaggctggagtgcagtggc

SEQ ID NO: 69662 - DNA, 3582 bp, Homo sapiens
ttgaccttgtcatccacctgcctcggcctcccaaagtgctgggattacaggcgtgagccactatgcccagcttgtttttcttatttgtaattaggattttggagggcaagaagttttcagttttcagtggcaagaatcaggtttttgaaagctggaatttgttttgttctttcgataggcttgcccttcatgtaatttaaattgtgactgtttaaatgtgacctgcttgcctagctcctgcaataggtcagtggctacattgtaaggaagcagaattctcttggtagagtggctcttttcaggatcattgttactgaatagcaattcggtatcttagccatggattagggtcaaaacttttcaaagcttcatctaacaccaaagcaaagattatgcatgcacaaagcttattctttctcaacttggtgcagtttaaatgcagaagtcaaagggtttttttttttttcctttctcattttttttaagtcaagaaggattttactggattctgagcattttctcctgtctcttgatttttcatggtggcagtctgtccttttatatagttagttgacttctgtatccctttcctttatggattgcagctgtccttggacataggtaaataaaatgaggttttaagaggagcctttctgctcttgaagacttagcgttgtgggctcaattgtccaggcacacttcccaaatatatgtagttctggcttagacacatacaggcatttgggagacatgtacccttactgttctgtggagcttattttgggagtggaagcagcagcattttcgcttaagtatgaatttttaggtgatacttgagtttctcttttccacttctgaaaggtccacattagaagtatgatcagtcagaaacaactttttataccacctcccaccagaaaagcttccctagttcttatctacacttctgttctcagcatttttctttgaaaacgctacattctttgaaatttgaaattagtcagtgacctactttggactcttgtctctttccaccctgatactggtttgtttgctgtggagatgtaagcagactttaatacatagctggaaggatttttaaaaattctgctttataaatattcaaagcttcacaagtaattgtgggataattgattttctgttagaataggaaattgacatttgattagaggaaacatttcttccttgttgggtgattgatgagtatctttttctacccgaaatcattccttcaacatctgggttgggtcagtgtgtcagatacatgaagtatgtgccctatgatttcttttctctgtcagctttttcttcaccatagcagtttttaagtagctctgtggaatggaaatatacatatttagagggtgggacataggctaaaagaaagcttgtcacaagttgacactaggtcttcctaattgtcaaccagaggcacttactgatataactgaagcagtttttgtcctgtacttactcccttttgtggtcttcccttccacccaccctttttttttgttccttttttcctctgttacagtttagaaaacgctaaaccctcctcccaggcagcctccgtcacgatccctgatcacctcagcatcaacctctctcaaccctccaccccttcttcttcttcctcctccaccaccaccccctcgctcgccacagcggggacctccgacgcaccctccagcctccccaaccctcttccgaccgccccttgtgtctccagtctgcttggcatgaaacccatccctctcctggctctaaatgttgtgtctgctgctaagggtaccggggcttcagctaccaccaccaccacctctgccgtgccatgtgtaactaacaaactgaaaggcgagaaacagagattctctccctactgattgcataccttgaggcacctcctccagtattattttgttcattttgttttcctttgttaacattggtgagaatgaaactattgtgagcttgttaccgtttcctttttactactttgggggataactgggtgggggtgggggagtggtaacccttgtttaggtttaggccatttcagctgagtgcctgtttcagggtctgacttgaattctttatctagagccacagttttctcttctttcttgtttgttacttttctttgtagctttattctgccttgcaatataacaatgtgttaggctctgtgttaatgaataaaagctgcttcgttaacttttttttttttttttaagaattatttaatggttaagctatcagcaggccttcttggccatatttgtgtttctagctgtaataaagttggcgcagtaagaaccttagtacactgtgtgctgtgaagggtaaagggttgggggcttgtgacttgtggctattcagctaggaagcctgtataactgacatgggctttttgaatcccaagtgaattttatagtcgtttgtcaatatttccacaaagagataacgagtctgtggcagtttagatcctgaaggtcctctgtaattggcaacaagcttcactagtgaggaagtttatctgacttctcagatggccttaccttgccagcagcagctaacaaggtgttcatcccaggattcctctggtgaatggttaccatgaggatctcttccaagtcatacattcaaagaacatacttctttacccagaatgaaggggaggggcaaagtgggataagtctaataaaattaggcagcttctgtctgcattcctctgaattagcattatgcctctttctgtgacattaggtatatctcagccaacccgtgacattatccacaacttgacatgatgccatccactagtcctaaaccaactctgtcaaccaagtttctttacccttttttctattcctggccgtatcctttctgctccccaccagcactatcaggagtaggaagtgacatgcttagatttggaaggaaccttaaggatcaactaatctgtaacacattgatcccctcattttacagattaaaaaatagaggccctaagataatttaaattcataggttatgagtgactagccaggactaacaacttaagctttacttttactcaatcgtactaacctccctgaaatcttgttcattttcttatactaagatgggcacaggcctctcataaaacagtagaaatgttcttagtatggtggtataaggcctctgatagccttccattcaacgagagtacacgttgccacagtgctgaaagtgtaatgctcttcccagggcattagagaactcagtgtagagatagtttccctgatgaccttttcccagcatcaccattggctgacaaaaaaaaaaaagctgttagtattccaatatattatctcattctttgatgttattttggcccctccatcccagattgggcctgtgaagaagtgttacacgtctcaagtatgcataaaggattagatggccaaacctgtccagtaaggagttttatttagttgctcctttatcatgtggtccagctctctcccttggtaagcttgctcctcctgtagttaggacttaatcatgctgatacca

SEQ ID NO: 69663 - DNA, 1079 bp, Homo sapiens
ccgggcacggtggctcacgcctgtaatcccagcactttgggaggccgaggcgggtggatcacgaggtcaggagatcaagaccatcctggctaacacagtgaaaccccgactctactaaaaacataaaaaaattagctgggcatggtggtgggcgcctgtagtcccagcaactcgggaggctgaggcaggagaatggcgtgaacctgggaggcggagcttgcagtgagccgagaccgcgccactgtactccagcctgggtgacaaagcaagactctgtctcaaaaaaaaaaaaaaaaaaaaaaaaaaaaaccctaaatattcccttaatactgaggtggagaaaccatttctgactaaaagtaaatagtttgtagtcgaaggactttgcagttttttggcccttgcttttctacccagcttttggctttgcattgttgtggaagggatacagatggtgaattaccaatcatgttttcatgaccacatatcacaaatattttatgctaatcagtttaaaatcttatgaaataacttatcttatgaactgaaatgaagtcttatacatttggttctattcaaaatgagggcaaagtcttgctgcctacctacctaccagtgaagcatactgagtacttaaatacttttccctgaaagccctaaattggattccaggacctcaaatgactatctctttgaaacagaaaggcattgtagccaggtatgtttagatggaggatatggcttgacaagatctaggagcttgtagagtgagctacagagttgaaacaaattattttgtctgctacttttaagtcctgaaaactttttaaagaactttttaaggccgggtgtggtggctcatgcctaatcctagcactttgggaggccaagacaagtggatcacctgaggtcagaagtttgagaccagcctggccaacatggtgaaactctgtctctactgaaaatacaaaaattagctgggcatggtgacagctgcctggaattgcagctactcaggaggctgaggcaggagaatcgctagaacacgggaggcaggggttgcagtgagttgagattgc

SEQ ID NO: 69664 - DNA, 5417 bp, Homo sapiens
agttgtctcagcattaaacccttgagactactctcagatgactctttctttcctaaactggtattctgtcagcagtttgggaggagccaaagtgagctcagcaataaagaaacattgcttctgtgtattgtgagcactctttagaggggcctgtttccagaaagtacactccttggttagcccaccatggaggtggaactaaaagagaacatagtttgagggacattggataacaagggctgtttcccttggttctgaggtaatagacctccacatgcttgaattgcaaggattaaaggatcatggtactggtaaatttaagaaaccttaaaatgtctcccttggtactccagcactggttatttactcttcacatttcatgaaccaggtagagatgaggtgcagctgagcactggggaaactaactgagttcttgtttctgtgttacaggctttcctcggagacgggtggcatggggagcagctagaacaatgcagattcatccataatccctttctgctgttcaccaccacccatgatccatctgtgtagtttctgaacagtcagcgattccaggttttaaatagtttgtaaattttcagtttctacacactttatcatccactcgtgattttttaattaaagcgttttaattcctttctctgttcagctgttgatgctgagatccatatttagttttataagcttctccctggttttttttttttggctcatgaatttttctgtttgtcatggaaatgtaagagtggaatattaatacatttcagtttagttctgtaatgtcaggaatttttcaaaaaaattaaaagatggactggagctttttctttgtgaatagaaactggatgccacagtgattcatgtgggttttattcctcttgtcttgctgttatttttgtaccttttatccctcaaaggacccttcttgggttttgaatggaagcctttattccggttaagatgttttcttctattttaccacttccatctttttttgtggccctcgatcctatttttccctgactccatgcttggttggcccttataaaacttgtgcccaaaagattgaggattagactttccgaggacttacctgtcctaggggagtaggcaagcacttccactagggagggggtgggggaaaggaatgacacatgacatacatggcatacacattaagcagttgatcatatgtctgactgggttccagtttcttgggaatgttggtccccttgttcaggcttgcatattttaaactaaaaatttcagtctattgtttttagtaacttcatttatagtcctccataacaagttagaaggatgtatctgctaccatttattcctataattttagaaagttggggcttgacattatactcatttagtgagagtagatgcaaaaaagtggaggggcaggagaacttctccagacacctcagataaagtccggagcccaaggctttatcttaaccatgtatggtaccccattcattcatcaagaaaaccctcaacagctgggcctgcatggagtgttatatttcaaggtttttcacaggggttacagtaggacagtccccaccccaatcaggcaccaggataaaagcagggacttaaacagcaccccggttcttcagcctgagccatcacatgctatcagtctcctaacctccccctgggccttaagacagggcttgggcagagaagataaatggtgggacaaaaaaatgagttacattgccacctgagaaacctcagaggggaggacccagccttagcctccctcctcccaagtgcaaaatgtgtaaacagagtaaacggaacagaaaagtgcagtctaagtggttttctctcctgcccctcccaccgcccctccccccaccccctattatttggggataaagaatataaagacaaccctggcttttctattgccttgttgcttgctgaatataaggaatggggtggggcaggaaggggcttgcccttagccacagctctacggctgtgcctcattcatttccacagctgccagtgtccctagagtttatcaggtgaattggtcaggggatcagtctccctcgagcctgacttacggctgggacagccccatctttctgttgattatgtggcgcatatatatatatatatgtatatatatataatttatataaatatttctctatgtacaaggaatacgagtggctttcatggagggagggaagctgggggccgcaaggcatcaacgctgttggagttgtccaattcagtgctgtcacagtctgagtcctcagaattgggagggccctgtgagaaagagtagaaatggagtgagattccttggggttctttgctggggtcattttaatagccagtggcttactgatttgttttttaagacagagtctcactctcgcccaggctggagtgcagtagcacaatctcggctcactgcaacctctgcctcccaggttcaagcaattcttctgcctcagccttctgagtagctgggactacaggcatgcaccaccacgcccagctaatttttgtacttttaatagagatggggttttaccatattggtcaggctggtcttgaactcctgaccttgtgatccacccgcctcggcctcccaaagttctgggattccaggcgtgagtcaccatgcccagccagcttactggttttattccttccagatttcagttgctcaggccattctccaaggtgtcagactcctttcagaatcattccctggctgcaatttatagctacatgcaagctactggtcaggcatcgtaatagatgctctgtgcaagaggcttctgaaattccaccacgtggatatttgctctttatggtactttctggcctgtgcagctgtctccccaaaagctgttaaaagacaaggcatctgcttacagctctccctgttcaatatctgctttttgctgttgtgccactcacccgctctctgagaagttcctggtgtggaatgggcagggagctgggttcagggccagggatgacctctgaaggaggtgggtccagtgggatttctgagccctgggagcacatgtcatcagaccgctcatctggccgctcatcagtgttggtgctgccaacttcaggtgtgccactgggggaaggttcactagctgtgccttcctccccatctgatggattctctgagctgaaggtagatagtgactggcgcatgttcaggctctgaggccacctacatgttgaagagggggattacagcttggttctgcccctagcagaaaacaagaatgccattaattcttgtaatgccatcacttacctctggcttgatgtcagctctacttcactgtctacctctccttcctcctcttccgatgagatgccacgtttctgcaggagagatggggtggggggggtctgattagaagtggaaagaggtcactaagaatccaggagaagggaacatagttacgaagggtgaagtagggaatggcttaaaattgagcataatgtgggggattagacttggaccccagggaggataaggaaaaagggaaagagcttgggagccttcccatactttacctgacttcgggtgacggcagccctgtacagcagtgcagctggggtcaagtgctgggacccagcccggcttcctccccggcctgaggtcccttcccttccagttcccagaagccccacaccttcaccaggccctactggaggaggtggttcccctttggctcccccaggtgaatctgggctggtggagccaggggctgagccctcacttggtggggtgtcaccccgggccggaggtggtgagccaggatccccagctccgcctgtggccccccggccccgggaccctagtgctgctgacagcaggtctggggacgatgaagacattttgcggagcaggaggtcatgatgaagcccacggagggcgggagggcaggcctcccaggctgagggtccccctcctaggccccctgggcttcctggtcctccaggttcatggggtggcacagctgtacgaagcccaggcaggtccccacagctccccttggcgctggccttgcggtgacgggtcttgccacggcgactccgtcctggtgagggggggcccttaggacacccaggaagccccaccccactcagggctgcatctagtttagggagcaaagactccgtcttgaggatatctggcctggaagaagaggaaaagtaaaaggttaagactgccaaatctatgtactcaaagcactccctaaccttggacactaaagtacacatctccctgctaatatacctgttgccacttcagtatccctcttgccatattggaaccacagtactcatgtcccaccttttgctatggggtgacagcttctgtggcacattcctcttcttgataagcttctccattgtgtttccatgcaggaggccccgggaagggtgtggcttcagcaggcctgggcacctccgctctaaagcttgctctcgcctaaagatccaggcaccttctcagctgggcaaatgaccaggaaggggcaccccagtctcagtaggacctctaaggcaggcacagctccagggcttggtgcataaggacaggtagggttacctgagcagctccctctccttgagttccagctgcaacatgagggcattaagttccatatacaggttgttggctctctccagcttcctttcatagtgctccctgatgtccagggcgtgtctgcaacgggcagaaaggttccccaaggtgaactgggttcacctagggccataacagatctcagtctcagaattcctgtccacagtcctttcgtagtccttccacccgccctggggctgggtaggagctgactgggtgcatagtccttgctgttagtaaaatcacctccccaagcacgggaactcacctgagctcctccctcctcctcatcaccagttcctcttctaggcggtgcagacaggtcccttctgacttaatcttttcaaagtgcagttttacttcttcccgccactctgcctatgggttgagagcagatgaagagtgagagccatcccttcacccagtgaaaggctctgcaggttgcccacaccactgccaatgtgtgtgctggagcaaaaaggagtggattgactcagccctctaagagccaatctcttcagtcccactcaacccatttcccagcctccccctcaaatagcatcatctctgcaaagaaggggagttaggtatttattttcctacccacagcacacctgggacttaaagtaagtctcctggggtgtggagagtacatcagctgaggcaatgtccagatgcagcaggatctgtcggaatgatgggcgatttcgtggtttgctattcctgaaag

SEQ ID NO: 69665 - DNA, 1817 bp, Homo sapiens
aaccccatattttccaacttgtctcccaaaataaaagccttttctgaataacttcattgaaggaaccacattttgggaaatgctcagtgacagattagcaatcgtcaaacttccctgggtctaggttccaaatgagggtctggggtcctttccttctgtgttctaaggttgtttacttgaggctcaaccaaccatgcttggtggttatgctgctccttccttgtacttgtatgcactcactggcacttcatgacaaatcaggaatgcagatatcgttaagtgtattttatagatgaggaaacaggttcagagtagataccaattacccctggtgactcagctcagaaggtagcatgagcctgattcagatgaaagtcagtctctttgaattaaatgtacccctgccatttattggtcagtccagcccagtactaccgtgcttctcaacttctccaggcccagtatcccagcccagaccatccttaccagcactggcgaagcaggatcttgaaaccatctgggcaactggagggcacgggcagatggagactgttgcttcccacaccccagataatggctgaggaatctacgtctttgtaggggatctcaccagtcagcagttcccatagcaccacgccaaaggacctagggatgaggggacatcacttgtgctcaagccctagaagttgcccacaatccccccagggctggccacccactcttctcagttttcagcctagttctcaccagatgtcgaccttctcagacacaggttcattgcggatcacctcaggggccatccaggctactgtccctgcaaaggacatcttggtgctcttgtcactcagctccttggaagtgccaaaatctgagatcttcaccacatcgtcgtaggtgattagcatgctggtaaagagtgtagtcagctggggtccacacccctccacacacctcatctaactctgcagcaactctgcctttcaggtttttttgtttgtttgtttgagacggagtctcactctgtcactcaggctggagtgcagtggctcaatctcggctcactgcaacctccacctcctgggttcaagtgattctcctgcctcagcctcctgagtagctgagactacgggcactcgccaccacgcctgactaatttttttgtatttttattagagacgaggtttcaccatgttggccaggatggtctcgatctcttgaccttgtgatccacccgcctcggcctcccaaagtgttgggattacaggcgtgagccactgcatccggcctgcctttcagtttaaaatcatttgggacactcaaaggtgaggggctcactacagcccttctgagatgggactgtcacttggaagaggtttctgagatggccacatggacctagggcatggtttggaagccgggagaaggccacactgacttgagtgggtcacctgcatgcacatctgttgctccctgcttgcttactcacttgggtgacttgagatccctgtggataatcttgtgcaggtgcaggtagttcatgccaccagcgatgcccatggaccagtcaaccagtaaggagggggtgacagggcggccagcccgcagtacctcatacagctggccctgggcgcagaactccatgaggatgcagtagcagggagcctgggtgcacacacccctgggagccaaacaatggtatgaaggcctcagctggctcagcattcacctgattcatacctggaacccccattcccacccattccacctatggatctcctctggggaaggatggggtaggtcccactgcccaggagggt

SEQ ID NO: 69666 - DNA, 1124 bp, Homo sapiens
ctcgcaccttcttcacagccacctcctccccgtggaagcgccccaggaagacagcaccctgggcccctgagcccacccactgcaggtccaggatttcctcaaaggggacctcccaaaggtctgtgggcaggaggcacagtgccacaagcctcagaaagagccacactcaaggccagggacaggatagcattgggttggctgaattgacttaaggagggtgaggcagaaagccaaaaataggccaagaagaaggttcgaggggacagggaaggaatgaatgggtggccttaaaagaagctgggaagttagaggctgatggatggctaagggactagggctgggccatggggagggaagggaccattgcgtgactttagcggagctgaccaacagatctcgggctcagggaaacagagaggaggctcccacaaggacgtggcctaccttcctgctgctgcttgtgctcagtggagtaggctttgccaatcatggtccagacagggcgcaggcagccaaagaggccctcaaggaagccactgccactctggcactgcagtcgcacctcgtcagctcgaactctggatgcccgactctcaggtgacccagctgctccccctgggccccctgcatcctgctcatgtagctgcaggacactgttggcaaaaggctcagggggcggctctccacctggggaggggctgggccctcccccaccctgcccaccaaggggtaccacatctcgaagtacacactgggtaggcgtcaggtccttctcgggagtgcagtcagaagtgtctgggtccagcttgcgcatggatgcctcacttagggtagacacaaagcccccaaaggaaggagagggtgttcgggtctcatggaggcaagccatcgcctctggcccctggtatgatggtgaacactgggccctgtgggaatgaaggaaggaggggctgggctgttaaagccccaggactgcctgctcaggacacttatcccagaggcacagactggggtgctgggttcacagtagccccgctggaggtaacacttgtggctccgtttcccatggccctccaaattgcaccttgagccatcttaggaaatctgatacacttgggcttcct

SEQ ID NO: 69667 - DNA, 1293 bp, Homo sapiens
cagcctgcacctccacttggaacccagccaatggatgctagactgtctggggttccttggaccctatgtcccccataatgtgcctaggtctggtatggaagtgcttggctaggtgggtgcagagaggggaggtgtgatgtgggtctgtgccccttcccccagtatagagcaaatgctggccgccaacccaggcaagaccccgatcagccttctgcaggagtatgggaccagaatagggaagacgcctgtgtacgaccttctcaaagccgagggccaagcccaccagcctaatttcaccttccgggtcaccgttggcgacaccagctgcactggtgaggaaggcttgggcagcctggctggggtgtgcatttgcaggtccccatggctttgtttcttggagtctctctcttcacagtccttttctccaaggccagtgagggaaggagagatttcaggggaaaagctactgactggattgggagaacagggctgtaagaaggtgggtaggacgtgggagagttagaggagcgagcaggactcccacagtgatctggcagatccccatcaccctagaggaaaagtaagagaagataactgaaatcccagtggagtatttgggggagtgagtgcctggcgtgctgggctctgttcccggtgcttaaccaaattcccgtttaattttaaacctcagtctaaccaatgattgtaggtggtagtatccgcccccccgactcctccccccgcccgcccatgttgaatatgaggaaactgagtgtttgagatagtaaatggctggtgcatggtcacatgcctagtatgtggcagagtggggcttttactccagagcctaccctctcttattccagctctctgtatttattgagggaaaagaaagtgctttgcaaaggaaattaaagcatttgcgctcagaagtccacccaaggcgtttgagctcagaagtcctgcttggcatggcttaattctggaagctaacggaaagataagggctcttccttccagcaattagtgaaacacttccagtcttcagcagggggaggttggtcagaaggggcttgattgattccctctggctacgaggagagaggctgtgggatgctggtttctttcccgtcctttcagtgacctccagtattgcccatgccccctctctcaggtcagggccccagcaagaaggcagccaagcacaaggcagctgaggtggccctcaaacacctcaaaggggggagcatgctggagccggccctggaggacagcaggtgagggaggaaccga

SEQ ID NO: 69668 - DNA, 1154 bp, Homo sapiens
gcaaaggatccgaggaggaagctgttggttgagcctccctgattctttggctcaatttggaagttctcttaggggattgggaggtcaggaggacgtgggtcccccacccctctcttccccctatacatgggtgtgaatcaaaggcccccttcccctcgggaagttctttttctcccctagactcttcactgcctgaggacattccggtttttactgctgcagcagctgctaccccagttccatctgtagtcctaaccaggtatctgtgtcccctgactgcctgaggtgggtggaggaaggggttctggtttttggtccctcagtccttggacccaagctggtcaggcatgaggaagtctgagaataaacagaatggaatagttgggaaccagaacttgaagaaatcacagcagctggtaagctcttgggacaagaggtcatttgtgattttcagacagccttatgaatgatgtccgaccatgtttaagggtcttgcaggccccattttcttctgggttgaccacatgtcagttctgtgtttgaggcccatcaggcacttctgggactggaaatacagctcttctcccactgtcctggcttagatgatacccaagtgttccagaatggaaatgggctggggcctggagaaggcctcccttgagtgggagggggaaggaagccggctagagcaggaggagcaggctagatgtgtggacagacagctccccacccggtggaatcgggagatggtagtcaggaatctaaagtagtggttaggtttggagctcatgggcaggctcagatggaacccttcacctcaactttggccctgtgccttttccttcaggagcccccccatggaactgcagccccctgtctcccctcagcagtctgagtgcaaccccgttggtgctctgcaggtgtgtcccatcctcatttcccatgcatgcctgtcttcccttgagccaggggccatgagggaaggctatgtgtgtttgggggtgggggcggttccttgtactgaggccctttccacccccctctctccttcctctcacctagagtctgaggctcctgcgtggggaccagcgtgggtgtgagaagccttttttcactcagcctcatgcaccctgtgtctcccttccaaggagctg

SEQ ID NO: 69669 - DNA, 1124 bp, Homo sapiens
ttgcccaggctggagtgcagtggcgcgatctcggctcactgcaacctctggctcctgggttcaagtgattctcctgcctcagcctcccaagtagctgggactacaggcgtcaaccaccatgcccagcctgtatcttttttttttttaattaaaaaccattttttttttggccgggtgcagtgcctcacacctgtaaccccagcactttgggagaccaaggcgggtggatcacctgagggcaggagttcgagaccagcctggccaacatggtgaaaccctgtctactaaaaatacgaaaattagctgggcgtggtggtaggcacctgtaatcccagctactcaggaggctgaggcaggagaatcgcttgaatcggggaggcagaggttgcagtgagctgagatggcaccactacactccagccttggcaaaaagagaaactctgtctcaaaaaaaaaaaattattaagatatagagggaggctacaggattttggagcccactgaatgagtgtggcttccaatctttgcagacagacccccatcctcactagagagcactgcttccgacctgcctcatcgcccttcctatagtcactctccacagctgaagcactgctgccaccctgtggtcacagctcctcattgccagctccggccatttccttttcctagaatagacctctgcagaggaagtgaggagggtgaggctgagtggaggtgctagggtccagtctccagggagtcccagaaggacaggagcaggctactgtggggctggactatcattctgaccccgactctggtctccacagcctctgcctggccctggctctcatatagagtagcctagaatcctgtcttaagaaaaatcagaatcactaatcctcagggagaggccttcaaagccatatggtgcaggttccttctaatcctcgagtcccttttggagcatccccaccagtgtgggtctctagcttgtgctgaggaagagccatgacgtaaaggccttggcctctgcttgagcaagctgtctcccgctctgagcttcagtttcctcacctgaaacatgggcccattttacaaggaacgccttcctagggtgtgcattacttaacatacttttt

SEQ ID NO: 69670 - DNA, 1734 bp, Homo sapiens
tcacatatgccttgttgatatgctctttctgctttctttagacttaatgtttgacgggggtgggggtgtctggaagaacaggaaaggtggggatcctaaggcagattaaaggactccctccaccccactacagcctcccataactctagtcatccctctcatagtacaggactgatttctctgtgtctgtttgtacacacaaatgtgcatacagacataaattcccccaccccataccaaggtggttacctagcaggaatgagcgtaggtggctgctggccaccattaccaccgtctgcatcagctgtgttgtctctctttggggtaaagtcctaccccagaatgagaaaaggctggggagagtagggcaggttaaaggagcttatgtcctctgtagatgtaggtttgtatcatagctactagggtttatttttttaatggggggctaatagcacagagttatctcaccagcagtagctactggtgagtgatgttttagctgtaagaagtggctatgagcaatagtttcactgactttaccttagggcagtgccacagtaatctgggaacttgttagaaatacacattctcaggccccatcccagacttattgaatcacagactctgggggcagggtttaaaagcactccaagtgattctaatgcacactaaaggttgagaaccatttcttagggataagctgggaaatttttacaggtgtggaggatatttcaaatacatcttttgcctttgcactaacatgctttcatttctttcagtctcttcctccattccctttaaagtcttccccatcatatcactgatctcaaaagctagatttgtcttcattttagtcgtatccctaaaaccatgcattggtctggacaggagttgtcccatattcccttgcagactggtcactccatgttctctgttacagtaaggaccagccaagcttcagctgtcccattcctccccctacaacacacacacctttcaggcagggaggagatgagcttccagccccaagagtggaggctgccacatcctaacatagtatctattgaaaaggaagcagtgtgtatctatgattatatctctgttcatctatatatttttgacatgtagcaacacctctccatcttatcaaggaactcaactcggtctgggtctccccagtgcccagtggtggcctttgacaggtaggaggatgcagtgctgcaggctattttgttttttgttacaaaactgtcttttcccttttcccctccacctgattcagcatgatccctgtgagctggttctcacaatctcctgggactgggctgaggcaggggcttcgctctattctccctaaccatactgtcttcctttcccccttgccacttagcagttatccccccagctatgccttctccctccctcccttgccctggcatatattgtgccttatttatgctgcaaatataacattaaactatcaagtgaaccactgttatgtctgatgcttcactcctctatccacagcccccattgtccccttttctgggaggtcactggcctttcatgtctgtcatcttcatcactcccccatttcttaggacagaaggaacagggatttttgtctctagtttttatacatgggagatacagcctagagaaagtggatgatttctataaattacaaagtatgacagaaggcccagggcagagctcctgtggactgccttggag

SEQ ID NO: 69671 - DNA, 1539 bp, Homo sapiens
tgtctctcttctgtaactacttcagactcagccctcctggaggctgtcatgtaggggactctcgagttcctttgttctaccccatctctccccctcacacatctgtctgcttttctgagctagagtcttctgttcacaagtgcccatcaccgtctggactatcttctttctctttcaccaggttcctagcttagccactaggtcttccaggtcctccagagtttcttcaacccatttcttctctcttctctttacatgcagtgctccaggatcttgaagcgtcatagccaagatgctgagtgggtttacttgagtataagattgaaaggagggaggaagaggagagggaaagtgcagaactggtcccagcaaaggaccccaggttctggcctgggaaattggtgactattgctctcaaccattcttactttgaagagttgggttgcagagggagcaattcatctctcttgtccctcttccacgttaaggcttctcatctccccttggctctgaactatgcagtttctaccaggaccataggaagcaattcagagccagaggcctgtggatagataggtcagctttaattgcctttccgtatgaaacccttccagttgtcccagagccactttctgccatctgtgcaagccaagaatgtccttctctccatctttcctacctccatcttaaacatacatacaaaataactgccagcttcctttcttattttgtctccaaaattgactgtcacaggggaatgagaaaatgttctaagctacaagattcccgtttccttaaagtgatatcctgtcctagtgaaccagtcaggtaacaggttctgctgcatttgttttaaatttcccctcctgcttttcagagctggtgctgaacaggccacacccctaaagacaaaggagagaaaacacggttttctcatcctctaccatcaggtacccaacaggaataggccctgaagtgattcagactagcaaatgttatggcagatggtcaggacgcaggttaccacatccagggacttcacttttgcctttaaaaattcacagccgtaacttgtgctcaggacttcccctttagctggctgctccctgggattttctcctgctttagagttttgtttcatttttttattgtcttgatttcccagtagcagccttgccctaaagcttgactgagtttatggctcctaaggagctttcctaagactcttgactatttttcttcccccttcagtcaagtgtttttacagttaagaattaatttgtaactgcatacatgccctgccagtctgtccctgtgttgggtggctaatttatgtagcgggtcttttttatttcttagcccccatgactaattatctagtcctaacttcatttttatcagtgggaagatgtgtacgggacctcagtgaggagcactgccagaaccacagtaacaaaatggcactgaaataaggaagcagcaggtcagaaccccctagatagttcttgagttggttctcagtctcactaaggaggcaga

SEQ ID NO: 69672 - DNA, 1037 bp, Homo sapiens
ttcagatttggccatcatgtgacctaactcagctttgcaaaatgacgactttgatccaacttcccctttcccaaggcaagccagtggtaggaatgtttaattgttctaaaccctttaataggattagcttcctactatttgagtttgcttaatttgcaaagtataaagattttgccatttttctccatctataaggtaagttgaataggattccctgccttctcaccttcatgagggtgtcaagatttttaccatgctgccctataccttccctaactagagaagactggaaaatcttctgtaattataagaggaagatccatggacaaaaggtctgtgttatgagcatttcacttcatgtctcctctaggtctcccactggctccctccctcttgtcatgcatcttgctaatggacagaccatgcctgtgttgccagggcctccagtacagatgccgtctgttatatcggtgagctctgtagttggggcagccaaccctaccaacatggtaatccttcccttccacctgaatggtcataaaatacacatgagccccagggaaatgtgggctctgatctatattagctgagcatggcagcctgcctaaactcttcactaacctctgccaatccagcactatggaacactagataaagactcatctggacaattggctcctggtctaggaattgatcttgccagcccactgattagttgctttcacttggcacgtagcacctcccaaattgcccaacaatttcctcaagataacagccccaacccttcccacagaaattgccccaacactgaaggattaaattccctactctggtgctccatggagaaaggtatttcccaggctgtccctgcacgccctatgggcacattgcacacaacaggccctgatgtgccaatctcaaaagcgcttcattttagggaaactgttgccccaccgatggtattatgttcccttctctttttttttttttccttctctcgatccagctggccagacctgtgtccatggtgcccaaca

SEQ ID NO: 69673 - DNA, 1050 bp, Homo sapiens
gttaaatggttctcctaatcctgcataatttatctccctgttagcgccctcataaaagagtccaattcagccctaccatggagggcttcattctcaatttcctatttttgtgatggccaactagtgcccagcccttcccttctctattattattattaaaaattgcttccccttgttcaatacgagtttgccttaatgtttttttcatttggagcctcctacttggaccccactttaccaacaatctgtccacttctgttgtttggacctgatattacagagcagttggtgttgtggtcttccccatctcctcttctccctgcgttctagcacccttttttctccatctcttctcctcttccagttttttctccctctccagttcttctttccagggaccaatctcattgcaagatgtttggtaggacattttaaaagggcaccgaatcgggtttttgtttttgttttttcatatctccatttctgtttcgtttcagagatttacaaacgaggaccacctggcagttcataaacacaagcatgagatgacattgaaatttggcccagcccgaactgactcagtcatcattgcaggtatttgctgccccaaaagccacgtgccttgataccaccaggcagttaagattaataccagagaccagatgtactgggagctgtactccctttctcccattaagagcccttatgtgatctgcatttaatcaggaaaaaggaacactaaaagctcccaagtttctcttgtaccctccactctatttttaataacaaggttgtgttctgtggtttttgaaggtaggtgtgttgaggtttcgtcttagttttttttcggtctattaccgtctttctttctatttattaagactttgaaagatttacagacaaaagatccctttgacatttttgcctacccacagcaaaggggtgaacaaaagaatgcaaaaaaaagccaatctagcctggttgcttctcttccactgggtgtcagctttcctccagcaggcagattgtcagttcataaattcaacttcc

SEQ ID NO: 69674 - DNA, 1062 bp, Homo sapiens
tgaggtcaggagttcaagaccaccctgaccaatatggtgaaaccccatctctactaaaaatacaaaaattagccgggcatggtggcatgcgcctgtagtcccagctactcaggaggctgagacaggagaattgcttgaacatgggcagcagaggttgcagtgagcggagattgcgccactgcactccagcctgggcgacagagcaagactccgtctcaaagataaataaataaataaaaataaaacatttttgtatagaaatgggtttttgccagattacccagtctggtcttgaactcctggcctcaagcaatctgtccacctcagcctcccaaagtgctgcaattacaggcatgagccatcgcgaccagcctgggattttggatcttaaattggctttagttgtaaattcaggtaaaataaagtagtagaaacagtttggtattgctttcctgacaggtaggagctggatggggccaactcccgtgtattttgtttgcagtcaagaagagctttggaaaagaaggctaaacgtatagtatttggtgagaagtatacacgtgatgaagaaagtaaaaagagacgactaaccaatcaccatttttagaagcaaaaagacaaacggaaccatgtttcagagcctcagtgtgaaggagctgtggaaaactgcagcatccgggctgttactgtgttgcagtcatgttttaatgaaggaatatggccaggagcctcaaagggacttttgagaatattattcttttgaattactgctgttcatctgttcccttcactctcccccttttaagaaggggtaggagcataaattattgtccagtaaccctattttacttaatcataaactggatagagttagcccacttttcttcattgtcctttcacccaaatcccaaaaaaataaaatctctataccatctccctttctcttccctcatcctgcctacaggctcctccctacccctaaaaaaatattttttcctggcatttttattctaccattatatagtcatcagcattgtactggcctttttatggctgatggag

SEQ ID NO: 69675 - DNA, 1587 bp, Homo sapiens
gcatgtgccaccatgcctggctactctttaaattttttaagagacaggatttcaatatatattgcccaggcttgtctcaaattcctcaggtgatcctcctgcctcagcctcccaagtagctgggattaccagcatgagccacagtgcttagctgcaatttcattctttgcccctacctgcctgcctgccttctttgagtgtagacctctagtctgtggccagcattctaaaaaatatcacttatggttagaaagtaaacatccaaaattgaagttttccatttgcctgactttgtaaaactaaagatagcttatcagagctttcctggttagacacaaagataatcagatgaatatgtcaacaaattatggtaagaattttttgctgcattaaattaagatagcagggcagaattagagcacttgaccagtttatggtttatatagaagacctgccaaactatttgagcctttatcgttgcctatttctttaccaggctgcaacctcttctgtggtttccgagtccctgggcctgtaagctttgatagcttgtttaaaacaaaagcttaatactgtattttggtattattttaaagtgagggaaggagagagagagaaagagagagagagagtgtgtgtgcgtaatctccttgtaaacttgaaccaagtttagagacggttttagagacgagtgcatgtgagcacgctcattggttctctccccctcctcaccttccagttatatattttcttttggcttgactgttacagtactaaactgcataaggccttaaagatcagggcagggtttttgttattgtggtctcagtactgacttgtatgtgctctactctgaatgcattgtaagcattcaaaattttaaaactcctgtattatcaggaagtatttacagtatagtttttccacagtgaaattttcagcagctcaagccaaaccacaatgtagtaggttcatacttttcactctgtaactttgtccttcccacccatttgtgagatccagaaattgtaacacttaatgtgtagcaaattagaagataaaagtatttgatacgtttttcaaggattttgtacctcataacatcctaataagaatttggggagagagatgagattgaaaaatagaaatgtataatgtcaacaagaacttaatagggctgtgtgataattattttgattttaaaataaccttttcttgctttgttaagaactacagttatccctttggggactttaatggtaccccagctaagtggctacatctggataggagaatactaaaaggtctaccattaggcaagagctgtggagaaagcaattagccatgtaactgacataggaccaggcctggctgaattgctgctgggatttctctgcctcctaggcactggtcctttaaagtttgttgagcatttaacccatccaagtaagtagctgccatctaaggaaagataatggatctatccttgttaattcttaagcgtagttcccaagagtgccctggagtttgataaaaagccaaacactgggtattgaggaagaggggcagcgagaaataagaaaacat

SEQ ID NO: 69676 - DNA, 1202 bp, Homo sapiens
ccttgccaacagtctcgtagtttatacaccagggagccagattatggccctgtaaaatggagcacccctcctataatcccttaattaattaaatgacaaattttggtcttctctcgttcagaaatatggcttccgcatcgagcgttcagtgaatttattgacataaggaactgcactagttgtaattcaacagactggagaagtgtgttatatactgtagtagaaagagggaaaatctagcaaaggtttgaaattccttgactatttagatctcattctttctaattaaaagtttcagttgagacacagtagatcatatgccacctgtctaatgggtctccccaaagtagcctgtgtttacaactttgatagatggcattcgtggaacacctgtttctagggttgatatttttgaagcactttttttttttttttgctccagcatatttaacataactttttccctcacctccccctcctcagctcctctctgctatatgaaatatgggagacgacagaccgtttgtgtgcaatgccccgggctgtggacaggtacgtttacaatatactttattgtgaatgtctcgttgtgaatcaaagtggctgttttatcactaaggcaaagagtttaaagccagtattttacgtgatcactggaggtaatcagatcagaggatttgcagtgtgtaaatccaagttatgaggaagtgtaggcactctaccgtaatgaaatctgccttgctgtcttccatattgttattctactggtgtttgtttcccaccacacagtatggaaaaatacatgttgctgtctcctcctttctaaagctgtccatctaaatacaaagcaagtttagaaatgttttctcttcatgccgggcgcggtggctcacgcctgtgatcccagcactttgggaggccgagatgggcagatcacctgaggtcaggagttggagaccagcctggccaaaaccccatctctactaaaaatacaaaattagctgggtgtggtggcacatgcctgtaatcccagctactcaggaggctgaggcaggagaatggcttgagcccaagaggtggaggttccagtgagccgaaattgtgcgactgcactccagcctgggtgacaagagcgaaactccgtctcaaaaaaaaaaaaagaaagaaagaaatgttttctcttcaacctgcatggatataaa

SEQ ID NO: 69677 - DNA, 1003 bp, Homo sapiens
ctaatcttaacatcttctagatttttatgactctttgatacttacagtgcattatccttctaatttttttgtacctagcagtatctgctttttgtcattaggaacctgataacaggcccctggatgtgtttgtatgtggcttttattccttgcttagagttgggccatcttattaacatcagttggttactagagaaaagatcacatcacaccatatctgcattcttttttcttattaaattatattgtaatggtaatatcacacgaggtttagagaatttactttgtagtcctcagtgacagactccatgcttagtctattaaaatatatagatatagacatatatctagatatacataaataatctgttttcttacacagtgaccattttaggatctacctctgagattttatgaaattatctcagttattaaaaatcattctctaaatcttgggttttcttcagttctctcccagcatttacgtaactttctcttttgagtaagtattaagtttttttaatcatttaaaaaattctggtgactgagtacctgagccttttctgcagatgttggcctctaggacagcttttttatgcatctttgtcttccctgttctaagatgtttgctgaaagcatcccacttctccttgtcagtgcttcttaatgtgtgtatccctcttctgtcatttattgtttagttctataaaatgcttatgtttcatcctgaagaataggttgggaaggagatgacacactgagtgccatgcccagacacatgatctgcttgtcaagcagtatggttataaatgagctgtgagttaaattctagtgagtggcagcattgtttttcaagatttccctttatgtctcagtctgtttacactacagaaatgtgttgctttttgtttttgagatggcatcagtgagacctcactgataattaaagatttgttttaagtgttagatagaaatcagcaaaatgacattctttatatgtagc

SEQ ID NO: 69678 - DNA, 1023 bp, Homo sapiens
gaatcacttgaacccaggaggcagaggttgcagtgagctgagattgtgccactgcgctccagcctggtgatagaacaagactctgtctcaaaaaaaaaaaaaaaaaaagaaagaagtctgagtttaaaaaaagaggtccatatctgcctattctaaagcactaaacagtatatttaaaaattatacaaaactactcattttctaactacaaagaaacagaaccaagtgacaaattaagttcaaaaaggaccataaaaaattctaaagttataaaccgtttcatatagaaacaaacacggtggaaactcgtttataaacacacaaggtaaaacaggcaattcaaaatagctcctccttttgttaccttccaggacccattttgaatgcttcctaacaacaattatgcttatatcagacaatcagaaattgccccaaccatgcatcacaaagggaatatagagctgaaaccaagtttagcaggtaccgaatacctttcagctcagtacaaactagctgaaaaacttagaaaggtacccaaacagagctctatgggctctatttctttatgataataaaaaaattatatgcaaacagctctcttttaaacacacaacttcagttaccacgtttcagactctaagataatttagctgccattaagcaaagagtacaaatacgagatcttcgccacagcagtctcaacattttatattctccctaggatactcagtgctgctctgatttccattacatctagcaaagtgacttaagattccagttaacacatgaactgtgagactataatgcaggttatgggaaccccagaaaacaaagtagactactcaagttttactaggcagtagattatttaggtattaaaatttctcttcataggccaggtgccatggctcacacctgtaatcccaacactttaggaggctgaggtcagaggacagcttgaggtccggagttcaagaccagtctagccaacaaagcaagagcctgtttcttttctttctcttt

SEQ ID NO: 69679 - DNA, 2403 bp, Homo sapiens
caggctggggtctcccctcccagtctgtgttggacgggggcgctgaggcggtggccgggccctgtctgaggaagagggtggggcataggccaaagccgaccaatgggagagaaggaagcctcgattggcggcgatgagcgctaatgggagatcgcttttacgttgccgagcgccgcccttctctccctactcccgcctccttcctttggggggaaggcggggccagaggcttgaagtgtggggagaacttggtgtaagtagccccggggggcacagggcgtggcaaggagaggggaattgaatcctgagggaagggtagtctagtggagcctaatggaaggatcatgggatggggtggaatgggagaaagaggagggatactaaactaagttagaaacccagggcttcccaaagagtgggattaggagcttggaattggaaaagggtaataggaaggaggtaggaatgagtagatgagaacaaagatcttgatctggtgacacaacaccccgttgggtttggcagaaaagatagatggggtggattattggaaatgagggtcatggcattttgattgaattaattaaaagaacatcagggacatgatatcagagagaaagtatggatttggagaaaattaagtgaattaatttaagaggacagtatgggtgagctgagtcgccataaggcatggcttctggaaggatatgagccttgagagcgataagaggtgtttgggaaggagatggctgatatacacatgtctttagcctaggtatcaggtggttgggatattgatttagggcttctggtggatatggcacccagactggtgaccagcctccaagatgctgggatgggggttgagaaggagaaaaatagaacgctttcatcgcttctctgattttccttctccctctcttctattacccaaactcttcccagacaccaggatgtggtcttgggacttaagcagtccaagttggagccccatagggacttaatatgttgctctgaattgcttgttatgttctctgactggggtgtttacaacccagggcacctcctacccagattcccgcgttgctactttcctaactttaaaagtttgttttctgcttaacagagggtgttttagtatctctgagggtcatgtcatattaagtacaggtgtgtagggggtgtgcagagttttctcagcaagctcacatgagtcctgtgtttaaaaattttgcagtagtgtaattcttgtagcgatatcagtctttatgggcattctaagcagaaatatactaaaatgaagtttgttttgttaaatgtggcttccccagtcattctcgaagagttgtcgaatgggtggttgcagtttgttttagttaacttacataatgtgtttttaaatagtgtaaataaaatagacatgttatttcaggaaagtgaaaaatgttcagttttttcctttgtgtccagactcagaaactaaagctatgtcataatatcttaggccaagggctggggaaatcaaacacaatttgtacttacacatggaagttgtaaggtaagtggaggctcttgcgaaatgtaacatgtctgtaagaaaagaagctaaagaaaagtttgcaagctctgctaagtagtcttaccagttcttaattctgtacagaaaagggacagggctttgccctttgtttgatagttgtgtatcatttaataacgaattggactaatatagccaattaataacttctttgctcttgcgtagattttgcttttacattccttctcttctccttttacttttgagaagggaaataatgtctgaaatatcagtaaagctattacatgaagagaaaccagagtacgtagttgtattaacctttggttttctgcaatcagctgaagcctttctccctggccaagaagttgcccctatagcacattgagaccaattcattgctgacccgttagcattaactactgagctgggttctagtatttcacagtaagtgcattgctattggacattcagaacatttccagtttgcctggcagcagtacagaaaattacccagtgagagagcagagtcccttgttttggtcttctgccctagaattggtgattgctttgactagggcactattaaacccaagattttttttttctcactagtgctaccatctagcagaaagctagagtgataacactgctcatctttcaacttgtggatcaaagtttacaccctgtggtagtttcagtgttgtaatttttaaacacgtttgtttaccacggttttaaaatgttaatagctctacttactgtatcttgttctctttcctttcctcatttccaacccaaaatgaaaattgttttttcaaccaactcttaaactacttctttgcctg

SEQ ID NO: 69680 - DNA, 1209 bp, Homo sapiens
tggtctcgaactcctgacctcaagcaatctactcatctcggcctcccaaagtgctgggattacaggcgtgagccaccgcgcctggcctaatttttgtatttttagtagagacggggtttcaccatgttggccaggctggtctccaacttctggcttcaagtgatccgcctgctttggcctcccaaagtgctgggattacaggtgtgagccaccgcacccagcccatttgtagtttcttaaagccccagatcttctgactatttgaaatgagagaacataatctgtccctcttactcttgtcttctagaagagcggtgttccataaatccttaggattctgaggttatgccccagagactgtcttagagaataaaggggagaccaagccgttaaaatttccccactacttttgtaccattgcagtttggcttttagatgtttactatattggagttctgcttaaagtttgaaaacactgctctagatagacccttccatcctatttgggccctggatattaagtgtctgggccaagaggtcttaatttgtggtaatgagatgggtgaaccattagtgaaggtcatgattatacctgggccatgttacaggattttagattgcctgctcccccttcattcagttcctgtagagcctttggggaatcagggcaagaatttgggcatgatggtgttaccctaaaagcttctttattatgtgagataatcttgaagagggggattctccctgagcccatcttagatatttatccttttctttgtgtgaactagaaattcagtcttttctcttctccttctaccaggaacccttctctgaagcaacagctcttctcctacgccattctgggctttgccctctcggaggccatggggctcttttgtctgatggtagcctttctcatcctctttgccatgtgaaggagccgtctccacctcccatagttctcccgcgtctggttggccccgtgtgttccttttcctatacctccccaggcagcctggggaacgtggttggctcagggtttgacagagaaaagacaaataaatactgtattaataagatgtttcttgagtctcctgtgtatatttcttttccacagttggctgagtgccttcgtgagagtacaaggcccgaagggtagtgatggtgctaaactcaacatggatttggctgagctcactttttcttaat

SEQ ID NO: 69681 - DNA, 1235 bp, Homo sapiens
ccccaggctctcccctcctatctctgctttctcttctcatcctgacttgtgccttctttattctgaaatctccagactttaggccccagaacctcaggtgctccgagcaatggagatagtggatcgtctaaagtcaccaatccctctagtcagcacccctcaatttaaaaagtaaaccttgaacatggtagaagtgggaaaaaaagccaaaacatcgcctcccgttaggttgtggcttgggatagctaaggcagaagagagaggctggttgctttggaatcactagttatttaccagtacctttctcgcatcccggcacgctggtgaagttgtaaaagtcacaaatggtgggctagagatgagggtttctgttgaggcagcaggcccagaaaggtggggtaaggccaagctagtggggccagcatgagaccctgcctgccagctttcctgtgaaggattaattaacctccccagattctgctgttacaaggaaaagaaggtttaaggaaaggaatagttaagttactacccctgtgactcatctacactgaggaaaaagcccgtgatgattttggagtcctgattctggatagtgcctttgcccaagttgtaggctaacaattgcagagttgccatggttagatagccaatggtgggatcacttaattgccaccccttgttgtgggtttattatatgccagcaccacattaaactctttatgtatgttaatttgtaaatgaacatacttaatccccctaagagctgcattttacaaagaagataataaggtataattcccttagaaaagaaccaccccttctttttctaaaagccttaaagaactattggattttgacccaagaaaacctgaatagtacggcagcaaaattgggttagagttacatataggcaaaaatcagagttctagataggacaagagttgaagacatccattaacttaaaagtaattaaggctgggtgtggtggctcacacctgtaatcccaacactgggaggccaaggtgggaagatcttttgatgccaggagttccacaatagcctgggcaaaaaataaattaagagcaattaagatgttggattcagaagtgttttaacctgggacaatctgagttcagttcatttaatgaagtggtatttaatagccctaagcattcactgagtatttcagcctgtgacatattagaaagcatgtaacttaaaagatccaagttcaa

SEQ ID NO: 69682 - DNA, 1015 bp, Homo sapiens
taaacatctcaaagattcctaggacacaaaacaaaacaaaacaaaacaaaacaaaactccactaaaaataaatacttttttgatcacagcctcctagagaaaaatatctttgaaataaaaaaagtatatcccaattgagatttaatacacttgcaaattatggcatggaaatggatataaaacctagcatgcctcagcagctatgtgctcccacaatccccgtgtggaaatagaattgggctgatgtatctcagtgagtgcagaggtacagacaagaggcagacgaataagaaattatcttcagacactctccatctttctacccactcagagatcttttagaagtagtgagatttcaagataactctgtctgtgcaattgtggtttgttcggcaacatgtaggcataaacactgctgtctctctacagtgcctctggctctgagaatcctcatctgtggtagtctgggctggtgtgggagatggaggcaattgttcagcaagatccagataattagggccaagatgtgtcgtggcttcttccttctcccaattatacagactcttgctttattgctctggtttttttttttttctccctacggtgagtgtagactttttttttttttttttttttttttttttttttttttgagagagagagagaagcagaaattccaggagagaatcagaaagggagaaaaagagagatggggtttaggagagagaaagagggagaaagaaacagtgggctatttggaccacactagaagtctttactgacaagcctttggatttgggttgggaagagtagcaagctggatttctagctggacaaggcactcttcagagcccagagcttgcctgtgggggggcgggtggtcaagggtgggtgggctgtggggagctgaacagaggggccccgaagcccaaaaagaaagccatggctgagcattgagatgatttttatttactcctcaaaggtgtctattaggtttccaggcatgaagtcattc

SEQ ID NO: 69683 - DNA, 1065 bp, Homo sapiens
gaccaggccgggcagctaggcaagcaggggcggggaaggggaaccggccaagcagggcaagggacaggcaccgagctgcgagcttcgaactgctccgggcagggcggcgcccgcggggacacatttctgtcggagtgagcagctacggtttgggatatgaaatcgcccggggagcggtggaattcaaagaatctgcgtttctctctgccgcgtcctgcagaggagagaggggagggagaggaaaaaaagggagaatcttctctgcttcgatctgcttttgcagctttggcttattctcaggctttctctgatatttaactttcacctaaatgggtttctttctcattctctccgaatctctgtctccaattttctttcaatcttctggtattttttcgtatttagacgtttactgaactatttatccaaccctgtattacttaagccatgcattggttagaagctcgaaataatcacatggaaattcgagtgttttttctattagaccccaaaaggatacatctggtttgggggagttttattttgtctttctttttaatccgcttggctgtgttctgtggacctagttgagatcggattgtggttttgcagatgttgattatctcaccaatggccagcattgcttctcggccttctctggagggagcttctgagtttgcaccataaatataatttcaccccccaataagataattcttcaagggttttttccctcaatcctagccccctcaggaggcaacctactgcgggcctctgcactgctatctgatggtcccaggggcaggcttggccggttctggggtgcagttgtctcctccgcagtgagaattaggcccctctcagcccagtcaagccctgttaggggtccaaagcttcccactgcaaagactccaggaggcccccagaagctcctcagttccccggaaatgacagcagaagagtagttcgcccccagattttcaggagcaggcaggcaggtccatgtggagctaggcacctccttttgctgcattctctacctcccttccgcatccttcctctagc

SEQ ID NO: 69684 - DNA, 1036 bp, Homo sapiens
cagaggcaaaggcaaacacatacacacagctgagcccagcacagcactgggcccaccccactctccctagtgcactcgcaagcaggcagcctcataatccccacatggcccagcagaatggagataaaatcacatgcctccatcccccgctgggtatctgacacctgacaattccccatccacacatacttgcttcacccatgtacaagttcccccaaattaccaccattccagctgtctgcagtctcctgtggtcttcccctgggcatgaagcactccccaccttgactggtcacccactgtaccccctttatgcagcccttcctgtgacctctgggctctagggtgctggatttgagctctaccactccagactaacctgattcccaatctaataatgaagagggaccagaacactctaaaaggagtgaggggacaaagatatgcaatattctctttccatttgctttaaacttgacttctgtgaggttctctgtcaatctgtgtcttgttctctgtgtctgtcgctggtacctagtgtagtccctgtggatagttgcccttcccctagctgcctccccagctctctgtagtgtaattctcctattccaacgtctgtctttagcacgttttccctttatatagtccttgtacagagttgcttcatcatattaatattgataataataataattaaaacatgaattatgattatgtgattttttgaaaacaaaagttctaccccaaaataatgggagtcccagcctcttagctgttctccactttattttctccagctcaggtgaataataaaaataataaatgtgtaataataatgaaggaagagtggttgcaggggcaacaaaaatacataagcaaccaagatctgttgatgagctaccatctccagtcccaagcaattatagcagagagaaaattggggggtggcagacttgggggaggagagggagctttgagaagtcatggggccataaaaataatgtggacagcctaaaggaggttgaaaccagcttca

SEQ ID NO: 69685 - DNA, 1049 bp, Homo sapiens
ccgtcttgccctctgccacgtttgttccgggaactgccgccttgctcccttgcctgcatttctctgcgtggttcgctttcaccttcgtctggcgctctcttccctcctctggctctctctctagcttcgtggttgctttttctaccaggtcggtactggcttaggccccaacgagcttgtgaaaaaaaaatacaaatgccccctggttatctcttgccagagtgaacacccccagataagccagacccaatgaaaataaagttaaaaaaaaaacaacaaaccttgggtgtaattgctggtttaggttgcagcacttctctcgccaatgtgcatacttaacggagagatattgatattaaagggcaggagggaattaattttacttttatagtcatctattaagagcagaagatgatctgagtctcctttaaagggactcaaaaaagggggaagggaaagagaaagaaagggagggggaagggagaaatatgactgaaggggaacaaagatctttgcctgaagaaacaatgtaacactagacagaactataaagtctgggaatgtaagaacgcaggactctctcagcttcccccatttggaattctgtcccctgcacttcctgctgaaatcctgaccctgactacacagtggtattccaggaagaattcatgcaattattcggataattgtagagggagagagagaaagtatttctcttttattgtctgaccctctctgatgtctgtgcagaggaggaggggccaggggtgtatgggatgtagaggaaaaggagacagtagggtctcccaacatcaccctaagccctacaaaatggctattcctaaatcaaggaggccctaggcaggagcttatagattttggaacatactcaagaacgcacaagagatcgagtttgaatgcccctgatttagtttcattttccaggatatttgcttggctttactttgtcagcatagacctgcctcctctagtattgtaatcattacaagtaaggggataatagataattacaggggtatcaataatat

SEQ ID NO: 69686 - DNA, 1140 bp, Homo sapiens
ggaggaaggatcccgaactgagatccttgatccttttcctccagggtagcactggggatgaacagagagaaagaaggagaggaaaataattggtgtggggatatctgcggaggacttacctttttcctggacctcacagctcgttttcgcctcctctgggctcatggagacattttaaggcctaatcattgctttttaaattgaaattctaatggcaagggaagggaaggatgcacagaaaacaatgatggggaattctggttcaatctgatgctccaaaagcctctaattgttgtcacctccaccctcctcaactggaaaaatggcctctgggatctgcccccacctcccactttacctttctgattgagagcacctccgggatattagggacctgagggtctaagtcccgggtgggagccgccaggagcaggggtgttggtctgtggaactcccaggcctcagtgcctggtgctctcttaccctgtgttttcatcataaaaaacaaaggaagaggatttgattatttctggtgatgttaaatgatcctggctttcaaagcagctctgaccccaagatctaaggtgataagtgtctctgccatagacgtttaatctgggcaaagtgccacttatgttacaaaatgcctgggctcaacgggctggaggggtagccgggaagccccagggagggaacagcaggctctctttggcagtatctagagttcggtggatagtattttaaacagttgaaatggactggggaggccctttcttatgtcccctcagtctgggaaggggagctccagttagtgaggtggtttatgagctggacgcttccccctagtgtgggaaagatagagatagccagacctcaccctacaaaaatgtgcttcatgtctgtgacataaaattggcaggcactttggagatttagggacttgcagagagtggggcagggccagacaacctggtgaaagcagaggctgaggtgtgattcagggtgggtgggggtatctgagggagtaagcctgggaaggtatcacccaaaaccatttcctgagagaagccaaatacacacaatgcactccaatattgaaaaacaccagatgatctgcttggaagggatataaacaggcca

SEQ ID NO: 69687 - DNA, 1034 bp, Homo sapiens
cagagaatttcaggtgaaggccaggactcaaagcagatggaggggtcacaggcacccaccagataagatacaaataagccacctggagcgggcttgacaaggaagggattgggggccagggatggctcctgtacagggaggtattgatgctgtggccagaatccacaggctgagagggtgcagcctagggcaaacatctcagctgaagcgtccaggtagcctggacccagggctgggcagggaggctactccagaccatgggcatttttgccagtaaatgtctagctgacctcagtggccagggccttctttccttgaccgtagcagcaactgacagttgctagaggttttttgatttgttgaaaaactaagccatatcaacactagagaacattttaaactttatgccttacttttaaggggaggaatattactttccagaagtctctgttgggagaccccagcgtttcctagacatcaactctttgacattctttcttgcatttcttttttgtttcaaggaaatagggccgccagcagctccttgttgccgcctggctcacttttatggtggcccaggaataaactttggtggtcaaattcaagtgctcagtccagcagctgtctcctcacaggatacagcccctacccccatctcagtcctggctttgctgaatctgccttgggggattgggccccacatcaccctggagggccaggagggggaaggaagcagagccttgggtggaagtggagaaagcgggatctgagactcgagccctcatccacacctctgcaaggataggggtacctctcgcttccctcttgctggttcctatcactgtttgggcagcattttgccttcaataaactcgagtttaatgaggtcagtgtgaaccccattaaaagccatagtccatagttccccaccactataattaaaaatgctggccccatctcactctataaaaagggctagaggaaaaaggaaacacagcagatttttcttttcatggccccttaccaacagaagt

SEQ ID NO: 69688 - DNA, 1100 bp, Homo sapiens
agggctgagaaataggaaggaggcactaagatctggtcacagccccagggacagaggctgggggctttgactagggagtggccgctgggcctcccctgatgccacagcatccaccgctcctttccactgtctggttagtctcttctggagacccatacctggccccaccacccaccttacagtcctcaaaatcatccaaggataagaaccccaaacctagtcccccccaccatattcttcctggacccctacactaggcttcttttcagcgcactagctgaggctgagccactaagccaaagggccctgacatagaagatacatggctctcattccaatccttttctttggggtttgggatttgaaaatccacagtggatgtagctttcttcacattgattgacaataaaggcaggcatgaaatattcacccagggccactctctcatactaaatatttaacacaacattagagaaggtttttcccagacttcgccaggcaccggctgggcggctggcgcactgctcaccactcgtttatgactaatctgactccctagccaggggcagcacagcaagccagacaaagttgggacactggcttgcagctgggctgcctcacctttgggaaacttcagatactcttccgggagtctctctaaggactccagaaaggtagtcttgacacccagctctggccaggaaaagagtggacttcttcaaactcttgtgaacaggcggtgtctctgcgggttggaagggtaagagtccctgagatttaagggaaaggattcacttctctggggaaatcaggcagtggggaaagaagtcctcactcccaccctcctggtgctgctcacagagaggaggcaagacccccatacatgagagccctcctccttcccccaatcctgggggaaaaaagagcagcagctagaaaaaaatacaattaccccttcccagccaccaccctcgcccatcccaccgcccaccccaccccaaccctctctctcctcctttgctcgtgctgtggtatggagagaaggggagtgacgagagaaaaacgaatacaaatctgcaattgattttcataatgtttct

SEQ ID NO: 69689 - DNA, 1088 bp, Homo sapiens
ggtgggggagtagggggtgttagctgtggtgtctccttatttgacaactcaaccttttccacagagcccctgcagacacactatggggagctgtttcccttaaggaccctgcccctgagggaagagaggcagaaacaagatggggcaggaagttggaaagggtgtctgcatgatgccaatagccaggtgaaaacagagaaatcagcccactatctgcttagtttcaaatagaataaagggatccaattttgtagctttcatctgatgtaatggataatgagatgcaggatcagccttttgcagtgattcagtttaaagcccctgggaaggatctgtttccccctccccaattatcctgccacaaaaaagccttaagttccaccattaaagcacatggtgttaagtacagtcctctgcagatcacatcctttaaaatacaaaagcaccactgggatacttcatcaaacaaggatagaatcagaaaagtagtgcttagggggtatgcttagggagatgaggggccctgaagattaatctctagatacttctcagtttcacattgcctgatccttgtgggaaagctagattctgcctgaggaagtgggaactcagggactcccctagaaaccagatgcctgcaattatgagtatatttctagtcctgggaaatgggtggactctaagtggtgagggtagttatcacaccaaaaaatcacagaggctgccagtaaaacttaaatcagggggatggaaattctgataatatacgtgcatttgggtcagccactatagaaaccagtgtagaagtacttcatggggccccctgtatgtccagaggatataaaactattccagagggggaaaaatcccttccatttctatgattatctactgtatatctaacccataaggcatggtttgaaagtattaaaacctagcagatagggaaacacacagccagggttcagatctagtgatgtgaccttgggtgggtgacttaacctttctgagaatagatttcctcatcaaattcagtataaagcaactggcatatagtaatcttctagaaatggaaactattatagtta

SEQ ID NO: 69690 - DNA, 1002 bp, Homo sapiens
caaccaaatccagctttattacttactaactgtaagaccttgggcaagttgcttaatcttgctaagcctcagtgtcctcacttataacaggggagcagtaatacccacctcatgggattgttgtgaggatcaatgaggtgtacctggtgcagagcagtcgctcaccacctggaagctattgtaattagccttcccaggtctctgggctgtggctgtgcacttgcatttcattcttcagcgccgtgctttccagaacagtccattctggctgggcttttcttttttaggatgaccttaaaggtgctgaaaggatgccaccagtaaatgtttattgaaaacctactatgtgctcggcatagcccaggaactagtgacctatgcctgatggaaaggagatttggagtgggagatgtttggtggctatggcttatcctcaccaggtgccatgtgaagaggacagataatggaagtggggagggaaagggcccttcattaccaagaactgagatgagttcagtcctacttggtggttggtagatgactgacatggtctcttagggtcccttctgagcccaggaaatggtagtgggggccctggcaagcatggatccctcctactctgtggctgagggttgatggggcttctgtccatctcttttcccaggtgacagcggcatggacatatgccccaggctttcctgctggggtccatccatgagcctgcaggtgccctcatggagccccagccctgccctggaagcttggctgagagcttcctggaggaggagcttcggctcaatgctgagctgagccagctgcagttttcggagcctgtgggcatcatctacaatcccgtggagtatgcatgggagccacatcgcaactacgtgactcgctactgccagggccccaaggaagtactcttcctgggcatgaaccctggaccttttggcatggcccagactggggtaaagggtttggcttccccagtgggtggagtgg

SEQ ID NO: 69691 - DNA, 1023 bp, Homo sapiens
acacagatgctaggaatgtagaagctcacgaaaggggcaattgaggccctctaaggctgtgtatcctctgcctccaggcagtatcttcttcactcaaacagatggctggaacttcacttctgcagagctctgggcaatgaatcaacttagcatccactctcatgtgttctgagttagaataatctttgctctggactgtatcaccttcctgaaaatctgagaaatacttggattatttctgcatcctgaatgacttcaatttttaccctagtatggggagttggagggcctggaatcccaatgctttcttaattcccaagcctgttttaggtggtcccaggaagggaatgagaagggggtgtgtataaaagagggaagttgaggggatggcagtgcaggtagccgcaggtaaggattccccaatcctcattagagatctcaattgaataactgttgctatcttcaaagaagagatgggacagacagccccctttactccacaaggaaatggcaggtctgtgtgtatataagttggaaggctatattcatttgaatataactctctgaatacatttttgtcttcatttgaatatattaaatttcactgagtccaagttgagtcactttaatggaggggaagcaatggcctaaataattcaaggcggtagataatccccaaatcatttatgaatgtgattgaaaggcacttggaaggggctttggaaggtgctttgtggacttctctgggccaaaaggaagaaatcattaatggaggtaaatgaaaagctactcttagacctgtaccagaatagctgtacagaccccatgctattggaagagcaacaagcaggttggaattctgagggcacaaagagagtcgcagttatgtatggattgagagaagctaggaaacaataagctcacaactggcatcactcccgaattaaccaatataccacctcggaacagcccaggcactgggcaaaatccttaggtaagaatttaagtctggctttgttattc

SEQ ID NO: 69692 - DNA, 6162 bp, Homo sapiens
agtttaccccagctttcctaaggtacagtgaggggttggagggatctgtgtttggcccggggagcaattgtctctaccttaaggttcagttttgagggcataaaatactactttgcaatgtcatgagaacaccgttagatctgaaatgtggaaatggtttctcacaatttaaaggaaaaacccactttgcacccatgatcccatcattttggttgagattttagaataaaaaatatagtgttgagatccgtacttttgtaatcagaccaccaagcatgcctgtggcaaggcagagaggaaaggtctggagccagtgtattgcagtttcatgctacctttacctgctaatcataaaaattatgttttcaaaagtagatgatactagccttacacccaaaaacatgttctgaattagatgccccctcacccaatttttattaagctttctaaattccagccacattgctgtacatcaacattggtttcattcaacagacatttttttggcctgaagatacaaggttcagaaagaggccatccctgccctcaaataactttcatactggtgtatgatgaactgaccattaatagtttaagtgcttacaagctatgtttctgttcaaaaaaaaaatagtttggtataataaatgctataaaccaatacacatttctgacttgggggcagagacagactggctgatgttgtatagtttgtagccctggagtaagaagttgacattaatttcggcctatatgtggaaaagacctataacattgggtgaactgagccagctggccatagaacacaagaacatattccaggaaataaatatagctggagggttggaaatgctgttattactgagagagaaaacaggtgagttgggattgagaactcctgattttcatccctggtttagattcttggccaaagtagtggtagagttaatctttgcttgtggaaagcattaactatgttgcagattcagttgtgttacattattgtgggttctataacaacatattcctcatggacactttaccagagttgctcacacctttttcaatttctcatcccttttggaggaatgaacatgagacttaactgcctttaagcctaaaacggacatgctttccaatgacaagagattttctaaagagaagtcttggagcacatctgttaatacctgagcatctactctgagcagtgcagttttattcaatactggagagagggtgatttctttttttttgagacggagtcttgctctgtctcccaggctggagtgcagtggcgcaatctcggctcactgcaagctccacctcccgggttcacgccattctcctgcctcagcctcccgaggagctgggactacaggcgccggccaccacgcccggctaattttttgtatttttagtagagacggggtttcaccttgttagccaggatggtctcaatctcctgacctcatgatccacccacctcggcctcccagagtgctgggattacaggcgtgagccaccgccgggccgagagggtgatttctaagcagagaattgtatcagttatgtggaaacctttgccagaaatacatataccttgtatattaaatctgagtctcagatttaatcatcgaagcgtagctgggttaagaaacagtctgatcgtaaggatgttgtcgattctgacccatggatgaccacaagaaaaagatatttatttctgcctggataattgagagttgactaactttggaagtcagaattcccaggaattagagtaactgctctggaaagttaaagtgtgaagttttttagatagtttcataaaaacaattctggtttctttttgcttgtgctgactttcttggattttaatctacctcatcttgtctttttagagttacttcaacttgtcactttaacattgtgcttgactttggttgttttctaagatggaatttttcctgttcattgacagcttgttctcttgccttttcattctgatcctcatttcatctaacatcatctcatattgctcctctgtcaagagaaatgttttaaaatagtttaaagtcttgttttatgggaagaaagtgatcctccaatgctatttgtttctgaggtcagtaagagaaggagttaaaacaaggcagtggggaagggaatgaatcctgcactggaggcaaaagctgacaaggaaagagccattaattaagacaatttcaaagtcaactgattgtgatcattaatgtcacaatagatcaaaacctaattatcacagcctaggtaagagccatcagtattaatcggaaaatctaataggaaactattatcaagaaattaggccaaattgaatgcagtgaactttttatcttggcattctctatttttttgtgatgtcccctggcattggcaggtgtgaccctaacagtcgattcaaggccaagtggtcagtttgtcagccttttttaagggatttctttttatttttaggaattccaaacagagttaacctaaactgtcattgccaaaagatcagtcttaaactttcttagcacctgtacctgtttaatgtgatcagctatcagtgaggaaaaaaaaaaaaatctatttaggtcttggaatggttcctgtacctagagtatccatattgaaccttttttttttttttttttttttttttttgagatggaaacttgctcttttgcccaggctggagtgcagtggcgtgatcttggctcactgcaacctccgcctcccgggttcaagcagttctctgcctcagcctcctgagcagctgggattataggcgcctgccaccatgcccggctaatttttgtatttttagtagagacagggttcaccatcttggccgtgctggtcttgaactcctgaccttgtgatccgcctgcctcggccactcaaagtgctgggattgcaggcgtgagccagcacccggccacagtatctttattacagctcactgcagcctcaatctcctgggctcaaatgatcctcctgcctcagcctcccaagcagctgggactacaggcgcacaccacggtgtctggctaattttattatttaaaaaatgttttgtagagacagtctccctgtgttgcccaggctggtctccaactcgtgagctcaagtgatccacgtgcctcagcctcccaaagtgctgggattacaagcataagccaccgcacccggcccctagtgaacattttactgtatgtgttgataaatcatcttttgagtttctgttgtatgtggggacttcctacactggctgctgtgaagaggtatggaagaaaggagaggctttctgcctagaaattctttgagaacacctgaaaagacagtttaatcatgtcacaacactcttaaggctcaagtcagtgttctggtttccggtagctttaggattggattctaaacgagggctggtggtgagtttggtgtttgtctcgtgtcaccctcacccctcacctcctcagtttaggataagagacataatgatttctaccagaatccaaagtaaatccaaagggggagaaaagacataactgttttttcttctaccttttttttgttaaagagttacatctctcacaggaggaaagaattcaagagtctatatgattagttacagagaatattttcatcccctctccctgaatagaaaagcaggggtcaccatttgtatccttacccttgaggtgtttttgaagatgctgtaactcttgaagttgagctgaggcagaaaggttggaaaaatgcagccctctgggtattgtggggagggatgtgatgtagtaagagggtgttttgtggtgctaggattcccacgccaccaacttgcagctttataagagcgctaccaagaaccaccactggggaaaaggttcttattcattgtttctgttggaatgtgatcttgctttctggattttaggaattcaggttactcagtataaaactctgagaaatcagtgtgacttagtccttcacctcctaagataaagtgaatatttctttacaaaataattcatgtccttaatgttaaagatgtaattttattttcaaaacatctataacatgactttcagaagcagttcatttttccaagattcctcacattatactagataaataataggccctcagttaatacccttcagttattgaattaatctagtttgtggaatgaggtgtatcctgccaacttccctctgctcccaagtacactctgagaggtaaaatgctctgggaaatggaacaagaatcgagtggatgctgactctgtgtgcccacctcctcaactgattgataatggttgaccttgggcaagtcacttctttcaatgcctcagttccccatctgtcaaatggggttaataatactgacctacctcacaggggtgttgttgtgaggcattgtaaatcaaagttaatagaatacttcagggtcctctgtggaggatgtcttgagccagagtttaagcctgacacacaggctttggtcctcactgagctgtctccaagactggaactacttagtgactcggcaaattttctgccccccacccctcatcaaagctgctagttcagatgttgacagtgttttcatgaatgttggaatcttactagtccagacttacttaggatgttgttggggaaggcacttgggattttctgtgtcttgcattcacagagggaggccatttcagattcaagagcattggattagggaatcgtgaggcagggatgctactgcgtatttctctctgcaggttggggattaaagttcctttccccatgggtttgaagcagactcagactgtctcaggatcaaagcaaccctcaatggttttgatttatgtcattgcttaccactccccaaccaatcccaggacagctgggtcactgtacccctttgtggtatctgtacctgggcctctccttcctcatagggaccagctgattgaataaatgtgaccaccttatttccaccccccacccccaaaagctacattggaattatttttcctagaaatgtgtataacactcagaattgggcattgatccttaaagcttcatcccattcaccgtattcaacatctgtcatctcttagtgtctgcagtctgaacctaaccttgaccttttttccctctggtttgagaaaactttggacactatttctacttggccaggtgtgggctcaagagccttactctttccatctcagtttaggggcgcagccagctcctcttcccaatagggctctttctgctttccctctccttggccctagatttgtaatccatgaaaaagcacaaggtcctggctccttgcggtcacattctggttctctgtgttttgtggactctgctctcactgttcacccagcactagcagtaccagatggttctgtggagtcctggggaatggagagagcacagtctgactccctgccaagtagccaggagttgacttgcccatggtccgctggctttcccaccacttcctacaggatgggatctaagagactcaagagctgggtttctttcagcactctgtactgtcccaaatagcaaacaaatcactttgtagccagatttctgaatggaaatgagaaattgaattctccatggacttttaggtttatgggggagttttagctgtgtttcttggttttatttcagccaaacatgtctgcttttgattttttttttaaagtataagtggtctatatatatgttcaccttttaaatgtaaatgtttaaaaagtaagcatttatgtgtttccataactgacatctgatgcagacctcattctctccccctcttctaccctcctcttttcccccttttcatactcttgtattggttctaataaatggttgcttttcaaatatggattctgagtggtggtttaaagatctgggtcttatgccccttctttaatttgggccctggagtgtcagctcaatttctgaaagagcaacaagacttggagaacatgggcttcttttctaaggattattggtctctgactttctgcaaataaccacaggttggcgcaagcctgaggaaataagataatgcgtatcctgtttcctactcttatttccttaactggttcagtgtgtacct

SEQ ID NO: 69693 - DNA, 3317 bp, Homo sapiens
gagccaggatggtctcgatctcctgacctcgtgatccacccgcctcggcctcccaaagtgctgggattacaggtgtgagccaccgtgcccggcccctgaatgtaggtttgattgggttcactcacatgctcatattcacaaataaaaattttggaagcagattaatattatttattattcatctttttaacctaagcccaccatggtttacatctaaattctagctacagacatctgtttctgtataatatattagctattaatccatttacttacatttcttcttgaaaatattgaaagggtccttttcaccttgaaaccaaggtgaggaggaaatcaagtcaactaaatccatataatgacataaacgtatgtctggacagattctttcactcttcctctccttttaagtctcatattctttctctccaggaaagacacagatgaagctgacctggttcttgcaaaagaagctaatgtgaaatgtccacaaattgtgatagcattttatgaagagagactgacatggcatgcatatcctgaggatgcggaaaacaaagagaaagaaacagcaaagagctaaaggaggggatggtctctgtcatttctctttgtacataatacattcacctccctgcctcctctcctttctacccacccctttctatcctaaacacatccataaaaaatgtgcttatcactgtgctccacaggagaaatgttggtattggttctcttgtaacataactgatggtctgattaatgataagtgtctctctgtgaagaccaggcatttacatactgagtgtaatacccacaatttttttttcctttgccctgatctcttccttctgcttccctgtgacctcaagatgagtttcaactttttaatcaccttagagtcttgatcttttcagggttggtcgctttttaggttgggggattttgttacaatgatgttgaattttggtttcttgctttggttcttagaacatgttgctgactagctggcctttgttctgacatgttgagatggaaaggatgttgcccatctgttaaaaagccaatagcaactgcctacctgttggggctttcccaaccttgttcagctctacccaggagaatacagggtttctggtgtggtcttctgggccaccctctgttgttcatcctcactcatcctcccagaattactccatcctttggaagatttgaaattttacactgaaatctgtcaagacactctttttagccccaggactttcggtattgcttttagcactccccacttctgcttctgtaaagtgatatcaatttgtgataaaatgacaagattattaactgtgcagatttgtagctatagtacatgaggatgatggggtagggtacaattgtctttattatcatatatggtatgtatgtatgatttctttccattcctcatatttagactgtatatttatgtaggtgtgagtgattgcctggtgcttgcttgtgccaaggtgctaggcaccctccaaccctgccaacttttgtggcctcccaaagcattcctgttaccaaagaggcttcaaacctgaccctcacttctcagtggacccgagtttcccttccatgccattattttcagtggggaagttttagaggtgagctgttggccacaatatcaattttaagtgttcatagcagttatgtctcctgcattcttggctcctggatttaccaccaagagtccccaaaatattaatgctcttccctttttctaccctcaaacttatagttgtatcttattttttaaaatgaattttcatggccaggcacagtggctaccgcctgtaatcccagcactttgggaggctgaggcaggagaattgcttgaagccagaagtttgagaccagcctgggcaatgtagtgagaccccctgtctctaaaaaatataaataaaaataaaggcatgttcctgaaagactgtcaccttggaaagtgacaggccctggcattagcatgttgacacacccttttcttcttactcagcaaaatacttcgttttggtttcttcttgtgttgctattgagaaatttgtctgatcatatccttctgcctttgtcccccaagaaatgccctactttatccttttctttttgtagttgaggagggctagagaatcacaattaaaagtaaggaaatagcagggttttgaggatccttgtcccagccccaaagctgaggaaataagaataaatgcttaatatagccttaattctagagcgcaccagccatgaggctgcttttcttgttgtttttgatttttaaaacatacagctgtctggccaggagcatctaccatttctagattattcagagtaatgaggggaatggatggattgctccagtccacagatgagccacataatatgcaaatcatatacccattcatagcatttgttaacattgcttccctgctcagctgctgattgaattctgtgtgcttatataaattatgtcaaaaattatactgcataattgaggtgacagctgttgctgcagtgacatgacagactggaacaatgaagcttttggtttaagtcagccaggaaaatccttctgaatggtaatgtgattgggcaagagctcataaaccatacctcaagtgggtgggagttttatctctatattccttctctctctgaaggaattaaaggcctagatcaagtgctggataattgacaattgcttgtacttaatctgatcggtatctaaaagaaggaaaggatggtcaggaaacatttatcataaatgtagccaaggatatcaattagggtagacaagaataggacaaaaataggccagagctcctgaggaggtgatatgggtctcttgatttgcagaaaatgacagcctatccaagtggcccagtgtatgcctcccagtagcagtgggcatgtaaactgcagcgaccttatttttaaaaccaaaaacctagtatgtggacaaagaacatgacaatatttggtactgagattggttctgagaaacctggggcatgtggctgctgtggttataggtaatatttaagacattcataaaaatctgatattcttttaccgaaataaccccagtatcatctactacttaccatctgttaatagactttactctgtcttttttgtcttcggtttattgtactgagtgccgccaaaacaacttttgttctcttcctgcctacctgcagctggttctataggaatgtagggagccagaggccagtattgatttcagcccttagcacaaaggaaatcagatgcctgcttccagc

SEQ ID NO: 69694 - DNA, 2060 bp, Homo sapiens
aaaaaaaaaaattacctggcttgtataaaattttgctttttggctctcatcagtgttactacacatggatttgaacctgtgctccttgtctagattgtattactacatttagaccaagtttcaatactcatctcatgaattatcaaattttttctctctcttaagagacaggttctcactatgttgcccaccatggagcacagtggcgtgatcatagctcactgcaggcttgaactcctgggcccaagggatcctcccacctcagcctcctgagtcggagtagcacacttcaagtgtgcatcactgtgcccagctaatttgcagagacagttgcccatgttggtctccaattcctagtctcaagcaatcctcctatgtcagcctcccaaagtgctgggattacaggcatgagtcactgcaccaggccagttttttgtttttgttttcttttttgtttgtttttgttttcagtcacagtccggttctaccttctaatgctaacagtcatctacatccagaggggataggcactgaccagggccttctctctaaccaagcatataggtattggtgtttatgatctctgaaattttgctatttaatagtattggccttacataattcttacctctattcttccataaacacaggtgactgtgaaatgtgtcaaaattattgtttagtgttaaggtaaactaaaagtctaaaaaaataaagattgagagagaggtagtatatttgaagtttgtaaaatgaaaagatacagttagggtaaacatggtattctttaccatttcagaagcttatttacaatattaaggagattccaagtgagtgggattagaggagttcctagatgttgactccagagtatctttcttttcgccccttttcttttttttttttttttttttgagacggagtcttgctatgttgcccaggctggaatgcagtggtgcggtctcagctcactgcaacctccgcatcccgggttcaagcaattctactgcctcagcctcccgagtagctggggttacaggcacctgccaccatgcctggctaattttttgtatttttagtagagatggggtttcaccatgttggccaggctggtcttgaactcctgagcttgtgattcgcctgccttggcctcccaaagtgctgagattacaggcgtgagccaccatgcctctgactccggagtatcttataggacattagagacttttagggttcaccaccagtcttctggaggaattccaggaaagataatcacatcttacaaaaatatctcttgacatcactgtcacttcattgtcactgtcagtacttagtattaagttctaaaaatttttctgaattggtgaaagaaatgatatcaggagatattaacttaggttatgttttgttgagcctagaagcagggagtttctttactctttccacaagctgtaacctttctttatcttctatttatagcagagcaatgatatcgctcggggctttgagagaggactggaaccagaaaagatcattggggcaacagattcctgtggtgatttaatgttcctaatgaaatggtgagagagatttggcttcgctttacaattgtgtttctttgccagtgacttgaatttgtgtggaagatagggtggcaagactgcatattcccaaaccatgaattttgaatgtcagagatctttctttttttgagacagtgtttcgccctttgttgcccatgctggagtacagtggtgcgatctcactcagctcactgcagcctccgcctcctgggttcaagtgattctcctgtctcagcctcccgagtacctgggatgacaggtgcccgccaccatgcctggctaatttttgtatttttattatttatttatttatttatttatttttgagacaaagtctcttgttgcccaggctggagtgcaatggtgcgatctcggcttaccgcaacctccgcctccgggttcaagcgatactcctgcctcagcctcccgagtagctgggattacaggcatgtgccaccatacctggctacttttata

SEQ ID NO: 69695 - DNA, 1035 bp, Homo sapiens
tcactgcaccctccatctcctgggttcaagtgattcttctgcctcagccttccagagtagttgggattacagacatgcaccaccatgcccagctaattttgtatttttagtagagagggtgtttctccatgttggtcagggtggtcttgaactccctaactcaggtgatccacctgccttggcctcccaaagtgttgggattacaggtgtgagccaccatgcctggctcaattaacaattttaaaatgtacagttcagtggcatttatattctcttgatctattatttctacatacttggcgtacaaaattaatttttgtcttttgaatcttcttcagtttgggaagtgtatttatgaaattttggtttgatttagttgctttaatccttctgatctttagctctcaagtaagtagcataagcactgttattgcctctctctcttttcatctgtgtgtgggcgcataaatacacacactctaccacctcctcccgcccccagcttccattccttttatttatttcaaggttatgaagccttttgtggtgaaggatgtatcatacactttacatttcataaaagcgtaagtctacttcggaatcttccagccttccagagtagctgccacaatcatccctatgtatcttcattctaattagatttatacctttctagagcattagttctcaatgctacacattataatcacctggggggtacgttaaaaaaaaaaaaaaatctccagtgcctaagatgcaccccagaccagtaaaattagaattttttttttttcttttttttttgagacatagtctcactctgttgcccaggctggagtgcagtggcacaatctcactgcaacctctgcctcctgggttcaagcgattctcctgcttcaccctccctagtagctgggactacaggcacatgccaccatgcctggctaattttttgtatttttagtagagatggggtttcaccgtgttagccagaatggtctcaatctcctgacctcgttatccgcccatcttggc

SEQ ID NO: 69696 - DNA, 1182 bp, Homo sapiens
tgagccaccgtgcccggctgatctgctttctgtctctataaatttgtctttcccagacatttcatgtaaatggaattagtatgtagtatcttgtgtcttatttctttcacttagtataatgtttttggggttcttccaagttgtagcatgttttaatattttgcttattgttgttggataatattcctttgtatggatataccacattttgtttttccatgtcaccatccattgatgaacatttgaatttgttttctgtttttggctattaaaatgctgctgtaaacaattgtaaataagtctttgtgtgggcttttttttttttttcatttttcctgggtagaaatctaggatcaaatttgttatcttctttaaagcatagggtttctctgtcctttttgtccgaatgtcctctttgaaataaggcattggatttttttcctcattctttaccccccccttttttttttaattttcccatttttcttacccagggagcacaatacttgggaacctgagaaaaacttggattgccctgagctaatttctgaatttatgaaaaagtataagaagatgaaggagggtgaaaataataaacccagggagaagtcagaaagtaacaagaggaaatccaatttctcaaacagtgccgatgacatcaaatctaaaaaaaagagagaggtaagcttcctttcccttttccccaaaaactattcttttgccaccaaaataataataataaataaaagtatcatattttggttatttctattgtaaggatggacctataaggtaaattgttgaacaaaagagcttccagggaggtatgttgattacagctccctctcctggctaagtgagaaatgtaatttgtggccactggattgtattaagggggcaaaattaaatctttgtaaaatgttaaaccactcctctgccttctccataagtagaagacttagttatcttagagaaggaggatcattggtgaattttttaagaatagaaaggggctttgaaatgttttgttttgttttgagacagagtcttgctctgttgcccaggctggagtgcagtggctggatctcagctcactgcaatctccaactcccggctttaagcgattctcatgcctcagtagtagctgggattataggcacatgccaccacacctggctgatt

SEQ ID NO: 69697 - DNA, 2417 bp, Homo sapiens
cacaatgcttaactgcatgcatctaacatggggctggttttaaccccagcgctctgacctaaactgctcagctcccggaaattccaaggtgagtggtggtgggggtggggtactctccctggaatatgacatttcctgtctctggtgaggttggaggctgttttattttaaataaagcacataagatattttcttgaagcttaggactcttctaaattcatggaaaaattattttaacccccccgcacctacattttgctactacttcctcttccaaatagagtattttaataaaaacttagtcttatagggcagtaatgggtataggcagttttttaggtgggcagacctatagctaataagttctggagatatggtctccaactatatattcttgtaataatttttaaaattttgctaatttgaagtgaattgataattgccactttttatgtgacttgaacatcattctgaggttagtagtgggccctccctgacccagtggttttctggtcagggtggaaatatttagagggtgctgataaacatctttaaagattacaggaaaataataatggagttcagctaagaaaacaatttctgctactctgtaatccagactgtaggcaccatttagcatggttaaggaagaattcttaaaaatgattatggaacaacaacatgggaatttttaaaactagattctctgttgagtaccccctggtgtgcatatttctgagcttaactcaatttccatttgtgtttccttgcttcagctttccttgggcctatgaatggttcctctgtattttgaggaggcttcatgttgatgctgagtctggggccagacttctttttcctcctcctcttcctttggccctgagtcaacttcagttaagagggagaggtaccttcttaactatttgggttagttgcatcttgggaattactgaataatctagtgactaattttgaattttaggactgaaaaattttttctcctttctgcctccctcccatccccaaattagctttctaaaaaggaagattagtgtgtttgagatgtcagccttgcttttgtgagctgatggatgctctgaagggacaagctcaatttgtttaagggaaatgtaccaagtcactgaaaatgtggtgaaaggtgcctaagcaagccttttttgtgtgctgctaagagactgggcaagatgctcagagcacagaaaactcatattttagtggcttttcttttttcatttttataaagacgcttattcaccttggagaaaaaggttttaattttatcttggttcatttaactaaagattttgcacatttctgtttgagttcctggcttgtaaacagttacaaacatagccaggaataacataccacactacttgtcttttggaatctgaaatagaagagttaaacagttgtgccttctaataattttggtctctttagccgaagaggaggttgtagttgaggaagtgaagactgattcatttttaaattaaactcttaggactcatctgtagaatgatttgagactcaagagcagggcacatggcaactcagtgttatccccttttcatcccatcaagaaaagacaaagtttttaactcctcacatggattctaaccattttgtcctttgcctttgcagggacctggtggccttagtctttcaggtggaacggtgtgcgacatgggaaagaaaaccaagcggacagctgacagttcttcttcagaggatgaggaggagtatgttgtggagaaggtgctagacaggcgcgtggttaagggacaagtggaatatctactgaagtggaaaggcttttctgagtaagttccttttttcccccaggcgttgggactctgtagagatagatacctttggtttacttccttaggaatcacaagcatttttgtctttttcttccccctcctgcactcttcctaagagttagaagacacagcagtaaagaaaacaaaatctctccgcttgtggagcttacgttctaatgatactgcttttgaaaggcagtataatgaattggttaggagcacagactcgagagtcagattgcttgggtctagattctaactccaccacttatgatacaaactggatggccttggctaatttccttaatcattttatctcctcagtgaaataaggataagcagtagtgcttataaggccaggcgtggtggcttgcactctaatctcagcactttgggaggctgaggcgggtggatcacctgaggtcaggagtttgagaccagcctggccaacatggtgaaactccatctactaaaaataaaaaaattaagtgtggtggcaggtccctgtaatcccagctactccagaggctgaggtaggagaatcacttgaacctaggaggcggaggttgc

SEQ ID NO: 69698 - DNA, 1050 bp, Homo sapiens
atccacctgccttggcttcccaaagtgctgggattacaggcgagagccgctgtgccggcctacctcttgtttttctgggttgccctagcttgcttgtgatgccctctctgtaattgctgaggactgataagttttttgtttggtttttttttgagacggagttttgcccttgttgtccaggctggagtgcaatggcttgatctcggctcactgcaacctccatcttctgggttcaagtgattctcctgcctcagcctcccaagtagctgagataacaggtgcctgccaccacacctggctaatttttgtatttttagtagagacagggtttcaccatgttggccaggttggtctggaactcctgacctcaggagatctgcccgcctcggcctaccaaagtgctgggattacaggcgtgagccaccgcgcccagcctcttttctcatctcaatgggccttaggtgctgtaatctatagttattggtagctttaccagatagttcctatgtatatttaagagagaaggctgagagctgttatgcctgaaagactccagaaatttgagaagctactcaccctttcccttggagatttccacaaggataaggttgtgttcagaggctcatcttcttttcctctgtcatggtattgggattctatcttaatcactccatcatcctgccagccatgtctcatttctcatgctggaaagctccctcctcctaagctcagtgtgaaccaccagtcttgatgctttatctggtctaggctctagcccttaaattgtttgactggctttgtgtttcatttgaccctaatactccgggtcacactgtctaaaagagaattatgtcccctccgatgtctgagtgcatttctcatttcttactgctgctcctgagcagatctgtaacttcaaggttaagataagacacattccatcagaactatgtcgtcatccttgccagcttctgatctgtgactgtctaggagatttacaagacaattgcatgccatcctttaaagaatattatggttgtactctgactc

SEQ ID NO: 69699 - DNA, 1811 bp, Homo sapiens
gaattttctttccagtagtagtagttcatcaaaattaaacactgacagatttttttctacctgaaactaggtcatagagtaaaaattttcacttgcagtcttactcttcagactcactgaatgcctgttccatcctgtttcattgctaggaaggacactagataaagccatgagcttgagatggtgtacttgaaaggaccgtttcaagatcaggttttataacacactcattatttatttcttctgtggagaggagaaaccaaattggattcaagtatttttctgatagtaatctatgtttcttagaataaagcaagttcatatctgagccagagggcataattatgtcagaataaaatataattatgtcggaataaaatgccctgtactaaagaggtcaactaacaggctgggaaatcttaagttttgtttttaagacaaatccttgaactctctgtgcctcgtttctcatccctaaatctgtgcaactcacctcacagggagttgtggagggtaatatactgctaatttgttcagtgtttcacaacaataaattatgcctaagatctgataaaacatagcaaacctcatttatgtaagtagagacaagcatggataagacttacagataataaagaaaattcattaaaatttttttaacttccttgattattaaacatttttccttctgtttcctatatattttccaaagtattttcctattgtttttccataatagacttatgagatagggcaaataacaaacaccaggttatataataaatgaataaattcatcaagcggacataacaatcctaaatgtcctaaaagctaataataaagcttcaacatacacaaaggaaaacagaaatgaagtaacaagccaggtgcagtggctcacgcctgtaatcccagcactttgggaggctgaggtgggtggattacctgaggtcaggagttccagatcagcctggccaacatggtgaaaccctgtctactaaaaatacaaaaattatctgggcatggtggcgtgcgcctgtaatcccagctacttgggaggctgaggcaggagaatcgcttgaacctgggaggtggaggttgcagtgagcggagatcgcgccactgcactccagcctgggtgacagagcaagactccgtctcaaaaaaagaaaagaaaaaggaaataacagacatctgcaattatatttggaaatttcagtgcctctcagtaattgataaaacaggtagatgaaatcagtaaggaaacggaagacttgaacaacactaccaacaacctgatataattgacatttatagaatagtacaagcaacagcagaatacatgtgcttttcaggtgcacatggaacttttacacagacagtttaccttctgggtcaataagtctcaaattcaaaaggattcaatcataaaggttttttaaaaaaatttaaacggggtcttgttctgtcacccaagctggagtgcagtgacacaatcaactcactgcagcctgaaactcctgggctcaagtgatcctcctgcctcagccttctgaaaagctgggaccactggcatgtgccaccatgctcagccacccacccttttttctttttttgtagagacagggtctcgttatgttgcccggattggtgtcagacccctgggctcaagtgatcctctcatctcagcttcccaaagtgctgggattacaggcatgagccactgtgcttggccaaggtatgtttatttcctgatcatagtgcaattaaataaaaaatcagtaacaaagacatcaagaaaaatccctaaa

SEQ ID NO: 69700 - DNA, 1040 bp, Homo sapiens
ttgctcctgtattcctcgacttgagcatttttcccccgccccctcaccacttgaggtttggggaacaggagttgtttttttttgtttgtttgtttttaaataatactttcagaagtcgcttctttaggaagactgttaaaatgttagaacgaatgggagaaatctctatgtactgtcatggaaaggcgttcaagaaatatctccttcctgatagtgcatatttctactgacaaatatgtttgtaggtccacagaaaagttttggaaagctacacaccaaagtgtcaatcctagggacacagtaggatcgaggcagattagatctttaatgtttaaaactttgcaaggttaataatttgtgattaaaattaaataaaaaatgaagtcgattgttttgtgtttctagtcataatcacatacttacaaccccttttctgttttatgtaatccatgtgcccagtgcttttattttagtctctttctcccgggaactttcatatatttcttttctttacaccattgaagatatcctaaagtccctctttttgctgttcctttgaggatatctgactttggaataaaaaagaaacaaagagggtaatatttagggttctggggacagaagattcatccatcacctggattattccttgccttttaattagatttccttcgaagtgtgttttacatgcagtctatctccttttggtaatgcccactctgcttattccaggatcttttggagaaataaataaattttgataacattggctgtatcagagtcttactgctttattcaataatttattcaggatcaagggaaaatatttaaatactgaaaatcaactacctatgaaatacacttataattagagacctttccgactttataccaaagacagacgattttaatagcagtttatgaacagaggagagatttccatgttctctggcactagcaaaaggacaaacctataatttatacctggctgtaaacctatttgtaggtatgctagtaatggagttgctgagcttctgaga

SEQ ID NO: 69701 - DNA, 6699 bp, Homo sapiens
accaatggactccaaggggtggagacggcgtagaacgaccgaaggaatgacgttacacagcaatgtggcaccacaggccaatagcagggggaagcgatttcaagtatccaatcagagctgttccagggcggagtctaccaatgccgaaagcgaggaggcggggtaaaaaagagagggcgaaggtaggctggcagatacgttcgtcagcttgctcctttctgcccgtggacgccgccgaagaagcatcgttaaagtctctcttcaccctgccgtcatgtctaagtcagaggtgagttaggcgcgctttcccacttgaattttttcctctccctttcctgaatcggtaagatgctgctgggtttcgttccttgcaccagcccattctacagttccttcggtcgctgccacggcctacccctcccaaagttcaagtcgccattttgtcctcttgatcgccatgaggccgctctccgccaaccatgagttatcatgcgggactcgttactcgtagcaaaattcttaggcacacaggatctttgtctttttttaaaccttgccttggtgagcgagttttctaaagagcgattagtcccattgtggagatgcacccctaccgcccaagcctttgttgcgcgtgcgtcggaaggcgactagggacgcatgcgcttgcgatttcctagcactcccaactccagcatacggcctcccttgataggcagaagcacgtgtcttgttgcgacctgaacgaacaataagtgctaggtacacagttggtgtctagtttttcttttcctcgatggaaattgtttcgtgttgtagcccatttaacacttccccctccccccactctagtctcctaaagagcccgaacagctgaggaagctcttcattggagggttgagctttgaaacaactgatgagagcctgaggagccattttgagcaatggggaacgctcacggactgtgtggtaagatttggaagggacaaagcagtaaaacagccgatttccttggcttatcttggtgcagtcttctccgaatgcttatgaaagtagttaatagcattatagttagagctttgttggcaaaggaacgtcctgctttgattttaaaagctacctcttaaatctagggtagtgggaaactggacgactttttataaaaggctggtgtaaagtttcctattgccctattcaaagttaaaatgacaaaagcttttgcggtcagactttgtgttacataaattaacactgttctcaggtaatgagagatccaaacaccaagcgctccaggggctttgggtttgtcacatatgccactgtggaggaggtggatgcagctatgaatgcaaggccacacaaggtggatggaagagttgtggaaccaaagagagctgtctccagagaagtgagtgggttttttttcttcttcttcttaaacttacttggatatgtgctgctatggacttaagattcgggagttttctaaacttaccaaaattttttattcgagtataggctttgctaatctaaacctatggtttttctcctattaggattctcaaagaccaggtgcccacttaactgtgaaaaagatatttgttggtggcattaaagaagacactgaagaacatcacctaagagattattttgaacagtatggaaaaattgaagtgattgaaatcatgactgaccgaggcagtggcaagaaaaggggctttgcctttgtaacctttgacgaccatgactccgtggataagattgtcagtaagtatcagatagtggcatttagtaagggttccacaatctgtatggcattctaaaccctgataccatgttgtatctatgttttttttttagttcagaaataccatactgtgaatggccacaactgtgaagttagaaaagccctgtcaaagcaagagatggctagtgcttcatccagccaaagaggtatgcttgttgcttaattaaaccttaaaggtaactttgagttactccagtatgaatgatttaatgcttaaacttcatgtcttaaggtcgaagtggttctggaaactttggtggtggtcgtggaggtggtttcggtgggaatgacaacttcggtcgtggaggaaacttcagtggtcgtggtatgtatggtttatctacatgtagttctgacttctcaccatctttgctatgaagattttacagtacgggaactgcattcagaatgtcactttaagtccaagtcatacttaaaacttgaaactttttcttacaggtggctttggtggcagccgtggtggtggtggatatggtggcagtggggatggctataatggatttggtaatgatggtaagttttttaggaataagtagagaaaaattcctggcaacctggatctttagaataggttagtagagactaaaattctggtgcatgtcaaactcaactttgcccataacacgcatgctgtgagcaggccttcagccgttacacttgcacaagttttcattgtcaaatacttttgtcttattgagaagaattgtattcttgtaggtggttatggaggaggcggccctggttactctggaggaagcagaggctatggaagtggtggacagggttatggaaaccagggcagtggctatggcgggagtggcagctatgacagctataacaacggaggcggaggcggctttggcggtggtagtggtaggtatccagtgatccaagtacttggtgtgacagctagattagccttttagagcttgggttctggtgctgttgaagcattgtgtggtacactgcatggtatattaaaaacaaatgggcttgctatgctacctcctcctagctttaagctggggccgcctcactcccaaatagtagagataagtggatagtgttgtctttgagttagattagtatcatagaaggatttagtattttaactcctttgggaccttaggcgcttagttgatgtatccaagatacttctgcttgctgtggccctggatccgtgaaggccttcaaggctgaagggtatgcttgtgccactctgaaaatctctttattttatgtcatggtgagttaggccagttttctttgtattactggattattcaactgaatgcctttcccagagaatgaaatgcaaagattggagtcaccatagtttgggagaaaggaaggctgataactcaaccttattttattctgactgctaaacagaattggaaactaacatcatcctcaggtaacagataaaggccctctttcccattcataggaagcaattttggaggtggtggaagctacaatgattttgggaattacaacaatcagtcttcaaattttggacccatgaagggaggaaattttggaggcagaagctctggcccctatggcggtggaggccaatactttgcaaaaccacgaaaccaaggtatggtatctatgtaattttggataatgtcaaaagagtgtctgtagctactgctgggaagaaagccctttaactgctatgtctgggcagcaaaacgtttatagtttagaaccttcagaaagtgataatttgatcacaaattagaaaaatcatgggacctctttaccacctcccttgtagtagggccatttttaaatggccagacacttgaatttaacttttattatcccaaatatgaaaacattactgttggcactttgaaactttaaaagaaaaattgtacttttcaggtggctatggcggttccagcagcagcagtagctatggcagtggcagaagattttaattaggtaagtaagcacctttttgtgtgttgacataattttttaaattgctgatgaacccaataaccctaatgtagctgagcagtgcaacatagttaacattataattgcagtaattgtggatataaagttaatattcagatcagcaaaatttgtgggaaacaaacttgatattggattgtagccttgagtcttaatatgtttagattaacaactttattccatattgttcaacaggaaacaaagcttagcaggagaggagagccagagaagtgacagggaagctacaggttacaacagatttgtgaactcagccaagcacagtggtggcagggcctagctgctacaaagaagacatgttttagacaaatactcatgtgtatgggcaaaaaactcgaggactgtatttgtgactaattgtataacaggttattttagtttctgttctgtggaaagtgtaaagcattccaacaaagggttttaatgtagatttttttttttgcaccccatgctgttgattgctaaatgtaacagtctgatcgtgacgctgaataaatgtcttttttttaatgtgctgtgtaaagttagtctactcttaagccatcttggtaaatttccccaacagtgtgaagttagaattccttcagggtgatgccaggttctatttggaatttatatacaacctgcttgggtggagaagccattgtcttcggaaaccttggtgtagttgaactgatagttactgttgtgacctgaagttcaccattaaaagggattacccaagcaaaatcatggaatggttataaaagtgattgttggcacatcctatgcaatatatctaaattgaataatggtaccagataaaattatagatgggaatgaagcttgtgtatccattatcatgtgtaatcaataaacgatttaattctcttgaatgaaatgacaactgtatggatttgggactggcagagatttggactttccctacccactccccctgataataatgttgaatgcttctatcacaattcaagttcaaagctctgccagggaatagaaactagctgctggctaatgccgctccataaatccgcagatttgaagtgtctgggaggccttttaaaaataactaatatcagaaagcattttaatgaacgtaaagataggcttacattaaaggaaaactgcagtttgactgggttctggttgggtgggccttcagaggttctatcagttaactatactaattaatttggagattcaaaccataccaatagaaactaaatttttctacataatttcatgttaactgcagtttccctttatggcacaaggggtcacacaacctacctaaaatgttaattgtatagaaaatgatttctaaacctttaacagttaatatccaataatgtgttatttgtacatagattcttttgagccttacctttggtgctctctcaatttcagtgctattgtacctagtagcatagagatttgtctatcaataggactgtatattccatcccatgggtgtgttggaagtttggggaggaggagggtggtgggaggtgggtgggaggtggtggtgggtgggaaagcatgggtgatagttccatgatactggctgagtttgcaatagcaggtggaaccctaactattgagggagtttgcagatacctcaggattcgtgacaatgcctttaaagatccaggagagatgttcagctactaggaactgctagcaagtatagcgcgaatggctccgagctcagacactctacagctgagagtagacacttgtggtatgtggagtacagataagccaggggcaggccacggcacgctccatgaaagctaggagggagtgaaatatcagtgatcatcgcaaggaaggaggcagacaagagtaaggcacacctgactcttaggactagcagtcagaaccaggaggaaaggttttattgctatgcgggtaggtaagaacagattttacttacatccatatagttacttaaagtccagttttctgttaaacatttttcttaatatattgagccaaaactagtccagttaagctgaacttggtttttctggagatgaattgttttaaattgacaccctattgatggctcccagttgaaggaagtgagcacattatttgtactgtgaatataaatttttgcccttttatttatcttcctttgacccatttccttaaaataatggctcaaagtaatagacttccccaaatggtggggggatgggtgggttattaatgggaggtatggggggtttagcttgagatgggacttggtcttagagctagttctaaaggttgtttacttttctagggaggagtctgctactagtcttatcagctcttaaaaacagaaactcatctgtccaagttcgtggcagaaaggtaagtttttacaaattagtgctcagcaaaagaatgccctgcgttcccaaagtaaaagaatgacaagctgtaccttaaaccaaaacacttcgtaatctcatccaattgcaaaaagagttattagccaaccaggtattcccagtagtgacagtggatataactgtgtagtcattcacctctgcttatatgaatactttacaacctcttttgccttttgcaggaacgtccttgtgaagacctttatctgagccactgtacttcgttatcactgccatgcagtttacatgagctgttctgcagctcaaattccattttgtgaatgggtttttttttttaataaactgtatttaacttagttctgcttgttttgtcctcctttgtgatatctatggttaataacatgttgaaattcaggttagagaggatatggttgattctaatgtgaatttctatatttagattcatcccattcagcttcatggtttaatgaaaatagaaat

SEQ ID NO: 69702 - DNA, 1088 bp, Homo sapiens
ttgcaataccagcacagttcttaacaagtgcttactaagtctttactaaggttatattacctcagaagaggaaagacttctgattgtatgggttaaggtatggcccaaatgaccctgtgaggacacaggacagaggtccagtgtctccagagcccattccttctgtgcctctgctgcctgcaactgataaacctcttatctggcccaggcaggggagcccagggccaggataggaggagagggcagagctgctatcaaccaccaggcctgggccatatcttggagaggaggaggggctgtctgcttgcctctttccacaacttgttcttggggatcctcaagcatatactgtcatcatcttggaaagaaaaggctgagaacgtaaaactgaggacagaggaggaaagcagggtgacccctgatgttgccctagaaaatggaaaacaaaacacagcaaaacagaaaaacagaagatctgactctgcctttagccaggaaaacagtttgggggagtaaaaagtattagggaaaagagtgggcattttgcctggaaaaaaggtaaagacctcctgtgctaccaaaggaactgactgtggccatagttggcgaggtggagatcacaacacaggaaaagactttccatcttaagggattgatgaatccagcatgagtgaggatggggaggaggcggtctctccttccctcaggggaagctggagggagcccctccaaggaggtagtgcaaacttgctgaccctagcaggtgtagctctaacacctcttttcctttgacacaggtttctagagccatctgggctttccgggaacctggaccagactctggcccagtaggatgtccccgtgtcctccccagcagagcaggaacagggtgatacagctgtccacttcagagctaggagagatggaactgacttggcaggagatcatgtccatcaccgagctgcaggtgagtaaggggggatagggcaggggaggccgtgtgtcggagaagagagaagcagggagttggccaggactgaggcagagggcaggagcaagcagggctcagggctggtaatgctccaggc

SEQ ID NO: 69703 - DNA, 1002 bp, Homo sapiens
aggggcagcagagatgctgtggtgtccacaggggccgggagtcagggttcagcccgagtgggagacggggaaagagagttccgggtaattcttggggactgagcgttctgctgacctttggaataagtgtgtggcctagtgtaggagctaaagccttggtttagagtaggaagccctgccggggagagggcatagagtcggtggaaagttgaaggcagcacatggactccttaggatacacagacctgtaggcgtactggattaggacccttcaggttgccccttatttttagcattgtggatgataccctgattttaatttaccaaaccaccaaactcgccccatattgtaagaaaagaatacagatgttttgtcgttacagactcctcctgatggtttcccaagtttgactctccattgccgattccctgccacattccttcaggaaactgttttgtcttcggtttcctgttaatccctattatataggtttgtcaaataatcagtattccatcaaagttctgggatacctgataaagttagcatggattgtggaatattttttctagactccttattctgttctccttttctctacccatttagaccttaggaattctttttttttttttttttttttgagaccgagccttgctctgtcacccaggctggagtgcgcacgtggcgcgatcttggctcactgcaatctccacctcccgggttcaagctattctcttgcctcagcctcccgcgtagttgggactataggcgcgtgccaccacgcccggctattttttttgtatttttagtagagacgtggtttcaccatgttggccaggctggtttcgaactcctgacctcaagtgatccgcccgcctcggcctcccaaagtgctaggattacaggcttgaaccaccgcgcctggccaggaattattattattattattattattattatttttgagacggagtctcactctgtcgcccaggctggagtgc

SEQ ID NO: 69704 - DNA, 1062 bp, Homo sapiens
ttctcttcccttagttctctgtctctgcttcttcagtgaagtctgtttcagcctgcttcttccttattcttttgctttaatctatgcctaataggctgcattcacagatccctgctaacttgatcaggtaaccctggactttgcttttaaaaccacactggttctttgttatgggaaacctatgtaatgcggttagggacaatctgatcaaagcatattcttctgtccttaactctacaaggtacatacatagctgcaggatgtcgagaaaaagggacaggtaagctacagggggtcaagaagaactgttgatcaaagtttgcattgattgtggaatttctaaataacagtaagttcccttcttttaggtactttacagtgggtcacatggtcacatttctttcttgaattaagtaatccagctctagctttcaagcagatttgtctaatctctctcaggtctccttaggctctaaggaaagagaccctttcatctcttttagttcccaatgcttaataatagtgatctcagcctgcatctttggacttggcttcttctctcttgctgtatctgctggttctcgctttttgagttgtgaatgaagaggatctctgcagatcaccattctccattaataacctgtggaatcttaaagataaggatttccccttcctccttcctgctttactttttttctttaaagctgaattactcgggccgggctcggtggctcacacctgtaatcctgaggtgagtggatcacctgaggtcaggagttcaagaccagcctgaccaacatggtgaaacccgtctctgctaaaaatacaaaaattagctgggcgtggtggcatgcgcttgtaatccccagctacacgggagactgaggcaggagaatcgcttgaacctgggaggcggaggttgcagtgagccgagggccattgcactccagcctgggcaaaaagtgaaactctgtcttaaaaaacaaacaaaactgaattctgtatcggtttagatctttaaatctttgttcataggttttatttttcctaatcctctctgga

SEQ ID NO: 69705 - DNA, 1051 bp, Homo sapiens
acctgtagtcagctacttgggaggctgaacggggaggatcgcttgagcctgggaggttgaggctgcagtgagctgtgatggcaccactgcactccagcctgggtgacaagaaataataataatattaataaatctgatataggctgggcgtggtggctcatgcctgtaatcctagcactttgggaggtcaaggtgggcagatcacctgaggtcaggagttcgagaccagcttggccaacatggcgaaaccccgtctctacaaaaaacacaaaaataagccaggctacaaaaaacacaaaaataagccgggcgtggtgggaagcgcctgtaatcccagctgcctgagaggctgaggcaggagaattgctggaacccgagaggcagaggctgcagtgagccaagatcacgccactgcacttcagcctgggcaacagagcaacactgtctcaaaaaaaaaaatctgatatgtaaaaactgctcttccctgtcaaagactttagctaattcttcttttcttttcatctgaagtctatcggattgtggctggcaaattggagcccttaaccccagaggagcttttaattttaaaaaagttggcacaggctgggcacggtggctcatgcctgtaatcccagcactttgggaggatgaggcgggtggatcatgaggtcaggatatctagaccatcctggctaacacggtgaaaccccgtctctactaaaaaaaatacaaaagaattagctggtcgtagtggtgggtgcctgtagtcccagccactcgggaggctgaggcaggagaatggcgtgaacccgggaggcagagcttgcagcgagccgagatcagaccactgcacttcagcctgggcgacagggtgagactccgtctcaaaaaaataaaaaaataaataaaagttggcacagaggccaggtgcagtggctcacacctgtaatattagcatgttgggaggccgagacaggcagattgcctgagttcaggagttcaggaccagcctgggcaagatggtgaaactccatctctactaaaataaaaa

SEQ ID NO: 69706 - DNA, 1154 bp, Homo sapiens
gcagtggcgcagtcctagctcagcgtggtcttaaactcctgggctcaagagatcctatcacctcagcctcctgagtagctaggactatagatgcacgccaccacacctggctaattttttttatttttgtagagatggggggtctccctgtgtttcccaggctggtcttgaactggccttaagcaatcctcctgcctcagcctcctgcgattttccttctcctagttagctggctcccttgaagttgcagtggtagaggagagcaacagaccaccacaggttttgcaagtgatatacttacagttgaagaagaaccattaagactgaggccgtgattccttatttgattcttggtagtggaaaaaaaattaccctcttgctcactcactctaggccccagagtgtttctcagatagatcatcttctcactgcttcttaactcccccaaaattcaggttggcttttgtccttggaagttaagtggtagtggttaaggtatagtggaagaattggagaacataggagagtttttgaagatggctgttttactaggctgcattgagaactggtgtgcctgtgcgtgtgtgtgtgtgtgtgtgtgtgtgtgtgtgtgtgtgtgtaaacgctcttttccctctgcttagtgtgtgggtggtttagggaaggcttgctttatgcttctgcattgctactgcattcggactgcagaaacttccaagtatactaggacattcaaccctattttcaaatggctttgttcagtgccttttaattaatctggtcacattctatagccacctgtacatgggagagcaggaagggagagggtaatttggaaaataactgtaccataatatttggaaataacagcatgacctctcttgattaagccccctgtgagtcagagaaactgtttctctgatggtactttggaatcctttgtttaaatgctttctctgtcaattcagtttacttaccctgggtctttctcaatgggaaatatcaaaatctgaccaagttgaggtaagggacttacagaggtacctctgtatccccttgcagccccagtgggactaggggaaggtatctggtttaccagtggtgatgggaggcttcaggactgaaggtatgttcgtatctcttcaggaaccttc

SEQ ID NO: 69707 - DNA, 1079 bp, Homo sapiens
gtagtgttttttaagatggatttctgaggtatggtcaagactgcagggggatacttgcttcttctatgaagggtccatacctgactgagtttgagccaattagctaacaacctgggtcatgttgaaaccatacattctgaatggatcactggagaagaccttgggtatagtcctaacctgcttcctatatgcaggaaaagctgtttgcctcagatagcaacttctaggagaatagataaataaaaataagcccccagataatttgaggcaaaagtgaaagtttgagaaagtcaactcttactgagctcttattattggtataagtgctttgtaaagtatattgttatttaaacctcatagcacttctatgagttgtaggcattggtgcctttgttttacaaatgaggaaaccaaaccatgaagaactatatgaaattacttgtatgtgaccattgagaaaagtacaaaagtggcagttatctgatgtggttcaacctagtaactttctcagggtcacacatgtagaaaatggctcagcttggattccaacccatatctgtctgacttaaagtccatgctttttaaaaaattttgagacataggccgaacgtggtggctcacacctgtaatcccagcactttgggaggccaaggtgggcggatcacttgaggtcaggagttcgcgaccaggctggccaacatggcgaaatcccatctctactaaaaatacaggccaggcatggtggctcacacctgtaatcccagcactttgggaggccgaggcaggcggatcacgaagtcaggagattgagaccatcctggctaacacagtgaaaccccatgtctactaaaaatgcaaaaaattagctgggcgtggtgcgggcacctgtagtcccagctactcgggaggttgaggcaggagaatggcatgaacctgggaggcggaggttgcagtgagccgagatcataccactgcattccagcctgggcaacagagcgagactccgtctcaaacaaacaaacaacaacaacaacaaaaattagctgggcgtggtggtgggcgcctgtaatcccagctac

SEQ ID NO: 69708 - DNA, 1050 bp, Homo sapiens
gcccaggctggtctcaactcctgagctcaagcaatcggcctgctgcagcctccgaaagtgctgggatagagtcagagtctagacagggtctagacgttacaggtgtgacccactgtgcccagccaattaaagtccatgctttttacactaactctgaagccttcctctgacctcagctattgcttggttagtaatttctctacctaagacatcaggtaacacatatacagttggtgaagacattgtagaggactgtgacagggaagttctgtttaaacttttggctaaaagatgttgaattgtggaatcatgtagcagaatttatttctgtgagaaatcacagatccttttcctgttgtgctctcacttccactttatgtttttggtcctttgtgaaagcctgtgtcttttgatgtttaatgaattaggaggttttgtttttaggtagcagctttcagggccttgaaccttatccttctgcctcctctgtttcccaacagctgatgcttatggctgttctgaactgtctcttcgactcattgagccagatgctgaggtgagcaggacattcttttttttcccctcaagttatgatggaaagagcagggcattgttgatttctttttgggagataaagtaaccattcttcaggcccagggattgtaggggattggcaaaggctccagggagttgatttagttttagaagttgggttttgccgggctcagtggctcacgttcgtaatcccagtactttgggaggccaaggcgggcggatcatgaggtcaggagattgagaccatcctggttaacatggggaaaccctgtctccactaaaaatacaaaaaattagccgggcatggtagcgggcgcctgtagtcccaggtgcttgggaggctgaggcaggcgaatggcatgaacctgggaggcggagcttgcagtgagccgagatcgcgccactgcactccagccttggcgacagagtgagactctgtctcaaaaaaaaaaaaaaaagttgggtttattaattcacagtaattcatgctactgg

SEQ ID NO: 69709 - DNA, 1088 bp, Homo sapiens
gcgagtgtccatctcttagttagctaccttaactgtccacccttactacctgtgggatcgttgcctggtttgtcttctctgtgtcctggagcaaagccagttcctaaaactaaaactccattctagtcttgggaagaaaagtttctactcagaactggggaaggagtggaacttatgacttgggcctctaggctgtctctgtcccctcagctccccgacatgcatttactctctgccgtgggtctgcagtcgctgcaacctaccctctctctgcctcagccttacacccaagcagtaggtctgtgctctccctgtctctaggtcgctgagagaggtgcttttcttcataaaacctttggggtttggatttccccaggaagatggagaatggaatactcactcttgggtctaatctttccccttgacccagaacttcctccccacaaaaatgcctttaaaaaccttcctgagacttaagcattctgccccacttactaactgccagttctccagcactgaggtggggcagataacggggcatatttaagggggcatctttgtgtaaaagatgcatggagtcaggagaaaaccaccttcataaactgctctgtgcaaagaggaataaaacattttttccaaactgcctttgtgtgatgtttctgtttctcttcctctctttttggcagctactcctgttcctccagccccccgtcattccccatcttataatatttcttccctcctacctcagagactcctagcagtgcccccccatccctaatttacggggctgtttgcctccttggcatctctccgtcccctcgcctggaaattggcgccaggggtggggtggggatggtattttctcagtgggagtcccagggaactgagttcttcccccatcacccccaaagccagctgcctgctcccgcctcagccattagtaacccagagacgcgcacctgcgtgggggctcttctccagcccttgctcacttcctgcacctcccactcctgctctgaaacggcgctgagcgggttatttatcggagccagcgctgctccagaaggtcaggacggtggtgtaaa

SEQ ID NO: 69710 - DNA, 1350 bp, Homo sapiens
ggctccaggtactaagcacaagacaattctggaggcccgaagtgggctcgggcccatcaaagcttaccctcggctggggcctcccaccccgggggaaccagaggctcctgcccaggaccgaactttccactgtgagatctgcaatgtcaaggtcaactcggaggtccaactgaaacaggtgggtctaaggcccttcccaggaattctgggacgctccacccgctaagtggggaaggggagcaaggagcttgagtaaaggcccttcttcagagttttccccagggggccagatgggagggggccggtgcttggagcttgattatactccctcgctgttgcccctttccgggagctcacagccccctatccactggcccccgcagcacatctccagccggcggcaccgagacggcgtggccgggaagcccaacccactactgagccgtcacaagaagtctaggggcgccggggagctggcggtgaggcctggatgctgggaattcagcagtgggagggcgcgggcggggaggagagagggacgcgggctttgcccagggagaggtggggtttgcaggaccgccgggtgacttctcttcctccgcctttcgcccgcttcagggcacgctgactttctccaaggagctgcccaagtccctggcgggcggcctgctccccagccccctggcggtggctgcagtgatggcagcggcagcaggctcgccgctgtccctgcgcccggctccagccgcacctcttctccagggaccgccgatcactcaccctctgcttcacccggcccccggacccatccgaactgcgcacggacccatcctcttctccccgtactgacctcaaccctgaacccctcccattcaactccccacctccagccgggacccaggcgtccgggctcccagcccgcccctcctcccggcactccctaaatgatctctccttccccccccccaccccgagatacggggttccaggaaaggggaggggtagcgggggaggggggcttcagaagggggggaacaccccagatctcagggaaccccgccccctgcctttccctctcccctagaaaagggggggccgtctcacccccgagcccccttggagacaccccccctcccaaaagccatgtccatccagcccttccccccaaacctagcacaaaacggggttcacaagccatggtcggggtccgggggggacagaaatggattttcttggcaataagcggactctgggactccggctccctaccccaaactgaagcgcttccgtgaacacccccgtcctccgtagggggaggggagcaggcgggatcctgggtccctcataagc

SEQ ID NO: 69711 - DNA, 1048 bp, Homo sapiens
cagcactacccaaatggagagtggatgaggccaccatctatttcacagggatacgaaagcccatttcctgacattaaccccacccagccagtgaaactactggtgagaggaaaggagagtccagaggacagggctttccagactcttactactttcccccacttcttgttctctcaccagtgtctcattggaaaccctaaagacctgtcacagagatgggctcggctgaggagataaggaccccaagtccccagcaactatttttcacttgatccctccacccagaagataaggttttgtcctaattcagtcccattcttatgagagagcccagccatcccccaatcttcagtctcagctgcattccaggctttcctctccctagctgcctagaggccaaaagggaggagaactgttgagggaggcagttttcacacctctgagcccctggttttcatcccctgatagcagaaagcctcagagaaactcccgtcctctcccttactcatgtgaactcttggcaggagactgcaaagacgtctgctgacccagggtggggacagggatggttcctaatcccgcccagccccacagctctgccctagaaaccctgatgatcagggagaaaaggttcagaagatccctgggctgcctcgggccagcccagctgcttaggtccccccatttagtccccatgattcactagagctcctactctctcctgagttcttttactccctctagaagttgctgcccttaagaggtccagagagtgtgtgtgttagggcgaccagggatccagagttgggaggctgggaacatctgtctcctgggactagaggctgggcttggtgatagtcttaccccagagtggaggcccaaagggctcagaggcttcagctgaaggccctaggatctagggtgctttgggacttcatgtcagaggcctctggtggattggcttcactgtaggagataagtcaaggtgacacagttgtatgttcatggtatgatggaccaaggcaggaatccaggttcagataccaga

SEQ ID NO: 69712 - DNA, 1667 bp, Homo sapiens
tgatcatgccactgcactccaggctggtcaacagagtgagaccctgtctcaaaaacaaacaaacaaacagaagcagccactactaagcaatcagacttggcatttgagttcaaacctatctgccatttctggcttaactggggaattttaaaggcactggtaaaagataccccccatacaaaatcacccccaagtttggtcctcctgggtccattgcacaacttagaggggtagtcctagcctgaattcagaggccacttttgcaggatgtagaggttggaggcactagagtcctccttattacttcttggaataagagctgtggagaaatggcagccatagtacctaaactctccctcttttcccctttatcagcttggattcttcaaacgctccctcccatatggcaccgccatggaaaaagctcagctcaagcctccagccacctctgatgcctgagtcctcccaatttcagactcccattcctgaagaaccagtccccccaccctcattctactgaaaaggaggggtctgggtacttcttgaaggtgctgacggccagggagaagctcctctccccagcccagagacatacttgaagggccagagccaggggggtgaggagctggggatccctcccccccatgcactgtgaaggacccttgtttacacataccctcttcatggatgggggaactcagatccagggacagaggccccagcctccctgaagcctttgcattttggagagtttcctgaaacaacttggaaagataactaggaaatccattcacagttctttgggccagacatgccacaaggacttcctgtccagctccaacctgcaaagatctgtcctcagccttgccagagatccaaaagaagcccccagctaagaacctggaacttggggagttaagacctggcagctctggacagccccaccctggtgggccaacaaagaacactaactatgcatggtgccccaggaccagctcaggacagatgccacacaaggatagatgctggcccagggcccagagcccagctccaaggggaatcagaactcaaatggggccagatccagcctggggtctggagttgatctggaacccagactcagacattggcacctaatccaggcagatccaggactatatttgggcctgctccagacctgatcctggaggcccagttcaccctgatttaggagaagccaggaatttcccaggaccctgaaggggccatgatggcaacagatctggaacctcagcctggccagacacaggccctccctgttccccagagaaaggggagcccactgtcctgggcctgcagaatttgggttctgcctgccagctgcactgatgctgcccctcatctctctgcccaacccttccctcaccttggcaccagacacccaggacttatttaaactctgttgcaagtgcaataaatctgacccagtgcccccactgaccagaactagaatctgtgatctcatgttactctttccaaacccatcctggaaccaagcgacttggtggaaagcagatgcctatttctctcatggcttctttccactaggagccagaagtatgaccccccagaaactgtgaaactagttctaggctcccttcttaggtgaaagaggtgatggaaggaga

SEQ ID NO: 69713 - DNA, 1061 bp, Homo sapiens
ctctgtcaaaaaaaaaaaaaaatggatatgatatgaaagcccgaaagtaagagacaatattgtacattttaggaacttcaatttttaagttcagaatgctgttagttcaaaataagaggtggagttgatctggaacccagactcagacattggcacctaatccaggcagatccaggactatatttgggcctgctccagacctgatcctggaggcccagttcaccctgatttaggagaagccaggaatttcccaggaccctgaaggggccatgatggcaacagatctggaacctcagcctggccagacacaggccctccctgttccccagagaaaggggagcccactgggctctgcagatccaatgacaagtgggggccaagtatagggtagaaagaacttctgagctttcattgacttcacccaacttgctccccaggtggccacagctgtgcaatggaccaaggcagaaggcagctatggcgtcccactgtggatcatcatcctagccatcctgtttggcctcctgctcctaggtctactcatctacatcctctacaaggtcagccacatcctgcttgtgacttggccaccctctcatcaggctctgcccttgacctggcacagtcccaagtatctacctctagaccagttcaccagccatgtgcccccacctctgtcctggctacatgcatcccatcctaacccttcctataagatcccccccttcattctatagcccctagcttagaaagggtcctcttgactcaagatgataagtttgcctatacttgcaaaatcattggaacccaaagatgacaaatacgtggcatttgtgctgtcaatttctccaaaaatccatggcagccatcactaacctagaaatggctactgatcatctcctagaagtggcttcagaatctctctcaagaggcagccatggccaggtgtggtggctcacacctgtaatcccaacattttgggaggccagggtgggaagacagcttgagcccaggaattcaagaccagcctgggtaacacactaggaccttgtctctacaaa

SEQ ID NO: 69714 - DNA, 1062 bp, Homo sapiens
gtgctcttccctcctcagctcatcaaccaaggccccagctccattagccagggtgtgctggaactcagctgtccccaggctctggaaggtcagcagctcctatatgtgaccagagttacgggactcaactgcaccaccaatcaccccattaacccaaagggcctggaggtgagatcctgaacactggcatggggaagaggagcagattcagaggaccaaggctgaggggttggggaaggttgctgggggcctgcaagaggcaatgaggatgtgcctatagctagggttgagggtcacaaggcccaaagttacctcaaaatcctctggaggaaaaaggactttcatccactgtgtttctttctgcctgaactatcccttctttgtttcccggcatacccctagggcccagttatgtgccacctcctctaggaagccttcttcaaaccttttcctctgggcccgaatgcctgttttatagttcatttactcattaacatctaattaaataagtgactgtactgaacactgttaggcccaggaaatattgcaccaaacagaactgacaaggtctccacgttcatggaacttacattctagtgaagggtgatagacatagaaaagaaaaagagaaggagaaaaattaacagggattgaaaggtgatgaagtgaagagttaataagctgtagggacactatttaaattggatcatagaaaaacctcttgaagacgtcacagctgaactgaggcctgaaagataaggttgaacctgtctataagactcagggatgagcattccaaaccaagggaacatccagtgcaaaaacaggaacacagacctaattatttacttaagcatctcctccagtgtgatctccaagaaccaagttttcctcatttccatattttaaccctgagctcagtgccttgcgcataggaggtggacagttggatgaatcaataaagagatagatgaaagaataggttgaagctgctctggaacccaggtgcaagctgacttagaagctgtaatgagatgggaaaggggcccaacactttctttt

SEQ ID NO: 69715 - DNA, 2573 bp, Homo sapiens
ggagtgggcaggggcaccaagtctgccttaaaaaggggaaaatggtggtgtcctagtctgggtctggctgggagataggtagaggataggatgtctgttccagttggattcaccagctttcttcttggtctctctccagcatcaaccttagcttctgcctcaatgcttctggaaaacacgttgctgactccattggtgagggagactgcctggatctctcaggccctaggacagagaatgaagggactggggacctggggacatttcttctctctgaaaagatgaggaaagacaggcagtttccctttatatgtccctggcttcaggtttcacagtggaacttcagctggactggcagaagcagaagggaggggtacggcgggcactgttcctggcctccaggcaggcaaccctgacccagaccctgctcatccagaatggggctcgagaggattgcagagagatgaagatctacctcagggtatggcccagagggcggggtgtggactggccagggagggtggccacacagaactgagggcacctcctgaagggaaaaagactgggggactccagtgaagggcttgggactcttgtaggggctgagaaagggagaccttctgtcagaggagctgggaagcaggctgccagggcctctgaaacaatgaggatggtcggaattgggccctaagcagacaaagggagatgagagaggctgaggagcagggccactaagtctccagagtcccctgactccgtgaactctctcctctggccccagaacgagtcagaatttcgagacaaactctcgccgattcacatcgctctcaacttctccttggacccccaagccccagtggacagccacggcctcaggccagccctacattatcagagcaagagccggatagaggacaaggtgaggacagggcagggagaagggacctgggaagacagaggcctgggtattgggggggcagggccatggaaagagaagagcctacagcccaggaatgggtctaaacttcccctctcaaggctgccctgctccccaggctcagatcttgctggactgtggagaagacaacatctgtgtgcctgacctgcagctggaagtgtttgggtaagtagggctgacggtaagctagggagctccaggtgcacctggcacctgaaaaaatcagctagggacatactagctgtgtcgccttgggaagttgctgagctgctctgagctttaactcctttgtctgtatagtgggaatagtagcatttatttctcagactttttggaaagattaaatgaaataatctacataaaaaatctagcctagtgcctgccatagagttagaactcagtaagcagtgtctattgttactttattattactctttttttttttttgagacggagtcatgcccttgtcacccaggctggagtgcagtggcgcaatctcggctcactgcaacctccgcctcccaggttcaagcgattctctgcctcagcgtcccaagtagctgggattacaggtgcctgccaccatgccgggctaatttttttattattatttttagtagagacagggtttcatcatcttggccaggcttgtcttgaactcctgacctcgtgatccacccgcctcagcctcccaaagtgctgggattacaggtgtgagccaccacacccggcctcgtattactactcttataatggtcctttgtcctggtttgaggattaattcaccaatgtcccttaccctctgtgtcccttccagggagcagaaccatgtgtacctgggtgacaagaatgccctgaacctcactttccatgcccagaatgtgggtgagggtggcgcctatgaggctgagcttcgggtcaccgcccctccagaggctgagtactcaggactcgtcagacacccaggggtgagatgagactctcgagtgggatttgggaggatacccctctagaggggacaccaaaacctgaccagtgcccaccccatctccagaacttctccagcctgagctgtgactactttgccgtgaaccagagccgcctgctggtgtgtgacctgggcaaccccatgaaggcaggagccagtgtaagtttgggatgaaagaggatgggacagagggagagcagacctgagggcggtaaccagccagccgagagcacagctgtgaggtgcggagggagggtgaaatacacagtctaactgccctcttttcctctttttctgtccccagctgtggggtggccttcggtttacagtccctcatctccgggacactaagaaaaccatccagtttgacttccagatcctcaggtagggagtgagtgtgtctaggctggggctgagctggggacggaagggagggctgggcgccattctcactggctgcactccagcacctcagtcttgcctccatcccacagcaagaatctcaacaactcgcaaagcgacgtggtttcctttcggctctccgtggaggctcaggcccaggtcaccctgaacgggtcagtgccaggcaaaatggggtctttctgagaggggacacagacttctagg

SEQ ID NO: 69716 - DNA, 1050 bp, Homo sapiens
ctggtgggggcacccctgctcatggatcggacccctgacgggcggcctcaggaggtgggcagggtctacgtctacctgcagcacccagccggcatagagcccacgcccacccttaccctcactggccatgatgagtttggccgatttggcagctccttgacccccctgggggacctggaccaggatggctacaatggtgagtaccatgggctcagagagtgaaagaggaggcaggggcccaagtcagaagggatttggggagagggcatctgtcagctaagatacccagacctccacgacttcccgaggggttaaaatcccactgtctgggtcttgggatttgaagattagaatatagggactgacagatgggaaaaaataggatcctaggtcctggggtctggtagtagagattagagcccatggattcctggcctgctgactagtgtgtgttctgtgtcttccagatgtggccatcggggctccctttggtggggagacccagcagggagtagtgtttgtatttcctgggggcccaggagggctgggctctaagccttcccaggttctgcagcccctgtgggcagccagccacaccccagacttctttggctctgcccttcgaggaggccgagacctggatggcaatggatatcctggtgagttgtgcctgaggccccttttcaccttaaaattccctggtcactgacccctactctctcttctgcacctttccttaagttcctgggtgcagttctggctaattccaacagagggcgctgtcttctcacttcaacctccctgagcgttgaaaccaggaggggttaggaagaaaggatcctgatctggggcttgctgtaagaggtgatttcttgacttcttacagatctgattgtggggtcctttggtgtggacaaggctgtggtatacaggtatgagctccaaagggagatgaggggacaacctgggtggactggaactggaaatttctcaacagagctgaggttgggaaaatcaatgcagaggacacacattctggcgcttgggcat

SEQ ID NO: 69717 - DNA, 1063 bp, Homo sapiens
cgattgttatcccagtatacagagaagaagaaggctcagagaggttcagcaggaagcagagtatgaataaagagcagaatgattctgccagagtaagtgccagaacttgaatgccagtctgcctccagagcccatgttctgatccacctttttgagcccttgcaaactgccatgcacggttctttgtgattaggcaggggaggagaggaagtgaggggtcaggctgggtcttacatagccgtaagtgaggttccctttgggcacaccagcaacaaagtctgcaaagagaagagaaagttgtgacctaagggtggggaaagggaagcagataatggtaagtggccaagttcatgggctctctggccctgtgcctctaaccatccccctcccttggccccagcctggggacacactcaccttctgtgtcatcaccactgaattcaccaacagccacagagtatcctgggggacagggtgggtggatgttaggattcctgctttgaggacccctctgctctggcctatccaccaatcccttccccacccctactgggccttcatagtcagcaggcacatgacaagtatggcaggggtgctggggatgcctgagtaggagaggggaggcgagggggtgagtggggacaggagcacttgaggttctccctctgccatcccttccccacttgcttgctcacctaggtagctgtcatcatagatggaactggcctggcgagtctgcagctgcccctgaaccaggttgatcaggtactcggggtaataagattctgcaatctgctcctgagtggcagacaggatctggcctggagagagtatgaagagggagtagatggagaggaagtggcagagggggcttgggactctgggggctgactgggtagtatttcagaagtctggttcaagaaagggaagcatggggagggtggtggcatgtaagcttcaggaaaggaagaggagaattgggagtagggtgggaggctatgtgccaggggacttaaagaatggcagaaacaggcagggcgcggcggctcatgcctataatccc

SEQ ID NO: 69718 - DNA, 1056 bp, Homo sapiens
gcctcagcctccctagtaggtgggactacaagcgcccgccaccacgcccggataatttttttgtatttttagtagagacggagtttcaccatgttagccaggatggtctcgatctcctgacctcgtgatctgcccgtctcggcctcccaaagtgctgggattacaggcgtgagccaccgcacctggcgcttttctcattttttattaaccaaaaacatctatagctgccaatcagagtttctgaccagcatgagataaccaggttcccacataagttgatataattccagccaaaagcaaatacacttgaggttttaattagcctaggccaccttatctggtaaatgcatgatttccgttaggctttctgaaatattgaaaatagcacacggaccctccattgttaccttcttagacccctaaaagtgcccaactgctgcaggatttaggaagcaggaaaaagatgtgggaaaataaggacaaactagcttgcatgccatccatggcaccagtcacctcacttggcgtgttggcaggggaggcactatttattggattgactttaggttgctgggatggaagggccactgcctgtccaggaataagccatgggtagtgtgccgggaggaaaggaggcctaggtctgtgtcccttgcctgcatgccaggtatcctgaaccatcgcacagccggaatggatatgcccctggcttgtgggctttacaagctttgtaaactctctgtcttgcaaccctgctaaactccaggctacttcctcaggccaccccaggagtgtcaggctcagctcctctccaagagcagtgggtgttggagaaattggcagcaggaatagggtcccttggccttagccctgtgctccaggaaactttgagagaacctcttcttcacccagaggaagagggagagggtattgcccaagtccacagttagtgcctgaaccagaactcttggctcctggtccagtgctcctttcactgcttcctgtacctctgctgttctggtctagttcaggttggtggccctttctgctttctag

SEQ ID NO: 69719 - DNA, 1449 bp, Homo sapiens
accagcagttcatgttggttgaatttataagatgggaaataatacacctaagttttgcagaagcaagtaaaaattgatcaagtgtcctgcctaagtgacacagtagcaagaatttaattgaagaatataaacacaagcaacataaataataataaacgtgcctactaacaatcaaacacagatggtacaacacaatttatggaaaaaaacagatgtaaagaagtgctttttccaatcaagagggattggctgttccacgtgtctgcacagcgatacaaatgtgctcgttttggggcccaataaaaataataaggcattctgaacaacatggtatgttcataaaaaaggaaaatcttccttctgtcttaagcaaatgacttgagatttagacattgtgaagaaaaagatgtagaggcagctcacctttatcccagtcttcatcgcaaggagggcactgccaagtgctctcagccagagtctcttgtctaaggctcctggtttggttgactgcaagacaataaagattggatataagagggggatattgccaagttattgtgttcaaaggggctagtagcttaaaaggttgcaagggtagcctgttgggtctttatttctgaaaaatggatagtataaaagctaaaagagggatcttatctctttgctgacagaagaaagaaaagcagaaacaaaaatgtttaccatatttatggcaataaaagatttatttttagatgaattattagtaaaatgaaccaggctgttcaggagagaaaacagtatgacatgtacaatctgacaacctattgctgccatgatacaaatctcaaaggtggaaaagtattgttcttctaaaacactgaaagccaaaaatcaagctgacaatctagcataatacaaatctgaaggagctaccctccagtactgaaatattttagatactaagtcttaccaacatcttgctcaatacaacttctgtcatcacagcttgagatatgatgactaatttcagctcgaggaacctggtggcgagcattgaagggacaagtagccaatttgcttgcaacatcaggatgattctgtggaaccaaaattaagggatctgtcagttctctggatctactaaagtcaacagggagtagctaagccttattctacaaatgcctcccctaaaattcctcaataaacttctggcttaactataacaagtaaactcagagtaaaaaactaagagggaattatttattgtttttatagacaattacttcaaaatcatcaaaacataagtctttttgttatgattgtagagactgacaacacagatattgttagctaaacaatgaatttaggattgggtattggaacgacatctttcccccatttatttctcagagtcacatgattcaggcagcacagcccgtaatgagagagctctctggatgtctttga

SEQ ID NO: 69720 - DNA, 1024 bp, Homo sapiens
aataatttttcttgggctaacttctagctgttcaagctctaaaatttctaaacaaaataatcagaaaaagtgagttatagcactcaatcattgttaggctcatgaatacatcaaatttagaagataggcaggatttctcattgttagccaaaattagtctgttttacaaagggtgagaagactctagagatgctgtttataaagggttctttgtcactagttaatgggaagaaaaccaaaacaagaaaaaatttatcctaaggaatgaacaaatgcctttctataaatgttggtatttaagagaggtagattcccaaaacaattctggcaatcaattaaaacatgataaaattatttgatatttataaaatatggccttttaaaagaactcaggagggtgttagagggcaaattatgaccctacctttctgcacttgataagatgataaggaaacctgcaagccctgatttgatggtttttgtcataggggcattgcaatagcttctcagggtccagggagtcggctgaaagacagaagtgtttcagtaggtaaaacgataataggcccttgtaaaactacagcattccaggcacactggattttttcaagagactctgtaataatagaacaatatagtctaaagaaaacttggattaaaaaaaaagggtgactacacttttaaaatatttctgaatcttagtaagttcagcagaaccagaaatctcagggtgaagtctcagtttcatattgaactgaacatattgtttttgttgctggttactcttattataaaacaaaaagttaaataaaatgtcatcctcttttccttttctaaaagtgctaattcagggttattcctattctctagctagtctatccagagcctcccaaccagtatgctgcagttgaaatggatttctagtgtgctaatacactgatttgggggcccacaactagttcaagtcatcccctaccccccatttccacaggcaagttgggggtagtaatagcaagtaatagta

SEQ ID NO: 69721 - DNA, 1054 bp, Homo sapiens
tgtggtggcgggcgcctgtaatcccagctacttgggaggctgaggcaggagaattgcttgaacccgggaggcggaggctgcagtgagccgagattgcaccactgcactccagcctgggcggcagagtgagactccgtctcaggaaaaaaaaaaaaaaaaaaaaaaaaatggcgcctgagggaatgggactgatggaactggttagaggtggggagctgcctagaaagaagccttgtttgtggaagttgtctagatagaaaggtaatttagattttgagggaagagaagaggaattataaaggagatacgcagtgcagccacaaaacaatcaccaaggacaggaattttgtgtctggctgttcttgtttagaatgtgttgtaaaatcccaaaattcaaaaggcactaactatctgagaatgcttggtaggatgatggttgttgctgcctgatgaaagcgagttttagagttggggagagagctcaatgaagagttggagaggacaagaaggccggaaggttacaacttgttaagggaaaaccaaacgtagtgtgaggctttgttctggggaaaaaaagtgtaagctgcagttcttgtccccagagtgcttagaaaaacgactcccaaagtggatgaaaggtttaatagcagtacaaaaaatgccaaaaaaagtggtagagactgtaaattcctgtaaggaaaaaaattaatggggcctgaaatgacctgggaaggcattatagagaaaagggacttgtagcctttgaaggttagacaaaaaaaggaaggtgttgacactacaagtagatctggtggtaatatttttcaaaaccaagaagtaaaagatatgacaaaacattctgtgctgttcaagatgtaggaggcagtctgggtgattagtctgggcagtgaaatattgggatttctacagcatttcagtggtgtagagcccaaataggacttgagaggactaccctgacaaaaactgaatgtagctttagtaaaaaggatcagtggggcattttctttttcttcttttttttttttgagatgga

SEQ ID NO: 69722 - DNA, 1011 bp, Homo sapiens
tgggcaacatggcaagaccctgtctctacaaaaaaaaaaaaattagccaggcatggtggcatgctcctgtagttctagctactcgggaggctgaggtggaaggatggcttgagcccaggaggcagaggttgcagtgagctgagattgcgctgctgcactccagcctggtgtgacagagcaagaccctgtctcaaaataaataaataaataaataaataaaaaaaataaaaaaagagctccaggtatccagggagaaatagtggtaagagataaagaagcagaggcagacatagagatgcagagatagagacaaacacagatatcaagaaggacagaagactgcttcagagttggaagggaccttaaagctcatctattccactgtggaatacctctagatgtgtgctgcccaacatgggagccaccattctgggtggctattgagcacctcaaatgtggcaagtatgaactgagatgtgtacataaaatacatgatggatttcaaagacttagaaaaaagaatgtaagatattcatatatatatatatatatttttttgttttgagacagagtttactcttgttgcccaggctgaagggcaatggtgtgatcttggctcactgcaacctctgcctctggggttcaagcaattcttctgcctcagcctcctgagtagctggattacaggcatgtgccactacgcccagctaatttttgtatttttagtagagatggggtttctccatgttggtcaggctggtctcgaactcctgacctcaggtgatctgcctgccttggcctcccaaagtcctggggattacaggcgtgagctaccgcgcccagccgatatctcattaatatattttataaggctgggcgtgatggttcatgcctgtaatcccagcactttgggaagttgaggcagcctgattgcttgagcccaggaattcgagaccagcctgggcaacatgatgaaaccctgtctctacaaaaaataagaattagctgggc

SEQ ID NO: 69723 - DNA, 1017 bp, Homo sapiens
acacctctgtgggccccacttactctactgcggttctcaactgtctcaaggtaatctctgggtttttgggaaagaggagaaagttaggggatggaatagccactgggacttctagaccctgtttatggcattatttttgccttccttttttttttttgaaatggagtctcgctcttgtcactcaggctggagtgcagtggcgtgatctcgtctcactgcaacctctgcctccctgcaagcgattctcctgcctcagcctcctgagtagctgggattacaggtgcccaccaccatgcccagctaatttttgtagttttagtagagatggggtttcaccatgttggccaggctggtctcgaactcttgacctcaagtgttctgcccacctcggtctcccaaagtattgggattacagacgtgagccactgcgcccggcctgccttcccttttaactgttgttcccacatttatcaaaactgcttttgcccagtataggagcaaactcctgccttcctgtctctcccatactgagagatatatgggaagaaagaggcacactttaccatttctttgctttcctatttaccaagactttgtactcatgggaagtccttcttgaagtctaacttcaacccttgctgctgctggaaagccacataatctattgtttctccatagaacctggatctctggtgctttgatgtcttttccttgaaccaggcagcagatgaccatgccctgaggaccattgtttttgagttgctgactcggcataacctcatcagccgcttcaaggttgggcagcatcctacctctacctccaggcaggattctccactcctctcatgcctgttctaaaagcctcccaacaaacagattccatagatcccctcactcagtctcaacatcagggaagtctccccatgcccacgcccagcctagcctttctttcacttgctgcagtcttagttccagacttcattaattgatttctagggggagattctcggtctgcaa

SEQ ID NO: 69724 - DNA, 1042 bp, Homo sapiens
gagggtggctggggtagccagatatcttggttcaggaaggcagtggtagggagggatttggactcacagagaggaccgactcacagccatggtggggtggtggggaggcagactgcttcaagcttgggagtccctctgccgtcagggacagaaggatgggatcagaagggtgtgacctgtacctatgctccccttcaccatatttttgtttcttccattagctgtctttctgccttctggctaatcttgttttaattttccttctaccaggagggaagatgtggagagggaggggtgaaatgagggggagagggacagggacttggggaatatctagtagaggaaaagaggaagatgaagttccctgaaccttctcctggtcttccatgtcctgcactcccagggctaaggtggttctggagtgggctggggcttacctcttgcggcttttgggggttctgcttctagctttcagtggcgccagccctctctggatgtggaagtgggagaccccaaccctgatgtggtcagctttcgttccacctgggtcaagcgcattcaggagaataagcagaaatggaaggaacgggcagcaagtggtgggtaccatggcagagggcaggggtgagaacttgtgtgggtggatcatggagcactaggaggtccatttttcttaagcccctggggaaaccctttgccggactccttgatttgggagtggagctgatcagaccagttagatcacaggaaagactggctgagtggcctggaatgttctaagaatgggggccgtagagatgatagagacagtcagatattccacaacccaagggtccctgtgcacactgtggtccctgtaaatggtgcccctgtagatttggctaatttggtggccctggctgggaaatctcttcctgtgtgagggggtggtagggtggtgttgagggttctgagttttagcaaggctggagaggctcttcccaagtggggatgggttgaatgtagttcagcttgaaggcaggttgatggatgagaatccctt

SEQ ID NO: 69725 - DNA, 1044 bp, Homo sapiens
ctgggaatggggtggagaggacatcctcttcaccccagaattgcgctgcttcagccccatctccagcctgatcctctgaatcttccttccctccctttctgatacagtgactggggcaaaaggagccattgtgaccaggggctgcgggaggcctttcctgggaccttccttgggactggtctgggcccctggggcttgtcgcctgccctgagtccggagccctttgcctccttcctctcccctggggctgggaggctccatccgaccaatgtctgtaaagtgctttgaggatctccccagcaaagcaccttcagaatgtatcgacaccagctgggttagggtcaagggtgcctggggagggtgagtaatcctgcattgctaaaagagagggtctgtcccctcctctccacgtcccagaactggcccagctgcaggcactaagaagctcctcccctgagacaagtgaggggtagtcggtgaaaggcagatggacaaggggctcagggctgctgccttcctgtcctctggagagaacccagccaggcgcggtgccccttcctctcctcaggctcctccttgcccccaccttgccccaggaaaggccaaagtccaggtgactgccctccttctttcttgtaaataccaaccatgcatttgtacagtgggccctgttcatgcgaaatccacatccatggtctcctagacctgctaccctggtacttccaccctaccccaccccgagaagggcagagacgcatgtgactcacccctgcccttggtttcccagacccctgctatagccagagaacaataaagaagggagaccaggcctgactgtgtgtgttcactgggtacaagttgaccaagcatcttcacatacatacactctttccagcatgataaaatctgggtgaggcgttctccctcatatatatatatatatatatttaggtatgtatctgggcaagctgaggcccaggaggaggccccgagggctcatagtagctgcatggcagaagtgggacctgacgcttctcaggctct

SEQ ID NO: 69726 - DNA, 1053 bp, Homo sapiens
ggctagattgcagaatattctttgcttttggaaagatggagcagttctaggaaagggagggagaccacctggctcctaagccccccaggaattggggtggtcaactgagtgctggttgctgcgacaacagccttccagatttctccagcaactgagatgctgccacccccacccccagaggcagtgtcagctgtgagggggagggaccgcctccaccagctcttcacagcccccagagggggaggggaaggttagaagcagctcagggagcagctgagattctggtcaccagcatccccatcgaggtctggggagaaaacaagttctcagagaatggtagagagcttgacaggagtatggaagcgagggggacaggctaagaagctaggctggggttcaggatgccggggtctccagcttgcctccagctataccttccagaccctgcacagaataaattgactgtcctctatcactgttccctcctatgcagggcttagttctggctgaccctggggtgggggaatgattggaaagagaaagagacatggatacttcagaggaggaaaaaaagcaaaaagactacagatcctgcctttggggatctccaggtctgaggcaaagatgcagacgcaaattgaccacagagccaaggacgggactagatgcagagggatggaggcagcggaagcacaggagaggagcttcggggaggaggtctggggcagccatgagggccaagagcctgggggcagatgtgagggacagatcaggaggagcatggctgcagaatcccctcccctgagaagtcagctctatggggatccctggtttcctgtccttatcaccctctcctttccctgttcccttcagagatagatgaagaccggatccccaacccacatctcaaggtgagctggcccatcccactaagcccagcccaaaaaacccccacattcattaggggattattccttaaaaccctgccgcccatctctaggatctttttgactcccgcttccctgtacctctaccccccaaatgtgcatgagt

SEQ ID NO: 69727 - DNA, 1075 bp, Homo sapiens
cactctgatgttatctcaacccactgatcgccactccaccctccttgtctctttcctactaccaccaccacaccctgcccctccaggatggaaagaagtagaggagtcttctagttgaaggatggcccccaccccatatacatgaagcagatggtccccagcccatgtgtatcaggaatgaccagagacgactcacagttaatgtctgtgcggctcatccatgtgcacacttacacacatacacaaaggactggtactgcggggaccttgcaatgtcaccaaaaacagatgccactgaattctcctgggaaaatgatgccctacccccacatacccccattctttgcatcctgtttcttctttggaaagagttcccccctcaggcttaaacagcccatcttaccatagccagtaccccccacttttctgggcatagagaggggcagtgttcacctctgtcatccccccacggccagtggtgatgattctaaataatggacatgcaaagataagggtttgatcattcagtgtcctcatcctactcctctcagcccaggataattctagcccttttcccagccccatttgccttccctccccactgctaacctagagggtcatcctctaacccccatccttccacttgcttccaagcctctaaagcctccagagaaagggggaaaactacacctcccaggagtccttgaactgacttcaacaacaatcaactttattggcagcgtgacaaaagaacaacagtggggggaaagggggctcagaggcagggcagtcagtcagctttatatgttaatttcttagactaggacctggagcctaggataagatttttcagctacgctttgggccctgaccagggtcctgcctagggctcctccttgtattgatattatatctaccatgacaaggattcccccaaccccatttcttgacaaatcagaaaggcaatgtatccaaggacagagaggacattagggagtgaggggcacaggccagaggagatgcacgttcagatcctcctctgtgctgtcctcccaggctggggggcgcttgaaaa

SEQ ID NO: 69728 - DNA, 1026 bp, Homo sapiens
agggtttcactatgttggccaggttggtctcaaactcctgacctcgtgatccgcccacctcagcctcccaaagtgctgggattacaggtgtgagccaccacgcccggccttgcctctcgtctttaaacaataaggttcaaagttccgtgggagcacaaaggagacatgatgaggacaacgggagtagggcctgagtttttttttgtttttttttttttaagcgttttgctcttgttgcctaggctggagtgcaatggcgagatctcagctcactgcaacccctgcctctcaggttcatgtgattctcctgcctcagcctcccgattagctgggcttacaggcacgtgccaccactcccagctaatttttttgtatttttagtagagatggagttataccatgttggccaggctggttttgaactcctgacctcaggtgatccacccgacccggcctcccaaagtgctgggattacaggcatgagccaccacacacggcccaaggcctgagttcttagcaggagtataaggcgcctaagcttagtctaccttctaaggaagcctgcgtttgtcaccatcactcagcaaataacctgaatgtctcctgtctctcagccttaatttttcaggcagcatcatgggacacatacttttagttttgagacaaggccttgctctcacccagggtggagtgcagtggtgcagtcacggcccactgaacttcaaactcctaggctcaagcagctcaagcgatatccgcctcagcctcctgagtagctgagaccacaggcgcgtgccagcatgcctggctagtatttttttacagatggggtcttgctgtggtgaccagacttgtctccaactcccggcctcaagcgatgcttccgcctgggcctcccaaagtgttgggattataggtgtgagccactgcatactggaacacatactttatacttgaatttttttttatccccttccctcctgctccttacctatacttggatttctacatctgtgccagggcagt

SEQ ID NO: 69729 - DNA, 1026 bp, Homo sapiens; identical to SEQ ID NO: 69728

SEQ ID NO: 69730 - DNA, 4891 bp, Homo sapiens
gctctccagccgccctggagcaactttgcttcgaagttccctgggcccgggcagggtgtggcgggggtgctggctgcactttttttttttttggtgggcggggaggtcagagcccaggggaaaggggctggggcgggggtcggggttgggctgaagaccgtttctccaggctgggtgttgggtggggaaagggtgtttgacgcccggagactggcgggccgagggtcggcgtcaggctcaagcccctgccggcgcccttggatctgtcctgggccccagaggcggcggggcggggtccgggcttcgcggccgtcgcccccacccctctcctgcgggtaaagagggggctgggagacgtggatccgaccgcgggtttccgggtgggaggggccgggaatcggggccgtgaagggaagccctcgagggccggccgggagcccggaaaccgaggtcccccttcggccagttttaatccccccgccctcccctctgccccaggcccggcagccatggcggtggaaggaggaatgaaatgtgtgaagttcttgctctacgtcctcctgctggccttttgcgtgagtggcgaggggtcctggggggcgcgccggcagggtgcggggagacctggctccacagtggtgagggctgagggaatgagaattaaggcagctggagaccagatgtggaaagaaagccagggaaagacagcgcagccactccctcctccagttttcctggacacctgaggcttgtttccaccgagaatggccatcctgggtgtgcagcaacccctacccccatccctcctggcccttcctgtctggtgacccaaccacttgtgatatggggcagtggggcaaccagccaaccgcctgatgctatcgccatggggcttcccttcgctctcccttctcccctctctccctccccaaccctctcatccctgtccagcccctctccccctttccctcctcccagcgcttgggggtgaggaagggctctgcccacttcaatttgctcctgccctgggctcctggcttgagaggctactgtttgtctagggagggacacatcactcttgctcccttttcctcttcccttctcctggcctaactggccagaggaaccttagtcacagctgatgcgcgcgtgggatgtgcactggaggatagtgagggggcagttctgggagagaattgagctgggagccctggaggcctgtagaaagcattattctaggtcagaaatacgtgtcttgaggtcaaggctttctgggaggtttttgaatttggtcatgtccctgattaaagagccgggaggggatcaggggaggtaggggcaggcaaggatgggtcatccccctaccccacagccaaagaaattccctagaggtgtgagaatctctcttccggatggggtcaagtctgtgtcctaggtgtaccccctgccctccaccatggagggccactgtgttgtggatatggcctaatcctcacctgattttctcttaggcctgtgcagtgggactgattgccgtgggtgtcggggcacagcttgtcctgagtcagaccataatccagggggctacccctggctctctgttgccagtggtcatcatcgcagtgggtgtcttcctcttcctggtggcttttgtgggctgctgcggggcctgcaaggagaactattgtcttatgatcacggtgagttgggggcgggaccaacatgggcggtctgggactgccagagcagcttggttcgggctcaggaaggtgggtgaggtgggtgggtgaggaagacctttgtgagtgtccagggaccggctgtgccaaaacgggcccctgtaatgcatagactccaaacttgacttctgtcctttgctcctgcagtttgccatctttctgtctcttatcatgttggtggaggtggccgcagccattgctggctatgtgtttagagataaggtaagcagggaataatgggaagggcctgcctcagccgggtctgggaccctggtgcttgaattctgactgcaacagtgctcctccgtactctcaggtgatgtcagagtttaataacaacttccggcagcagatggagaattacccgaaaaacaaccacactgcttcgatcctggacaggatgcaggcagatgtgagtggggttgctgggagcaggggtggtgggaatagagaattctcatctccaaggctgggtgtggtgactcacgcctgtaatctcagcacttttgaaggccgaggtgggcagatcacctgaggtcagaagttcaagactagcctggccaacgtggtgaaaccctgtctctactaaaaatacaaaaattagccaggtgtggtggtgagtgcctgtaatcccacctactcaggagggtgaggcaggagaatcgcttgaacccgggaggcggaggttgcagtgagccgagattgagccaccgctgggcacttgtctgggcaacagagcaagtctctgtctcaaaaaaaaaaaaaaaaaaaaaaaaagaattctcatctccatattgaaggtgaaggttcacttaacaaccttcttctccatatttcttccctcccccagtttaagtgctgtggggctgctaactacacagattgggagaaaatcccttccatgtcgaagaaccgagtccccgactcctgctgcattaatgttactgtgggctgtgggattaatttcaacgagaaggcgatccataaggaggtagggaggagactgtgtatgggacttgggaaacctgggaaatgttttagaatgcaagagacccaggatggaggtggacagggtcagggatggggaggggatctggaaatgctaagggtggggtgaaaggtacaggggcagggaagagactgatggaccaagggagggggttggggtgggaagtttctgatggtgcttttgtcctttgtgcctgccaccttcagggctgtgtggagaagattgggggctggctgaggaaaaatgtgctggtggtagctgcagcagcccttggaattgcttttgtcgaggtaagagataaccctgagcaggggctgggactctgtccagggtgcctggagggaaggggctgaggggaggagggtgctgaacaggaggtactggcctgggagtgtgtgtttggagtctcttgcatgggtctgaggtagctagcccttctgactcctctccacccctgtccccatctttccttctaggttttgggaattgtctttgcctgctgcctcgtgaagagtatcagaagtggctacgaggtgatgtaggggtctggtctcctcagcctcctcatctgggggagtggaatagtatcctccaggtttttcaattaaacggattattttttcagaccgaaaagagatggtctgagtttgtcttagagtgatgcttgattccttcctttccttactgatgttccctgtcctctgggaccttaatgcatgtgtacttcgaggtctattttggggggtgtttgggaaaggaggactttgcgaaggtgttggttgggcaggcagtgggagaagtgaggatccagagactgtggtgctttctgccccctagtcttatgctgccaggctcactatgaacattcatgaagccatctgctgcataagtcaaagcagctccccagaaaggtcccacctgcgagagcccagcccccatctgccttggacatcttcctggccttctgtgcaccgctaagggcccagcacctcccttcctggccaatcctcaagggatccagctcctttcgaagtatgataagttgccttgacacctgtgtggtcagtgtccttagcaggagaatttatgtgaatattgccttttcttccatggaagccacccagcctggcccagaaccctcatcacctgctcttctcccccaagaaatatgaagaccattcccagtacagacactgaattgcaaccttactccccttcagaaaataagggaaatgtattaaagtgccctttgatggccactccccgacgtgcagctgtagatgtgaggcagttccctggcgccccactgtgggtgctagctgttttgcagggactgaacaggccagagaccgtgagcatgtcggtttggagtagttggcacttaaatggggtcagccttccactgggcacatttctgcccaccttctttttattttttaaacaatacacttttgttagtgcttattttgtggcaggcaccaggcagtaccagggtgggggcagaaataaatcaaagtccttgtccttgaaaaacaatctcttgctggaaggctggattcagtagactgcttgggcaggcttgggaaggacccaggtgagcacagcatccaccaggctggctggcaggtaggaggcaggcagccagagcagcttggcatcccaacctgggctgtagcgggttcgggggtgtcgagcagtcagggcatgctccaggcatcggctcaccttggttaggtccgggtcacagatcaggttcatgatgcgctgttgcattttcaggtctgcagccccataggtggttgcaatcagtttcccttcctcactccagcccatcttaggtactgtcttctggggccctgggcttgtcaccctcagtcccctcctcagtgtggggagtgggcaggttccacatggcctgggcactcttgtaacatcctgttcaccctcaaccctgccctgggtgccccacccacctcctagcaggcttatgcaggactggcctttctggtacttgtttcccttcatgtgcccctgtgtgggcctggctactcacacttggtgaggaaggcccccccatagtgggcctgtgtggcaggaggcagccgtgcccagcaggcctgcagggttttctccagactctcca

SEQ ID NO: 69731 - DNA, 1035 bp, Homo sapiens
agcttagtagagaatgcgaaaatagtagtagcttctcaataaatgttggtttgtttgtttcctattttcacattctctagttaatgctcagcactcatgtgaagcaagaattattattatctgtatcacactgagaagtttggtgagtaaggttagatagtggttagtaaggaatcaggcagtgattaaacccacttcaattatagccaaagaacagaatttagatgccaggaagaactttcaggcacttgcctgtataatttaagattgggagtttagggagttcattcaccatgtatttattgagtgctgtctagcactatgggaggcactgaagctacaatggtgagcaaaacagacacagtatgaataacaacagtgtccactctcatggagattagtacctaatggcaagaaaatagacaattcttatgctgaaatttgtaaagtatgctatttgggatgttgcttgtcactccccatctcactagtagcttccctatcccagctacttctgatctctgaattctcaccccccaaaccctactccattgcaccatcactgaagctccagccagtaaaataactggactaccagggccctgggacctcagagaataatcaagaaaaaaaaaagctatagagactttgggtatcatatcctgaatatatgaagttcattaagcactttctcctcatctcccttagaaggtcctctttctcccagggtgggggtggggaagagctgacaggacaccctaagtccatcctgattttgcagaactcaagacatggggaggatacttaaaggcctagacttcctaaccctgcttatatggctctggaagctcattcctgattcttcctatctagagtcaggatagacatattctgtccaatggagacatgttgtaggacactcccaactgacttaggaaaggcagtgaagaggagctggaatggaggcagaggcagatatttattgagaatcatctattagacccaagaaggatcaatttaaggtccagagcaagg

SEQ ID NO: 69732 - DNA, 1051 bp, Homo sapiens
ctagctctccttcaactcaccatctctaattcttactcttctggcaacctgatccctgtcagccccttggcccaacgcctcaacagccagtttttttgttctcacagctcttccattaactgacacctttaccttcaaatccagttttcagctgttgtctgatttggatccttgagaagtaatagttgccaccccactcctcacctcctcctctagaatcagctgctgaccccagagaagtaatgctggtccccaacctccttcacattccttgtctaccttttccaatgtaaccctatctcctcagggccaggttacacatatccaccacctcaggccccctgctcaccagcccctcggctcccggccccagggaggtgacagccaggtctgtgccactgggatcaaaggcgttgatctcgatgccccagttgctctgtggctggcggaaccagctgtgtagcacttgcttgaagtcgatgctctgccaatggcctgagcgtgagtgcagctcaatcttcagtgagcggatacggatgtgacgccggcctccgccccctccccctgcggtcccttccccagttaggggttttagtcgcaagatctgcaggtagactgtggctgggcggggtacaggccgtaggtacacccacagctgggccttcagtacctttgtgaacatcaccttggggctgaagtgaaaatggcagcagagagggctgccatctgtctgtactgctgggtccgctgataagagagaagggcacagcatcagcaaagggtgtttgtgtaggggatcagtagtcctgggtggcactggcaattttggacttctcagcctgattttccagttcttctttacccttctcccatgcctatcttataccatgtctccggtacctaaaacagcacttcctctttaggatgatggccctataaggccttactgatctgtgtccatttcctaatccatttgccctaatatataggttcctgtctaccagataacctgcaaaattattcatccaccaccatccttactgtccaactt

SEQ ID NO: 69733 - DNA, 1005 bp, Homo sapiens
atttgaccttggagggaggtatctgttcttcacttctctgttcctttccttccaccaaggaaatgtgagtggtgttgatggccgggtgtgtcttgtccttcaggattggggcagaaggaaggatgaagaacagggccagagaggcttggggttagcatagctgctatatgggtgaaggcaagctgaagagcctaacagccctgcccattcctctactgaaagatcttgtttcactttctcactataagaataggaataagatgttaaagctcaccaacatcaccttctcaagggtggtcacatacctttgccccttccaccaactggccaagggggagagtcatgctcttgggaagaatgagccatccagttttgctcaccagcttgggctttactttagttcagtactgtttttatcagacccgtaactgctggctctacttagagtgacagttttgctgaagattcttacccccacctctcctgacatcctctaagctcttgcctggagccaagaggcctggtggtgaagtaaggatagggtgtggatcaggagattctcaactccttggcttctaggcactgtccagctgggaggcagaggggaacttgtactctgaagcctgtgactcctcttaagcctcacatctcttcaccactactctggtgccctggttatctgtcccacagcgagaggtattttatgtccataaagtgcccgtggtaagtgctcagaattcatctcttggctgtggcgggtgctgtcatttctcattccattgaggggaagaaactgaggcacagtgagtccagaggagaatgggtcagggttgtgggaggaatgaatgggcctagctagtgacttgaaatggcaaccagtctctgcctgcttcctagccttccaagcccgggagtctccatccttcccatcctctgttctaactggccttgtcagatgcttttccccactgtactttcccctccctgctgccaggtactgttaga

SEQ ID NO: 69734 - DNA, 1162 bp, Homo sapiens
tgcgatctcagctcactgcaacctccgccacctgggttcaagcgattcttctgcctcagccttccatgtagctgggattacaggcgcacgccaccacgcccggctaattttgggtattttagtagagatgaggtttcacaatgttggccagcatggtctcgaactccggaccttgcatgatccgcccgcctcggccccccaaagtgctgggattacagatgtaagccactgcgcccagccagctttccttatttttgaaaaatgtgagtcaggcaatattcttttgccattcccaactcatattcctggggaattgtgctctaggtacatgggaaaaatttttacagtgaactgaaagaatatttgagatgctattttagccactcttgtgtaacaaggcaagttcgttggctatgttggtttagatttttgtcaaacttcgttgaggaaacctaggaacagggactgcaggagaataggacactagctggatcatctcaagagaacctttagatcttccatactagctggatcatctcaagagaacctttagatcttccattctgtggaggctgggagaggggtcttgttgtctttgggactgttttggctcaagcttttcagagaggggttgttctaggtacccccagtttcctgtcctctttccatccttccttggcctgcatgtcccaaaccttataccaccatgcccttagtgttttctgtcttgctccaggaccccatcttcttagtcattgaacacgaggtttcctgtctcagatcctcttcacctccggttctccaaggtgtaaatgtggcacttgattagggagaagagctcagcactgaattctaaactctttgaccgcttttattttttttttcaggttcaagtgctggattgtgtcatgtgaccatcccaaaactcagagcaccctatggccgtctttgccctctgtcacataacttgaaaactgcctgatggcctttttgcagtggttccctccaggaagccttgatctcagttgaagaagttctttcctggcattccaatgcccctgtcagctccatactcctcagacacccttaacaaaggctgtcatgcacacaatgtgacaaatacacaaaataaatgataattacactaataatgatatgttca

SEQ ID NO: 69735 - DNA, 1053 bp, Homo sapiens
tgtaacttgagagattatagattcactaatggtttcttcctgaatatggttttaaaaagagaaaaatacatgagggaatagagcagatgctgattatgaagtggaacagtggatcttttggaagttttcttcgtctctttatcctctataaccttccagaaagatattcagccttacttgccaggattctcttcttgaagcctaattattctcctcactcatcttacttcccctagatctttgaacagtgttttccaatttgtgaggatttttttttttttcttattaacctctttcatcccatttcagcagctgttcctatgttggtcagaagtctctaacctccaagccagatgaagtcctccccttcctatctcattatagtcattctccacatactctttgagcatgaatagttcaggatgcctttttcccaattcagttttaaaatagtaattccgtttggagatggaacagacattgaggcttgtaattgtttacctgagatcttagtacccttccttcctctccccgtttccctactatagttgatccagcatccagatgtggttaactgattccaattcctgaagctgtgacattctctgcatacctggaagctcttaatgagggagtctataaaagctgtggggagaactagcttcctcagctgtaaatctgtacttttttatggttctctaggattattctttttttccactctcactctaaactgcccagccccccaccccacctcttaagaactgctgaagatagaggctagaagcttctgtgaggatgagggctataggaaggaaggtgtgaataagggcaggacttcttggtgttgagctgagttctcttgctgtgtctgatatgaggagtgagggaggaacttaagggaggataacttttttgctgttctcttatatgagggcctctggcaatgccacttatttctgattattggaatccccccaaaatttaacctccccttctcttgccatatctagacttttcttgtttttcccttccaaagggatttaaaattac

SEQ ID NO: 69736 - DNA, 1019 bp, Homo sapiens
ccttaatttaaaatttctagttataggctgggcgtggtggctcatgcctgtaatcacagcactttgggagactgaggcaggcggatcatgaggtcaggagatcgagaccatcctggctaacacggtgtaaacccgtctctactaaaaatacggaaaaaaaaaaaaaaaacctagctgggcgtggtggtgggcgcctgtaagtcccagctactcgggagactgaggcaggagaatggcctgaacccaggaggcggagcttgcagtgagctgagatcacgccactgcactccagcctgggcgacagagcgagactccatctcaaaaaaaaaaaaaaaattctagttataacctgatgactctttcctctctcttttttcttctgaggacattgagtattttaaaataaattccattatgtttatagaggagtacgttcttaagggaccagcagcaaccctgtaactaactacacttcatcttgctttctaaattcctatctctgtttctgtgtgtttgcttttcatctctggatttcatgtttctctctcacttcaatacctctggcctctctcttctaatagaaacacagatactcctctccttacaatgggggctatgtcctgataaaaacccgtcttaagtcaaaagtgcatttaatacacctaaccttctgaacatcatagcttagctagttgaccttaaaaatcccagaacacttatattagtctgcagttgggcaaaatcatctaacacaaagcctattttgtaataaagtgttgattatctcatgtaacttattgaataccgaaagtgaacagagtggttgtatggatacgtcaagtatagtttctactgagcatgcatcgttcgccgttgtaaagttgaaaaatcttaaggcaaagcatcataagttggagaccatttgtatgttcaaaatcacttgctaaaggtaggccacacatttggctccaaactttatggcagccagtagaaagggaaagcacagttgcactgtttat

SEQ ID NO: 69737 - DNA, 1605 bp, Homo sapiens
gagatgcaattcctggtgttctctaattgtcgtgtaactttaaagttcctagcaccctaccagccctagaaagttgatactgatctcacacttgaaagagattattgagagtaggttaaggtggttatattggggaggtgtgttatgtgtatatgtgtggatagtgttggagtgtctctaccatattatttgctaaggcggtgtacttgctgctagtctggtctctcaccttcatctacttaagctctgtgcattgatttttgggaccaccctatgttctgtcgtctggttggcataaaggctcgggaataaacagtttcagaaactggggcaggggaggtgacagctgtgtttttaagcatccaagtgtttctgagagaataaccatcagttgctgtcattcatcctgagagtatgaaattggaagctcgcttaccctggagtgtttcataacctttacctctgggaagtcaaggccgtgtcatcattaatctaccatcgcctgaaagcccccaggctctgcttttcatcctgccatcagtcacgtggcactgagattcaggctccctcttttcctttttgccatgctaccttacattcctttggaaatcagactggcctgagaactattaacatcttagtatggtaactcatttacaaaggggggcagttatttgttatttttgtgaaatatgacatcttagctctctgtcagcctctcttccatcactctagggaaaagacttttgagggggaaaataatagcagtacctgagctcccctgaaatgcttctttctgcttctaaggatttttctgactggactctttagattggaatttctgcttctcacacatggtataaggagggatgataagtgagtgagcttgttacacttgaccaggaacagtgcctggcttggttaattcttttggtcgcagagaataacgatgtttcttatttgaatccagtgaaagtactcatgctttgtgttcttgggaattactgagttcaaattcctaatgatgcttgggttacactttgctttgtttctcctagtttctttttatatgatccggagtggcactggtaataagattgaagaaggtgggccgggcacagtggctcacacctgcaatcccagcactttgggaggccggggcaggcggatcacctgaggtcaggagttcgagaccagcctggctaacatggtgaaaccccgtttctactaaaaatacaaacaaacaaacaaacaaacaaaaaacagccaggcgtggtggcatgcgcctgtaatcccagctacttgggaggctgaggcaggagaatcacttgaacccgggaaggagaggttgcagtgagccgagatcacatcattgcacactccagcttgggcaacaagagcgaaactctgttaaaaaaaaaaaaaaaaaagattgaagaaggtgaatgctttcaacacacaacccatgggatgctaattacatcaaattggaccccttttggcagagtaaacagccatggcacacaagcaaggagcagtattctttactgtatttaggataaaattagtaagttttgaaaaatgttctcatgactttatatcttg

SEQ ID NO: 69738 - DNA, 1016 bp, Homo sapiens
gaactatgatgaaagattctctctgcttttctatttgaattgtaggagagcaataagacaggtgtgctacctagagtcctctgtgatttcttcacatctctctttttacccctcacatctctgcagctgaaatagtttttgtaggaagcataaactttggaatacccttagcatttataggagataattggagcaggatgggagtcttacttggacttgatgagaaattttaaaaagttgtttggtctatattttttcaaagctacttgaaattggccccaaataatggttgcatgtaagggttacaggggaccctttaaaaaatacagctctgtaggccttcccttttgagatacagattaattaggttgggttgtggcctgaaatctgcatttttaaatactttagatgaaaataatctgttttcctagtgctcactctaaatttctgaatggtcaggtaactgtcctcccttctctgtatgttttggctaagacagcattcacgtctcctgaaaagtttcagcttcccaggctgggcatggtggctcacgcctgtaatcccagcactttgggaggccgaggcgggcagatcacctgagattggaagttagagaccagcctggccaacatggagaaaccctgtctctactgaaaaatacaaaattagccgggcgtggtgttgcgtgcctgtaatcccagctactcgggaggctgaggcaggagaatcacttgaacccgggaggtgaaggttgtggtgagctgagatcatgccattgcactccatcctgggcagaaagagcaaaactctgtctcaaaaaaaaaaaaaaaaaaagtttcagcttccctctactgacttcttgacatttctgccaggctctgcatcacttatcctcaaaagcagcagctccttggcttttaaaggagggagatggggacttttaatagaaacttgatttctgggggtgtcaagtgtgacaccttcatttcctctgcctgccttgctttgtcctacaa

SEQ ID NO: 69739 - DNA, 1068 bp, Homo sapiens
gagtgagactcttttttttttttttttttttttttttaaagatacctacctctgactgactttcttaaaccataaattgacttttttttctcccttttgtctatttttacttagagaatgcagaagagggctgaacgattcaatgtacctgtgagcttggagagtaagaaagctgctcgggcagctaggtgagtgtccccagccttttgggcctctgataggggtgttgtaaagatgaagatgtgtgatcctagcttttaggtataattgttgattttaagtagaatagaggcttgctgaaggatatgaacacttttttgaccctattcagaacatgtctactgatttggttatagtagctataaattgagctttattgagaagggtttttgtaacagttaaagccaggaactgactactactaattctgataaggcttccttttagcttaatttctgaacctctttcatggggttgttagaattagctaatgattgcaaggcttgagatcacaagcaagaagtgtcatatgtatacttgacacggagacagacaaaccaggagtgtgaacagcttcctaaaatttagtttgtttttccttcttcaggtttgggatttcttcagttccaacaaaaggtaagagtacagagatacttctgagaaagttacctttttattctttcttttctggtataacaggttttatttctccaaaataaggtaaatttgctagctgtagaaactctttaagagattgtaacattcatctcctgctttaggtaaaattatacttaggccttcctgggcaattaagagagatactgaatgttatgagaggataggaagtgccaacatttgtctgtcttttcttgaacatcttcaaagaagtttctctagtactttgcttacttattctggggtctcaactgcataaaattattgcatactatctagtgttatactggctattataagtgataaaagggaaaagaatatcttctaccttaacagttttacttctaggaacgtataaggaaatagtcttgaatgtgcataaagacttagcct

SEQ ID NO: 69740 - DNA, 1043 bp, Homo sapiens
cagtccagggatttccaataaaagggtggaagagagtaagttcttattccagaattgcttcctctgaaaatgtcattaaaccattactacctttcagggcatcaaatgggaaaagtgttcaggatattggaacaaaagctgcccatgtctctaaatgagggaccttaatgagactggttatgacccacagttttatgggagttgtttggtggagggttaatgcccttccatttatcgtgggtacttccgaactttgtctcccgcccctgtggtcccccctcttttgtttcctcttaaacctttgaccactagcttaccatgttttcctaattcaaactccccttagacttttttcttcctaccttctttggcatttttatttgtttcactttgactgttccagctagagctacattccccatgggagaaataagggatttttaaaagaaggaaaccagaccttgtagagtacttattaattgttgtgatgaacattgggaggtggtacttaaaggaggattggagggttactcattagttcaaaagtaaattaaaggctgggctcggtggctgatgcctgtaatcccagtactttgggaggccgaggtgggtggatcacttgaggccaggagttcgtgactagcctggccaacatggtgaaaccctatctctactaaaaatacaaaaattagctcggcgtggtggcaggtgcctgtaattccagctactcaggaggttgaggcaggagaatctcttgaacccaggaggtggaggttgcagtgagctgagatcgtgccattgcactccagcctgggcgacaagagcaaaactccgtctcagaaaaataaaagtaaattgaaaagttcctaaaagcaaatgagatggtttctggtgtcctttgagtgtttcccttcagcccagtatatttaaccagacttctttccttatttctttattatactttagctaaagaagcttagtttgttatttgaactctttcctctcaatagatgacagttaaaggaaccaaagctctagtggac

SEQ ID NO: 69741 - DNA, 1001 bp, Homo sapiens
aggatgtacatttaacatcttgatagatttttgtcaaatatccctttatttatttatttttgagacagggactcactccgttgtccaggctggagtgcagtggcacaatcttggctcactgcaacctccgtttcccggctcaagcagtcctccagcttcagcctcctgagtagctggaactacaggcacgagccactacacccagctctttttttgtattttttgtagagatggggtttcgccgtgtttgccaggctggtctcaaactcttgagctcaaagcgatccacctgccttggcctcccaaagtgctgggattacaggtgtgagccagtaatcacctgcctatcaaatactactttccagcctatcaaatactactttctaaagccatttagttatctttccatcataagatgtttataattagatatagtgccttgaaaaaatgactttgtgagatagctttaaaatagaaatgttatggggatttctggaacaagaaagaagatcaagtgaataccatgataattggcttctgtgggttaaaaaatagaggttcgaaagtttgaagttcattattcatagaatatttaaaatgtgcattctgttcagggggctttaattctattaatgaattttgaaacaaggaaattgaagtgggtggggtgatcgtttttgatttttagaggatagttgtggttagactgaagtatgtacaaaaagattctgggtctctgtatttcagggaatgttgtttatgtgattgggtaggagagaaatttctcagtgaagagtggaaatttcccatgcatcccagaattcgatgtttatttattgcgcttgagtttagttgcctaagggaattgtaatagaatggaaggaaacttcccgtctggggttccctttctgccatgatgtgcactgcattgactgtgcttcagaatggtaatggggaggaagtcattacactggggttgatggagagtactactttcttga

SEQ ID NO: 69742 - DNA, 1027 bp, Homo sapiens
gctggctgccacagtagtcttaagaaaaaaacctttttcccccctcagaatatttagaaataactagagatttgtgacagttagtaggtatacaaatagatgaggttttttattaaagtgtgatgtttattcttcagcatctgttaggcagttcctcttgtatattgaatatcgttagaggaaaatggatcatctttgtggacctagagccttggtagaattaagggcagtaatttgggatggaacttcattttctttttttcttttccttgtgggaactaccattttattcactggtgttcatcctgttaactaaggaaaagttttatttttttcccctcagcttgccgaactaaagcaagaatgtcttgctcgtggtttggagaccaagggaataaagcaagatcttatccacagactccaggcatatcttgaagaacatggtgagtactttgtggaggcggagtgatgtgagtgaggggattttcaggctttgacactgaaaagatttcttttttttttttcaggtcattagcaatgtaagctcttaattaacggcatcaagaaaactctctcttttttttttttgagatggagtcttgctctgttgcccaggctggagtgcagtgacgcagtttcagctcattgcaacctctgtctcccggcttcaaccaattctcctgtctcagcctcccaagcagctgggactacaggcgagcaccaccatgcctggctgatttttgtatttttagtagagacggggtttcaccatattggttgggctggtctagaattcctgacctcaggtgagccacccgcctcagcctcccaaagtgctgggattacagttgtgagccaccgcgcccagccatcttgtacaacctacatcttaggttgtacaagtcctctatctaatttttatttacgtattcccttttatttctattcctcatttcactttctccccaacccatttaggcacccgttctaatgtgtttgaatgtatttttttggtgtttttcctggt

SEQ ID NO: 69743 - DNA, 1047 bp, Homo sapiens
aaggaactattgcagaggagaggagaaagtgatagtagtgtcagagtgttgagaatagtgagacatttgtattgaaaagtgaagtgaggaaatatattggtagttgaagatagtttggaaaggaaaataggtaaactataaaggtaaatcagagtgatattgaaaagggctttctaagttatgtaaggacttctggcctttgtcatgtaagaagtagggctgggagcctttggaagtttgaaaggaggagcttgatgtgatcagcttgtattctcttggcggatgggatttgtagggggagcgatttcaccacttagatatttattataggagtcattcccctgcttaaaacctttaaattatatccctgcccgtctctccagcatagttactaactcttcaactactgtggccttattttatttaatttcttcagaatgcttcatcaattgccaacacttagcatttgttatgtggcaaagcactgtttgaagccatttacatacactaactgatttaattctcataataaccctgtaaggtaaatacctgtattatcctcatttgaaaataagaaaaaccatagctcagagagagtaactgagtaacttgccttaggttgcacagctaaaatgttgtatattaaatccaagcaggctgggtgcagtggctcacgcttgtaatcccagtactttgggaggccgaggcaggcggatcacctgaggtcgagagttcgagaccagcctgaccaacatggagaaaccccgtcactattaaaaatacaaaattagctgggcgtgatggcacatgcctgtaatcccagctactcggggggctgaggcaggagaatcacttgaaccgcgtaggtggaggttgcggtgagccgatatggcaccattgcactccagcctgggcaacaaaagtgaaactccgtctcaaaaaaaaaaaaaaaaaaaaaattccaggcagcctgtgtccaaaattcatgttctaatcattgcacactgcttctccctcttacctcaacctagaaccttcacatatgct

SEQ ID NO: 69744 - DNA, 2315 bp, Homo sapiens
cagtccagaagccgtgggcaagttgttgtcgtgccccacgcttgagagaagtaatggggatgcagactgtttacatgccacggaggtgagagagagggtggacaagccccagagaacaaagtggggaccagagtgagctttactctgtcatcccttcttagtggttctttgatgattccatgactttcgcctggaattctgggtgtacgtgacctcttcatggttattaacttcttcagcaaagtcagatactcctatttcccttgctccctgaagtgagtgccccaagcctacacatacaccttcatgttacagttgacgtgtaaagatcagagcaataatgactatgtctctgaaatgtagtgaggactcttcttgtcttttaaagttttccccaagtcttcagtttttattttctgcgtgatgggtaagttcttcattcccaatagagttcaggggattggggctatctgagagacaactgggagatagctcaagaggggttgagaaaaaactgagctggactcctgcctgatcccccattacggctaggatgaatgtgggggtggcacacagcgaagtaaaccccaacacccgagtgatgaatagccgaggcatctggctggcctacatcatcttggtaggattgctgcatatggttctactcagcatccccttcttcagcattcctgttgtctggaccctgaccaacgtcatccataacctggtgagcactaaaccacgcccttgtacccaccccagggtttcccaaccaaaagcaaaataaaatcaccaattgtttggggatttatgtgttccttttgggatcttaacataattctttgactgaaaaactactttctgcccctcacactgccaccttccctgttcccaggctacgtatgtcttccttcatacggtgaaagggacaccctttgagactcctgaccaaggaaaggctcggctactgacacactgggagcaaatggactatgggctccagtttacctcttcccgcaagttcctcagcatctctcctattgtgctgtgagtctatgggggaaatgagatatgctgggttagaaagagctccaagagccaggtagaaaggcccatagggaagctgttaaaaagcagacttctcatctaaaaccctttgaagatattatggtatactagttctaagcctacagagagcagtaaaatgtagattacagtcaatactgtaatcaagcattccttgctgcctccttggtagtaaggaaatgaagggactgagaaaagataagtgccaaataaaaccaaatgattttacactgccaaaagaagtaaataaaggcagaactgatattaatcttcaaaaacactgtagggagtggaagcaaagaggactgtaacagtcatacagactgaaatagcttgagccgtcatttgccatgtcattaacaattaacagatactgacttacagtctccagttaagggtgctatctcctgaaccccaaagtaaatgctgttgatatagctggaatagttttagataatctagaactatatacagtaaaactggtcatttaaaatagaagagaaagagcagggcactgtggtgcatgcctggagtcccagctacttgggaggctatggcagaaggattgtttgagcccaggagtttgaggttgtactgcacgtatcacacttatgaatagccactgcactccaacctgggaaacatggtgagaactgtctcttaaaaaaaaaaaagaatatggatagagaaggtcaacctcactcaccctatttttttctctccccagctatctcctggccagcttctataccaagtatgatgctgcgcacttcctcatcaacacagcctcattgctaagtgtactgctgccgaagttgccccagttccatggggttcgtgtctttggcatcaacaaatactgagggatgggttttgggacagctccatgggcatggggaaggcactgaaacagaggactataaaacatccttctcttattctccatactgtcttctacacctttaaagcctgagaactatacaacctttcccagactcccaagaagagaagagattggcaaatggggctcctgggcccagtcctgctagtggcaagtttctttgaatcaggaaggcaggtgaggtaagggccaaatcactctcctccatagcaggaagccatttgggcagcttctttggtgattacatctttccatatcttttacacttaccaccttccagctctgttttgctgtgtatttttcttacaataatttttttcagctatag

SEQ ID NO: 69745 - DNA, 1027 bp, Homo sapiens
cctaagcggcggaagaaagtgaggaggcccttccaacgttgatgccccttctctttcctcaaatcaatgtcagggagtcaaaagggctgtagcacaggatggagtttgatttatccctcctcccccaacacctaggaactgaatctttttctttttattttttgagatggagtcttgctctgttgcccagctggagtgcagtggtgtgatctcagcttactgcaacctctgtctcccgggttcaagcaattctcccatctcagcctcctgagtagctgggattacaggcacacaccaccacacctggcccagctaattcttttttgtatttttagtagagacggggtttcaccatgttgcccaggctggtctcgaactcctgagctcaggtgatccacccgtcttggcctcccaaagtgctggattacaggcataagccactgtgcccggcctgaatcttgtcttttgacaataccaaagaaatagggggtagctagagtaaagaacctagggcctggacctgggctggacagtgtatccctttaggtgtgggaactgggtatttccctggggtctgtatgcctttgtcttgtcatttgcttttagggcagatgacactttttcccacccttttaaagctacaagtctatcttctttcttgacccatttcaggagggagccctctcctttatcctgatataatatttaaaagagaacaagaaagcatgtagccctaatgataggagattatcgcatagagttcagagactggaaactgaattttccctcgactttcactttgtgggtaaatcacccaattttaggctcttttctgcaaggatggccaaaattaatcatttttaaaaagtagattcatgcccactgcccttgggtgagggggaagaatacgggggttcccagaagcccccatgtgatccaagggtttgtattttttttttaagtttgttcatatttgtatgtacatgactatttaaagccaggggattatctttctataaatgtataa

SEQ ID NO: 69746 - DNA, 1028 bp, Homo sapiens
tgtaatcccagcactttgggagggtgaggtgggcagatcacaaggtcaggagatcgagaccatcctggctaacatggtgaaaccctgtctctactaaaaatacaaaaaaattagccgggtgtggtggcgggcgcctgtagtcccagctactcgggaggctgaggcaggagaatggtgtaaacctgggaggcagagcttgcagtgagccgagatcgcgccactgtactccagcctgggcgacagaacaagacaccgtctcaaaaaaaaaaaaaaaaaaagagggtgtgcagatgggagttgtcatgcaccttatgcttgagggaaatggtttaatacaagcatgcaatcaaattgcattagaagtagatattaggttgatattagataacagattgttactgctatttctgtacaaataaaactattatgaatataagtaaggtgtgtaaattggaggcctacttacactggagtgtatggagctggactggtaaaacatcacagtgtgcaaattacctcaatggctgcatgacaccaaagaggaatgggcaactaaagtttccattaatgattaaaggtacagtaaaccaccacacctgtaacttaccaaaggactgaattaatttggtgggaaatgtatgccccttagtaggtagcttggtatattcttttttttttttttttttttttgagacagggtctcactccagttccccaggctggagtacagtggcaggatctcagctcactgcagccttgatcccccaggcttaggtggcttccacctcagcttcctgagtagctggaactacaggcgtgcatcaccacacctggctaattttttgtatttttagtagaaatggggttttgttatgttggctagcctgatctcgaactcctggactcaagcaatttgcctgcctcggcctcccagagtgctgggattacaggcgtgagccactgcgcttggcttctgctgtattcttagagtgggtaacaattgtttactctcattgttactaattcta

SEQ ID NO: 69747 - DNA, 1094 bp, Homo sapiens
agggactgctcctaatggtacccgctgcctcacagagcactctggtcctaagcacacacagcacccaaacccagcccattggttggacccaagccatggccccccagggggtccaggaccacctagagatgcagaggaccctgatcagagtgagacgtcttcagaagaagaatcaggagtggaccaggaactctcaaaagaaaacgagactgggaaccagaaggatgggaactcttttctttccattccatctgcttgcaactgccagggaacacctggaattccagaagggccttactctgagggaggaaatggttcttctagcaacttttgccaccactgtacctctccagctttgggggaagatgagttggaagaggaatatgatgatgaagaatctctcaagttccccagtgatttttcacgtgtgtccagcggaaagaaacccccatcccggagacagcggcaccgctttccaacgaaggaggatactcgggagggtggacgtagggatcccaggtcccctggtcgacatcggctgggtcggaaacgaagtcaggcagataagcgcaaaggcctgggattgtggggagccgaggaactatgtcaacttggacaggcaggcttttggtggctgattgaactgctggtattggtgggagagtacgtagaaacttgtggccatctcatctatgcctgcaggcaactgaaaagcagtgatttggacctttttcgagtttggatgggagtgtggacagggcggttagggggctgggcccaggtcatgtttcagtttctaagccaggggttttactgtggagtaggactgtttactcgttttcttaagctgctgggtgctttgctgctcctggctctggccctctttttgggctttctacagttgggatggcggtttctggtgggactaggtgaccggttaggctggagggataaggctacctggctcttctcttggctggattctccagccttgcagcgttgcttgactctgctgagagatagcaggccatggcagcggctggtaagaatagttcagtggggctggctggagttgccttgggtcaagcagaata

SEQ ID NO: 69748 - DNA, 1079 bp, Homo sapiens
gggtgctcttgaccgacagccgcacccccggcgtctaggacctccgagcagggatgcatctggaggtctagggaagcacttccaccccctcctctcctcaatcctggcaggatggtgagtagttaacatcccctccccaacccccgcttgtccagggtccccagacttccaagcagattgaggagaggagctccgagagtcaaccctccagcctgtaaggaccttgatatccaaaggacagctgaagaaagtaatgtgcctgcatttttgccacttcattcccacagtgcccgaaatgccagctcctccttggtgttctcctttcaggatttgaattcaaatcccattggcagccctgataccgctgggggaagggtgaggtaggaaaagtcccaccaatatcctaaggggaggtgcgagtggctaccaggatgtgagatgtctgtgggcaaagtccctgcttattccatgaggggctgtgggattaggactgtggctggatgcctcttcctccaacaactccatctcagcatgaagctgaggctttaaaaccctgacaaactgtgggtgactgtctctacttaattcctcctcccaaactcttggtgtctggttttttccctctttctgccctgggcctggagcagctgtccagagacccccaccatgactcatactctcctgttctccctccctctcccctctctattaacctcacccttcccaatccagtggggtagtattaagtcccagtcgcagatggggcaataatgtcccagcacccctccctccacacacccagggcttcctgttctttccaccctcaccctgaagagctgcagggtggtggggggaggcaaaggctcattactttataagattttcattactttataagatttcattttacattttacttaagtgtacttgtttcagagagtggtaaagacagatcctgctcctctcaatccaatcctgtagatttcttcagttacctcaacagggtcatactggctcctgaaatgggcaccattatttaaaagaaatagaggtacagagtcctcaagatttatgggcac

SEQ ID NO: 69749 - DNA, 1026 bp, Homo sapiens
ctgccaggggttcctacctctagtgtggcccatgttgctctggctgtattcctaggcccatgttgctcttgccagcttcttgtccatcctccatgcccatgccttccagctttcacctctggcatctatcatttgctcttctcttaactcctacctgaaaaccccattcctaaattattcactatatttcagacttcttcactcttctccaaaaacctgaatcagcttgtgctgattttttcctatctgctatccctaaaaggactagaccttctttctatccttactcccctcaatgtatccatcttacctcttgattttccctcccattccctcacagttcctgaaacagtgcccccccccgaccctaagcgacccctttctgcccctggccttgaggtcccttgacgtgctgctcctgtcttctgctcctctagtgagccattcctctcccttggaattcatcagagtcatccctgtagagcccccttcctgcctctcaattcctcctgcctcacttcccaggctactgctgcttcaagacagtgacgtttctctccggtcagctgtcaggagcgctggtgagcttcctactgtgccacaaggtgcgggtgctggagacacagctgagcctggaaatgagagtgggcatcgccgtggtcatcatgactcctctgcggcgtggtcaccatgttggttcactgtgttgggctcttattgacgggtctcctgctaggcctgaccttgggtgccggagccctgctggcttctgagcctatctaccaaccaccttcagcctgggtgccagctggggggctggtggggctggcgctgctgggagccctgctcacacttcggtggccacgtccattcacagttctgggcacaaccctgctgggttctgcagtgcttgtggcctgtgttgactacttcctggaggggctggcactggggagttggctgggccaacgcctgcagacacttccagccttgccttctctctgctgatatagctgggtcttactg

SEQ ID NO: 69750 - DNA, 1037 bp, Homo sapiens
cctcggctgctatgagttggcaagatggccgagtctacttcttcaagggcaaagtctactggcgcctcaaccagcagcttcgagtagagaaaggctatcccagaaatatttcccacaactggatgcactgtcgtccccggactatagacactaccccatcaggtgggaataccactccctcaggtacgggcataaccttggataccactctctcagccacagaaaccacgtttgaatactgactgctcacccacagacacaatcttggacattaacccctgaggctccaccacccaccctttcatttcccccccagaagcctaaggcctaatagctgaatgaaatacctgtctgctcagtagaaccttgcaggtgctgtagcaggcgcaagaccgtagatctcaggcctctaacacttccaactccagccaccactttcctgtgcattttcactcctgagaagtgctcccctaactcagatcccctaacttagatttggcccccaactccatttcctgtctgtcttagacagcccttccaactgtgtcatctcttctctggaggtcaatggtggagggagatgcctgggtcctgttcttcctacataaaatgcaagaaaacagcatggccagtaaactgagcaagggccttggaatccttgagaatcacatttatgtgcttatgattacgggcaagctaattaaccttgttgaatctcagattccccatttgcaacattaggttaagaccagtactgcaggattgttgcactaaatgaaatactgtatgtgaagtgcctggcacagtgtctggtacatttgtgtttaataaaagctaactccatgttcataagagaggactgaacagctcttcctctagctgtctggctgtataactcttacagtagtctgtataataagggcatctctattagatctttaggggacagaggatttgtcaagatggttagctctttgttttggggtgcagagaaagaaaagagcagcaacagcagaggctggactccctggttcagt

SEQ ID NO: 69751 - DNA, 1242 bp, Homo sapiens
tttctcctccccgtggtttttgtgtctttttagcctcttgttcatttactgcctttcatgttcccatgctattgccttggttttttaacaaaattcttcctctgtgcctatcctgtcttacctacaaatagaatcttcttgagggcaaggatggtttcttgtacggtgtattggcactcggtaaataaataatgagagagggattgagtgttggtatgagaaaaggagcctaatggttgcatttggatgaatgggtgctgagagatggtatgtacatttatacattcttgtctcatcttgtaaaatgtttgaaaataagagtaattttcaacttgatttttcttattttaggcaagtatatcgcgtcaacacagcgacctgacgggacctggcgcaagcagcggagggtgaaagaaggatatgtgccccaggaggaggtcccagtgtacgtggttaggctttgcgtaggggttttctgatggggtccctacagaaggatagaatatccttatgcctacaagttcagggaggactctcctaagccccaaggaaatggaaggaggggcaactatctgagaaaggagagaaagagtctgggattcagggatgagtgagggttacagatcactagtcctatacttttgacctctgttcattagaacctccagagctttaggttctagggacttcgctgcatctttcctgcagagcagaggaaagttggggagggaccataaagagagaaaggtggtcaggcccagtggcctacatctgtaatctgagcactttgggaggcctaggcaggtggattacttgaggtcaggagttcaagaacagcctccccaaagtggtgaaaccccgtctgtactaaaaatacaaaattacaaaatacaaacatcagccaggcgtggtggcacgagcctgtaatcccagctactcaggaggctgaggcaggagaatctcttgaacccgggaagtgggaggttgcagtgagctgagattgcgccagtgcacttcagccctggcgacagagcgagactctgtctcaaaaacaaacaggcaggcgcagtggctctctgtaatcccaagcactttgggaggccaagatcggtggatcacctgaggtcaggagttgaagaccagcctgaccaacatggtgaaaccccatctctactaaaaatacacagttagccaggcgtggtggcaggcgcctgtaatcccagctacccgggaggctgaggc

SEQ ID NO: 69752 - DNA, 2299 bp, Homo sapiens
tggtatctgatgacaacccaggttgctgctacttctccccaacctcacaatttaaagtggtactacctctttccttctgttctctacccagtagctccttcatgaattaccaacttttaatgtgtgttttgaaaatactacttatccagtatacttctctttactcttaatcattttctttaccctgactccgtgaaaatccaggtatcacatcttaccttaccttgtcactaaaagctgttttctgttttccgtgactatgtggaagagaaaaaggaataaactgcttttttgttttcctttactatgtccagatcattgatctaccactgtcactctaatcctcatggaaggtattgccatgcaattatagcagtttctgtaaaactttagtgtcatcatttactgcccacagggacccagacctattgcatcatatttttttctctcctttttttcttgctatcattttcagtgtctccagcaccattggaatattctgatttcatagttcctcagcatgagacggtcgactttcctttgtattttcaaaccagttgcacatcagaatcactacaacctggatctcatctaggacaccgctttttcttcagctgctccccatcactttagcctccttaccagtcacctatttcactatcttaaacccacaggatcagctttttgtcctcaagttctctggttcttgaccttcccatttcattgaatctgtcagtaccttatggcctttggtgctgcccagctagacctctgtgaccagccactttgataatatcctcttgctttctttattcattttgattttctatactaagcaggcacttctgttgtctctaatgatgggtatgattagagatgttttcttggcttccgcttctaggccacagcatgttgctagagaaaaagtacagagctatcagattcaatataacttaacttctgccaagatcatggcttctaattatttttttctttttaaaaaaattttttgctgggcatggcggctcacgcctataatcccagcactttgggaggccgaggtgggtggatcaactgaggtcaggggttcaagaccagcctgaccaatatggtgaaaccccgtctctactaaaactactaaaattagctgagtgtggtggcatggtggcgtgggcctgtcatctcagctactcgggaggttgagacaggagaatcgcttgaacccaggaggcagaggttgcagtgagctgagttcgcaccactgcactccagcctgggcgacagagcgagactctgtctcaaaaataaataataaataaatatttaaatttattttttatgttcttccatagctgtttccccaaccttttccagatctgtgtgaccatcccttttaattctccttcttttggcagaagacttcatttttatttcactgaaaactcaaggcctatcatttttgtttcctttttcttcacagccagattttgtttgtttctttctttttttaaaaatgaagcgatgcagacttgctatgttgcccaggctggttttgaactcctggccttaagtgatcttcccacctcagtctgccaaaatgttgggattacaggtgtgagcatgcacctggccccagatttctcgaatatgaagaaatctcctgatatttctgtttccttgctgcctatttgttcttaactctttgcagtcattatttctagcactaccctctctcgagttgcctatgcctttttctaattgtttcgtgaatatcttcactcttggatatactgttatacctcaaatccaacctgaccaaaaccagtatcagtttttccatcactatttctgttaaaggcaccattattctagccaacccaaggtaaacttttgtatcgtttctttttttttttttctttgagacagagtctcactctgtcgcccaggctggagtgcagtagcgcgatctcggctcactgcaacctccgcctccctggttcaagtgattcttctgcctcagcctcctgagtagctgggattacaggcacatgtcaccacgcttggctaatttttgtattgttagtagagacagggtttcatcatattggtcaggttggcctcgaactcctgacctcgtgatctgccagccttggcctcccaaagtgctgggattacaggcatgagtcaccacgcctagccatttctttttttaatattctaaatatacttgattttttagaacacttttagatttatagaaaaattgagaagatgctacagagatttcccatatacccta

SEQ ID NO: 69753 - DNA, 1056 bp, Homo sapiens
ggcttgctacgatcgggactccacttccggtggggaggggggcgggaccccagcccgctcacgccggaagtggtttgcgttttcaagatggcgactccctatgttactgacgagaccggcggtgagtgcgggaggcgcggagccgcttctctccgggctctcggggcaggggttcggacttggaaaggggtctgtgccccgcccatcccggggcccctcctttgccccgccccccggaccgccttccccattcattctctcctacggggtgtctcctgcgcccccttctggtctcgtgtttggggtctctgcttccggtcacccaaaccctggggtccttcagtgctggtccctgcttcaggaccctcacgggcccttagcttttctccagcagttggaccactcatatctcttttaggttcttcaggcttgggggcttctacactctcatttccctccagttcctgccctccttcttttcccctcccccatctcagctatacttggtttctgccctaccccagtcccgttttcattatttttctcgaagctttatttgctgaagacctcctcgtttctacatagtaccttttcctctcccgtatcttcatttgttgggtcactgaggtttagaggtgtgaagggaagaggaccctaatacaactttcagcttgagttttctccctgatggagccacccttcgctaccttctcccgtgatggtgatagaaattgaggggtctaaggtgggaaaaggcaaacaggaaagtatctagtggcttttctccgaagccctttgacaagtgaataaaacccactattccttctggctagagaagaatttgcagcctggctggccgagatgctgaagtgtctgctgtgtatgtaaggtgtatgtgttggaaacggagaatcacagcttttatcatggttttgtcccttcctaatggcctcatctttaggaaaatatgcatagtagtaatagctactcaatgatgatcaaataatatatgtaaaagcaatttataaaatactgtgcaagtgcaaagtgtttctg

SEQ ID NO: 69754 - DNA, 1048 bp, Homo sapiens
agtgattttgcccagctgcaaaaatacatggaatgtgagtcttcctgtcaggccttcagttctggagaccctgccccagagaatccctcctcctcctcattacaccccctgccccccagcttcctcagtggctttgagcagtgtgctgctcagatgtgcccatgactggaaatgggaggagtgggagatggggagatgtcagaaaaagatccggatctaccacagtctaactgggctgcattgtgcaaggtctcggctctctacccaccttcgctatacctggactgcttgctccagctctcagagaagaggagtaaagagtggtactgttttggaggatctgaaatatttttccctctgtatttctgtgtttcttcttggaatttcttcatctcatttgaatcttttttcctgctggatttctctggcaagagaactcagctggactaataatgctgttctcttactctctctacaccctagactccaccaaaaaggtcagtgatgtcctaaagctcttcgaggatggcgagatggctaaatatgtccaaggagatgtgagtggcagctgggaaatcttcttcttgatcaactcttcccatctttgtttttgatccccaacttccaggaattattctgggcctgcccctcactatcccctctagagataccctagtgtccattgtcactctgactattgctttaggataaaacaagggattctattaactcaggacttaatcaaagaaaccatactcctgcctcagatgcttctcagctctgcatttattatccctgtccccgctactcccaattcttcagccccagctctgaccttgcagactccccaggataatgctcactctcattataggccattgggtacgagggattccagcaattcctgaaaatctatctcgaagtggataatgttcccagacacctaagcctggcactgtttcaatcctttgagactggtcactgcttaaatgagacaaatgtgacaaaaggtatggtcaagcaggtaggactgggctaagcctctggc

SEQ ID NO: 69755 - DNA, 1041 bp, Homo sapiens
gctgggattacaggcatgagccaccgtgcctggcctggggtgaactgagttttctacctgcaagaagggcagatcccccaggcctggggtggcatggtcctcaggcaggaaagcttacggggtgagggaggaatggacagaggttaccacagaaataagagagggtaaaccctggaggtgaggagaaggggaggaagctaggatcaaggctaagcagactgggatatgggtgtgttcccttctttggagaagcacagacaagctacctttgtccattgctaaccagtttaccccttctcccaatatcaggcgcagacttatgaagcaagacttctccgtaccccagttgccacatagcagcagtcactggctgcgtctaccccgcatcttctgctcttgtcccattggtgagaacagccccctcctcagtgggcagcaggtctgagtactctcatatgatgctgtgattttcctggagttgacagaaacacctatatttcccccagtcttccctgggagactactattaactgaaataaatactcagagcctgatgctggtttttctgttgcttcttgggagaatctacgtcatttaaggagtgaaggtataaaagaaggaagtgtaccacttacttagcagatcccaaaggggaaacacaagtcattttattcagatgaggcactttcaatgtatgtgttttggggtgtgtgtatgtgtgtgcgcatggggaacagtgaggtggtgcaggataataaatactgtgagggtgaaggaacactcccccaagctggcaggagtatgtggcagcaatgtacagagcctcgggagtagagtccagggacagggaggtgggttcaaggctggcttggaggccaagggtgtcccccttagctcaagaagccaaagaaattggtggagcgggggggtgggcccatgagcatgggcatctggttcttgtgggtgatcttgatctggaagggaagggagcacattcagaggcaggacctgatactttggggctgtggcttcagagattta

SEQ ID NO: 69756 - DNA, 1299 bp, Homo sapiens
tgtacagtgtgggcatttctctctctcacacacctccatttcctcaaactttccttctctaggctgctggatgtcattcacacagaaaataaactctacctggtttttgaatttctgcaccaagatctcaagaaattcatggatgcctctgctctcactggcattcctcttcccctcatcaaggtaatgcttctcatcagctcctctcatcatgggcatgtcttgggggactggtggcaggcaattcagggtgatattttatgattttggcctccttctgagccctcatctcctatacacacacactccccttctttttgtgtctccttccctgctcattatattcattaaccctagggttggactgaacaatcaaagttgaaactctagtgagtcaacctagcaactcaggtgggaggtcagatgaaactcagataaacgggatttgagagcacttggtaaattcctccaaaaagcccttccatttggtggaagacctagctagtgagtccctattgtctattttagggctggattcttcactcccagagctactttcaatctattaacaaacattttttcaatgcacaggatgtagaaaagggatggaaaattgagtaagacttggtccttatcctctctgggctgacagtccattgggagaaatagcttgtaaatatgtaactataatccaacataataaaggctttagtagagttttaggggcacagagcaaacccagtctgctcactgtaatggagaaacacagtcctctctttctcctttgtcagagctatctgttccagctgctccagggcctagctttctgccattctcatcgggtcctccaccgagaccttaaacctcagaatctgcttattaacacagagggggccatcaagctagcagactttggactagccagagcttttggagtccctgttcgtacttacacccatgaggtgagtccctttatgtcttttttctctgagcttcccaagaggtgttaactagggtattcacaaagttactaaaaatatctggctaacagtttcttactaggtagaaataatctcttgacatcctaaagagtcttagggtatgcatggaattcatactgtgttgctaactgggcccacacctgtaataccaatactttgggaggctgaggtgggaggatcacttgagcccaggagttcgagaccatcatgggcaacatagcgagaccccatctctacaaatctacaaaaagaaaaaatttagaaataaaattatgaccaatttgtctcaagtttttcc

SEQ ID NO: 69757 - DNA, 1828 bp, Homo sapiens
aattctgccttgggtagaaggagttctggtttcctgatttctgggaacacctgctgcccatttagtccactatcacatcattgaagtcaacatgcatctctccctctagcaaatgctgcactacgaccctaacaagcggatttcggccaaggcagccctggctcaccctttcttccaggatgtgaccaagccagtaccccatcttcgactctgatagccttcttgaagcccccagccctaatctcaccctctcctccagtgtgggcttgaccaggcttggccttgggctatttggactcaggtgggccctctgaacttgccttaaacactcaccttctagtcttggccagccaactctgggaatacaggggtgaaaggggggaaccagtgaaaatgaaaggaagtttcagtattagatgcacttaagttagcctccaccaccctttcccccttctcttagttattgctgaagagggttggtataaaaataattttaaaaaagccttcctacacgttagatttgccgtaccaatctctgaatgccccataattattatttccagtgtttgggatgaccaggatcccaagcctcctgctgccacaatgtttataaaggccaaatgatagcgggggctaagttggtgcttttgagaaccaagtaaaacaaaaccactgggaggagtctattttaaagaattcggttgaaaaaatagatccaatcagtttataccctagttagtgttttgcctcacctaataggctgggagactgaagactcagcccgggtggggctgcagaaaaatgattggccccagtccccttgtttgtcccttctacaggcatgaggaatctgggaggccctgagacagggattgtgcttcattccaatctattgcttcaccatggccttatgaggcaggtgagagatgtttgaatttttctcttccttttagtattcttagttgttcagttgccaaggatccctgatcccattttcctctgacgtccacctcctaccccataggagttagaagttagggtttaggcatcattttgagaatgctgacactttttcagggctgtgattgagtgagggcatgggtaaaaatatttctttaaaagaaggatgaacaattatatttatatttcaggttatatccaatagtagagttggctttttttttttttttttggtcatagtgggtggatttgttgccatgtgcaccttggggttttgtaatgacagtgctaaaaaaaaaaagcattttttttttatgatttgtctctgtcacccttgtccttgagtgctcttgctattaacgttatttgtaatttagtttgtagctcattaaaaaaatgtgcctagttttatagttcatctctttcctcctcttatttactgaaagaatggtgggagacagaatatgaatgtgtgtatgtgatcattgatttcagaccccttttcctaatctctctgtgcatggctgcccaccccaccccattttggctagtgctgacggtgaacaaagtggttattatcatccctatttatggctggggaaactgaagcctatatacttcctacttcactttctccacacaccagcaaacctcctttcccccagccaacataccacacacacaccacaccacacacacatcacatacacacaccacacacacatcatatacacacatataccacacacaccacgtatacatataccaaatacacacacaccacatacacaccatatatgcacacacaccccatacatacacacacccatgcacatacatagcggcaggaagagggctcccggggaat

SEQ ID NO: 69758 - DNA, 1821 bp, Homo sapiens
tattggctggagccccgccccagggcgaggaggagaaggaggggcaggagggtttggttgagctgcagctgtttgtctgttcgacacaggcttggggccgacgggggagacggagccccaggtaccgagctgatggagcccaaagggcaggggcggaagcgcccgggagatgagagcagcctggcctgagagcggaggcgggtctggtcctaagcgaggggttagagtggcccaccggagaggggagaagggggccgggccccggcaggcctaatgggggtcgctgaggaggggactgggcggcctgggaccccgaagttggtgagtcgggaaggcggctgggctgtggcggcggccaggccgagggccgggggctggaggcctggagcttgagtgagggcaggggcaggcctcattaagcagcgctgaagagggaggagctggggaaaggaacagggcagcgggtgaggtaagcccatttgccgggaggtgaggagggtcagacctgtcgcccgagccccgggggtgactggggctgggtccctgcagagaggttcattggaagggcctgagaagggttcttagttgggtaagaagcgttcttttcagggaaagtgcctattgtaaaaagaactgagggtgctatggtgttgagctgagagagatttgggttcagtgagggagaactggggaaaatgaagaaggctgtattaatctagaagactaaggtagttgaagtaatggaagcagggcctggtatcagttatgggaacttctgggaatgctgaagggtgggctgggggctctgggtcttgggagtacacactcttttgttccctttagtgtttagatgtggtaatttgaagctttttaaaactcccagggtagggatgaagatcaaagtaatttttttttttccatgactgttggctgctccaaactcagcccctacactttctgttggcctcatagctggtctatactgcagtctgtttcttaacttactgtttcatgtcctatgaaagagctaagaagttggattgggggcatgttttgtccacttctttcccacttaataatgtggtctatagcaaataccatgtctcctagaactgagaatctatttcatatctatttcattatctacatgggaaaggggcttagagatcctcagccatcaggagatcttctgatcatagttggtgaaacttttgtgggacttagacttgacttgggtatttcccaggcaggtaatggagttaacaggtccgaaactatgcggtgatatcactgaggaagagatttggggaagagtgagaaattccatttcaaaagcttggcatcaccccttgttctttgtctacttcaaaagcccagatttctgtgctgttagaaagttgggtcaaactatgaagtatctggggaagatggtgagtagagaaaaagatacagaggtgcagtagcccacgcctgtaatcccagcactttgggaggctgagacaggaggatcacttgagcccgggagttcgagggtgcagtgagccatgatcttcccactgcactccagcctgggcaacagaatgagaccctgtctccaaaaaaaaaaaagacaaagattgccaaagcagaggagtggagtaccctcctccccacatatttttaatggtctgctagccttcttagtccctcatagattggagcctattggattttcccttactgtacttcctccttttctgcgtctctaccaatatattttatcactacatttcttttttttttttttttttttttgagacggagtctcactgcaacctccac

SEQ ID NO: 69759 - DNA, 1029 bp, Homo sapiens
tgtccttgttggctggacatggtggcttacgcctataatcccaacactttaggatgccaaggcgggaggatcatgaggtcaagagattgagaccatcctggccaacatggtgaaaccccgtctctactaaaattacaaaaattagttgggcgtggtggtgcgcgcctgtagtcccagctactcgggaggctgaggcaggagaatcgcttgaacccaggaggcggaggttgcagtgagccgagatcgagccactgcactctagcctcggcgacagagcaaaactccgcctcaaaaaaaaaagaaaaaagactgtccttgcttatatttagaggagttagtttggggcagggggtaagggggcagaaaacgggttcttgaaatagcaaataagagtacaaattatgcttccaagtgctaagaagacagataatgaattatcagagacctgtggtttcactgagggaagaccacctagaagaggtgaattttgagactcattttaaaaggtgatggatatggattggcagtcattccagcctactcattctcttcatgttttcctaggaaacctttgcccgagcaaagacatgggtgaaggaactacagcgacaggccagtcctagcatcgttattgccctggcagggaacaaagctgacctggccaacaaacgtatggtggagtatgaagtaaggtggcccgtggagttcctctctaacacttcctctgttcctgggacctctttttttccaaaccagccctctctgaaaacgtcaacagaggacattcattgtctcattccccagttctacaccaagttaaatacagcaacactgtgaccctaatgacagccaggagattttcaaaggagtcaggagaaaactccagagcagagggttagggaggtaccagctgtgggggtaccagtgtgaaaacaggaaggagggagcaattaaatttgtggtaagggactattcaagtgtcacaacccaaaagcccccaactaacttaccctctcccctataattaag

SEQ ID NO: 69760 - DNA, 1073 bp, Homo sapiens
ttggaggagggacagtttctggtacccatcctctgatttatacatatgcattttttcccctctggcctttagatggcctcagccccagccaccatatacccctgcagtttgcactttaattgatggtagttcagttggggtacttgttttatggaagttttgattgatttacttgccctcccaccttctttttaattcaatgaaatctgaggttaatgcgaggttcgaggagaggttatagataaaactaccagtggcagctactcaagtcctatctccactgttagcttcctccaactctaattattaacctatattcttgccaagctaactattgactataggtttgcctttcctggagaattaattgagcaattgaggagtgtctcaggatagcacaggccaaggtaggggagtaaaaaggaggtcaggcaaaagggaggagttttctgtcctttcccaggtttcacactcaatttgatatccattaccatgtcttttctacttccttgtaaataggtatgatctttattcccactgtacagtctgttctatcctctgcctcccatcaggccctgtttctttgttcctttgttaatatcttgaatttagtccctccatccttaatccccccatccctccccatcatgcaaccagtggtttaatccatgtaccaataggggctagtaccacagaggcctcctgtggtgccctcgtatcataccacctgttcctgtggagagggaatgaccggcactgaaggtaccttacaactggctcatattatcagaggaccttggtcctttctaaatctctagtctctcttcatatccttcatcaggtgttttaagatgtctctgagaagccatcaaggcaaaagagaactttaagttccttgttccagcccggagttttgggaaagaaagaaaggaaaggtcacagtgacctaggattggaaccttcctgcccttttggcttgcagactgccttctatcccagaacagctgagaaatctatgaagctgagattctgaaggacccagcttaggttcttccacttaggcctcaattccc

SEQ ID NO: 69761 - DNA, 1001 bp, Homo sapiens
aagcacttggggcaggggggaagggggggaggggggagcctcttggcttcgcactacaattcccaccaagcatctgtccctctctggcctctaataacgagtgcgccttgtggtccagcgtctggcaactttcacgcctagcgtcgcgtataccggaaaactgcatcgtccagaattgcttccgagtcggcgcggcgcaaggcttgctgggagacacataacctcgattttcttccgccatccggctaaatagtcccatgtgcactttgttccatggataaataaacactaggaacgcatttccaccctagatttcagcagaaatgctgaatgtaaaggaatatttgagtaaagtgagttgccgttcttgaagcccgtctcctaaggattctcccggtgtccgcgtagggatctcatgctatataggagggccctgccaggcaccgtctcctctctccggtccgtgcctccaagatggtgagtcttcttgcgtggtgagggtgggggttcgggtgcagactctgggattgtggggaagtgagagcctggagcacggctgaggggtggaccgagtgtacatttcatttgctctgggggtcggcgggatttgcggagaaacaggagatccgagcggcgccttcctggaggctgccggtgcggcttgtggccggaaagggactgaggctgggtgagttgcgccgttttcctaacagttttcccatcctgtcgcagacaaagaaaagaaggaacaatggtcgtgccaaaaagggccgcggccacgtgcagcctattcgctgcactaactgtgcccgatgcgtgcccaaggacaaggccattaagaaattcgtcattcgaaacatagtggaggccgcagcagtcagggacatttctgaagcgagcgtcttcgatggtaagtgggtcaccggcgcgaactgtgtgaggatcccagtatcttaaagccttcgcccaacttcgcccttttggaggctctgttctttgga

SEQ ID NO: 69762 - DNA, 1998 bp, Homo sapiens
tgttactggtagaagagaattctcttgtttgccgttttgattcttttctgggcagagggtgactttgtgatagagtgcacagcctttactctgaggtaaaggtttgcctgtttcggttatgagattgcaaaaactagaaacttggtaaatttgacaattcttgtgctattgattatttgaatatttgtgaaaatatacaggtgaggaagaatgtcttcaacgtttcgagaatggaggccgtctagtttggtgtgcaaggatgatgtttggagcaataagaacgtcgctttgtttttttccttttatagaaagagcaaggttcagggtaggcattagggcgggtgtaggtgtagaaggaactggattattggtttattgcatttagaatgtcagtctggtccttgcggtgtcaagatgaactcacgtgggatgttaattcacttgtaaaactgagggttatacatatgtgctcaggtattgggctgaacaggtgctttgggggtgcttttatgtgcccgacaggcatttaaataggtttagttttaattgacgtaaacatgtaaggtgctcttcattcatgtaacaaaaaagcaaggtaggtatataataccagtataactctattttctattccttagcctatgtgcttcccaagctgtatgtgaagctacattactgtgtgagttgtgcaattcacagcaaagtagtcaggaatcgatctcgtgaagcccgcaaggaccgaacacccccaccccgatttagacctgcggtgagtattttaaaaggagaatggaagccaggggagtgatggttaaaatttcatcctggagggtcagggtgtcctatacctgtaacctcaacactttgggaggctgggacaagaagattgctagaaaccagcagttcaagaccccatctcttcaaaaaatattgagaaggaagccaagcatgatagtgtgaacctatagtctggctgctcgagaggctgaggcaggaggatcacttgagcccaggagtttgaggttgcagtgagctatgattataccacttgcgctccagccagggcaaaagtgagaccttgtctcttaaaaaaaaaaaaaagttgcttcctcctgtggtgcagggggtatcaaattaaggtctgtgcctcaggttaagctgtaaggcaggtgagacccacacctgaacatgcttagagacactgcaaagcagtgttagaatcagaattggtttttaggatgcagagtagtgttctccctccacctctatcagcttcccatgcatttgtagcctgaatacatcagtttgtgagaggatggtggtcaagttctttgggggaagggagtcttggatccatgggttttaatttactcttttgtttctttgtctttcagggtgctgccccacgtcccccaccaaagcccatgtaaggagctgagttcttaaagactgaagacaggctattctctggagaaaaataaaatggaaattgtacttaatattgcatgttaagtgtatctgtgccagataaggtggggattttgtgtgttagaccaagtgtgaagtgacacacattattttcatggggaagaaagcttattcatgtaatttaatttttttcttttttttttttttttttttgagacggagtctttgtcgcccaagctgaattgcagtggcgtgatctcagctcactgcaacctccgtctcccgggttcaagtgattctcctgcctcagcttcttgagtagctgggattacaggtgtctgccaccatgcctggttaatttttgtatttttggtagagatggggtttcactatgttgtccaggctggtcttgaacttctgacctcagttaatccaccagccttggcctcccaaagtgctgggattacaggcttgagccacctcgcctagctatttatgtaaattaaactttaattgtggtcgtatggttggcctcacaattcgcatagctgtgtgaaatggagattaggc

SEQ ID NO: 69763 - DNA, 1073 bp, Homo sapiens
cggtctctgtggctcgggttcctgggctgggtggatgaattatggggtttcgagtctgggagaaactgaggtggcctggacgtgaggcaaaaaacaccctccccctcaaaaacacacagagagaaatattcacattctgagagaaaatccaccaagtgaaccaaccggctaggggagttgagtgatttggttaatgggcgaggccaactttcagggggcagggctttggagagctttccactccctcattcattacccttccctggatctgggggctttcggaatctcgacctccccttggcctatctcctgcagaaaaattagggtgagccccatcctcgatctgctccgccaagttgcgggaccgcggggcgtggcacgctcggggcaggcggtccgaggctccgcaatccctactccagcctcgcgcgggagggggcgcggccgtgactcacccccttccctctgcgttcctccctccctctctctctctctctcacacacacacacccctcccctgccatccctccccggactccggctccggctccgattgcaatttgcaacctccgctgccgtcgccgcagcagccaccaattcgccagcggttcaggtggctcttgcctcgatgtcctagcctaggggcccccgggccggacttggctgggctcccttcaccctctgcggagtcatgagggcgaacgacgctctgcaggtgctgggcttgcttttcagcctggcccggggctccgaggtgggcaactctcaggcaggtaagtggcgcgagagcaccggcgggctcggcacctgggagccggaacccagtgcgcgcagcctcggagggtatgggcacggtctcaggcggcgcggggttgtgggtgctgcccccggtttgccaggaccacctgggagaggggcggtcaggctcgggttatcggcgtggtccggccgagggcggcattccgggaccctcacgccacccttctccagagcgtcgccgaccctctaattggtctccccagaagaggctgaggccgaaacagtagttcacacttctgaggggccctgcaggg

SEQ ID NO: 69764 - DNA, 1050 bp, Homo sapiens
tgggactaggactaaggttggcatttgccccagtccctccccttcagctgcccagtgggtggtgtggaggcgtggccgcgccccttgttgacaggtccacttgagcccagccctgctctccaagggcagggagggacacagccctggctttttgcttcccgggattgaggtgcctgtgtactgacatcataccccgttgattaaaacaagcctttcttagccctgatggccccttgtgttgccttccttcccaaccaggtcccccctgtcatgaggtttgcaaggggcgatgctggggtcctggatcagaagactgccagacatgtgggtttgaaattccctccaaaaacttcactcatacgctttcatatcccttcctccccaagcctgggtcaacactgtgggggaggcatgagcagtggcctcagaattcagtcctaggagccctaacagccatgctttctctccttccatagtgaccaagaccatctgtgctcctcagtgtaatggtcactgctttgggcccaaccccaaccagtgctgccatgatgagtgtgccgggggctgctcaggccctcaggacacagactgctttgtatgtaccctttccattgcctgggttctgaaattgggatgtggcctttgaggaggaggtaggggtacacacgtaacataaatctgatgagcctccttttttcccaggcctgccggcacttcaatgacagtggagcctgtgtacctcgctgtccacagcctcttgtctacaacaagctaactttccagctggaacccaatccccacaccaagtatcagtatggaggagtttgtgtagccagctgtccccgtaagtgtctgaggggaaggaacaatgatcaacaatagtagatccaagattttagacaaaattgtggaagggaaaaagaatccagttggtgataaatagggagattggtgaatggttatgatcatctaaccactccagtgagtgacccttacgtccagtcctcccatgacttcagctatcacccttacttctgctccttgtagcaa

SEQ ID NO: 69765 - DNA, 1582 bp, Homo sapiens
ccacatgactttgaagaagttacttatcttctctgtgcctcggtttatgcatctatacagaggaaataacatttgtccttccaggatggctgtaagggtaaagggggatgatgtatgtgaaagtgctttggaaagcacagagcactgtataaaaggtactcaaggtggtaatagtactaccaactctccctagctgtccccttccccactttgtgctcctccatcaaagggaaaacccaacccctttgattcctgatctcatgagcacaaataacttcctcagttctcagggtctgtacctcaatatgcctataatccattccaggactaacggtgcttcctcttcctgccctttcagctgtgctgcttttggcattcacctatgaggagcgggttggagtgggacatgggaatggcctttcctgagtaactccttcccatttgctcctcagagcatagagcctctggaccccagtgagaaggctaacaaagtcttggccagaatcttcaaagagacagagctaaggaagcttaaagtgcttggctcgggtgtctttggaactgtgcacaaagtgagtgacccataggaattctggagaggtggggaaggcatctagggcaaaggggtgaaagatttttgcataggattgacctagggagaatgaccttatgccaactcctgccccaaacttcccagggagtgtggatccctgagggtgaatcaatcaagattccagtctgcattaaagtcattgaggacaagagtggacggcagagttttcaagctgtgacagatgtaagtgaaggaaattctgtatgccgctaggagagaggacaatattagatacaatcatgtagaagcagggtcctgtgcttctcagcagctactatgttagccagaatgttgggggtgggggggcctgggctggctgtgcacatgctgagtgtatgtgaacctgttggtttcctagataataccttttgtgtctcttagcatatgctggccattggcagcctggaccatgcccacattgtaaggctgctgggactatgcccagggtcatctctgcagcttgtcactcaatatttgcctctgggttctctgctggatcatgtgagacaacaccggggggcactggggccacagctgctgctcaactggggagtacaaattgccaaggtgagagaagcctggaggaattctgtgataagaactgcttgtctgggggccagccaggaaaaagtgagaaggttgaagttctgagaggtgaggtccccaacccccgggctgcagactggtaccagtccatggcctgttaggaaccaggccacagagcatgtgagcggcaggcaagcgagtgaagcttcatctgtatttacagtcagtccccatcacttgcattaccgcccgagttccgcctcctgtcagatcaggggcagcattagattctcttaggagcttgacttctattgtgaactgtgcatgtgaaggatctaggttgtgcactccttatgagaatctaactaatgcctgatgatctgaggtggaaaaatttcatcccaaaaccaaccctccccttcc

SEQ ID NO: 69766 - DNA, 1032 bp, Homo sapiens
atcatgctcggcctgactgcagccattttctgacttccctctgtactcctcttatggctctattccttttttttttatggagtctcgctctgttgcccatactggagtgcagtagcgtgaccttggctcaccgtgacctccacgttccaggtttaagttcttctgtctcagcctcccagatagctgggactttaggcgtgcaccaccacgcccagctaatttttttttgtctttttagtagagatggggtttcactatgttggccaggctggtctcaaagtcccgacctcaggtgatccacccgccttggcctcccaaagtgctgggattataggtgtgagccaccgcgcccggccatggaatgtattctcttttatgtctctacctcctacatcttatctccaggttggatgattgatgagaacattcgcccaacctttaaagaactagccaatgagttcaccaggatggcccgagacccaccacggtatctggtcataaaggtgagtagggagtaggaggtgctaaggaaatttagaaaaaggaggagttggctggaaccaggattccccctaacaatcacctatcgatatagagagagagtgggcctggaatagcccctgggccagagccccatggtctgacaaacaagaagctagaggaagtagagctggagccagaactagacctagacctagacttggaagcagaggaggacaacctggcaaccaccacactgggctccgccctcagcctaccagttggaacacttaatcggccacgtggggtaagacaacttctaattacccaacactttgcaccctgagccctcacaaaccctacagatacccagattaactactcaaaggcccccatggtgaatgtagatttctcccttcatcttaaccttttccttattttttcatcctagagccagagccttttaagtccatcatctggatacatgcccatgaaccagggtaatcttggggagtcttgccaggtaagttctgttgctgagaggctgggttt

SEQ ID NO: 69767 - DNA, 1090 bp, Homo sapiens
gggggtgattatgcagccatgggggcctgcccagcatctgagcaagggtatgaagagatgagagcttttcaggggcctggacatcaggccccccatgtccattatgcccgcctaaaaactctacgtagcttagaggctacagactctgcctttgataaccctgattactggcatagcaggcttttccccaaggctaatgcccagagaacgtaactcctgctccctgtggcactcagggagcatttaatggcagctagtgcctttagagggtaccgtcttctccctattccctctctctcccaggtcccagccccttttccccagtcccagacaattccattcaatctttggaggcttttaaacattttgacacaaaattcttatggtatgtagccagctgtgcactttcttctctttcccaaccccaggaaaggttttccttattttgtgtgctttcccagtcccattcctcagcttcttcacaggcactcctggagatatgaaggattactctccatatcccttcctctcaggctcttgactacttggaactaggctcttatgtgtgcctttgtttcccatcagactgtcaagaagaggaaagggaggaaacctagcagaggaaagtgtaattttggtttatgactcttaaccccctagaaagacagaagcttaaaatctgtgaagaaagaggttaggagtagatattgattactatcataattcagcacttaactatgagccaggcatcatactaaacttcacctacattatctcacttagtcctttatcatccttaaaacaattctgtgacatacatattatctcattttacacaaagggaagtcgggcatggtggctcatgcctgtaatctcagcactttgggaggctgaggcagaaggattacctgaggcaaggagtttgagaccagcttagccaacatagtaagacccccatctctttaaaaaaaaaaaaaaaaaaaaaaaaaaaactttagaactgggtgcagtggctcatgcctgtaatcccagccagcactttgggaggctgagatgggaagatcacttgagcccagaattagagataagc

SEQ ID NO: 69768 - DNA, 1422 bp, Homo sapiens
ccggctgggcgggtttcgccagccgacccagggatccgaagaagggcgcacccagcctccccgacctaggtgtagacactgcccacccgctgcggctccactctactccacccctgcccgctcgactttaaacctatttccccgccgtagctccgcccctctcccctcagcccgcccctctctgttactggctctcgctcagcgttctcggtggaagtggtttttccgggagagaccacgcttcccctcaagctccccaacggctccgccttcccgccggagcctgacccttcccagagtgcccggcgattccggcgtgcgaggcccttggagggcaaggccccagggcctggcttaggagcgcgagaggcaggctgggaattgtagttcgaaggccctcgagagcggctagagtctggcggccgagaggactagttgtcccagcgtgccctgcgcctcagcccgcgcgctcgcagcttctcgctctcgcctgcctgcccgctcccttgcttgctcgcgctttcgctcgccctctcctcgaggatcgaggggactctgaccacagcctgtggctgggaagggagacagaggcggcggcggctcaggggaaacgaggctgcagtggtggtagtaggaagatgtcgggcgaggacgagcaacaggagcaaactatcgctgaggacctggtcgtgaccaagtataagatggggggcgacatcgccaacagtgagtgcggcctcgggggtcggggaatcaaggctgatagggaaaggtaacaggctggcccggaaggggctggagcggaggggtcatgcggactgagctactgaggggcccgcaccggtccgctgggcacggcgtggtgggaagacccggtgtcgcgcctgggacctgagcgggcaggcccaggctgaagtctatggaggtgcgggtcggcgaccaggatgagcgcagagaggggaccctggcaggctccgacccgaggccgtttgttaggaggcaagacgtgttttctcttgttcctatccttcattcccgattattgcttcctctgattctggcagcggcgaggccacctcgaaaaggaagcgcccagctattggcgacagaagtgcccctctgtttttgtagcgtctccggggcgtcaggagccaagccggcacgtgttgctgggtcccattgcggatggctggcccccttcttactccgctagtgtccctgacaccagcttccccaccaccagcttccccaccacgtgctttgctggagcctttccttctttacttcagctcttaccctggtgggggcccccttctaccttgggccagctaaggagaccgttggagagcactcctggagcttctaatgcaagtcttggagatatatatggcttttcttgaagttactcattactaccacctt

SEQ ID NO: 69769 - DNA, 1138 bp, Homo sapiens
gtattccttgggtggtaactagacaatgaatacatacaaggctgacatgatgggattctgtcctcaggggtacttcggtccttggtggaagcatctagctcaggtgtgtcggtactgagcctgtgtgagaaaggtgatgccatgattatggaagaaacagggaaaatcttcaagaaagaaaaggaaatgaagaaaggtaaaaaaaaaaaatccctcactaattttccgtttgacccttatttggtcctatatgtttttatttttttcactgtaatgacgcagtccccaccccagctctggctgaggtatttggaaatttggaatggcaagtgggatacaagcagtttcctacctaatccaaactgatgaaacttaagcaagaccctgaaaaaatccttctacatttctgaagggcactagggctcccgggagacagcaaggcagtaggctgatgattctttctttacaggtattgcttttcccaccagcatttcggtaaataactgtgtatgtcacttctcccctttgaagagcgaccaggattatattctcaaggaaggtgacttggtaaaaatgtaaggttaaaccgttttaaagcatttttctttttttaaagcatttacaaaatgccagttcctaatgcagtactctgatcttgcctttcagtgaccttggggtccatgtggatggcttcatcgctaatgtagctcacacttttgtggttgatgtagctcaggtaggtggcctgcttttgatctctgtttagccttggggtagagggaatgcactgccatttgcttcttatccccacccccaatcaccacgtaagttgagagagtctctagagaagcaaaaggagaaaggtttttgttgttgttgttgtttttaccctcctgttcattggctggtcttcgcatatgggctcacagatattaaccagatagccagctgagttaacagactttccaggaagatactgattgcatgtccttatctacaggggacccaagtaacagggaggaaagcagatgttattaaggcagctcacctttgtgctgaagctgccctacgcctggtcaaacctggaaatcaggtaagctattttatccaattccaaagctcgtttgaaccaaagatg

SEQ ID NO: 69770 - DNA, 3231 bp, Homo sapiens
ttggggagcatctgtataaagtatttttagattgtagggataatcaagctatgaaatgaaaaaccagtgaatgacaatcattggggcttgatggaggatattagaacgctcagttctgccaggtgcaatggctcatgcctgtaatcccagcactttgggaggctgaggtgggcagatcacgaggtcaggagatcgagaccatcctggccaacatggtgaaaccccgtctcttctaaaaatacaaaaattagctgggcgtggtgttgcgtgcctgtaatcccagctactcaggaggctgaggcaggagaatagcttgaacccgggaggcagagattgcagtgagccaagatcacgccactgcactccagcctggtgacaaagccagactccatctcaaaaaaaaaaaaaaaaacgctcagttcttttatgcttcttattctcattgtagagaacttattagctcctgatatctcacctttcatttgatgttgtacttctagaacacacaagtgacagaagcctggaacaaagttgcccactcatttaactgcacgccaatagaaggtgagaacagataacagggttgagggtctaagaatgagtggctttgccaggtgcggtggctcacgcctgtaatcccagaactttgggaggctgaggtgggcggatcacctgaggtcaggagtttgagactagcctggccaacatggtgaaaccccgtctctactaaaaatataaaaattagctgggcgtggtggtgggtgcctgtaatcccagctacttgggaggctaaggcgagataatcgcttgaacccgggaggaggaggttgcagtgagccaagattgcgccactgcactccagtctgggcaataagagcgaaactccatctcctccatctcaaaaaaaaaaaaaaaaagaatgagtggctttgcagaattgaggcttttgctcccttgaagatctatcctggctataacccagtctaagccagaaatctcagagccctgtgtttccataaccaggtagttgtctcactgcctaccacttcaaactactgaagtgggtggatttggaaaccttttgggatactggatagcttgttccataggttgtgtactatctacaggtatgctgtcacaccagttgaagcagcatgtcatcgatggagaaaaaaccattatccagaatcccacagaccagcagaagtaggtgccaaccctacttattaccttctaccacacaagactagtcatcaggtttttttctatactcccaactgaatcttgtccgccctctactccatgttttcaggagtgacctgttgctcttaatattccctttctctaggccgggcgcggtggctcacgcctgtaatcccagcactttgggaggctgaggcgggtggatcacctgaggtcacgagttcagaaccagcctaaccaacatggcgaaaccctgtctctactaaaaactacaaaaatgagccaggcctggtggtttgtgcctatagtcccagctacttgggaggctgaggcaggagagttgcttggacccgggaggtggaggttgcagtgagctgagattgtgccactgcactccagcctgggtgacagaatgagactctgtgtcaaaaaaaaaaaaaaattcctttctctctattccttttaggaaggaccatgaaaaagctgaatttgaggtacatgaagtatatgctgtggatgttctcgtcagctcaggagagggcaaggtgaggagagtaccagagttggcaaagaggggtgactgagagtgttcaccagaccaaatgttacttaaattactctttcaggccaaggatgcaggacagagaaccactatttacaaacgagacccctctaaacagtatggactgaaaatgaaaacttcacgtgccttcttcagtgaggtggaaaggcgttttgatgccatgccgtttactttaaggtactaagcaatgatagtacttggaaccagtctgactcacagaccatacacccaggaacactttttcctctcccttcctgcctagacttgtagcgtgcatgtgctcactccctccctctctctccccatctccttctcattgaaggtaatgtaaaagagcaatcctaagcatgatttctgcctgagggtaggagctattttaaaatatgagcaaaatggtaagacttgatggggagttaaagatacctctgaatatcatcttccctgccagagcatttgaagatgagaagaaggctcggatgggtgtggtggagtgcgccaaacatgaactgctgcaaccatttaatgttctctatgagaaggagggtgagttccaaaaagagcttcactttggattccctgattataagatatccttcctgtaagttcagaagagctaagtatgacaaaggaactttttatcaaaacacatcttcatttttgccataggtgaatttgttgcccagtttaaatttacagttctgctcatgcccaatggccccatgcggataaccagtggtcccttcgagcctgacctctacaagtctgagatggaggtccaggatgcagagctaaaggttagtatggaatagaaggtggtgagtatgtacatggtatcctgcttgggagtgagggctaaatgccagcaaagtcctgaaaagagctgcagtactgaaagtaaccctttatttttaatttcctccacatttctcaaaatttttttcccttcttcctgttttccaggccctcctccagagttctgcaagtcgaaaaacccagaaaaagaaaaaaaagaaggtgtgttattaacgatcattcctctctggcagggtgaacctgatccctctttctcccactgtgttaagttgtagtgaaatacggatttttatacagatgctcctcaacttatatgatagaactttgtcccagtaaacccatcataaattgaaaatactgtaagtcaaaatggattttaaaatatatatatatatattttaagagacagagtctcaaactcctggccttgaacagtccttccacctcagcctcccaaactgttgggattacaggcatgagctgccatgcccagccttgctttggccgggcacagtggctcatgcctgtaatcccagcactttgggaggctaaggcggatggatcacctgaggtcaggagtttgagatcagcctgaccaacacagagagaaaccccgtctctactaaaaatac

SEQ ID NO: 69771 - DNA, 1754 bp, Homo sapiens
aagatcagcccgggcaacatggtgaaacctcatctctacaaaaaatacaaaaaagttgtacatggtggcatatgcctatagtcccagctacctgggaggctgaggtgagaggatcacctgagcccagggaagtggtaccactgcactccagcctggaaaacagagtgagactgtctcagaaaaaaaaatacttttatctctggtcccagacatccccaagtagttagaaactgacaggtcttctccctctccttttcttgcatataggcctccaagactgcagagaatgccaccagtggggaaacattagaagaaaatgaagctggggactgaggtgggtcccatctccccagcttgctgctcctgcctcatccccttcccaccaaaccccagactctgtgaagtgcagttcttctccacctaggaccgccagcagagcggggggatctccctgcccccaccccagttccccaacccactcccttccaacaacaaccagctccaactgactctggtcttgggaggtgaggcttcccaaccacggaagactactttaaatgaaaaaaagaaattgaataataaaatcaggagtcaaaattcatcgtcttcaagcccctctttctagccttttctactactctctgcttggtcaaggtttgtgccccactacagaacagggctaaattagccaccaccactgaaaactcagccgaatttttttataccactctgatgtcagcattttttccatctgtttggggctttttcctcttttttccattctccccaaatattttatctggcttcaaaattaagaggattatttttcagattgtttttattcagtgtggccgattcctcatctgattcaggctgtccagtcaggcccctcccattttaggagctggagccttcatttatgaagagattctcatctatgaaatggatcctcatttgtaaatcttttttcttccattttcacaaagctgtaaagaaataatccatctcaaccttaccctttttctctggagtcagtggggtctttcctcgctccatcttacacagacctgagctggaagctcaactggttttgttccctgtttgaaatattgtgatctccctcccatgaaagaaaaaccaagaaccagaggcgtagactgactgaagacacaactcctggctttctgaagctatggacttggattggattgctgggggtttgtagagaaaggtgacaaatttcagtacctctggcatgctgtcccaggaaactagggctcccactaacttatgaggtttttaaacacattgaaaatgacatgacattaaaataaatttggatttgctcataatgatgtgctttgtatgctgctcttgtttgatggaggtggggagaatgtcagttgaagtggtattggaactgttcctccacagtgccatgctctaccttcccaaaacgaggaatgtcttgacttgcagaagacacaaatcttagaatctttgatgatatagtaatctgctggagttgggtggtgtaattttctaagtagaaacagtcctcactgctaagatttgtttggggctaggacacaatgtctactgcaaaaacagtactgcaagtgtttatcttgaattcaagaagccaggaagaatggtacactagttttcagggccagactaaggtcagatgggtaattagtttatcttactacatgtcaggaattgctaaactagagatactacaagtgaacaga

SEQ ID NO: 69772 - DNA, 1999 bp, Homo sapiens
tgcgagggaaggtggcggtcactattttttccccgtctgcacctctaggtccaatattggaaataggtgctgacgtttaaataacacagcgtcctcatactaaatctgggggggaactggtaactcgaaaaccaaatactcggtcttccgaaagaactaactcaacctacccttctacaagagggtccgaaaaccactgttacgcccattgggtagccccgcccttggggggggcaaagggcgtgaaagcggaagtgacgacacccggcgctccattaaatagccgtagacggaacttcgcctttctctcggccttagcgccatttttttgggtgagtgttttttggttcctgcgttgggattccgtgtacaatccatagacatctgacctcggcacttagcatcatcacagcaaactaactgtagcctttctctctttccctgtagaaacctctgcgccatgagagccaaggtgagcggttcctggtagtaagcttgggaggtaggagttggcgagtagtagcgaggagacgaaggcaagtccgccatacctcctgaactactgggtttcaagggtgcccaagagctggtgggagagagaaggtagtttgtgagagagctagcggttaagtgctatgggtagagagggtgggcttagaaaagggtggaattctgatcttatgttgggagggtgtccaagttactgatgtagttgttacgaccaatctttcatacttcttggttaagaatctgtccggttctaaagagtgcatttcatatccttgctaagcctactaataagcttcatcccttttttttttttttttttttaattatctgctgcttgtgatcggttgctagtggaggaagaagcgaatgcgcaggtacgttgagactttgccagcccaggaggagggaagttccttggacaaaacttaggagaaacatttggtttggaaatcttaaaagatctttaggagaaaaacgtttgagtgttttctccctggagccaggatttaacagaacagagaacgatagaaccgtagtgcttgttcattttaccacctcattctttatgtggacgtttgatttaatgtgggagggaaaggcaactctggtttgaggtgtattccattcctgtgtctgcttttcaggctgaagcgcaaaagaagaaagatgaggcagaggtccaagtaaaccgctagcttgttgcaccgtggaggccacaggagcagaaacatggaatgccagacgctggggatgctggtacaagttgtgggactgcatgctactgtctagagcttgtctcaatggatctagaacttcatcgccctctgatcgccgatcacctctgagacccaccttgctcataaacaaaatgcccatgttggtcctctgccctggacctgtgacattctggactatttctgtgtttatttgtggccgagtgtaacaaccatataataaatcacctcttccgctgttttagctgaagaattaaatcatcttgtctattatgttttttatggttccatcgggtgggggttttctgtcattagagtttgccctgtcactacctgtgctatggagggtatcaaagctataaaggcaacagcccgggttacgtggtgtggtttgcatctcgctggagttggatgggatatggtacgtctctggaggcaggttttaggtttcgcgggttattaggggccaatgctggtaccgcccctttccaggagggctgccttggcgactaccgcttagaccatgtcgtgcctttgggttgggttgccatagtgacacgcaaagcgtgctgggaacgccctgcggcatgtcgcacgcgtacttcatacaccatagagtatggttccgggtctgctggctagagcgtcacttcttccgcaggaagcggaagagcgatcgggtaggcggctctttgtcgaagctagaggaccggcaggcggcagcagcaactacggcggcggcggcaggtgaggga

SEQ ID NO: 69773 - DNA, 1268 bp, Homo sapiens
tcagggctggttttccaacccctcctcccagtccctccgaattagttttactcttcttactggcaacttctcccttggacaggtgaagttcagtttgaaccctgaggaaatcctcacgttctcgaagctttgccgttttgtcagatttcttgtgacaaccaccccatagtcctccactcttactccttcttccacccaagtctctgtttttttcctgctcagaacccagcagtgatgtggaggtggagacccacaggagccccggacttcacctgagctacctcaggtatcaattctgggagagtggggtggggaggagcatcataactaattatctgctgctggtgcgacttgcaacgtgagccaggcttggatagatggcatttgtacttcacctggtcattcccctttactaaaagtttgtatcttcttttaccacttctttccttgattgcttctattattctgggactacctctctttagaggaggaggaccctcttacagattctcttgtaactctggcctctggtttggttagttcattttagggagatctgaaggcaaagtcacagtagtggggtgggggtaggtcaaggccaaaggaattaggaaagattcccttattctcaaagggaacaatatgaagttttcctatttcagcagcagggggagcctgaacaccgcataggaaaggcttgggaggtcagacacgtggtagcagggactccaggtcttactgggggtggagagaggggagggctagaaccagggcagtggactgacattccaaagctctcttgggaaataggagacttaaaaagcttttatggagtctataaataaagaggatctttctgggttgaggaatggtgtggttggatgtcagtgggatcttcacataggggagtaggaagggggtggggaatggggaaaggtcacttgttcctgtgaaattaactccttcccacttgaccttatcacaaatggtttgtcctaggaaatctagaagtggagactctaacttagaactcctatcctgaaatagaaggggcttacctctctgccgttgacagtgatgatggctgggagggaatactaaaatatgacaggttttgagactcccctcaagctggtgacaccagtctcttcacccaggatttcttggcttctagagatttgatgtgtacagagcccttacctgaggaaaaggaaagggggttaaggaagttttgttaccagtgtcccatcttctacagccctagtagc

SEQ ID NO: 69774 - DNA, 1068 bp, Homo sapiens
aggcaagcgttgccgatatcgccacccagacatgagcgaggtgtccaacttgggggtgagcaaaaacgagttcatcttctgccatgacttccagaacaaggagtgtagccgcccaaattgccgtttcatccatggctccaaggaggatgaggatggctataagaagacaggagagcttcccccacggctgaggcagaaagtagcagctggccttggcctttcaccggctgacctaccaaatggcaaggaggaggtccctatctgccgtgactttctcaagggtgactgtcagagaggagccaagtgcaagttccgtcacctgcaacgggattttgagtttgatgctcggggtggaggaggcactggtgggggctcaacaggctcagtcctcccaggacgacgtcatgatctctatgatatctatgaccttcctgacaggggctttgaggaccatgagccaggcccaaaacgccggcgaggtggatgctgcccccctgatggccctcattttgagtcatatgaatatagtttggctccaccgcgaggggtggagtgcagactgctagaggaggagaatgccatgctcaggaagcgggtagaggagttaaagaagcaggtcagcaacctgctggccaccaatgaggtactactggaacaaaatgctcagttccgcaatcaggccaaggtcataaccctgagctccactgcaccagcgactgagcagactctggcccccactgtgggcactgttgccacttttaaccatggcattgcccagactcacactactctcagcagccaggctctacagcctcgtccagtgtcccagcaagaactggtggcccctgctggagctccagctgctcccccaactaatgctgcacctcctgctgctccaccacccccacccccacacttgaccccagagatcacgccactgtcagctgccctggctcaaacaattgcccagggaatggcacctccacctgtctccatggctcctgtggctgtatctgtggctcctgtggcccctgtggctgtatcgatggcccaacccttggcaggaat

SEQ ID NO: 69775 - DNA, 1164 bp, Homo sapiens
gacatcagcccccaaactctgtgaggaatgaacctttggggcatcctcgcccctcgcccaccctgagtgtgaggagtcacacacactccctctcctctgtggcacaccaccagcatcttagtaggaaaccagaggcgagggtgtgctgcacgtcactgtctctgccttccccacctccaggtcagcttcccagacgtggaaaaggctgaatggctcaataaggtgaggattgatttgatttttagtcttcatgaggggagaatgggaatttgtttcttcttgccagacccatcctcaaccctcagtgctctccgtggggaggattctgaaggaacttgccttgagagggaagactggactctcctctgaccatctctctttcctcccagattgtggcccaggtctggcccttcctgggccagtatatggagaagcttctggctgaaactgtggctccggctgttaggggatctaacccccatctgcaaacatttacatttacacgagtggaactgggtgaaaaggtatgtgtggaggagggaaagtgaggaggtaggctagggagggtgagtggcccggagtagactcaggtacttctccctatccctgccctctctcaggaatttctctctccctagccattgcgcatcattggagtcaaggttcacccaggtcagagaaaagagcagatcctgctggacttgaacatcaggtaataccactcaccactcttactgcttccccttcaatgtgtcctgttcagtccaggctacttcactccccctccccgcaacttcagccaaggactaactctcttggttctcttcttcaccaatccccagctatgtaggtgatgtgcagattgatgtggaagtgaagaaatatttttgcaaagcaggagtcaagggcatgcaggtaggccagatgtcaggggccacataatagggaatgtttgtcctgcgtttcatgggatatggggaagtgtgaggttggaaagaccaaggctgagaaagtctgggaggacagaagagggacttttctggggaaaggctttgattttctcttcttgcctcagctacatggcgttttgcgggtgatactggagccactcattggggaccttcccttcgtgggggctgtgtcaatgttcttcatccgacgccc

SEQ ID NO: 69776 - DNA, 1066 bp, Homo sapiens
gccctcacctctgccctgccatcctgccctcttaccttccccagcagctcacgctctcttgacatgaaggaggaattagacttgacagagacatccagctttcgtctctgggcctcatccagggggagttcccactcaaacctggggtaggactggatgttaggggccaggagtcctttccaagcctgccatctctccacctgaatgcccactgactgaccgttcattaaattcaggactcagggtcctcttcttctgtgaggtcctcctcttggtgcctcggttcttgtctggcagtagcaacagtgacacatagggatcaggaggatcacgtccattctgtcgaagggacctacaacaggaggatgtaggtgatatggtaacctgagggaagggatggaggcgatctggaggacaggagggatggggtctcaccggcaaccatgaacaatgctgaccagctttcgttcttcactgtagtaccacagagtcagtttcacctggcccagaggcccggctggagcctcaaggggactgtggagaaatatcagtaggtctggggaaagctagagcctagtgaacctgtaatactttttatttctgactgcgtcccaccttcctgtcccagccctttacctgtcaacatgtgttaggcgctgccggagctctggggctgaggaggtgatgtgagggggtccccccgagagctctggttcttcactcagcgatgaggagctgtggctgtagctgtggctatgagcttccactcccgagtgctgggacaccaggatctaggggcaagaaagctgtgagctgggcagagttctctcagttccctcactctaaggacacggccctctgttcccaccctcctgggtgtccctcacctgtgaaggccctcccctcctccctctcatcctgcccaccatctcctgtcactcacccctagctgtgctctcagtagcacctgcccctgaccactgctgagtgtaaaccagcggtccaagcagagctggtcagccacgaggagctctgagaggggcagggataatgagcccagcacgcc

SEQ ID NO: 69777 - DNA, 1069 bp, Homo sapiens
acaggtaaagggctgggacaggaaggtgggacgcagtcagaaataaaaagtattacaggttcactaggctctagctttccccagacctactgatatttctccacagtccccttgaggctccagccgggcctctgggccaggtgaaactgactctgtggtactacagtgaagaacgaaagctggtcagcattgttcatggttgccggtgagaccccatccctcctgtcctccagatcgcctccatcccttccctcaggttaccatatcacctacatcctcctgttgtaggtcccttcgacagaatggacgtgatcctcctgatccctatgtgtcactgttgctactgccagacaagaaccgaggcaccaagaggaggacctcacagaagaagaggaccctgagtcctgaatttaatgaacggtcagtcagtgggcattcaggtggagagatggcaggcttggaaaggactcctggcccctaacatccagtcctaccccaggtttgagtgggaactccccctggatgaggcccagagacgaaagctggatgtctctgtcaagtctaattcctccttcatgtcaagagagcgtgagctgctggggaaggtaagagggcaggatggcagggcagaggtgagggctggaagctgctggcaccaaggttatagtccctgtgaggaaggaagtaccccacgtgatcctttagaggtgactcacctctgcaatggtttgggacgagtatgtgatgaaggaacatggtctttggagatttcaaaacagcatcatcagaatgagatcctgtctcaaaaaataaaagaaataacatctttcccctatcatcttccaacacaggtgcagctggacctagctgagacagacctttcccagggtgtagcccggtggtgagtgtctgcgtgggtgggggatggtctggatatttcagtgggagaaattccaatcacaggaaaggaaaaaaagatacaatctgagcagagaaccattgattctatcaagtagagaagcccttggatcgtgtctcatttataaatatgatgacacaagagtcatct

SEQ ID NO: 69778 - DNA, 1017 bp, Homo sapiens
taagactggatgcttccaaatgggggactaagggaaagccccaatctcattccagggctcactgattccctaccttctagataccccctaatcccctaggctgtatcccaccctcaaaccaccccctccaattctatcttcactttccagagactcaccaccactttggagagatcgactggaggctcctgggttttctgaggggcctgggggacagctggctcagctttggtcttggctggaggagcccctgctgctgctggcttagcagcaggtttggagatggagggccctgctggtttcttcacgggaacatccttcttgggaggcatgatgtccggtggccaaaggacagtgtgcggatgggggcacccatctctgtttaaatagccagggagtctgggatgtcaaggggcgggggcaggggcagggagccagttggctgtggcaaagatgaggtagaggagagatataaccgcctgccctcactcccctggcctcctatggttcaggactcctgccccaaggtcttcttccctctgtccccttatccccaaaggctgaccagaaaagaacaatgtttcctttaggggtaggggaggaagccagagactgcccagaatgaggtagttaacctccagggtgaggataggatgcttgccagtggcactgagatgggggtggtgaggcaaagcaggtgatccagcagctttagtcttcttgaagggtggggtgaggggtagcagccagggaggcttgtgtgaactggaacaagttaaagtgtggtctgggagcaatgacaaaaacaagaagcccatctgcccagcccctccactcccttctgaccatggctttgtaaagagcaggggtagttaaccttagagtctaatgatccctaatacttgtagttcctgagcccccacccagccaagaactggaactattcacagtataaaggaagaatagtcataaaaacaggagtatgacatccctcattgtctcctgtgcccagtgttg

SEQ ID NO: 69779 - DNA, 1026 bp, Homo sapiens
ttatactttagagttcaaggaggccttcgagctgtttgaccgagtgggggatggcaagatcctgtacagccagtgtggggacgtgatgagggccctgggccagaaccccaccaacgccgaggtgctcaaggtcctggggaaccccaagagtgatggtgaggggacccttgggaacaatttgggtttttagttttcaaaagttggatgttggtaacaaaaagaatgaggtggatctcaggacttcaaaaactgtcaaacacagaagcaggaaaatatcctaaatgctgaataggatgaaagcattgtggtagggttgggagctgggtcctatgtaatactacaatgacctctcctttacctctctccaacctccagagctgaagtcgcggcgtgtggactttgagactttcctgcccatgctccaggcagtggccaagaaccgaggccaaggcacatatgaggactacttggaggggtttcgtgtgtttgacaaggaggggaacggcaaagtcatgggagcagagctcagacatgttctcaccacccttggtgaggcaggcaagggggaccagaactcctttagagtggagagggggatggggtgggccagaaagactggacagataagcagagctagcaggaggcttactgtcctgcaggttgtcggcaggagactgagaaggtcagagctatgggggtagaatctgaaggactcgctcttccagaggctaaagtgccatccggagggcagaggaaaagggatgaggcgggaaacctgaattttcattttggaagagacgtgtgggttgtgtgttctggtacaagtctcgtaacctcctgggattgtttccttgtgggtcaatactttcagcagtactagggtgaaatggaaagcaagaggcatccatgaccaggggaggattcccttgaggactgaggctatgggagaagaagaggtaccactctaaagagcgtggcctggccaggtatggtggctcacgcctgtaatcccagcattttgggaga

SEQ ID NO: 69780 - DNA, 1580 bp, Homo sapiens
ttcagactgctatttttttcatggttgggggagcagcgggagacggggagggtgctaggaggagagggcgggaaaagagggctctctcctcttccaatcctctgatcttcctgctgttgggaggtgcagattcattgtgccccagcccacgtccccccacgacccccgcccccccacctccccccacgaccccccccacctccgagcgggttctgtgcccaggtggcgctggagaaaggaacagcggaccccgcccaagtcattactaatgtagcaatcgtctgcataaacccaggccacggttcctattggctgagtcctctgagggtgacgtcatcgggacgtactaagactagggttgggccgagagtcggagccattactgcaggaaaaggtcccggagagctgagcagtcaagatggtggggcccaggtcttgggagacgggcaggattggggacgagaggcaggaagagacgggtggggggcgaggagaaggcaggggtaggaggcaaagggaatctgaggacccgaaaggttggaggtggggttggaaagactggggccctgcggggaagcgagtctgcagcctgaaacaggagtttgtgggtcagagtttgtgggtcagagtttgtggggctgggatagaaactcgggggattggcgttcagatgctgaccacttccctcttctctgagcagtgtgacttcaccgaagaccagaccgcaggtaggttatctctgatccctaccgaggtcacccttagggagagggacaccctccccccagcacctatcctctaatcttaatctgtcatctctttagcacccccatgagattaccccctggattattttctcttcttctggatcctccattttcttttctcactttcttcctccctccccttccactctagatctgatcccaagcactgggtgagttttaggtggtgtgggtatgtgaaaaaacttggtcacttaatgcctgctgtgtgtggggtctcgggagggtgtataaagctgcctgctttcctttgtcctttaatcagctacttctgcctcttttctcctcttgtgataactgtccccgccctcccagcttgcagttgtgaagattgtagagcagtgacctgatattctgtgcagatggggacaagacaggggagtttgctaaggatatgactgtagctataccctctggaagttctctttatactggaggggtgcgaagtggcaggttgggatgaccctagtcccaggctgctgctcccacttccttataaggacaggactgagactgggcggtggcgaattcctgccctgagaagtgtagtagcagcagtggagattggcaggcctgccgcaggcagaggggttgtgtaaatggatgttaccaggctgccagaaggggaggaagcctctatatagaacacttgagttgggaggaagagaaatagagccctcttaagtagactttggtgtacagtttggtgcagatatctcgtttcctcagcatgatcaaagttgaatgggcagcagagctctgaggtagggtttggattaaccctcaaatcctgtg

SEQ ID NO: 69781 - DNA, 1939 bp, Homo sapiens
cagggcacctatgaggattatgtcgaaggacttcgggtgtttgacaaggaaggaaatggcaccgtcatgggtgctgaaatccggcatgttcttgtcacactgggtaaggttctgtgtccttgtccttgagctgagatggcaccctgaggtacctcacttgtcacccaattccaaaaatgctttctttccccctgcaggtgagaagatgacagaggaagaagtagagatgctggtggcagggcatgaggacagcaatggttgtatcaactatgaaggtaagaggtgaactgcgctttctcagagaaagcagccatatggggcaggtcaagtatagtgtctggggctttccctatccctggacttgggctccaaaaagagccaggaggcaaggtgcagggccctgcccagcccagcccaggagtgggaggtcagggcggtataacaggaaaggaagggggtagtattgtagagggtgggaaggaatgagaagtgaaataatggaatgtctgtccccactgcctgacccctcaccccatgtctttgtcttgtcttcaccatgaatgtctcttccttcctgcagcgtttgtgaggcatatcctgtcggggtgacgggcccatggggcgggtacggctcctcccagcctctcctctagttgatctccccagtgtttcttttttccccaacctgtgctctttatcccctgcccttaccctactaccatctgacttcctcctggcatgtttctgcatggagctgactagggaggggagggattcctcaaagaggaagacaacctgggggtacagtacctccttacctctagaatgggccctgaggttttacttatgcggccctgggtgctggtgtctgggaactctcaccagcctgtataccagtcttgctttagggtgaccttctggccctggagcatgggtagctggcatagaggggtatgggttgcctgccccattctgctgctatagctgaacagtcctttccccttccctcgctgggcagcttggaggtaccctaacccaaaactctgtcctctcctcccgccagtggctgacagtagctgtaggtgtagtggagaacttttctgcctctgctgtgttcttgctgcttaggtttgggtgggggactaacagctgctgggaggggagctaggggcatggagaactggtcagactcaaggtggctcctctgcaaactgaccccagggttggttgctgtgggcatgttcccgcttatgctacctttgcagtctggtagtcccctggcccttggcgtacccctccacagccctgttccctggctcatcccacctttcctttccacagagctcgtccgcatggtgctgaatggctgaggaccttcccagtctccccagagtccgtgcctttccctgtgtgaattttgtatctagcctaaagtttccctaggctttcttgtctcagcaactttcccatcttgtctctcttggatgatgtttgccgtcagcattcaccaaataaacttgctctctgggccctcggttcggttctttctttcctgaacagggtaaaggggaagaaggtgagatggtgatgatttctgccctgaggcagagtccaaggtcaatcaatggtgcaggggttgaggaaagctgggggaggccctgtactagccatctgggcttcatttaaaaactactggccccattcatccatcttacacaagctacctcttgggagattaggaaagccatagatcccagtaggactaaggctggccatccctgttccattccatatcaggctgtcttctcctacccttccagctccttaaatctggcccccgccctcccaagctcccaataaggccttttgtggggaagcctgtggagtgtttattggagctaaagccaggccattattagcactgcctaagcctgtccgt

SEQ ID NO: 69782 - DNA, 1124 bp, Homo sapiens
gtgaaaggtgtttatacaaggttctattaaccacttctaagggtacacctccctccaaactactgcattttctatggattaaaaaaaaaaaaaaaaagtagattttaaaaagccacattggagctcccttctacccactaaaaaataaccaatttttacattttttgagggggagtgagttttaggaaaggggaattaagattccagggagagctctggggatagaacagggcgcagattccatctctccccaagcccctttttagtgactaagtcaaggccccaactcccctcccccaccctacgctgagcttattcgagttcattcgtactaataatccctcctgcggcttcctcattgttgctgttttaggccaccccagctcagccaatgattcctttccctctgaatgtcagttttgtttttaaaagtcacttgcttagttgatgtcagcgtatgtgtatttggtggggaaaacctaatttcggggatttctgtggtaggtaataggagaagaaagggcactgggggctgttctccttccttccctgggctgtatccatggactcctggaaggcacagagaagggagctataagaggatgtgaagttttaaaacctgaaattgttttttaaagcacttaagcacctccatattatgacttggtgggtcaccccttagcttcctccctctcccaccaagactatgagaacttcagctgatagctgggggctccccagatgaggatgcagggatttgggagcagtggaagagggtgcccaaccttgggttggaccaacccttggctcgcagctcaactctgcttcccgcattcctgctccacgtgtcccagcttctcccctgtgacgggaaggcaggtgtgactccaggctctgcactggttcttcttggttcctcccaccaggccctttgttcctcatgtccccatgtttctctccctctgcgtcttagcacctttcttctgttcaaagttttctgtaaattttctctttttttctttctttcttttttttttttttataaattaatttgctttcagttccatcttgtgggtgcattctgtgttcttacctgtggctgtcaggcagggggattgtgatgg

SEQ ID NO: 69783 - DNA, 1014 bp, Homo sapiens
ggcaagttcaaagctttgtagctgaagtgagcttgggccaggttaaagtcattgcaataagaaaccatgtgggcactcaggagacataaaggtcatgggaatttgcacgaagtcgggtggggaggacagagggagcacaagcacaagatgtagattttgggaaccttctgattgagaggcaggctctttcagaagaagacaaagcaggggttgaggcatttgcctttgggatctgctgaaaattggataacaatactcaattggcactggcagctggagtatcagaggcagcagctcctggccgacagacaagccttccacatggagcagctgaagtatgcggagatgagggctcggcagcagcacttccaacagatgcaccaacagcagcagcagccaccaccagccctgcccccaggctcccagcctatccccccaacaggggctgctgggccacccgcagtccatggcttggctgtggctccagcctctgtagtccctgctcctgctggcagtggggcccctccaggaagtttgggcccttctgaacagattgggcaggcagggtcaactgcagggccacagcagcagcaaccagctggagccccccagcctggggcagtcccaccaggggttcccccccctggaccccatggtaagtgttatgttccagaacttttgttggctagaggaatccaggtgaatgtcccagttctcctcaaaggggatacaagatgagtgtggagatgaggttagcctcaatttctacagatgggcccatctctcttaggcccctaaatcagcaggagtccttccccaaactcgagagctttggaattttattcacttactctagtgtcagaaaaggggaagatagtgccaaggaatggctagattatccttgtttgtaaaagtgagttattctttgggaggccgaaatgggtggatcacgaggtcaggagattgagaccatcctggccaacatgttgaaaccccgtctctagtaaaaataca

SEQ ID NO: 69784 - DNA, 1041 bp, Homo sapiens
tggatcacctgaggttgtaagtttgagaccagcctggccaacatggtgaaaccccatctctactaaaaacacagaaattagccggcgtggtggcgcatgtctgtaatcccaggtactggggaggcaaaggcacgagaattgcttgaacccaggaggtagaggttacagtgagctgagatcatgccactgtactccagcctgggcaacagagtgagactgtcccaaaaaaaaaaaaagaaaaaagaaaaaagacacggtggctcacgcctataatcccagcacaaaaaagtcaagccctttcaccatgggttgtgaccacagcaaatttgttcttatacctgccagcatccaccctacctttcttctgtattgtcttcagttgggtcctcccactgatgtgctgtctcgcccctccttccctagcacttggctgctgttgaggaaaggaagatcaaatctttggtggccctgctggtggagacccagatgaaaaagttggagatcaaacttcggcactttgaggagctggagactatcatggaccgggagcgagaagcagtgagtagcaggagccctggaaccctgctgcgctgtgcctcagtttaaaatcggaggggcgtgtgtgtgtgtgtgtgtgtgtgtgtgtgtgtgtgtgtgtgtgtgtgtttcagtgaaagagagataagcaacagtggggaaagcctgagtgtgtgtgtgtgtgtgtgtgtttcagtgaaagataagcaacagtggggaaagcctgagacagacagggcttcaaagcagagcagggcaggaacagggcaggagtagggcagccagttagagacagttaagtggtctcacaagtgaagtctggggactgaagtcccacagaaggtcagctccatgaggcagggactctagttggttgttttgattgctgcatctccaggtccttgaacagtgcttggcccatagtagactcaaatagtgattgagtgaatgggcgtaacggatgatgagagagagggtaagagcctcagatccaggaggtgaact

SEQ ID NO: 69785 - DNA, 1334 bp, Homo sapiens
ttaacttcatatcctttcttagtgctacttcaagatcccccttggacctagcagagtacacaaataccagaacatagagaactttgaaaccagctgcccttagtaggatggggggagtcagccttcgagaaaagtggctaagtaagcggagttatgtctccaccactaccaccaggcactggaaatgtacaaagatgactggaacaaagtgtccgagcatgtgggaagccgcacacaggacgagtgcatcttgcattttcttcgtcttcccattgaagacccatacctggaggactcagaggcctccctaggccccctggcctaccaacccatccccttcagtcagtcgggcaaccctgttatgagcactgttgccttcctggcctctgtcgtcgatccccgagtcgcctctgctgctgcaaagtcagccctaggtaatgggggtgggtggttccacctggccttcttagtttgcttttgaagggctagttactcagactgtgaatcctctcaagtttggctgccctgctggccttgtctgtgcgggcctcagctcaggcacctgtctaggctccatactagcttagatgaagacatgggcttgtgagtaagcttttgcagggattgccagaactgttccactgtgccgctcccagcctcattctttctgggtcttgcagaggagttctccaaaatgaaggaagaggtacccacggccttggtggaggcccatgttcgaaaagtggaagaagcagccaaagtaacaggcaaggcggaccctgccttcggtctggaaagcagtggcattgcaggaaccacctctgatgagcctgagcggattggtaaggccaggcaggttcccagatttcttgcctttcacaagatccagagctacctggcctcctgtgccatttctgcctcaagttggcattagagcacaacatgaatgagaacattggtagggtttttattttccccatgagtttacctcaggggctctggagccctactagtcctctcatgaagattttgggtagaaaaatctttgcttgtagaaggggctgttagaaaagtcttgtgaaggccgggcgcagtggctcatgcctgtaatctcagcactttgggaggccgaggtgggtggatcacgaggtcgggagttcaagaccagcctggccaagatgctgaaaccctgtctctactaaatatacaaaaattagctgggcgtggtggcacgtgcctgtaatcccagctacttcagaggctgaggcaggagaatcacttaaacctgggtgccagaggttgcagtgagccaagatcaagccactgcactccag

SEQ ID NO: 69786 - DNA, 1263 bp, Homo sapiens
acccacacccccctggggacttcagttccatttcaggttacctggggtataccttgatccctagagtgactggcagagtaagagaaggggagagataataggtgtgattattttaatatggaggtgggagtgtggttggagatagaaaggctcctccccaccatgtaatggcttcctctcagaattttattccaggctagcttgctgcaggtctgggtagttggatcatggctccactgggattggggtggaaagcttgaggggagtagggttccagctctgggacattgtgctcaggaatttgaaaacgctgctatacttactctggttactacatttcttccactcccctttcccctacctgccttaaccaaggctcatactgtcctgtccttaccctcagatggagccaggaagctcagtgaaaggcttccctaccctttgcactagtgtctctgcaggttgctggttgtgttgtatgtgctgttccatggtgttgactgcactaataataaaccttttactcaactctctaaattcttcagcattactccctttcttgagaaggtttcccctctgcttttgcctttctctcaccttaattccctttcttccttactttgttacctacccttatcttagtgctaacttctctttcaggaggatgtctgggagtagtgtgcacttcacagctgctttcccatgtaccctcctgcattcttccctcctatctcctgttctgtagcagccaaagctctctagtgatctgaactgtgtgcttcccagggtctgcctttatcctaaattccatgtcttccctgagtggtcctgagtttttgggataatttctacagaagatatgtatatatctttttcctttgtcccacaagcaactttgctttagaatctagaattcctttgcaggcagagaagtctctacctcccagtgtttcctagctaagaacgtaaatgtgaggagggaaatgtacttgcagaggtttcataattatttacttataaaaatagtcttcatagccgggcgcggtggctcacgcctgtaatcccagcactttgggaggccgaggtgggtggatcacaaggtcaggagttcgagaccatcctggctaacacagtgaaaccccgtctctactaaaaatacaaaaaattagccgggcgtggtggcaggcacctgtagtcccagctacttaggaggctgaggcaggagaatggcgtgaacccgggaggcagagcttgcagtgagca

SEQ ID NO: 69787 - DNA, 1075 bp, Homo sapiens
ctgggactataggcacgtgccaccaggcccagcttttttttttcgagatgtattgcccaggctagagtgcagtggtgtgatcttggctcactgcaacctccacctcctgggttcaagctattctcctgccttagcctcctgagtagctgtgattacaggcatgcgccaccacccctggctaatttttttatttttagtagagacagggtttcaccatgtcggtcaggctggtcttgaactcctgacctcatgatccgcctgcctcggcctcccaaagtgctgagattacaggcgtgagccactgcgcccggcctatgcccggctaatttttgtaatttttgtagagatggggttttgtcatgttgtctgggatggtctcaaactcctgaggtcaagcagtgtgcctgccttagcctcccaaagtgctgggattacaggcatgagccaccgtgcccagcaggaaacgtatcttaagcctgtcccctacaatgccttgcccgtagtagatctatactttgctgtgacccagtggacctcttgtcgtagaggctgctcaaaggcttgattggctttgtagagttatatcatatccaggctcttaggtcctgctaattcccttgcgccccttttgccttgttctctcttctaggcacctcattgtgaacatgctttctgcaacgcctgcatcacccagtggttctctcagcaacagacatgtccagtggaccgtagtgttgtgacggtcgcccatctgcgcccagtacctcggatcatgcggaacatgttgtcaaagctgcagattgcctgtgacaacgctgtgttcggctgtagtgccgttgtccggcttgacaacctcatgtctcacctcagcgactgtgagcacaacccgaagcggcctgtgacctgtgaacagggctgtgggtgagatttgttcccttctgccccacatggataagggccatctcatttatgcccctgtctctggctgccctcctcactagctgaggaggtctctttggcatgttggcaaggagtattcttagcctccttggcttcctgctctaagatcttactt

SEQ ID NO: 69788 - DNA, 1995 bp, Homo sapiens
gtatgggcccccatcccgcctagtttgaaccctaccttttaagaaggagggataaggaacaaagcagccccttcccctctaattgtggtggctccagccttctgcagccttgacccaggttgggcaagggcggaggtgaggaatctttgaggaccaagcccagtggtctgggaatcgggaggtagagagggaagggtctgccttgggggctccctcctcccaacccaacccctagagaagcgaccaaatcccagagatggggtgaagctggggtggggagggtctgctctttgaattacttgaaggtactgactccaaggctgctgttgcccacttaggtgtgagggggacactgtcactgcatttgggagggcagagggtggcgggtaaccagaggatccaccttggccctcacccactcctgctaggccctttccctggggaatctggaagcctgactttgcccccagggaagttggggaccgccttccctcccttctccacctctcactctgggcaccctctccaattgcactaaagtagctgttgtgccagtctgccccccacaaggggggaggtctctgcttccagtcttcttcccccgctgcctccgctcccaccctggacaatctccttgtttcccttgtgttcctggatagctcagctttgtatgtgtgtttggggggtgggggtgggttctggcttgagtgggtttggcaggggtttgggaagggttaggggaggatggaggatgaagtctcctacccccttctccagctccaggccacagaagcctgggaagggagggtgcctactctcgctgctgtgtgtcttgcagatgtgccaaaatgggggtgggtgggaggggagggtgcctggcagagcagcccctggggtggctctctcaaagcaatatagttcccctgcgggggacagcaagacaggggagagggttggggtggggacctgggggttccccatgtacagctatgtatattcaggggtgttctccgtctggtacccgctgtgggcatctatgtgtgtgtgaacctccccttccccatgccctgcatgacctgtgatgctgcagacaccaccatcctgtgtgcaggtgtgtgttggggggcacggaggggcatgttccatgtcctgttgcaccctccaccctgtgacccatgtactcggttgtaggaagtaaagagaactgagcacaattcactggattctagtggaatctttctctaagcaattttcccattcctgcctctccctgccccggaaccacctgtggtgctagtgttgggatcgggggcgtttaacgctggtgggcagcaataaggggcagatgtgcccagatgcctgcatccccagggtgccgagggcagcaggaaaaagtggggacctcggtgcatttgccccacccctcccctccctgggctaaagcacaatgttctccccgcagattaatgaccctgcaccctccaggcccctactcacatcctcccccaaccggcttcgggtcctcccaccacactctggttttctatgctgttttggtgcaagtacaactgtcgtagtcatggctttgggatgggttctgtttattaaaatcctattgctcctactggccctgtgtcccgcctccattcctgtggttggggggaaggaagggcaacccgacccctttccactggccccatcagccctcagtggtcacgggcagtagccgctcctccagcagggttatggcaagcatgaggccgccccccagcagcagccccagcccctgcaggagcacatggggcgtaggcaggggctccggaggacgaagcagggctggtagctgaaagaaaaagaggatgtcaggattctggccttgcccctgacctctcaactccagaggaatggtgtcagaaagcatcagcagcccccacccaaacaccttagtcccttgtttctcagacttttgcgggcctatggtctgacgcccttcca

SEQ ID NO: 69789 - DNA, 2807 bp, Homo sapiens
tcacaccccagcactggcctgtgcccccaacaaagatgtggcagactgcctggccttgatcctttccaccatgaagcctttcccacccaaggacgccgtcagtcctttcagcttcagcctgctcaagaactgcagcattgcagccgccaagacggtgggtggctgcggcgccctgccccatggggcctcctgcccctacagccaggagcggcccggcgccattgggttagatggctgctactctgagtagccccctccagtgtccctcccccgccggtggcttgatatctaattctatttatttagaaaaagtctaaacatttagggcactttaaaggagaacacgactgggtggagggggcggaggggaaggaagccctggggagcagctgctcacccctttgccacaccatcttggcctggcaggggtctgggactgacagggagcaccccaggcccttggtacccccagggcgaccccttctgccaagtgtcccaaaatgattgctaaatgcctggctcccccactctttgactccatctcttggttccctctttctgctgccagctcccccgactcttccctggggactcctctctgtgtcccccttctcccctgcccctactgccaggcagatcccctcttcttccatacccatcactgcctccctgctcggccggtccctccatccccgcagcagtgagaagccttaatttctggtactgtgtgagcactctgggggtgtccccctccccccttcaggggcagctagaggatgaggggggaggatatttagcactggggcctggagctttttccccacttctgtaccctatcacccctaaagttcaaatgcaaaacacttgaagcagcaactactgtacctgggccccaatcctgcactctcccctggctcctcatatgcaaatcaagggctggttctgcccccacagcctgccccctccccattccctcccactcctagcctggcccctaaccacgcactttaaccttgcttctttcttttatcttcttttgggagggcagagcctgtggtcattcctgccctggctctccttcccttgaactttgaggcttgtcatgaatttttaagtaagcgttttatcctttaggggaagaaacaaattaatttcctgcccatttcaaaaccacagccctagtatgtccactgtgtttcaggcatgtgtttgcatgtatatggagggagggaccatgttcttcctcctgtgccgccaagcccatagtttatctgtgctccctatctgcctccaccttccgttatgtccaagagtacccactgccccagtcactcctgatctgaagccaaagatggtaggaggggcagggccgacaagggaccgtggctactcgggacccaggcttcccctccagtgtgaggaagaagctctgacctagagagagatgaataggtactggggcttggtccctgccttcccagcagggaggaaagatgggattgagctgggggctgcactgataagatttctaaagtcgcaccccaaaagccaaactgggctggagtgaagagggggcagttttctctctaaatgtagcattgaatttggccctggtccctttaagtgctctgtccacccatctcctagtgcagcctcctggacagttggacccactcctgcagcccagtgttcccttcctcacactcaatacctcagccaggggccaagacacagaacttgaatagaggtcatgccccctccgcccccacactgcatccttgcccagtttggctgccatcagtattgtcccctgagaactggacaggcttcgtttacacagtacagggtctcccctgaggggggatccttcagcctccctcccctactcaagtttgctttattcacagtcttacccatcttttagttgtataccctgaatgtcttgccacccttgtcaagggtgggctgaggggaggggggcgtcccagggaccccctccctccccaacggatacctttaaccatacctcatgctggtttccagaagcctggggtgttgtccaagtccttatcttttcatggtcccttttgatcccctgtctctctgtgttttgcttctcccaaccctcagttcctaaatcatttcaaggcttccaaatgaccattattgatgagaaggattgtgcagcttttagtttttatttttattttcaaagccaaagggccttgtgacgcccctcttgcccacctccctccacaccgtgtcctcccctatatgacaatcaatgtgacctctcttaagggctgcagcccccatccccaaccctgctggctctgcaaagcttgccttcccttcaattctctctcctgaaatcttcccattccaccccctccctctcatcttggtgctgggaattaggtggtggggggcaaggggagtgagaagatgggtcctccagagagaacttgccgggtgtgagtcgtgttctcctttcgtgatgtttggtgatggcgggaagcgtctgagtgtcagagccccgttgtcttgctagatgagatttctgggggctgtctgcgccctgctgccctcagcgcactgtcagcagtgctgggaggtggtggggagtcctctgtccctccatatgtggctgtgaggaagcctgggggacaagcagcctcctctccttatgccaaaggaaaccccacgccccaccctgggctccccagccctagtgttttttgaagcattttgaccattctcatggccactgcatatttattttaatgttaagattttttttaaacctc

SEQ ID NO: 69790 - DNA, 1305 bp, Homo sapiens
caagattgtgaacagccgagatgccaaaggacggtgagtgatggaagacttgggaagaatcccagttgcctctggcttcccctttctgcttgggcagtatactcttccctattttaatctaccctgatccctgccttacaggaccccccttcacgccgctgccttcgcggacaatgtctctgggctccggatgctgctgcagcatcaagctgaggtgaacgccactgaccacactggccgcactgcgctcatgacggcggctgagaacgggcagaccgctgctgtgggtgtgtaggggccacttgtggaagggaggagctcccctggggcatttgcaggatgggtcagccctgcctgtggaggctggctggggctggggttcagaaagcaagagggttgtctttggatgtctcgccatctgcagacgggatgcaaagtggagagccaggatggctactgctctggagggaggggtcagtccctctatcacatttctctcgtagaatttctgctgtatcgagggaaggcagaccttactgtgttggatgagaacaagaacacggccctccacttggcttgtagcaaggtacttacctgaagtgattgggggactgcataaggggcagagcttgatgaagagaggtaagtctcggttgcagaggggactggggcagaagtgaggattgtccagcctatccgactggttgggcagctgtttgtcctcctgttactctccccaactcctgccctgcaccctgccacatttctacttcacaagtctccactctctgttcccctccctcagggccatgagaaatgtgccctcatgatcctggcagaaacccaagaccttggccttatcaatgctaccaacagtgcgctgcagatgtgagtgcctggggaagggggctcctggctgggggaggccagtgggtgatgaaagagtggccgctgttcagaggctctctggagcccattgtatttgttcagcacccttgccaccctgtctggaggtggaagggcagcttagcatcaagctccttctttttccttttttccaaggccactccacattgctgcccggaatggtctagcttctgtggtacaggccctgctgagtcatggggccacagtgctggctgtggatgaagaaggtgggtggggtctggggccccatgcctctcttgggtttggggtcagggacattcttcaggaggtgacttcttaatcttgctatacatgggattttcttcccaagggaactcttcagagcagggagcccacaccagtactctggagtctcag

SEQ ID NO: 69791 - DNA, 1047 bp, Homo sapiens
agaactgtgccctcctgggctgggcctgtccctgcctcacagtctacccccggctccccagctgtctggagttcttactggataacggtgcagacccctccctgcgggacaggcagggctacacagctgtgcactatgcagccgcctatggcaacagacagaacctcgaactggtatgtgttggggcccggcctgcaggaggggaggcaggggcagggcacagggtttgtggattccaaaactaagggttcaatcaaatgtggtctttggatccagaggcttagtggggattactgcgagtcggggactggggtactatcttgggagttccagagtctcagcacctactttcctgtcctttgcagctcttagaaatgtcctttaactgcctggaggatgtggagagcaccattccagtcagccctttgcacttagctgtgagtcccacgtcttttttctgttgccttccttgtcctacctgttcccaggccctaacaaaggtgccagcacttgtgaagttatccttccttctgcctttttgtgggagaggggataagcacagtgcagggtaggaagccttaaggggcccaaggagcttgtcaaggactaagaccttgagcttcccagggaccccaagagcagagaaggggaagggaggagcagggaaggtcccgagctgtgtgcactggttgcctgcaccttgccaggcctacaacggtcactgtgaagccttgaagacgctggcggagacgctggtgaatctggacgtaagggaccacaagggccggaccgcactcttcctggccacggagcgcggctctactgagtgtgtggaggtgcttacagcccacggcgcctctgccctcatcaaggagcgcaagcgcaagtggacacccctgcacgctgctggttagtgcccactttaggctgctgccctacccttgccatgccagatccctcctggatgggaatggggctggaaagtggagtagggtgaggagaatggagacttcaagccctgattcatagcttcctatcctcagagat

SEQ ID NO: 69792 - DNA, 1023 bp, Homo sapiens
aagaccgagtctcactctgttgcccaggctggagtgcagtggcatgaacttggctcactgcaacctccacctcctgggttcaagcaattctgcctcagcctcctgagtagctgggactacaggagcacgctgccacgcctggctaattttttgtattttagtacagacggggtttcaccatgttgcccaggctggtcttgaactcccgagctcaggcgatccacctgccttggcctcccaaagtgctaggattgcaggcgtgagccaccacgcccagcctaatttttgtatttttagtagaaacagggtttcgccatgttggcgaggctggccacgaactcctgaccgcgggtgatctgcccacctcagcctcctaaagtgctggaattaaagatgtgagcaaccgagccaggcccctgtctccatttaaaataagtaaattaaataatttttttttaagatttatttttttaaaaaggacactaaaatccaagaggctcagctattaccttcagcaagttacttctctatgcctcaatttcatcacccacagtaaggataaaaatagtatctacttcatgggatctttatgaggattaaattatttaatatacatgaagtacttagaactgtgcttgacagtaagtgctactttattattattactactactacaactactactaaggtatgagaagactgccaagggagcacagaggaagaggcatcttccccagggaaggctgggaaaggcctcacagaggagagaagctgggactgagtttgagatgaacaggacttattcgggtgggctgggaggagaaagcatcctagggcaggggttggcgtgcctggaggtggggaaagcatgttggtcagcagaaggctgataactgaacatcatgctctaggttctctaggagagcattcagaggataaaggagggcattgaagccagaggggttcagggcagaccttgagaaggtaaagtgggtctggagctgccattgaagaatgggtagg

SEQ ID NO: 69793 - DNA, 1638 bp, Homo sapiens
acaagggcttcacgccactgcatgtggctgcagtctccaccaatggcgctctctgcttggagctactggttaataatggggctgacgtcaactaccaggtgcctgaagggataaggcttagaccagtggggagcgaaacttggatctaggggtcctgactgtatctggatagctctcttggggaattatccacttgcttcctagggtaatcagaccttgccagggactcaggaaagagtgggctaagaaggtgccatatgacccttttgtccttagagatatgtccttggaagggaggtagggcattctctgtgctttgcactggaaaaaaaaacaaaaacaaaaacccaccatgtttccacagagcaaagaagggaaaagtcctctgcacatggctgcaatccatggccgtttcacacgctcccagatcctcatccagaatggtatggacctgggagactttgtgctctcatcccctcctcccccaaggaactcatttctagaatctagggaggttcctaacttccttctcctgccctcttccagtaggataggcccttggaactctgaccaagggacctgtggaaatggccctgctctgccctgcccagtctcctaaggcctagaaacaggataaaatatgtagaatcctgggcctggcacctgatgcatacatagtaggcactcaaatcatggctagctcgcgaaagtggtcttaagcctgaggtctgcctgagcttgtgtgtgtgcatcccctcacaggcagcgagattgattgtgccgacaaatttgggaacacgccactgcatgtggctgctcgatatggacacgagctgctcatcagcaccctcatgaccaatggcgcagataccgcccggtgagtcagggccccgactccacttctgggctgcccagatctgcacagactgctcacatcaaccatggaggcacagataagcttgccaaagggcaccttggagaacctcctaccctgactctagggtggtggtaggtcacagaagaggtcttacttggtccctccttgacccaaggactgagtccctcaacttctctctaggcgtggcatccatgacatgttccccctgcacttagctgttctctttggattctctgactgttgtcgtaagcttctttcctcaggtatgtgctgatgggctggggattggcaggtgtataggagagcaaaggcctttccctccctgctgaacactctcagatgtgacctgtggctgttctgtgcctccaggtcagttgtacagcattgtgtcttcactcagcaatgagcatgtgctttcagctgggtttgacatcaatacacctgacaaccttggccgtacctgtcttcatgctgctgcttccggagggtgagttctctttctctctcccatgctttgagcagggagctgggcaaaggtctgggcccctcattcttgcctgcccagatctattccccctctcacaatgaaagcagtcacagcagaaagggcttgctagtcccatccttccttagccccaccctgggcctgtggcttccctttgaggctgtaactctcttaacacatctttcttttaggaatgttgaatgtcttaatttgctgttgagcagtggagctgact

SEQ ID NO: 69794 - DNA, 1107 bp, Homo sapiens
gcgcttcccacacacccctttttctcatccccctcaccccgcccccagccctgtccttagctgccctcgaccttttgcactcgtgactccctggccagagagagcctagcgggctgcagcaggtgctggggggaaagcttgtttggacgaccttcgtctgggatgcactcttcttctccttcacctacaaatgatagaggattacgaagaactatacggttggctcctctttcctttggccttaggtttctgacctcctgcagcctcctcttgcctcgggctgcccagatcttggcggctgaggctggcttaccttcgagccgttccttcatgggatttgctgctcccttcaccaacaagcgaaaggcttactcggagcgtagaatcatggggtaagcattctctgccttgcatccttgcacctcccttttccctccaaataaccctgtccaggcaagaatgtcagggtatcatcggtgggcaagattcatccctagccatccccctccccagctacaatactgatcctcagtcctcccctgccactcttccgaccttaatttctcccttcttggttgctgtgcatgtgcttaagtgaaatgagactagggttggactatactttaagacaacagggcgtagctgggtgcggtggctcacgcctgtaatcccaggactttgggaggctgaggcgggccgatcgttttaggtcaggagttcgagaccagcctggccaacatggtgaaaccctgtctccactaaaaaaaaacacacacacaagaatcagcctggcacggtggcgggcgcctttaatcccagctatttgggaggctgaggcaggataatcgctggaacctgggaggcagaggttgcagtgagctgagattgccccactgcactccagcctgggcgacagagcaagactgtctcaaaaaacaaaacaaaaaacagggtgtatttttctggtgaccatttaaaaataatttttatgggtacctagtatgtgtaaattagcagcgtaacctttttagtatattttgagcataatagctaaattatcgagcacttgctacatgctagcagcttgacttagatgttttacataga

SEQ ID NO: 69795 - DNA, 2689 bp, Homo sapiens
gtcgaggctgccgtgagatgtgatcatgccactgcactccagcctgggtgacagagtgagatcctgtctcgaaaaataaaagaatttctactgagaatactatcttttttcctcactctttacaggttgttccaggctatggccatgcagtactaaggaagactgatccgcgatatacctgtcagcgagagtttgctctgaaacacctgcctaatgaccccatgtttaagttggttgctcagctgtacaagattgtgcccaatgtcctcttagagcagggtaaagccaagaatccttggcccaatgtagatgctcacagtggggtgctgctccaggtaagtcctcctttccctcttttccctctaatttgtaccaaaccctattgttatctgccatgcacaaagtcaattaactcctagtcagagcagggacttccctcacagagcattttgataaagttgactatgagagggttgggggttggggttgctctgttttcagaatcccaattgctatacttttctcagtgtcatttctatttaaggttgactgggctaagtccttggagaaaaatggaaaatttagcttttaaggtttctatcacctaggacttgtacatgccactgcctctgccttaaatgaaatatttttctcttctaccttacagtattatggcatgacggagatgaattactacacggtcctgtttggggtgtcacgagcattgggtgtactggcacagctcatctggagccgagccttaggcttccctctagaaaggcccaagtccatgagcacagagggtctgatgaagtttgtggactctaagtcagggtaaaactggagactgggtgaaagtgactaccagaaagtgaggaagcctaaataaaaagtatacttttgtttcagggggcctttaaagacttaagattaaattatatctgaggcactgataatatgtttgaggttaaaatataaattaagactttaaaagatgaaaaatggtcccttcttccctaatcagctcccttcccctgcctggtatgagttgcccatcatacgcatggtcctggaggatgaccaggactaatgcatgtggtatgagtaggtttggccccctcactatctctagagtgagaatctggctcctgtttccatgggtcaaagccggttgcagagaatctgtagtcactttggagctttagcttctctgccaagccctcaataagccagcaaaccaggactctgccccttctgtttccataggaatcatgttggatagtcagctgtaccaagccccttggccctctcccatgcacacaaacacctcctagcaagacctgttggttagctggacatgctttggcaatttttttatactaccaagtgaccataaaggcatggcatttgttgtgactggcacccaatgtttgattttttttttaaaactatccaattaaaattaaggtctgggagtgttctgtttcccattactttaatactcacctcctcccagactttctacacctgttgcacctcaggcagaggatgttctggacctccccctcttggtccctactagagacctctcaacagatctgtgggcccagtcattgggttttatcagtgcttaatgtgaactaagttttttacttccacagaatacaagccactaccttctgacctccccaccccccaccaacccccatcttttaatatgctgtggggcatagaactccggaatgaccagcatgatattttcagagtcttgtccccggggtattagcacctctttttgaacagggaattgattcaagattggacatggtctcctctgattatcaggtactggggctgagggcattaaaaatagtaagcctccctcctcgtcccctgcctcaagaaattgcctccttatttatcaacatctttttcctccctttccctgagagctcacagtacaatgtttcagaagccccatttgcacaggttttcagcaactcagaatgctctacttctttttctttgagaaaggattaagatacactcctgctgtgcccccatctttcctccaaactcctgcctgtgtttgtgtggatacccagtcccagaaccacactgttgagttggacacactgtaaacccctgggtaactgtcaagtcatgatggagacttcaggttgttctgtataaaatgcaaaataaatgtttttattaacaatgcttgagcctattattaaataaggcctggaagaacctttattatgaggtaaggaatctggctagcaagatcctgaacttagtgggttataagtaatctgtatccatttatctttaggcaggtttggctttcttttaccttaaccagaggaaagcctccctgagaaatttccagaggagatttctgtccttcctcaaggttaggaagtccttgatgtttagcccctaaccttgctaattttgttgtaaggtaacatactcaagggctatagctgagattctcaattgcttatgtgactaatccaagaactggtctagcccactgagagaaaggaacaaactaccaaggacgaatgggctagtactgctacctcaggaccagagccactagagggctctggtacttcttggagtgcctgctctttatagcttccctgaaggaggtcccaaaaataacaagaggtggtcc

SEQ ID NO: 69796 - DNA, 1053 bp, Homo sapiens
ccgccttggcctcccaaagtgctaggattataggcgtgagccactgtgcctggccaagattaggatgtcttttacaagagtttaggtataactgactggctataggctggcatgagcccataactaggctagtaagtggcaaataagagaacagcaaagtttccataatctgccccttctttcttcccttggctctcccttcttacttccccacagtgaccatgagggtggcaatgtaagtgcccataccagccatttggtgggcagtgccctttccgacccttacctgtcctttgcagcagccatgaacgggctggcagggcctctccatggactggcaaatcaggtaagactattctttttattttcctgctacatgttttccttaccccatgctttgtttctgatcttggcattctcttctggcatatgtattaacattccctttttccccaaaccttacccataggaagtgcttgtctggctaacacagctgcagaaggaagttggcaaagatgtgtcagatgagaagttacgagactacatctggaacacactcaactcaggacgggtaagcagagatgcttaacgactaggaaagaaaccaagacacaagttctgcaatttggaagaattaagaaaagaatgaaagaggtccctaaattagagatttttttttcttcatttatctaccttgaagaatttagaaaagaatttctaggtgggcacaatggcatgcacctgtagtcccacctacttgggaggctgaggcaagaggattgcttgaggccaggagtttaaggctgcagtgtgctaagatcactcctgtgaatagccactacactccagccaggacaacacagcaagaccccattctctaaaaaacagttttaaataggttgagtgtggtggctcacgcttataatcttagcactttgggagtccagggtggatggatctcgtgagcccaggagtttgagaccagcctgagcaacacagaccctatcttttttttttttttttttttaaagacagtcttgctcttgttgccca

SEQ ID NO: 69797 - DNA, 1094 bp, Homo sapiens
gttggccaggctggtcttgaactcctgacctcaaatgatctgccagcctcagcctcccaaagtgctggcattataggcatgagctgccgtgtctggctgtaaaacctgctgtcttaacacattgaacgtcaagtcatggtgtagtgaaaaagatcatgattaaacatatcagagggccaggcatggtggctcacacctataatcccagcactttgggaggccaaggcaggcagatcacctgaggtcgggagtttctagactagcctaaccaacatggagaaaccccgtctctactaaaaatacaaaattagccgggtatggtggcacatgcctgtaatcccagctactcaggaggctgaggcaggagaatcacttgaacttgggaggcggaggttgcagtgagctaagattgcgccattgcactccagcctgggcaacaagagtgaaactctgtctcagaaaaccatatcagagttcaaacttgactttagcatttaacctaatactatgagccttagtttactcatctttaaaatggcagtcattatatactttgtagtagtaagcattgggaataatgttttagtgtacattagatagtattacaaatcacttagtgcctgggtcataatagttattcagtgaaatggttatgattgttattctctactttcaaacatactcaatatataacaacccatcatataactaaccatcaacccaaatagccccaattcatggaggacagacgatatccctgcctaattcttctttgctgataattcctttttttttctccatcttgctcctcttctgtcagttgatttatgaagactctatggatctaatcgcaaagctaccttgtgttgcagcaaagatctaccgaaatctctacagagaaggcagcggtattggggccattgactctaacctggactggtctcacaatttcaccaacatgttaggctatactgatcatcagttcactgagctcacgcgcctgtacctcaccatccacaggtaagctagacccagcaaccacagccactaggtgcctcaattggtgggaaatttttttaaaagctcctttatgt

SEQ ID NO: 69798 - DNA, 1052 bp, Homo sapiens
agggtggggaagaacccctgcctgagggcttattttggctgctggtaactggacatatcccaacagaggaacaggtaaagcagaaggatattattagctcttctcattccccttcttcattgcctttctctaatctcagacacttaatgctgatccggcatttatagagatgcgtagtgaagggaaggaatcagcagagttctgctgtataaatggattgggttgacctctcttgggttttctttactcagatgttgctgtccttttttatttttctccttccttgtccttgctggtgttctgagcactgtctctttttccacaggtatcttggctctcaaaagagtgggcaaagagggcagctctgccttcccatgtggtcaccatgctggacaactttcccaccaatctacaccccatgtctcagctcagtgcagctgttacagccctcaacagtgaaagtaactttgcccgagcatatgcacagggtatcagccgaaccaagtactgggaggtaggaaatttgggtggggtgatcggtgtgtgatggggattcaaaggacttgagtgtgaagggagggaaaaaatacagaatctttagaaaaattacctctgagttaatcagaaactaacttaacagattttcattggaggcttgttttttgtcagttgttggaattacaaagctaagtagagcatggtttctatcaccaggactgtttgtttggttaggctgacacacgtgcagaaaaaagaaattattaaaattccatagtcggccgggcacagtggctcatgcctataatcccagcacttggggaggccaaggcgggcagatcacgaggtcaggagttcaagactagtctggccaatatggtgaaaccccatctctactaaaaatacaaaaattagccaggcgtgatgccgggcgcctgtaatcccacctactcaggaggctgaggcagaagaatcacttgaacctgggaggtggaggtttcagtgagccgagatcgcaccactgcactccagcctgggcaacagagtgagactcc

SEQ ID NO: 69799 - DNA, 1040 bp, Homo sapiens
agtattatctgtgggtgactcagttttgtgacatcaaaaatgtcttttcacagatgatctgggtttggatttgggctaggaattgaagtagggctgcagttcacttctggacttttgaagtcaacatgcttaaccaaccctagctaaagggaactgtctcttgagccactgaaaattgcttctccaagctagtatgtttgaaactgagtaaatcaattcaaagatgtttctagattacttctagactttttcaagacacttaaatgcaaaggaaccaatggtttctttacattggacttataccactgtacaacatcacctgtataagtcctactcagaaattgggttcaacaaaaccgagttggttttgtcctgcaaaatatttagttaggttttaaagcccaaattttttaaaggtaagggctcatatctctgtgccctcactttgactatcagcctacccaaagtaacggtgattccttgatactagaatggcaggggaagccttatggggtgttagtggtgagatgactgcatttggtcttcccagtggcctttaggttggtagcaggtgaatgaatgcatggggaggcagcaagaatagtatggtaggtagcagcgatagagttggcattcctgacttaaaatccaaggggcagcagaagggaaaccagacttggtggatttcaataaagccacacaatgattctttctgccctgtgtcaatactttatgcaacagagtaggatgtgaaatttaaaaccgtaatgaggcaactgtagcaatagatctttcttagcatctgattatctttcagttctggcttcaactgtgcttcaactgcacaagttccttagttctctgttttgggttttttttggggggtggggctggagtgcagtggtgcgaacatggcttgctattactacagcctcaacctcatgggcccaagcaatccccccgagtagctgggaccacaggcacgcacagccacgcctggctaatttttttgtagtttttttggagacagtgttttgcca

SEQ ID NO: 69800 - DNA, 1093 bp, Homo sapiens
tgtcacctccatggccgtgaagccattaaccaaagacattcctcaagaaagcgcgccaaggcggtagaaggatcaggcaatgatcagtttccatgatcatattacggaattggctccaaggaccttcagaggtcgagtcctggagcgtctcctttagcattcgcctcagagataaccccaaaagtgttaaggtcaaagggaaaagccaagagggaagttaactgagttatcaggcacctatttagccacccgcacttccccgcccgccacccatccacccttaattagccctaatccgggcggtccaatcctccccgtcacaactgctgtcaagggctaaggtcccgccccgcttccataccggaccaatggccgggcccggggagagtcccttgagaggggcgggctcgggttccggccagtgggcggggcctccttgaggaccccgggctgggcgccgccgccggttcgtctactctttccttcagccgcctcctttcaaccttgtcaacccgtcggcgcggcctctggtgcagcggcggcggctcctgttcctgccgcagctctctccctttcttacctccccaccagatcccggagatcgcccgccatggctttacttactgcggccgcccggctcttgggaaccaaggtgagcagcgaggggagggagcacgccgtcccagggtggggctgaggcgaccgcaggccctccggcgccggggtctccctcccacacccgtgcgcaccctgcgcgccttaaagggccctgcgcttggctggccgccagccctgcgtgaagctacaggaccatgtgccgcgcttcccttctggctcctgggggtgaagtgcacgccgcccgccctcggcccgcagtccagaacgcgtgaggaggccgaccctgctgtcaccccgcatgtctgaaatgaaaggggaagggatgcgtggccctgaaatagcaaggagccgagacaggaacctctggtagagactagagatgtggtgttccactggagttacagtcagtttggtggagggagcgggagtgaagatatgtgctcactctggagcagtggctaatttcgtcctctgc

SEQ ID NO: 69801 - DNA, 1305 bp, Homo sapiens
ccgaccaacacagagaaaccccatctctactaaaaatacaaaagttagctgggtgtggtggtgcatgcctgtagtcccagctactcaggaggctgaggcaggagaatcacttgaacccaggaggcagaggttgcaataagccgagatggcgccaatgcactccagcctgggcaacaagagcaaaaccccatctcaaaaaacaaacaaacaaacaaaactaattaaaatcaattagggaaagctttttagaataggttgttggagctagatttggaaagaaaagtaaggatataaattactaatgtacagaggtagaagagagtgacccaaggctgaggacatttctaggtgccttatgcccgctcagaggcccacctcacagagctgctggaggagatatgtgaccggatgaaggagtatggggaacagattgatccttccacccatcgcaagaactacgtacgtgtagtgggccggaatggagaatccagtgaactggacctacaaggcatccgaatcgactcagatattagcggcaccctcaagtttgcggtgagctatgggaatcggtagctggttcttggacattaaggggttgttggagaaccaattagaaagttaggctgatatccttgtcctcctctttggaagtgaaggcaagaggcctcttattgccctgtgtcacccatttctcccttgggttggcagtgtgagagcattgtggaggaatacgaggatgaactcattgaattcttttcccgagaggctgacaatgttaaagacaaactttgcagtaagcgaacaggtaagctgcccccactttatctcctgttctagtagctctgtggaacctgacattccctaactcacccatacacccccatcccagaaacctctggtattaggtcaagagctgtcttccatttcccttggcttagggacttggggtgttcctccacattttctgtcagctttcagaatttgtgtccccttgaccctgagatacaggtgagaggacagtggggatgttttatcatttataagcatatattctgcagaatggtggttggtgtgtgtttgtgtcagcttggtctgggaaattttcttgatactggcagatatcagtatgagaatggcatattcctttaaattgtttgccatttgcagatctttgtgaccatgccctgcacatatcgcatgatgagctatgaaccactggagcagcccacactggcttgatggatcacccccaggaggggaaaatggtggcaatgccttttatatattatgtttttactgaaatta

SEQ ID NO: 69802 - DNA, 1991 bp, Homo sapiens
tttcttcctctcagattcagacccgcaacatccgccatctgccagatattcttgtcatcaattgtgaggtgaacagctcaaaagaggctgatttctggagaatgcaggctgaggtaaggactcagactagaaacaaggcttccggaataatttttcattttatcccccttctgacctccatatatgattacattcctgaagaactggatgtttttcttctgtgttcaggttgccttcaagatggcagtaaagaaacacggtggggaaatctccaagaacaaggaatttgctttggctgattggtaggtgctgtcttgggagttgtcaaaggattgaattgcccagtggttcctcttatcaagacctctttcggaacaaatttccaattcttctgacctgataggaaggaactagggagtccagagggtgtgctggtgtgtccctccattgaggagttgaagaacgtctggcttcctttctccattcgcatgaagatgaccaaaaacaaagggctggatgtttgcaattggactgatggggatgagatgcaggttgttgaaaaaccgggaagaggaaagggaataagggagagaaggtggggcagaaggtaaaggagggcaggggaaggtgaaacttagcagagggaaaaggaagagaataaggcctagtatttacctgttaggggattttccatagtcactcagttcagtgttggggtcctagatgggctaggatggagataacccaccctggtcccccatcccccatacccccaactccctgtcctctgtccccattcccctcccttccccatccttaaacttagcttagcagcctgggtacccccctcacagtggggcccagccagggcagaggaggagcatggtgtctatgtgtatgacctgatggctactgtggtacacatcctggactcacgcacagggggcagcctggtggctcacatcaaagttggagagacctaccaccagcgcaaggaggtgagtgaggttgtagagggcaggaacactcctgggatggccacagtgagtcccagatctgtccttgagtctgagacagagtggtccagccatcaatttgtatcgccacaggctttctttgtatttccatagggcgttactcaccagcagtggtatctgttcaatgactttcttattgaacctattgataaggttagttgcaacatgttctgtttcttctttcatttccccttttcctagcatccttatctttagggctctatagaatgccaggcagattcaacagggagggaggaaggaatcctcaggaataaaaaccattagcacttaaaaatagcacctgaaaaaaaacaaaaactagcacctgagtcctggcctccgtctgaagtgggggaaaaggaaaagggtgatatacattagccataagtgctttttctcttctatagcatgaagctgtgcagtttgacatgaattggaaagtacctgcaatcctttattatgtcaaacggaatctcaattccagatacaacctgaacagtaagtgctacatagtagacccaagtgtgtggacagtttagattgggcttcagggtgagatctgggacattgcttgcaagtacttaggattggtaaccagtgttaatatttctggagatactaaagagattcctgctcatcagaccttaaatttagaagtgcgaaatccagcctgagcaacatagcaagatcccatctctttgaaaaaaaattttttttttttttttgagatgcagtcttgctctgtcacccaggctggagtgcaattgcgcaatctcggctcactgcaacctctgcctcctgggttcaagcgattctcctgcctcagcctcctgagtagctgggattacagacgcccaccaccacacccggctaatttttttgtatttttagtagagacagggtttcaccatgttggtcaggctggcctcgaactcctgacctcatgatctgccc

SEQ ID NO: 69803 - DNA, 1810 bp, Homo sapiens
gaaaggtgggatatcagttaagtagatagtaacagaggagaatatccaagatgagagaagagtgttagtaaagatctcaagaggcataaatgcaaaacacatatctgagggggactacatgagtataccagtctggccggagtagctgttggtattgggatgtagtgagcgattaaaattagaagtggccagattgcgaagctttgaacaccagtctataatagaggaagtaatacacagaaagcagcattctgcaagggttaatttggtagtggtgtgctggacagagtgaacatagggagaccagtgtggacgccatcacagttgtccatctgtgctgaagcagagtgatggcagtggaaatagaaaggaagcagcggatgctgagagtgctatgaatatagaaggttcaggacttggtggctgtttcaatgttgggataaatgagtgtgaagccaaagatgacaagacatccaacaaggttacctcttcctaaaatccctagataccctacagactcaaggagtcagacagtgaatttgacagcttcagccaggtcactgagtcaccagtaggacgagaagaggaaccacatctccacatggtttctaagaaataccgcaaggtgctgggggacatcagggcctgtgggatgtggggaaaggtaccctgggaaggaagtcatatgagaaaggattgaaggactcagtcaggaggccttcaactaccaccctggacccaggaggaaggctctaggaaaggctgtggctactggaaagatttggggactctgagaatatccttgtcttgctcagacaatttctaccttaggtgaccatcaaatattccaagctagggctggaggactttgacttcaaacactacaataagaccttgtttgctggattagagccccacattcccaacgcctactgtaactgcatgatccaggtaagggttgggtattcctgtaacttgaacgtgcctgctgcttttcttcttccctatggctctcgaccctgctctttccaggtctcctcagccgtgttctctttaccatggtctcctctacaattctttcttgcctctacaactttcaagtctcctctgagctccaccggtttggtggactcactgcttcggtggactcctgcttctgggacattttctccaccagctcacttaacctccatatttctcctcacccccaggccagtttcctacatcagttcttctgcttttccctccaggtgctctatttcctggagcctgtacgctgtctaattcaaaaccacctttgccagaaggagttctgtctggcatgtgagctgggcttcctgtttcacatgttggacctctctcgtggtgacccttgccaggtcagtacttggagacacttaaaatggaaggggaaggaaggtggacacaaaagacaaaataacccctttccaccaacacatttccagggcaataattttcttcgggcattccgtactattcctgaggcctcagccctcggtctaatcctggctgactcagatgaggcctcaggcaagggcaatctggccaggctcattcagaggtggaatcgcttcattctcactcaactgcatcaagatatgcaggagctggaaataccacaggcttatcgaggtgctggaggcaggtatgaaatcaggatagaaatagttaaagccatcatgacaggcccctctgtgatttaaaaggtctcctaacttcctcaatgtgcatatatcatcctctccactcttagcagcttttgctcatcgggggactctgttattgggca

SEQ ID NO: 69804 - DNA, 1079 bp, Homo sapiens
ttctcaccaagaacaacctcaagtatatggcccgtgggggcctcattatatttgattacctgtaagtggcttctcagctctggactaggaacgaggatgcctcatagggtgggaaggctaagggattggcagcttgtaaggcctgggccccttagcctttcctctccccaccaggctggatgagaatgaggatatgcacagtctcctactgactgacagcagcactctactcgttggtgggctgcagaatcacataatagagattgatcttaacactgtccaggagactcagaaggtacaagcttggggcaagaaagacctatgtggggtctgaggttgttgcgggggcagggtatgcttgggctggtaatgtgcctgagatgtgggtgtgacctttctgttcccttggtctgtgggaaaaatcattcttctcactggtttttcctgcttccctctccagtatgcagtagagacgcctggagtcaccatcatgagacagacaaatcgcttcttcttctgcggccacacgtctggcaaggtggccaagttccatttctcctcccactgcagggccctgtttcactagatacctgattgcgatctgctttcccttaactctggggtgtagttggattggaggtgagggatgagtggagtgaattcacttcctactcagtgatgttctactatgagattattttgcagcttgatgttttctatgataatgaagtctccctgaagccccttctggctctgggcttctctgtttgccttttctgtgctttaactttccctgtcctaaagccctagttcctttggtagggaccccactgggttaggtaggtggcaggtatttttcctgataacagaatttgcagataactgaattttttttttctaggtttccctgagagacctccgtacttttaaggtggaacatgagtttgatgccttctcaggaagtctgtcagactttgatgtgcatggcaacctgctagctgcctgtggcttctccagccgcctcactggcctggcctgcgaccgtttcctcaaggtgtatgatttgcgcatgatgcgtg

SEQ ID NO: 69805 - DNA, 1025 bp, Homo sapiens
ccctcctccgctaggccctctgtactctccaccaccccattatctaacctaatccttgacttccctttcttctcacttcggactgctcacttgccttgttcagccctgaatcatcaggtgaagggagcgagaattgcgggggttggagttaggtagagggatttaaggtgctttctcccagaattgggggtgaaaacgggtggattggacggtggggagaacgagaagtcagtttcctagaatcctctccaatagctacccaggattctctagaggaaaacaataatggccagttacccacaattggggcgggggcaggggaaggtgacggaaacggctagttacccagaattctctgggggaaccagaaaaatcggttatctagaattctcccacggcagcggtgaggagggggatagggcaagggtcagatgtgttcctgggatgcttacggggaatgggtcattaccaagatttctccatggcggatattttggagcgcgtggaattagaacgagtagggggagcgcaagcgctgtcagctccgcgggaaattccagtttccccagttctcccccacgcctagggctcaacctaaccactacggcgccaaggaccggggtccgaggcgcttcttccaatcaagaagggctcggggcatattttagccaatcagaagggctccgggcgcatctaagccaatcagaaggagccaggtacggcgaccccaggagagagcgtgtgacgcacgcgccggaaaaagaggttacggggcgccggtgggacaaacgcagccagacgccggacttgttgggtggcgttagaaagtaactctgtttttagtcttcttgaacaaaattacgtctaggtttgaaaaccaaacttttatgctttctataactttaggaactctaaaataagggacacacaaggcaaagcactaggagtcgctgttgggtattcccagcggggcttagtctacctcctcttcctgcggtgccctagtgagccactccgccacctct

SEQ ID NO: 69806 - DNA, 1044 bp, Homo sapiens
tgtcctctttcattgctttcttttctccctagttctgcttgcaaaggatccaccagggtctgattttttatgagaagctgctaggatcggatattttcacaggggagccttctctgctccctgatagccctgtgggccagcttcatgcctccctactgggcctcagccaactcctgcaggtatgaagtaggggcgtggaggatgggggcttgcaggtgtcagagacagagggttgggggttaagggtttagagtcttctctgactgtgtcctatgtcctttcagcctgagggtcaccactgggagactcagcagattccaagcctcagtcccagccagccatggcagcgtctccttctccgcttcaaaatccttcgcagcctccaggcctttgtggctgtagccgcccgggtctttgcccatggagcagcaaccctgagtccctaaaggcagcagctcaaggatggcactcagatctccatggcccagcaaggccaagataaatctaccaccccaggcacctgtgagccaacaggttaattagtccattaattttagtgggacctgcatatgttgaaaattaccaatactgactgacatgtgatgctgacctatgataaggttgagtatttattagatgggaagggaaatttggggattatttatcctcctggggacagtttggggaggattatttattgtatttatattgaattatgtacttttttcaataaagtcttatttttgtggctatatgagtctaatttctaggctcaattgggaaagagaaatcgatggaaaaataaggccaagagactacaatatgcatccctttcttctattctgaagggctatggtggagaatgatattttctcatgaccccctggtgtatagaataactgggatctctttagtattaattcctatatggctgagcaagcagaatgggattaccagattaggaagtgggatcatacctaagggtcacttgctccctgatccagtgtctccttccctgctttcttggccaagagtatatctgat

SEQ ID NO: 69807 - DNA, 1031 bp, Homo sapiens
ggatgctatggtgaaaagacaaagggctaagaaccccgaaggaggaggaaatactgtggacattggtggggagggtctagggcaataggtcattgagagtggttgaattggatcaatcctttctgtttacctattctagcccttttcccaggatcctacccagttggctgagatgatctttaacctccttctggaagaaaaaagaattttgatccaggctcagagggcccaattggtgaggacaattcagtggtaatgttggaaactcctgaagtagagaggaaccatggaaaggactcagggagttgtctcagaacaggatccccccgacatcctgtggtataatttcaggcctgaacttaaggcatgaaaggccagagttaaaacgtgctcagagcctcttttttcaggaacaaggagagccagttctcgaaacacctgtggagagccagcaacatgagattgaatcccggatcctggatttaagggctatgatggaggttagtagatgtggtaggagttagggttgacagcgttcagcctaacacctccctgagaagcagcctcatcggggtcctctcccctctgcagaagctggtaaaatccatcagccaactgaaagaccagcaggatgtcttctgcttccgatataagatccaggccaaaggtaggaagcacattgaggggctggagaaagataagtgcctgctgagaagccggagctggaagtgaacaggagaaagctccgatgagcagtagtcactgtcagacacaccccactgactacagtcctgctgccgtgcaaagctggaagtgctttgtggaggctgagctggaggtgcagctgagagacagtaaatgttgaggaaatgcatggaaaactaacagtgttttatttgagggggtgtctggtccaagcatgaccattcagaatttgcctgagggtcccacaggtgcctgtgctttgcttggtttccctttcttcctccacaaaattcctccttcctgactctgactgagaccccagtcag

SEQ ID NO: 69808 - DNA, 1513 bp, Homo sapiens
gaggcgggatgatcacctgaggtcaggagttcaagatcagcctgggcaacatggcgaaaccccgtctctacaataaatacaaaaaattatcctggcggagttatgcacgcttgtagtcccaactacctgggaggctgaggcgggagaatcacctgagcctgggaggtcgaggctgcagcgagccgagatcgcgccgctgcattccagcctgggtgacagagcgagaccatgtctcaaaaaataaaaataaaaaaaaattgttttcattacctcagccctcctcttcctatcccaaggcgtcgaaattccggtcccaccccttcccatggagcccttggcgtctccaggctcctcaagctagtttcggttccggggctcacgcgcgggttctcgaaaatcagctgtttcagtcttgggctagtccactaattggactcctcccctcgtagaaagtgcctacttgaacttctccaccaatcgctgaagctgcaggtgtggtttcggctcagcttgtcccgccctgcggaggggcggagttgcggcggcgccagtgagctcgcagtctgggaagggcttgactgaatggcagccagtgtcggggtggcggctgggaatgggggccgctccggacttccgctgccaactacaagggggcgggtccgaggggggttagccgaagttgtaggcggggcgcgaggttctagtacccgagctcatactagggacgggaagtcgcgaccagagccattggagggcgcggggactgcaaccctaatcaggtacgggccctgagagggtgtgctggggtaggggtgggggtgagagtgagagttcctccgagggaagggcgactggccccaggggttaccccctggagagggtagcttcggtccccagattgaaataggagctgtcgcctgctcggtcctcgatcttcttctgtccagcctatctccctaaccctaatgcccctctcccaaaactgccctgcagcttccgagacccggaatctggcattgttatgttggttcggtatctgacgtttttccctctgctctgcattattttttatcttcaccaaaaaacgatgttcaaagatagataaatctaaaaacaaagatagataaatctattatccttgttttgttaaaaagtataagctactgaaagatgaaacgattgcctaaggtcacacacaaaattcagttcatttcagaaaagcttcttgagtgcaaaatatgtgcctaagaatgagagataatgagaaaaaattgtttcagcccttaacctcagtgtttgcaatccatttggggagaccaggttttttgttttgttttcatatttgaatctttgctgacttgctcctttaatatcagacacttaaatcctcaagaattgggacctcatcattaatttttttttggagatggaatctcactatgttgctcaagcttggtctcaaactcctgggctcaagccatcctctcgtcttgtgggcctcacaaagtgctgg

SEQ ID NO: 69809 - DNA, 1214 bp, Homo sapiens
cccgggttcaagcaattctcctgcctcagcctcctgagtagctgggactacagacgcccaccaccacgcctgggtgtatatatatatatatatatatatatatttttttttttttagtagagacagggtttcaccatattggccaggctggtctcgaactcctgaccttgtgatccgcccgccttggcctcccaaagtgctgggattacaggcgtgagccaccatgctcagccgctaatttaatttttaaaatgaagagaaatgagagtatcacaaacatctcatctttcctaattctgaatttccctggctcctatcatgagcttagagtgggaatgtggcagggacatacaggaaatgccaaagaacaggactgtaggcatagaggttgagtgtgtgacaaggggcacaaggtttgagcagccagtataaatgggcaaatatttgcagagattacatccttcactgatcataggggaaagcaaatatctcctttcctcatgggacacagaactaggcagaacaggatcaggaagcgatcaaacctaccaaggcagtctcacttctcaatgactggactgtgtggtaatttggggtccctatatatgggtggaaataaaacagaagtccctggtgacctgtaaatgggggagaccaagtgggagcaactggggtgcatttcctatttcctaggcctttacctaaaaagaacagaagcttggggccaggcgcggtggctcacatctggaagcctatcactttgggaggcggaggtggaaggatcacttgagcccaaagttcagaactaggctgggccagatggcaaaaccacgtctctacaaaaaatttaaaaattagctgggcatggtgtcacgcacctgtagtcccagctgcttgggaggctgaggcaggaggatccctcgagcccaggaattcaaggcagcagtgatttgtgatcccatcactgcactctagtctgggcaacagagcaagaccctgtctctaaaaagaaagtacaaaagcttggaagcaggtgatgtatgaggtgtccccctaactgagtcttgggctcaccatcgcccttagggaaatggtttgtatgtttcggatttctcccctttctagggtactctgctccagacatgcgtggcctcagactcatcatgataccagttgagctgctactttgctacctcctgctgcaccctgtggat

SEQ ID NO: 69810 - DNA, 1900 bp, Homo sapiens
agtgagactctgcctcaaaaagaaaaaaaaaaaaatcctgtgatactacagtacatttgttctttttcccattggattgtgagttatttgatagcaaggatcatacctgattcacctttacatccccaggatttatttatttatttatttattcaattgacaactatagccaggtgtagtggctcatgcctgtaatcccagcactttgggaggctgaggtgggaggatcgtttgagactggcctgggcaacacagcaagaccctgtctctacaaaaaattttaagtagttgggcatcatggtggcatgcacccctgtggtcctggctacttgagaggctgaggcaggaggatagcttgatcccaagagatcgagactacagtggaccatgattgtgccactgcacttcagcctgagtgacagaggcagaccccttctcatttaaaaaaaaaaaaaaaaaaagaacaaccaaaaaaacctataactgggaacctcctaatgtagcaggcactgtgctaggcactgggtatatattagatagtaagtattataataaatagagttcacaacccttgtggatcttcaccaatattgggtcatatatattcaatgaatatcatactctgggaaacaaaaagctggtcctttcccttttcaactttttggcccctgtaggaaaccttctggcgaattccagccaagctgagtcctacccagctccggagggcagcagcttctttgagtcaaccagaggaggaacagaagctgcagccagagctgcagcctaaagtccctggagagcaaggctctgatgaggagcactgtaaagagcaccgagcacaagccctgagggccctcttgctagcccacaagaagaaagcgggcctggcatccccagagggtaatagtgcgacagccatcttctgagtattaacgtgtcagccatgttggtctagagggcaggaaaggtgttctgagaatatgaggaccgagttcctaattttgtgtcatttatggtcattgcagaggaagacgctgttggtaaagagccgctgaaggcagcacccaagaaacgacaattgctggacagcgacgaggaacaggaagaagatgagggcaggaacagaggtagggaatttgatgggaccttctttttcttctctaatcctgaagacaaactctaccacgtccttaccccttaacatatttagatattctctctctctctcacccccatcgttcccacagcaccagagttgggagctccaggaatccaaaagaagaaacgataccagattgaggatgatgaggatgactgaagagctaagaagcctaggggtagagatagacacgtttttagatggtgcattcaagtcagagttggaagggtcatacaggacccagaagctcctcttactggacagagcagtagaatcccaggctctttcacggatttaggctgagaaacttcagcagcagtattggacttctctgctgtcagtctttgtttctcccagtttttatcggtatgccccagcagctctctggagatttagttctcttcttctaggaaccatttcttttggttattggagctccttagcaaataagaggagtgagtgaaatagagaaagcaccccggaccccttttattggtctgttcctttggctttctcttggaggtgggtcgcagcaccagatggggagctttatgacatgacaggcgggagttttgtaccacttttagaagataccagatgcctctgtcctcattttgtttcctatgatcatcctctagataccagatagaggcccattcctgcatttgagatagggttggaatatagtactctagatgatgaatgtgtttgctttgtgtttggtattaaacatgtaagatt

SEQ ID NO: 69811 - DNA, 1001 bp, Homo sapiens
ttccagagacctctgatttattttactcatctctttccctgttacccttgggtattcacatgcttgctttttatagatgtcctgggtcatatcatgaagaatatcacagccaaacgctcacgggcccgaatagtggataaactcttggctctggggctggtggctgagcggcgggagctgtacaagaaacggcagaaaaagttggcatcctccatcttggtaacaatctgaccctagctctgctggcatgggctcacttcccttgaagtggtccttaggagcagtccacctggattcttcctgcctgaggctgttctgaccaggtccttccgagagagcaggcgcgggggggtgcggtggtcaggaacgaggagactccactaagttccttgtgttgccttcattttcattcccccaacccccaatgaattttagccaaatggagcggagtccctgaaagatttttgccaggaagatctggaagaagaggaaaacctgcctgaggaagacagcgaagaggaagaagaagggggctcagaagcagaacaagtccagggtagcttagtcctttcaaatgaaaaccttggtcaaagcctgcatcaggaaggtgaggactttggctgggagagatgtctcaggtggagggcttgggagtagggtcaaatgtaagtttccctcatttccttaggcttttctatcccgctcctatggctccagaactgcctgatccgagcagctgatgatcgggaagaggatggtgagtggacaggtgacacttttaggagaagagccctggaggctattggagacctacctggtcatgggatggagaaccagttcttcccttatatcttcaccatatgactattgaccctgtcttaggctgctcccaggccgttccattggtgccactcacagaggaaaatgaggaagccatggaaaacgaacagtttcagcagctgttgcgcaagctaggggttcggccccctgcctctgggcag

SEQ ID NO: 69812 - DNA, 1025 bp, Homo sapiens
ttgtaatagaaaagacactgatggggaaagccctctttagctctcttgacatcctaatacaattctttccccacagaacaaacaaaagaagagaaggaagaagaagaagaaggtcctagaccaggccattgtttctggtaatgtcccatctagcccagaagaagtggaggctgtgtggccagccctggctgagcagctacagtgctgtgcccaggtaggtggttacagaaaccctgtcttttttgagaatagtgctcagggtatacaatctgggttttccactccctccgctcccatagctttatccatctctagaattctgagctcagcatggactccgtggttccctttgatgcggcctcagaggtgccagtggaggagcagcgggcagaagctatggtacggatccaagactgtctcctggctggccaggccccacaggccctgactctcctgaggtctgctcggtaagaaccctgcctgctcatcctcttgggctttgggggaaggaggaggccatcactgcggtacagtgttctcagtcttcaaaagagagttgtctcatcaaggctctgggactgtataccaactgactcctggggcgttttgattggtttgttgggtttttttgtttctgaaaaacattaaaaaagcatagttaattgagaaaaaaataaagaaagcaaatcctcacttgacatcatcaataagtccttggtaattgcagctttgagtaaaatgacctacggcatgtttcttataacgttaagagaaaaaaaactggttttgttatacattgtttcacttaaagtggcagtatccaagaacctattgaagacattaagggcggacttaactttaattctagtagccaaagatatgcatcattaacattttgatgagtaaccatccagaggtttttttgctccgttacatgtaaaaatatcgtatataccttgttttacaaaaatgaaatactgtacatgctgatttatagtaatttttcacttctcagtatattatga

SEQ ID NO: 69813 - DNA, 1577 bp, Homo sapiens
attatgctatagcattttctggttataccttgaaagcattgtggtgaggtggaaagagccttaaattgcggccaggcatggtggcgcacacctgtaatccccgcgcttgaggaggccaaggtgggcagattacttgaggtcaggggttcaagaccagcctggccaacatggtgaaaccccgtctctactaaaaatacaaaaattagccaggcgtgttgatgcacacctgtaatcccagctactcagaaggctgagacagaatcgcttgaatccaggaggtggagattgcagtgagccaagatcatgtcactgcactccagactgggtgacacagtgagactctgtctcaacagcaacacaaagagagccttaaattgaactttagaaagtctggaatctagtcctgtattggttattattggaataagctcaagctggtcgtgtcggtctccagatccataaagttgggattgtgacagttgtccatgaacccaaagtggaatcagtgaaaagcctaggacaggctgggcacagtggctcatgcctgtaatcccagcactttgggaggccacagtgggtggatcatttgaggccaggagtttgagaccagcctgggcaacatgacaaaactccttctctactaaaaatacaaaaattagctgggtgtgatggcacgcacctgtagtcccagctatttgggaagctgaggcacgagaattgcttgaacccatgaggcagaggttgcagtaggccaagatcatgccactgcactccagtctgggccacagagcaagactctgtctcaacaaaaaacaaaaacaattcaccagcatggtggcacatacctgtagtcccagctgctcaggaggctgaagcacgaggatcactggaacttaggagtttgaggatgcagtgagctgtgattgagacattgcactccagtctgggtgagaccaagaccctatctctgaaaaataaaattattggttcacattaaaataaaaaaaaccctgggacaaaatgcaaactccaaggaatttgtatcctggaaacacagagactttgctttgtataaacagattttgggccaggcgcggtggctcatgcctgtaatcccagcactttgggaggctgaggcgggcagatcacttgaggtcaggagttcacgaccagcctggccaacatggtgaaaccctgtctctactaaaaatacaaaaattagccaggcatggtcatgcgcacctgtaatcccagcttcttgggaggctgaagtgggagaatcacttgaacccgggaggcggaggttgcagtgagccaagatcatgccattgcactccagcctgggcaacagagcaagactccgtctcaaaaaacaaacaaacaaacaaaaattagcctggcgtggtggcacacacctgtaatcccaggtacttgggaggctgaggcaggagaatcgcttgaacccaggtggcagaggttgcagtgagccgagatcacgccattgcactccagcctgggcaacaagagtgaaattctgtcttaaaaaaaaaaaaaaaaaagattttgtaccagaacct

SEQ ID NO: 69814 - DNA, 1005 bp, Homo sapiens
gttttttttggttgttttgttttgttttgtttttgagatggagtctggctctgtcgcccaggctggagtgcagtggtccgatctcggctcactgcaacctccgcctccccagttcaagcgattctcctgcctcagcctccccaggagctgggattacagctgcccgccaccacgcccggctaatttttgtatttttagtagagatggggtttcaccatgttggccaggccggtctcgaactcctgacctcaaatgatccgcccgcgtcggcctcccacagtgctgggattacgggtgtgagccaccacacccggccctactagtactttgtacaaagtaaaggtagatcatctgatgttaaatttaaaactcctctttgaccacccacagttagccttaaatccgtaggtgggtgtctgtggcctctcagtctggccctgaccctctcaatctcattttgtaaatctcttacgcacctgactcctggccacgtggaaagattgtggctgccctctttcatatctcagtacttagttcctgctgttccttctgcttggaagatcttgacactgctctgccaagcgaacttctctttgaagactgagcttaattgtccctctgaaaatcaatgtatccagcttcctatgccaagttagtcacttcttcctgtgtgtccctgaagttttttacccccctctattaccaggggcactgatacagctcaataaaagatcaataaaaggttactgagctcctaacatgtaccatgcactgtgcttagcgccaggcttacagagatgagtaggatggagagttcccgacccttaaggaactcaagtcctaaggaaaacacatgtaattgagtcttctgtggttacagtgaaagggtcatcaagaagtccttcctggcttccttcctcctctcactgcactcacaccatcttacatcctgatgcctccaaatctttagctccaaactcttctccctcatcttccagacttctc

SEQ ID NO: 69815 - DNA, 1112 bp, Homo sapiens
taaggagtggggttcagcagggaagttggataactaaagagaattctttagttcccagggattagaagcctttctcccattggctagtttgggctggaatctgtggaccctgcagctctgggacaaaatagttctgctgcgtctggctttctctgagcccgggttccctacccccagtccatgacagcacctcccttttcaaaccctaggcctggctttttaaactacagggaccgacagagagaagacactatcatccctgcatgggctgggagtggggttggagggataggaataagaaagggactcgtagttaaaccttagaatcagcttgtatttcatctttcctaactcacatggtcatagcaagaagtactgaaaggaaggaaacagtcatggctatgaagcaatgggaaggtctaatgtcctttaatacagccatgatcagcacaccctaagccttgatccccagggaaaggtatgggtgtgctgggatcagatctggggaaacagccgatcaaagagagggaaaaggataatatggggaaggaaagtttggggaaagaggttcagttgtgctcgggcttggtgagggacttgggacctaggcgtggggttgtgtggtgatggagaaggtagaatgggacatactgataggttctaccatctccacatagtggcaagtcataccggccacaaacttttctcatgaagcaccagagagcagaaattcgaggtgaggcctgcaagaatggtgcccagcatgggtcctacccagtacacctgtggggagagagaaggaacacagatcaggggctgtgctttctcctcataatacccagcttggggatggacagaaagagagttatagtgaaggtagagggtccatctaacctatccactggcaggaagagttgctgagaacaggtcagagagcacccaaagggtttggagctctcaattacatagaagagaaacagtccactagaagtcattggaatctcctatattctagaagcctcatcagtctcctgacttaaggccctgtaaccctcagtgcatctcacccagtaatgctcccagatcccagtcaccactgctggcctcaggaa

SEQ ID NO: 69816 - DNA, 1523 bp, Homo sapiens
tttcaaaggccaggtgcggtggctcacgcctgtaatccctgcactttgagaggccaaggcgggcggatcacaaggtcaggagatcaagaccatcctggctaacacggtgaaacctggtctctattgaaaatacaaaaaattagccagacgtggtggcacgcgcctgtggtcccagctacttgggaggctgaggcaggagaatcgcttgaaaccgggaggcagaggttgcagtgagccaagaccgcgcgccactacacttcagcctgaacgacagagcgagactccgtctcaaaaaaaaaaaaaaaaaaaagaatatttcagagtagcacattccataacacttcagcaatacccttggactaagcatccatggaggagggtcacagggcacagctggcataggtgagttcaattaatgtcatgtgggtatgatttgtgttccagaacaagactgtggtcaacctgttatttgctgcctatagtggcgatgtctcagctcttcgaaggtaatgctactgtgaccaaatatacacaataaaatactcctggtcagagattttactaggaggcagcgtaacaaaatagttaagtgcttcagctttggaattagaatggatatagattgcatttaaatgaaatttttttaaaaaaggagattttttttaaaaaaagtaaactgtctgctctatgataattaatgttagccattgttattgagtgttaagagcagtgtcctaggaagtaggtaccctgcctcaaatgggcacttaccacaggtaggcagtgagtgatatttctggaaggatcacattcccatctctctaatatgagtataacagtctcatctggatatggaaaaaagattattcagagccaacaaatctggctataggctgtttcactttctctgaaactcatccagtctgacaccagttcacaaagaacacctgtgattccagtctgatctaggcaactctagctgctttcccactaccctcaggtttgccttgtcagccatggatatggaacagaaagactatgactcgcgcacagctctgcatgttgctgcagctgaaggtactgaagggttaaggaggggaggaggagggtaatcataagaccctttctttttcaccaaaagtaccttcattatatgtgccctcaaggttataggggcagcaactagttttatctagacacccttcggtttgcagctagactatgactgagtgctgcagggtacaaaatgggaagaggccttttcccctcccctcttggtaaagacttcagtggctaagtgtctgcaccaaagggttcaagacctgcgccttctcattttccttctgcccatattcctaggacacatcgaagttgttaaattcctgatcgaggcttgcaaagtgaatccttttgccaaggacaggtgaggaataggctaaaagtggaggagggtgggcacagcttctccacctaccctccagccaccatgcaaatatatacaaccaccactctccacgtctcct

SEQ ID NO: 69817 - DNA, 1068 bp, Homo sapiens
agcctttgcagctgcgacctagttgaatccacataggctccttccacacggtggaagatctgctgcttcactcacagaccaggagttctcaatcagaggtggttttgtccctcaggcctttggcaacatctagagacagttttgattgccacgcctggaggtgggatgtgtgtgctactggcatctagtggctgctaaacatcctacactgcataggatagtccccactacccccagccaagaattatctgactccaggggtcaatattgccaagactgggaaacactgatatagacagtgttgtccctgcctcctgggttagggtaaattttcaccccaaccctggacaaacagtgccttttgacactcatgcaactgttggggaaggactggactgggatccttgaattctccccagactttgacttttgataactctgcatatagcaagagtgattcttgaaagagctgtggctccatgctgaatgcacacatgtactcagagggattcaggtgggcattgttctggtgtgtgctgtgcaatggtgggaaaggacaaagctctctaaactgtccagagcaacctgccctgccccggtgtgcttggaccctttgcccagggaaccaggacatcagaaataatgttccttctgtggaaggacaacggggagctagggtagcaaagagcaataaattccaactctttatgaggtcaggagtcctttaaaaaagcctatgtcttggtctttaactgtccccttctgcaagatgtgactctatacacatggagacagattgaagaaagacttcacccatcttctaggaaataaaatcctgctcttgtcttctcccagtcactcccttatgcactgaaaggagaatttgactcccttgcacttcaaggccaggtgcctctccactagacagtcagacaaaggcaaataatggaggatagagagacaggtgttcattaggctggccatagggagaggaagggggtgacagcaggggaaaagaaactgtagtatcagttgtcacaagtagagctcggcccagctttccctccc

SEQ ID NO: 69818 - DNA, 1173 bp, Homo sapiens
tggctctaattttttgttttgaattttgaatttaccttttggagttcttctcatgtgaatctacttgttagattgtattaatgagtgtttctggtttgggcatgggaagtgatgggggcctgaagttattttgcagtggctaatggcactgaggaatttcttttttggtgcatttggtttacactcatttcctctcctaattgttagttcatttgtaacagtgggtgagtgtttggaggaaaggagggagaagaaaggagggatactgtttctcccatgaaatagtctaattggttgggttgatggcagaaggaaacataggggagccttccagctcacagccaagggttgggctcttaaacactatgcctagtgttttctgaatgctgtcttcatggagcccagctcttactctctttgtactttacatctcacccccactcattacagatgctcataacattcttaaaatattttagtacttggcatttttctgttttcagtcagctagaacacactagagtcctttcctcagatggcataatcctttataggctctgagcctgcctagccatctcctatcggtgttattactcctcatctcaggctctgagatgatactcagaccctaaactgattggactttttggaggagggtgccagtagagaggtcaggaagatgtggagatgatgatggagagagatgtttttattttattttattttttcagacagagtcttgctctgtcgcccaggctggagtgcaatggcacgatctcggctcactgcaacctccgcctcccaggttcaagcaattctcctgcctcagcctcccatgtagctgggattacaggcacccaccaccatgcccggctaatttttttatttttagtagagatggggtttcaccatgttggccaggctggtctcgaactcctgacctcaggtgatctgcccgccttagcctcccaaagtgctgggattacaggcgtgagccaccgcgcccggcctttattttattttttagagatggtcttgctgtgtcacccaggctggagtgcagtgatgcagtcgtagtctactacagtcttgaattcctgggcccaagggttcttcccacctaagcctcccaagtagctggaagtacaggcacatactaccaagcccagttcg

SEQ ID NO: 69819 - DNA, 1146 bp, Homo sapiens
gtcctcttaagttctaaactctgctcctatgctggtgtcctccaaccattacttattaccctaagccgtcactgcacagcctactcccctggcctatcacagcaggacctatctggagagttcacactattctagggcgatcagtgagctaaaaatcccagagaaaacactgtaggaatagaaattcccaagtttaattcccaagagtttaaaaattatgagccttttctagcccccaccttcccaaccctcagagaaggacagtaaagaaatcagtgaatccaggtatttacctgttgttgaattgtgaggttgtgaggtagacgtgtaacaaggacaaggaagtttggggatctgcttggagaatgaaggtttattcaaaacaagtggacaggtcaggggtaacgggtgatgagggcacctggcttttgtaatcatgtggggactgtcccctgggaggtgcagcaaaaatcagaacggagacagaagctcacagtctggttttagctgccaactcctatggaagtccatagctgactcctatggaaggcctaccaaatgaggaaatttcaggaatttgctaatgcgtgggaggattgaaaatgtaggcagcacagaaatagagtagttggtttaaacgggaatcaggaaggattggtataacaaggcacaagatttggaatttaccctttacagactggcttttataacacccaccctcgtctctgaagcctgctgattcagggctagcagagcctaggggcaagtttgggccagatcacccacccagtttattgcccttggctaagaatgcaaagcccctcatgagcgcaatgctgccacttgcccagaaggtggggcatgtgcacaaggcagcagcaatagttcttttctagaagactaatagccactgctactagggattcctaggacattccagcaaggcctctcacagcatcatatgacgcaaagtaacagcccacgggttgacattggagtgacaggcctcaactcccaatgggttgacattggagtgacaggagtaggcactggaggcactaagggagggtgagtgagctgattgtcaagttaggaaaggaaaacgaatggagtggagctgaagtggcccaacccagcgcatggcct

SEQ ID NO: 69820 - DNA, 1038 bp, Homo sapiens
tgggttgggccacttcagctccactccattcgttttcctttcctaacttgacaatcagctcactcaccctcccttagtgcctccagtgcctactcctgtcactccaatgtcaacccattgggagttgaggcctgtcactccaatgtcaacccgtgggctgttactttgcgtcatatgatgctgtgagaggccttgctggaatgtcctaggaatccctagtagcagtggctattagtcttctagaaaagaactattgctgctgccttgtgcacatgccccaccttctgggcaagtggcagcattgcgctcatgaggggctttgcattcttagccaagggcaataaactgggtgggtgatctggcccaaacttgcccctaggctctgctagccctgaatcagcaggcttcagagacgagggtgggtgttataaaagccagtctgtaaagggtaaattccaaatcttgtgccttgttataccaatccttcctgattcccgtttaaaccaactactctatttctgtgctgcctacattttcaatcctcccacgcattagcaaattcctgaaatttcctcatttggtaggccttccataggagtcagctatggacttccataggagttggcagctaaaaccagactgtgagcttctgtctccgttctgatttttgctgcacctcccaggggacagtccccacatgattacaaaagccaggtgccctcatcacccgttacccctgacctgtccacttgttttgaataaaccttcattctccaagcagatccccaaacttccttgtccttgttacacgtctacctcacaacctcacaattcaacaacaggtaaatacctggattcactgatttctttactgtccttctctgagggttgggaaggtgggggctagaaaaggctcataatttttaaactcttgggaattaaacttgggaatttctattcctacagtgttttctctgggatttttagctcactgatcgccctagaatagtgtgaactctccagataggtcctgctgtg

SEQ ID NO: 69821 - DNA, 3758 bp, Homo sapiens
gcctcggtactcggaagaagggctctccccctccaagcggcggcgactctctatgcggaaccaccacagtgatctcacattttgcgagtgagttgagtgaatcctggggggacagttggctctacctctgccagaggaaagggctgggaggggtcagtatatttgcttcctgagatggagccatcattgtccctctaatgataggattatcctgatggagatggagtcccatgatgcagcctggcctttcctagagcctgtgaacccacgtttggtgagtgggtaccggcgcatcatcaaaaatcctatggatttttccaccatgcgggagcggctgctcaggggagggtaagtagatgtgggtgaaccgcccggtctttgctactgctgcaactcctacccagctcacagttttgcccctgccctgtccaggtacaccagctcagaggagtttgcggctgatgccctcctggtatttgacaactgccagactttcaacgaggatgactctgaagtaggcaaggctgggcacatcatgcgccgcttcttcgagagccgctgggaggagttttatcagggaaaacaggccaatctgtgaggcaagggaggtggggagtcaccttgtggcatctccccccaccttccaaacaaaaacctgccattttcacctgctgatgctgccctgggtccagactcaagtcagatacaaccctgatttttgaccttgcccttggcagtgccccacatcctcttattcctacatccctttctcccttccctcctcttgctcctcaagtaagaggtgcagagatgaggtccttctggactaaaagccaaaaaaagaaagaaaaaaataatttttcttttctgttttatttgctaattaaaaatggggagggggaaagtcgtccctacttcctcctccctgcttcctctcctcccctgtacgtgccccagcattctggggttatttaacaatagcaatagttctagtgaatgtgtgaaaccaagaaacactctgtactgtgtgcggacccgcagtgacggccagtaaagtggacttaactcccaagtgtgtcgcgccggacaccgggccctggacatgctgcttccatgttcagtcccttccctgcttctcgctgtctttcttttcccacctcccaccccccagttttcagattttctctcatccaataatgtaaaactatcgtgtacgggttcctccctccttttctcttctcccaaatcttttcccttcaaaggaaaaaaaaatgttcagaggtccctgtcttctgtccccatcttcctgccgatagctatcccctgtatgatgttggatgctcctcacatgctgagtttccagccttttctgaaactcagtagctggggagagggcagggaggcttcctgggccttccagcctccttccccacctccttcccaaaccctcttgggaactcctcagggacaactactgctgagtttgggtgcaccctaagatggaggccaggtagcaatggggccggcctcagagagagcgctgtgtgtgtgtgtgtgtgtgtgtgtgtgtgtgtgtgtcggcctcagagcgcgctgtgtgtgtgtgtgtgtgtgtcagcctcagagcgcgcgctgtgtgtgtgtgtgtgtgtgcgtgcttgtgaccctgtattgtttgataggatccattcagtttccccaagtacctgttttcattcccatttttcccattgtttaaaaccatcacttttttgtctttgggaaaccacaggaacaatttctctggagacaaggctgtgtctctctcctggtcatttttgttccagcctcttcagactgtgcaatctttcagcaggaactccctctcttctcggtagctttgaatcttaagcttctacgggagagtggtagaactggatcatttcctaatcccatttagttgtgcttttcttcatttacttcataccccaggaccccttccccagcagcagagaccctggagcacaggagagtagggaggaggggttctgggtccatcactgccctacatgtgactatgtccaagttaagcccccaacacgagaggaaagctgctgactcccagctatagccatgggcacttggccccctgcttttcctgctcagcagagcccctcccttcagagattacgggtacttgcactggggaggtggctgctggctggcccaagcagagagctgaggcatccaagaaatgttccattggggggtgggggtgccaggtgaggtggagcattccttgtattctggcagcactgaagagccactgaagggggtaggggcagtgtaggtcctggggcagcccctttattcctttatgccccttctccctcatagcctatttctaaagtcgccttttctgtcagataaacctcaaaacttttaattttatttgagatttttttttgcttttaagaggtggattgaagaatatttgaattgactttatattatgcataaatatttatattttatctaaataactgcgctgtaacaaactttgtgttagacagttgaaactgttagagttgggggctctgctttttccccctggcaattttcccctggtataagatgtgctagattaatttcattgtgaggtggatgggggagtgaaattgtgaggtggatgggggagtgaaatctccatggttcctgctttgtgttcctctcccagctccatctctttccctagggaccaggcactcatatggcggggtggggtcctagcctcagtttgaagaagtgggggctggagcggggttgggggtggtagggatagggcatgatcaaaggggccatttcttgcttttctttcctcatcttcactgcccccttgagctaggtggattttctcttcatgacaagagtatttggtagggaaagcaggtttaaaataaaaagacaacccaccccctgcccttttgcttccctcccatcagtctggttgacaggaagaaaccacaccatcaacaccaacaagtttctgtgttccttttacagcaaaagggactttttatataaccaaatgtggtgttttagtgactttttgataatgtacagttttttgtgaatttaaatttatttctttctatatttttaggaccaatctcatttttaataaggttaaaaagaaaaaaaaagtctagcgaaaaaactcctgtttttgccatgtgatgttccacaagtgcagctgtagaaaagtgcttgtcagttgttgaataaaaaaaaccacatttgatagagattcaaaagactctgtgtattcatcttcccttctacacacctgagggggagacggcgttgggataggtatgactggcttaagagaccacaggcaagggaacaacaggggctcctgttccataccctctgtgtggatggaaagggtcattagtgctcctgcctaaatgtctggctgagttgctggagcaaagggggattcagtgcatccaggtcctgccttgtgagatgtggccccagcttcctaagctgccacctctgtgttcctgtcatagcaaatatgggaccatcaccagcttaccacttcccactcacggataagacaccaagacgtagacttttgtgttttatttaaaaaaaaaaaagtgtgaagtaagacaaaatggacctctaccaagttgtagggaaggacaaggaaaagaccaggggtagaaaaggagtgtaagttttagaatggtggcattggcatagatgtg

SEQ ID NO: 69822 - DNA, 1050 bp, Homo sapiens
ctgctgctagggacaacagcctgatgggcctctccctctgccacctctcttctcagaccccatctttgagcccaggcaactacctgcctttcaagaagggattatgagctggtcccccaaagagaagacatacgagacagacctagcagtgcttcaatgggtagaggagctggagcagcgggttatcatgtctgatctgcagattcgggtatgctgggattggcactgtgtaggaaggttggggaaaagcattagtcccttatgccctgttagaaaaaaccctgggtccctacttcacaggtgacctaccttaagtgggtcttgtttttgtttttttttttcctatgccaaattttcctccttttacagtgagttttattcctctctcttaactgaagggctggacatgtcctagcccagactctacccgtgaagacttggcctactgtgagcacctctccgactcccaggaggatatcacctggcgaggtcggggcagggagggactggcacctcagcgtaaaactaccaaccctttggacctggctgtgatgcggctggctgccctggaacagaatgtagaacggcggtacctgcgggagcccctctggccaactcatgaggttgtgctggagaaggccctgcttagcacacctaatggtgcccctgagggcaccactacagagatgtgagtgactcccaccctccattcttggtcttggagagaaagggataagttccctctttagtggatccgctccttctccaaagatcaccactttctccctccagatcatatgagatcacccctcgcattcgtgtctggcgccagaccctcgagcggtgccggagcgcagcccaggtgtgcttgtgcctgggccagctggagaggtccattgcctgggagaagtctgtcaacaaagtggtaagaggctgagagagcctggagaggctgaggggccagccagcaggggcggggtggggtcactggcaggtagaggctggagagctcattctgcctcctcacaaccttggtccagacatgtctag

SEQ ID NO: 69823 - DNA, 2005 bp, Homo sapiens
tttgggctgtcccagccctgtgggactctgtggcatttctccagggtctcctgctcgcctcttaggggccaacccagccaagggcgtggaagagaactgcactggagaacaagggttggcagcactaggtctattcatctgtgaataaaatgagacataaggaaatgaggatgttttcatgtttataggttccctcaacttcaggcagcagctccacacccaggcaatggtgcctgtggcaagatgaaatcaagtgcatactactaattctggctacttactggcttggaggaggcaagctgctgaggggagggagtgggttggtcctcagaaactgcagggggcggtgtgggggcagcattgcagggcatctgggctgagatgttaaaccagagtgcttgaggatcagggctggattctgcctcatcaggctctggctcctccgggggttgtgatggagctgggtctagttttcccggactgctatcaggtgtgaggactgagctgctcaacagggagctatggctctgagtctggctcagccaagacaggaaggctgactggctgaggtcatgctggctctgacccagtgacaaaggggagccttcttgctccaggaaccccttatgggactgaagctgaagctgaagctgaggctggggctgggcaggagcatgaagctgagcctcaggctgaagctgggcctggggctgttctgaatcctgacccctgacaggggacttaagatgcctaggttgcatagacccgggcttagtttttcgaggtcggcctcgggcccgggcaggagaactggcagtggtgttggagccagctaactccatcttcatagagaagagggcagggttgagtgacgcatgggctgccacttttaaggagtcagtttccttctttatcacctcctcaggaactgtaaagagaagtaaagagttaagccatatgctgacatacaagggaaaagtaagagggtatataaacttaggacctatactttctttttctcttggacttagtcccccttttttgagattccactgggaagagcttatatgccaatgaacacagtatctggggaagaaacactattctcccaagtaatcagcagcagcagcacaatcataagctaacatttattgcgaaacaactacgggttaagtattattctaagagacttaactcattttaatcctctcagtagccttatgaagtacatacactattattatctcaacttcacaaatgaagaaacagaatcatacagctggaaatggcagagcaggtgggtaggcagctttactctaaaatctgtgctcttaaccattacgctatattatcagaaaatgaaagaagcccaagactactaaggaaaaggaattatttaattcttgtttgataggactcagaatccacactcccacaggcacacctacctaagttcccctctgttccttctacaaagataccagccaaatacggcaatacccagtagcgacgtctgtagcggtcctgacccagggagaccgcccgaagcatctgggatgagtgaagcagctttttgcgaaagaaaagctgacgctgggtagacaatgaaaatgaagatgaataaacacatttccagagtgacagtggtgaattcatccagtatatcagagaaaggcaatggctctcagtccctctataaaagtgatgccatctgggcctaattcagaaggtgattaagtttgggagcggtggctcacgcctgtaatcccagcactttgggaggccaaggcaggtggattgctagagcccaggagttcagaaccagccttggtaacatatggaaactgtctctacaaaaacacaaaaattagccaggcatggtggctcctgcctgtagtcccagctacttgggagaatcacctaagcccaggaggctgaggctgcagtgagccatgatcgtgccactgcactccagcctgggtaacagaaaccccatctcaaaaga

SEQ ID NO: 69824 - DNA, 1093 bp, Homo sapiens
catgcctggctaatttttgtgtttttgtagagacagtttccatatgttaccaaggctggttctgaactcctgggctctagcaatccacctgccttggcctcccaaagtgctgggattacaggcgtgagccaccgctcccaaacttaatcaccttctgaattaggcccagatggcatcacttttatagagggactgagagccattgcctttctctgatatactggatgaattcaccactgtcactctggaaatgtgtttattcatcttcattttcattgtctacccagcgtcagcttttctttcgcaaaaagctgcttcactcatcccagatgcttcgggcggtctccctgggtcaggaccgctacagacgtcgctactgggtattgccgtatttggctggtatctttgtagaaggaacagaggggaacttaggtaggtgtgcctgtgggagtgtggattctgagtcctatcaaacaagaattaaataattccttttccttagtagtcttgggcttctttcattttctgataatatagcgtaatggttaagagcacagattttagagtaaagctgcctacccacctgctctgccatttccagctgtatgattctgtttcttcatttgtgaagttgagataataatagtgtatgtacttcataaggctactgagaggattaaaatgagttaagtctcttagaataatacttaacccgtagttgtttcgcaataaatgttagcttatgattgtgctgctgctgctgattacttgggagaatagtgtttcttccccagatactgtgttcattggcatataagctcttcccagtggaatctcaaaaaagggggactaagtccaagagaaaaagaaagtataggtcctaagtttatataccctcttacttttcccttgtatgtcagcatatggcttaactctttacttctctttacagttcctgaggaggtgataaagaaggaaactgactccttaaaagtggcagcccatgcgtcactcaaccctgccctcttctctatgaagatggagttagctggctccaacaccactgccagttctcctgcccgggcccgaggcc

SEQ ID NO: 69825 - DNA, 1877 bp, Homo sapiens
aatacgaaaattagctgggtgtggtggcatgtacctgtagtcccagctatttgagagactgaggtgggagaattgcttgggcttaggaggtcgaggctgcagtaagcagagatcatgccactgcactccagcttgggtgacagagtgagaccctatctcaaaaaaaaaaaaaaaattacataaaaattaaaggaagaacctcttgtagacatgcaaattgtcatcttctgttatgtttaacagaactctctactcacttttctctctctagcccctgcctgacttctcacgagtccctggtctgacattgcccagtggagccttctcagactgcttgaccattgtggagttcctgcatagctttggcaaggtgctgggctttgatcctgccaaagatgtgcctagcctgggggtcctgcaggagggactcctgtgtcaaggtgacagcttgggtgaggtgcaagacctgctggtcaggctgctgaaggctgcactccatgatcctggctttccctcctactgtcaggtgagtgcaagtccctcccaaagtaaccaggacaagtaaaggagatgtaactacttagtgtttctcttttccttatatttttccatttctttttcttcctgactcctctccttattttatttttctttattttttccttttcttttgtggtcttctttcgtattctgtcttaacccccatagttctcttctgatgtattttcctcttgcacattcacccaacttggttgtgcatctttccctactcacccccattatgctgtcctccacacagtccctaaagatcttgggggagaaggtgtctgagatcccactgacaagagacaatgtgtcagagatcctgcgctgcttccttatggcatatggagtagagccagccctctgtgaccgcctgcgcacccagccttttcaggcccagccaccccagcagaaggctgctgtcctggccttccttgtgcatgagctcaatggctccaccctcatcatcaagtgagaggctgggagtggggatggtcattgtatcccttgcatcagaatggggtggaggacttgtagccttccagaagtcctcagaaatgtgtgttcactgccatgttctgaagatgctggaatgacttgggactgaattgcagtgccctccctgggagagcctaagccttctgccattcacccaatctgggttctaggctggaactcctttttcagctgcagcccctttacccttgagcctcctttccctttttttgtgctgccacttcatcctattccctattcccctgcagtgagattgacaagactctggagagtatgtccagctacaggaaaaacaagtggattgttgaaggccggctccggaggtagggaccagacagagagtagagcctcagagaggagagaagtggggcgggtgaagcatagccagggttttggcttgaaatgtgatgctttagccccttccctgggtttgggaccttaccagggcccaggatggtttagagtcaaggtatttcttttgtggcactatcatgttcctcaccagtttcccgtaattttttttttttgagatggagtcttcctctgtcgcctaggctggaatgcgatagcgcaatcttggctcactgccacctccgcctcccaggttcaagcgattcttctgcctcagcctcccaagtagctgggattacaggcccatgccaccacacctggctgatttttgtatttttagtagagacagggtttcaccatgttggccaggctggtctcgaactcctgacctcaggtgatccgcctgtcttggcctcccaaagtgctggaattacaggtgtgagccaccacacttggccttcccttaa

SEQ ID NO: 69826 - DNA, 3038 bp, Homo sapiens
cacacctgtaattccagcactttgggaggccaagacaggcggatcacctgaggtcaggagttcgagaccagcctggccaacatggtgaaaccctgtctctactaaaaatacaaaaatcagccaggtgtggtggcatgggcctgtaatcccagctacttgggaggctgaggcagaagaatcgcttgaacctgggaggcggaggtggcagtgagccaagattgcgctatcgcattccagcctaggcgacagaggaagactccatctcaaaaaaaaaaaattacgggaaactggtgaggaacatgatagtgccacaaaagaaataccttgactctaaaccatcctgggccctggtaaggtcccaaacccagggaaggggctaaagcatcacatttcaagccaaaaccctggctatgcttcacccgccccacttctctcctctctgaggctctactctctgtctggtccctacctccggagccggccttcaacaatccacttgtttttcctgtagctggacatactctccagagtcttgtcaatctcactgcaggggaatagggaataggatgaagtggcagcacaaaaaaagggaaaggaggctcaagggtaaaggggctgcagctgaaaaaggagttccagcctagaacccagattgggtgaatggcagaaggcttaggctctcccagggagggcactgcaattcagtcccaagtcattccagcatcttcagaacatggcagtgaacacacatttctgaggacttctggaaggctacaagtcctccaccccattctgatgcaagggatacaatgaccatccccactcccagcctctcacttgatgatgagggtggagccattgagctcatgcacaaggaaggccaggacagcagccttctgctggggtggctgggcctgaaaaggctgggtgcgcaggcggtcacagagggctggctctactccatatgccataaggaagcagcgcaggatctctgacacattgtctcttgtcagtgggatctcagacaccttctcccccaagatctttagggactgtgtggaggacagcataatgggggtgagtagggaaagatgcacaaccaagttgggtgaatgtgcaagaggaaaatacatcagaagagaactatgggggttaagacagaatacgaaagaagaccacaaaagaaaaggaaaaaataaagaaaaataaaataaggagaggagtcaggaagaaaaagaaatggaaaaatataaggaaaagagaaacactaagtagttacatctcctttacttgtcctggttactttgggagggacttgcactcacctgacagtaggagggaaagccaggatcatggagtgcagccttcagcagcctgaccagcaggtcttgcacctcacccaagctgtcaccttgacacaggagtccctcctgcaggacccccaggctaggcacatctttggcaggatcaaagcccagcaccttgccaaagctatgcaggaactccacaatggtcaagcagtctgagaaggctccactgggcaatgtcagaccagggactcgtgagaagtcaggcaggggctagagagagaaaagtgagtagagagttctgttaaacataacagaagatgacaatttgcatgtctacaagaggttcttcctttaatttttatgtaattttttttttttttttgagatagggtctcactctgtcacccaagctggagtgcagtggcatgatctctgcttactgcagcctcgacctcctaagcccaagcaattctcccacctcagtctctcaaatagctgggactacaggtacatgccaccacacccagctaattttcgtattttttgtagagatgaggtctcgccatgttgcccaggctggtcttgaactgctgggctcaagcgatctgcccgcctcggcctcccaaagtgctgggattacagtgtgagccatggcacccggccttcctttaatctttaatggaaatgtctctcccattgcagaagtcctttttttttttttaaaggaaagtcttcccagctgacccaggaactgttactctctcctcactacctggtggtcagtcagacacatatcctctgtcggcttcttcatttcctccaagatcatctgctgcctctgccgttcctccaagcgcctctgtgtggccagggtcttatctgctttacaggctggcttggctttggtcacctcctccttttccttcatttttaccttctccttcttttccctcttgactttttccttcagtttttcctgctttgtctttcctttttctttctcagcctacccaaggaagagaggaaccaagactgccataaagatatcagtcactatccttccctggtcccagtcctcccaacctcacagcccagaaatctcactataaaacaagactgatgtacatgtcctgcaaaatcagtttagtggcttcgaaattatacttggcaagtttgtacatgcacctaccttggatttcttcttagcttccttctgctttaagctcttggtctcttgtttccgcttatttctggcctgtaaaccataagggaagtcatttctcctcaaactctgaaagcatctctgcttgggctaggattcaaaaacagacaagggtgctggggaggagaggtgagagatggaatgaggggttggcaatggattaattctctcaccctagagatgcccacgttatttttgaacaaacccaattctctaaatcaagtgcaagaaatttcagggtaatgaagatatgctgctacacagggagtgacggatgtgggaaatgaaaataaaagatgaagtaagttgtaggaaaaattaacctactgtttcatctctctgatgtccctcacctgcccttggatagtagtctgacactctccccgttgaaccttctgcctcatcttcttcttgcttttagcaatctttgctttatcctcctcattcaatgtttctgtgagagcagaaagaaaaatgaaacaagtgaggcaggaaggcagttctct

SEQ ID NO: 69827 - DNA, 2072 bp, Homo sapiens
gattacaggtgtgagccactgcacccagctaagtctcatattttaatcaaagccttaggtagttcatctgcccataatatctgtcttagagggttgtcacgtagacatgtggtggcgtttctataccagaaacaaaataataaatattgtcatgtcagggccaggcacggtggctcacggctgtaatcccagctctttgagaggctgagaccagcggatcatgaggtcaggcaatcaagaccgtcatggctaaaacggtgaaactccgcttgtactaaaaatactaaaaattaactgggcgtggtggcacgcgcctgtagtcccagctactggggtggctgaggcaggagaatcgcttgaacctgggaggtggagattgcagtgagccgagattgtgccattgcacttcagcctgggcgacagagtgagactccgtgtcaaaaaatatatatatgtatatatagtcatgtcagaaacatcaattatgaaatactcttgtttgcagaattatacttccacaagtcttcccgaaaggaagaaattcagaacttttagtgaagcaagacatggagctgagcatgatcaataactatgtcagtgattcttttgaggtgtccactgtgtgggccttttttctggcacacccttggttaatcagtgcttctaactactaccctctttccctggcagtttggcttgctgtatcctttctctgctttctgctctaaaatcagtccgtgggtttctgctcttgtcaggtatcctgggagagagattggctccaaggctactctgccattgtggcctcttttctatcagcaggacaccttctaaagcagtctgattggagccaggggctggtgcttctgggcaggagatgtcatttgagttctttgtgccacccccatagcaggtgcctctcctacattttttcccccaatgttttattatgtatacttaaaaaaaaaaaaagctactctagattcttcagggagctgcttgggaggccagctttgagacgggcatgtgttgccctggatgctagagaactgccttcctgcctcacttgtttcatttttctttctgctctcacagaaacattgaatgaggaggataaagcaaagattgctaaaagcaagaagaagatgaggcagaaggttcaacggggagagtgtcagactactatccaagggcaggtgagggacatcagagagatgaaacagtaggttaatttttcctacaacttacttcatcttttattttcatttcccacatccgtcactccctgtgtagcagcatatcttcattaccctgaaatttcttgcacttgatttagagaattgggtttgttcaaaaataacgtgggcatctctagggtgagagaattaatccattgccaacccctcattccatctctcacctctcctccccagcacccttgtctgtttttgaatcctagcccaagcagagatgctttcagagtttgaggagaaatgacttcccttatggtttacaggccagaaataagcggaaacaagagaccaagagcttaaagcagaaggaagctaagaagaaatccaaggtaggtgcatgtacaaacttgccaagtataatttcgaagccactaaactgattttgcaggacatgtacatcagtcttgttttatagtgagatttctgggctgtgaggttgggaggactgggaccagggaaggatagtgactgatatctttatggcagtcttggttcctctcttccttgggtaggctgagaaagaaaaaggaaagacaaagcaggaaaaactgaaggaaaaagtcaagagggaaaagaaggagaaggtaaaaatgaaggaaaaggaggaggtgaccaaagccaagccagcctgtaaagcagataagaccctggccacacagaggcgcttggaggaacggcagaggcagcagatgatcttggaggaaatgaagaagccgacagaggatatgtgtctgactgaccaccaggtagtgaggagagagtaacagttcctgggtcagctgggaagactttcctttaaaaaaaaaaaaaggacttctg

SEQ ID NO: 69828 - DNA, 1072 bp, Homo sapiens
tcctgggctcaagtgatcctctgctgcctgcctcagcctcctgggtaactgggattattaagcacacaccaccatgcctggctcccaattatcttttgaattcagatgtgaattctgaacctccatgatagtagaaatgggtaaggtaaaagggtacaactgaaccagtatatgataaggagctaaaagatggaaagaaagggcaagaaagtcctctcctctgggctaaacacacctgggggcagcccaaggtttcactggtaacagcaactcaagaaagaccatggctggaaaagtagtattcccaagcgctgggactaggatgctggattccaaggagaagctgattcagattcattcttcccagataatgttagttacactcctgggaaatccaggtattagcaattcatcaacattttagatacctcatggagggagcagaatcccaaagtaagaaataccactgtaccttgggcctccagtttctttagggggcggttgtctgtcttgttcaatagctcagtgattttgaccttaggtggccgacctcgaccccgtttcaccttggggacttccttagtcttagccttctcagtgtttcgaggtcgaccccgtttgccagtaattgcctgaatcctcgacgggatctcctctgctgagagctgcacccactgcaagccctaaggtagcaagggagactgttacagtagtaaggaatcagtgcaggccacgaggccctcggaaccattcaatgccccagaaccttcaaaccccacgagaggaagctgcagcttgtccaccaactcttcctcagggacaaaagcatatttaacccttgggtctgcacctctggcgtgtctctttcttcaaagaaatctccaacaggcatacggggactgaagctgaagtgctctcggcggacactgtgtaccacgttgcggctcaggtactaagaggaagaagtaaagtaacattaataaagttggatcctaccatgtctttggccagcaaaggcataagcagaacaggcccagagcagacaatgccagcctgttgtcactgagcccaa

SEQ ID NO: 69829 - DNA, 1021 bp, Homo sapiens
ggtattatggcccctgtgggaagaggatgaagcaatttccagaagtgatcaaggtaatgtagctttttttaaaggactgctttcttgggctcagtggactcctttccactgcccaagactccgttcttgggctcagtgacaacaggctggcattgtctgctctgggcctgttctgcttatgcctttgctggccaaagacatggtaggatccaactttattaatgttactttacttcttcctcttagtacctgagccgcaacgtggtacacagtgtccgccgagagcacttcagcttcagtccccgtatgcctgttggagatttctttgaagaaagagacacgccagaggtgcagacccaagggttaaatatgcttttgtccctgaggaagagttggtggacaagctgcagcttcctctcgtggggtttgaaggttctggggcattgaatggttccgagggcctcgtggcctgcactgattccttactactgtaacagtctcccttgctaccttagggcttgcagtgggtgcagctctcagcagaggagatcccgtcgaggattcaggcaattactggcaaacggggtcgacctcgaaacactgagaaggctaagactaaggaagtccccaaggtgaaacggggtcgaggtcggccacctaaggtcaaaatcactgagctattgaacaagacagacaaccgccccctaaagaaactggaggcccaaggtacagtggtatttcttactttgggattctgctccctccatgaggtatctaaaatgttgatgaattgctaatacctggatttcccaggagtgtaactaacattatctgggaagaatgaatctgaatcagcttctccttggaatccagcatcctagtcccagcgcttgggaatactacttttccagccatggtctttcttgagttgctgttaccagtgaaaccttgggctgcccccaggtgtgtttagcccagaggagaggactttcttgccctttctttccatcttttagctcct

SEQ ID NO: 69830 - DNA, 1034 bp, Homo sapiens
gccctctgctttgaagaacttgtgagacttggaatttgtagggagaaggaggctagaagctttattggcaccaggtaaaaggtatttcttcacacaatgacatctgtagcaactttaccctttaatcctcatgattggttgggagaaaaagctacttctttttccaaccctagggaagaccccttgaagtaaccctgtttagcttggtccagggttgactgagtagattctcttgttttatgtgatgccttttttttttttaaagcctatcctgtccctttggattctagataacagctttgacctgaataatggtagtgacgctgaacaggaagaaatggaaactcaatcttcagacttcccaccatccctgacccagccagctcctgatcagtcatccactattcagctacatccagcaacctcaccagcagtctcgccaacaacctccccagcagtctccctagtggtttctccagcagcctccccagaaatctctccagaagtttgtcccgcagcttctacagttgtctctccagcagtcttctcagtggtctctccagcttcctcagcagtcctcccagcagtctccttagaagtcccgttgacggcttcagtgacatccccaaaagcctctcccgtaacttccccagcagctgcctttccaacagcctccccagcaaataaggatgtcagcagctttctagaaaccactgctgacgtggaagagatcactggagaaggactcactgcttctggtagtggtgagtatccagattctattctatccctgtctggttccaagaaacttttctgtcccatgttgtagttagcctttccctattggcctattgtttaaatattttgcttgaactcttaacttgggtatcccttcctcccaaggtgatgtcatgaggagacgtattgctaccccagaagaagttcgtcttcccctccaacatgggtaaatgctctagtttgctacatttattgaccttgacaagtttaatgcacaactctagaaagaagggaat

SEQ ID NO: 69831 - DNA, 1050 bp, Homo sapiens
ccactgaagtacaagaaagacatattttatgataaatcctagaattttgcataggtctctgggtagataataccaccaatgcctttcctttcattttcaccttgtagagatgaggtcttgctatgttgtccaggctggtcttgaactctggcctcaagcaattcttctgcctcggcctcccctcaaacttttatgatccctataatctcatgactactctttcagggagaaggctttacttgttacctaacttaatattaggaagaatcttcacattgtgggaactagaattggatgttttctgaccagtgtttcttaaatcttgctttctgatttttttctcattatcctgctctgatttttctacccttgtaaacagagccagtgagtggaggactatatggtattgatgacacggagctgatgggtgcagaggacaagctgcctcttgaggacagccctgtgatttctgcccttgattgcccttccctcaataatgctactgccttcagtctcctggcagatgatagtcaaacatcaacctctatctttgccagtcccacctctccacctgtcctaggggagtctgtcctgcaaggtaagtgacggtaggtaggacaaagaaagacctttacctgagaaaagatgagagaataagtttcatagttagggccttaagagtgggaaatctggctgggcgcagtggctcacgcctgtaatctcagcacttcgggaggccgaggcgggtggatcacctgagatcaggagtttgagaccacctggccaacatggtgaaaccccgcctctactaaaaatacaaaaattagccaggtgtgttggcacatgcctgtaatcccagctacctgggaggctgaggcaggagaatcgcttggccccaggaggcagaggttgcagtgagccgagattgtgtcgttgcactccaacctgggcaacagagcaagactccatctcaaaaaaaaagtaggaaagcaagagcaccttgctgggagctgaggggctatgggatagtgtatggtggaactaaaagag

SEQ ID NO: 69832 - DNA, 1321 bp, Homo sapiens
agttaaaacagcctcaatgcccgctgctagaccctaaccactccgtatattttgaaagaagcctttcttgatgcagggtgtctgttggggctgtttcgggctcgcccacctgccctctccaggccagaagctctgcatgagcttgaaataatttgcactcccactcgcgagctggtgctgctgccacaaaaacaccagccacttggctctgctaattgctaatcaccaacatgcaaatcagcctccactgcagagagctggaaagacaagtttttctcacctcaaaaagccactatcccccccgagctccatttttcctttccccacccagttcaccaacccagttatacctggctgctcttcttccagctccaagctgcctaccaagccagtgccattctctgccacaactgaagtcatctccttttctgctgcctcatcaggatggataccactgcctacctcctgggagggtgcaaaggtttgaatgctagatcccaacataggagaagtctgtggggaggtgaaaaaactagggggtccattgggcatcacctcaaaattctggtcaggaaaggaatcatacagttcttgtgaatcaaagttaagccccatgggactctgggtaccgttggcccagaactcttggctcccagcccgaaggttagtgttatgacttggggatgaaggttgccggctgcccccaaggatgccgttgagtgggtattgtccccccgagaactgggagagaaggggtgggtccttgaggttgctgccaggattggcagatgggtactgtgagtagttccagagacagtcgtaggccacgctggggtgatggaggtgtgaggtgctggaggagtggggagcagagttcaaaatccctgaagtagtagtgtgagatacagtagataagccattaacattcacatccccattcaaacctggcagagaaagaaagaaaaggtcagttacagatatgtaggcaagcaactttaccaaaacaaactcaaagtaatagcactgactagaaaaagacatggtaaagggaagggggattcctcccctgctatatttagtttttgggtctctggagaacaccaagcccagaggctcctggatgtaggtttagcaactgctgctgaggctgagtagggggctagagagctctccaggcctaccatgagagccaccagcagagctggttgctgctgcttactgctggcttttttttggtttattttttgtttgtttgttttgagacggaatctcgctatgtcaccaggctggagtgcagtggtgcaatctcgacccacggcaa

SEQ ID NO: 69833 - DNA, 1302 bp, Homo sapiens
tggtcccagctactcgggaggctgaggcaggagaatcacttgaaccagggaggcagaggttgccgtgggtcgagattgcaccactgcactccagcctggtgacatagcgagattccgtctcaaaacaaacaaacaaaaaataaaccaaaaaaaagccagcagtaagcagcagcaaccagctctgctggtggctctcatggtaggcctggagagctctctagccccctactcagcctcagcagcagttgctaaacctacatccaggagcctctgggcttggtgttctccagagacccaaaaactaaatatagcaggggaggaatcccccttccctttaccatgtctttttctagtcagtgctattactttgagtttgttttggtaaagttgcttgcctacatatctgtaactgaccttttctttctttctctgccaggtttgaatggggatgtgaatgttaatggcttatctactgtatctcacactactacttcagggattttgaactctgctccccactcctccagcacctcacacctccatcaccccagcgtggcctacgactgtctctggaactactcacagtacccatctgccaatcctggcagcaacctcaaggacccaccccttctctcccagttctcggggggacaatacccactcaacggcatccttgggggcagccggcaaccttcatccccaagtcataacactaaccttcgggctgggagccaagagttctgggccaacggtacccagagtcccatggggcttaactttgattcacaagaactgtatgattcctttcctgaccagaattttgaggtgatgcccaatggaccccctagttttttcacctccccacagacttctcctatgttgggatctagcattcaaacctttgcaccctcccaggaggtaggcagtggtatccatcctgatgaggcagcagaaaaggagatgacttcagttgtggcagagaatggcactggcttggtaggcagcttggagctggaagaagagcagccaggtataactgggttggtgaactgggtggggaaaggaaaaatggagctcgggggggatagtggctttttgaggtgagaaaaacttgtctttccagctctctgcagtggaggctgatttgcatgttggtgattagcaattagcagagccaagtggctggtgtttttgtggcagcagcaccagctcgcgagtgggagtgcaaattatttcaagctcatgcagagcttctggcctggagagggcaggtgggcgagcccgaaacagccccaacagaca

SEQ ID NO: 69834 - DNA, 1670 bp, Homo sapiens
ggtctccttgctctggggtctgggaggagaacagggctggtggggctgctgaggaccccggacggggccgcgggggcaggaggagctgtaggggctcccggcgacagtgaggaggcggagaagccgcctggctggtggagatgactcctgtgggggacttggggtggaatccccgggaggggctccacctcctcgggtgggggtggggattgcctgagcgcgaggggtgggtgagggggttcccttggcgggttaaaacgctccgtttgcggggagctgggcgttttgactgtggtgagtggagggcggaaggggtttccaggggtctgagggtgtctccctcggggagcgcacccattctcttgagcgtgaagatcaggagagggccttccttgctgagggtggtgctgcgcttggcttggggccctcgcgtcccgggagaatcgcgcactccggggatggaggttgatagggcttccgctgaggctttccaatttgagctgggctgaggggcagaagggaagaataaagaggaattcctttttccaaggagattcctcactgaggggatccccgcttccgtggcagaaagatgataccgcatcatccctttctttcccggtgttcccagttttcaggagaaggcaatgtcaatagcagttgtcctttgtagggttaattggagtgagagatttgtctgctttgggggacgacggaggggatagctttccacctctatctgtacacaaacagcccctcccccagcctcccgcaggaagtggccgggaaatggcagctgtgcgtttgctgctgcgtgtcttgttgttttgaaatgtccattttaatcagatttggtttcattttctgaagccttctgggcaagcttggatcttgccaaccatgtggcccgagagacctttcgttggactttttttttttttgtaaacttgtcaactggaagtagtcaacttcagttgactcacgtatcccaatcccttctccagaacatctctgtcttcctgtctggtttcgttttgttttccctttagctagaggtcatagagaagcaaactcagttatctaccagcggggtacgctctatgtaagtgatgcaaattccctcagcatagagagctgtcagggagactagagagcttttgtggcacgagtagcttcttggggtcctactttagtatagttattatgacagtttctatattgcagagcacctgagcaagtgagcttgtgaagaagggtagattctaagaaatggacgaagaggaaggggtgaggaagatttaactattagatggatttgtgtgtcgggggtagggactgattaacagactgagattggtgaactcagtccttggtggtgattctagcctaagggcagcccctgtgggaagcttgttatttgactaaggggtgctggagatactaccttctgcagaatcaactaattagaatagtacagtttgttatcatatgacttactctttaatccataaaagaacgtctcccctcttattcttcttggagattggtaagcttttcctctgttccctgcaaagtcgtgcccagattttttttttctttcttttcacttgataatcccaggatatttctcctgtaacatatagtgatggactgtgtgctatgtccccagg

SEQ ID NO: 69835 - DNA, 3009 bp, Homo sapiens
gaatgatactaaaaattcttccatcatggctgagagaccagataatctgtcagcttattcagcaggtattaggggtggtaagaagggtcttttgagtgctaagaatatggagtgagatgataaagataggtcagaaagggggatggcttaagtaaaattactttggttcgctgggcgtggtggctcacgcctataatcccaacactttgggaggccaaggcgggtggatcacgaggtcaggagttcaagaccagcctggccaagatagtgaaaccccgtctctactaaaaatacaaaaaaattagccgggtgtggtgatgggcacctgtagtcctagccactcgggaagctgagacagagaattgcttgaatccaggaggcagaggttgcagtgagccgagattgcaccactgcactccagcctgggcgacagagcgagaccctctcaaaaaaaaaaaaaaaaatttactttggttcctgttcttcatgggatctcactttaggctatctatgtgcctgctgatgacttgactgaccctgcccctgctactacgtttgcccatttggatgctaccactgtactgtcgcgtgccattgctgagctgggcatctatccagctgtggatcctctagactccacctctcgtatcatggatcccaacattgttggcagtgagcattacgatgttgcccgtggggtgcaaaagatcctgcaggtgagtatattactatgtgggatcagtgtccggaaagtcaaaaagagggcctgtggggactatatgaggactggatctttcttagtgatttgttttggagcaaggaaagttgaggctggcaattgctagtgagagctaatgaggtctcttgagtttccaggtacttaacgctttggaatgcaatatttttctttctttttttttttttttgagatgagtctcactgtgtctcccaagctggagtgcagtggtgccatctcggctcactgcaacctccgcctcccaggttcaagcgattctcctgcctcagcctcctgagtacctgggattacaggtgcgcgccaccatgcctggctactttttgtatttttagtagagaccaggtttcatcagttggtcaggctggtctcgatctcctgacctcatgatccacccaccgtggcctcccaaagtggtgggattacagacgtgagccactgcgcccggcggaatgcaatatttttctaacagcaccaaactaggactatggagaacaagacactgatctttcttggctgagggccctcataacaccaccaccttctctgccccctagcatgtaactttccctttgttagcttgtccaaattaaaggaatgagaatacttaactcagtcttcttttttctcataggactacaaatccctccaggatatcattgccatcctgggtatggatgaactttctgaggaagacaagttgaccgtgtcccgtgcacggaaaatacagcgtttcttgtctcagccattccaggttgctgaggtcttcacaggtcatatggggaagctggtacccctgaaggagaccatcaaaggattccagcagattttggcaggtgagattttgagtacaaatcttgaatgtttactgtgctgtggtcccattccaacaaccgtcaagcaatatatgtaatatactatgcttaattatattttttaatttaaaaaacaaacttacccattgattttgtttgaaaatactctacatttaatttgagtgtgatttgttacttgattctctagctcccttttattttatatgtattttttgagactgagtctctgtcgcccaggctggagtacactggtgcaatcttggctcactgcaacctccacctgccgggttcaagtgattctccagcctcaaccatccaagtagctgggattacaggcacacgccaccacgcctggctaatttttgtatttttagtagccatggggtttcaccatgttggctgggcttgtctcgaactcctgaccttaggtgatccgcctgccttggcctcccaaagtgctgggattacaggtgtaagccaccgtgcctggcccatgtgttcttaattcatactgtatcatatcttgtaaatttgatttgtgagggaaatttaagctttctaagatgacatgaattcatcacattctaactgatggcctgaagtggtgaggaatgttacatgatgcagaaagttgatatccctccgcttcttactctttttttttttctcccccatcatacaggtgaatatgaccatctcccagaacaggccttctatatggtgggacccattgaagaagctgtggcaaaagctgataagctggctgaagagcattcatcgtgaggggtctttgtcctctgtactgtctctctccttgcccctaacccaaaaagcttcatttttctgtgtaggctgcacaagagccttgattgaagatatattctttctgaacagtatttaaggtttccaataaaatgtacacccctcagaatttgtctgattctcttggttctgacaacatagtcaacactgaagggttatgtatttaattttagttttagagacacggtgtctggctgtgttgccaagactggtctctaactcctgggctcgagatctcccacctcagtctcctgagtagctggggctacaggtgtatgtagtctcacatcaccagcactgttttcaacaattagatttttagagtggctataagaagcagtttcagcatgaagtgggccatgtatgtttgaaattggtccttaaaaatagccattctcttttgttgatggacaaccgtacctcttgtgaggggtttcctgtgggtagtgtgatcttagtagggcctcagttttgggccttttgttcaatacaaattgatttttttttttttttggcctctattccatgtggcacatccctacttcttggttaaaaataggacttttttgaagggcatattgggaaaaactcgtttta

SEQ ID NO: 69836 - DNA, 3736 bp, Homo sapiens
ttccattttgccgccccatgaccttgagccggggaacgatggtagctcgggcctaagggatccgtggtgttaaaaggatgcctggagccgcgtcttgctctctaatggctggagaacaagaatgggacacccataggaggtttcttcgacccagctctgtcccattttgtataaagtcctttgtgtgacggaaaaggtgcgggcaggtgcgttgaccttccggttgaataggggtactgaactctcgaaaaatggggtcttgtgcatgcggatgggaaggctgtgcaggcgctttatcgatcgctgcgcggccttccctcttggacacgcgttccgtacaagcggaaagaggcctgacttcggctgagttttcctctccttgtgtgttaagtcctggcttccgatgacctttaactggcctgaccccagctccttccaatatcttttgtctgttagtcagggactatgcggcgcaaacatctccttcgccaaaagcaggcgccgccaccgggcgcatcgtggcggtcattggcgcagtggtggacgtccagtttgatgagggactaccaccaattctaaatgccctggaagtgcaaggcagggagaccagactggttttggaggtggcccagcatttgggtaagtagagtttgttaggaatagtaaagaccttgtgtagcccaaatatccccaaaaccaagctgtctgccttctatgatgattttatcaaaatgactttcgttcttctgagtttgctgaagccacatttaggtactgagaaggagtcttggtcgatttaggtcttgataccaatttatccttatgtataaccctgcgatgcctgtatctaacaggtgagagcacagtaaggactattgctatggatggtacagaaggcttggttagaggccagaaagtactggattctggtgcaccaatcaaaattcctgttggtcctgagactttgggcagaatcatgaatgtcattggagaacctattgatgaaagaggtcccatcaaaaccaaacagtaagttgctcttattgcatctatgcacaaaggaacttctgttatttgcagttttacacattaaggtgacatgttctcctaaagcagaatttttcttctgatacgttcgattattaaaatcacacagtgcagtttcacctgaagaaattaggatgcagaatttctgattgacaaaagcctactacttgaggtttttttttttgagagggagtttcgctctcgactcactgcaacctccacctcctgggttcaagtgattctcctgtctcagcctcctgagtagctgggattacaggtgcatgccatcatgcccggctaatttttgtatttttagtacagatggggtttcaccatgttggccaggctggtctcgaactcctgattttgggtgattccccccccacctcggccccccaaagtgctgggataacaggcatgagccactgcgcctggctagttgagtatttttaagactcggtcttatggcttaggtttaggagtctccaaaacttgtaggtttttgtatttgctattgctatgtgagggaatgctgttaggttaaggctcagtaaaatgaaaaatttatgacagttaaagtcagggaatgggattattgtttcctaagataataattttctttattgcagaaagttgggttagatcctagatgatagtttatctgatttatgtaagaaaggggaggtaagactgtggttcctcaggtaaagggatggacttgagagttgatagggagggatatataagattatcatttgctttcaacaaggtgaatagatactatcctctcttctacctttacagatttgctcccattcatgctgaggctccagagttcatggaaatgagtgttgagcaggaaattctggtgactggtatcaaggttgtcgatctgctagctccctatgccaagggtggcaaaattggtatgttattaaggggtacatattttccaaacctaatatgggaggaaaaactcatacaatgttatgagtggatattgacatctattcctcactgatgagtacgttctgactttcgttcttctgagtttgctgaagccagatgcaatttctgagaaggaataggatggaaggaagcaattactttttttgaagtttgcttatttaggaaagcagaactcttaaatattctttcttttcaacctcttatagggctttttggtggtgctggagttggcaagactgtactgatcatggagttaatcaacaatgtcgccaaagcccatggtggttactctgtgtttgctggtgttggtgagaggacccgtgaaggcaatgatttataccatgaaatgattgaatctggtgttatcaacttaaaagatgccacctctaaggtaagcattgagctaattgatgtccacgtggtagttacgccaggaaactattgccaactgaagccatgttctatattttctatttaatttttttttctttttaagaaaatgttaatattttcattttcgtgtcccagggcctacaaaggaaacctgttagtgttttcccccccaacttccaatacacaaatggacattttctttcctctttgatactgacattaaataacatttccaggttttctttttggtagatagtcccatcatttgaaagctaattttgggagggctggattggacgtggtacatatgtttcagttaagcctattttgtacttttcacttaacttgaataggtttttatttcctttctactatagttttgccttactaatataagaagctgtcttttttttttgaactgcatctctaatagggaaaagaaacttgcacacaaaaacgctgacaccttctgagaaaggatctgtggtcgtttctccgatttgggaaccttcagtatgtggcttctctactcctttgtcaggttttacgattatgtatgattactgcaggtagcgctggtatatggtcaaatgaatgaaccacctggtgctcgtgcccgggtagctctgactgggctgactgtggctgaatacttcagagaccaagaaggtcaagatgtactgctatttattgataacatctttcgcttcacccaggctggttcagaggtaagagggaaggcttgagaggacctggttcatctggcctttcttcggatgaggctaaggatgtagacacctaagacctttttttcttttaggtgtctgcattattgggccgaatcccttctgctgtgggctatcagcctaccctggccactgacatgggtactatgcaggaaagaattaccactaccaagaagggatctatcacctctgtacaggtaagaaaaattacatagatgaagatctgatttgtataaaggcagggtgcagtggtgcatctcagctactgaggaggctgaggcaggaagattgcttgagcccaagagatcagcctggggaacaaagctgtatgtatgtagagagatgtataaaactgactgggccaggcgtggtggttcatgcctgtaataccaacactttgggaggctgaggtacgcggatcatgaggtcaggagttaagacaccaccctggccaacgtggtgaaatcccgtctctactaaagatacaaaaaattagctgggcgttgtggcaggcgcctgtaatcccaactactcagaggctgaggcaggagaatcgcttgaatccgggaggcagaggttgc

SEQ ID NO: 69837 - DNA, 2224 bp, Homo sapiens
gtgggctaaattgtcaccaaaaggcacacatcattttttataggtagataaatcctctgctgtacatccattcaccttaggtaaacctagtcaagtccaatgactaaatttctaggcttgatatgactacctacctgtgctactttagtcaaaaatatagcacttgaacttttttaggtaaactgttcagttagcaaacgaatatttgatcagctcggtaactttattttccctctttcaggattcacaagacagtgatgatgaaagtaagtgtatataaaaagtatgtttatacagtgatactttgcatcaaaaaacaaactcaaaatagagatgttaacttctttggaagtaaagtaattttttctttatgaccttgaataaataaccaaagcagaaatgtgaataacttgatagcaagacaacctattaattcattgggcaactatgtatttcgatttttggttgcttttcctttaagacagtaaaattggtagattattcacttgtactatatactaatatttttaaaaattctttcagaaatgccagatctggagtaaggaatattgtcatcacctggattttgagaaagaaaaataacttctctgcaagatttcataattgagagaattcctgagttgatagctctaaaggcagatatgctgtatttgcctactttaacccatttttcaacctgtttgttttttaaaaggcttcactaagggttgatatgtaccattgtatggggcaattttaagtcagctaaggcaataaccttatgcatgaacatttcccagactttcatgaagctgttgaggtcctaggcaattaatgcagcagttgcgataaataaaaacatctcacctaagtctccttttcttcataacatagatactgacatgataggaagctctcagcttagggaaagagaataaattttagattatagaacatggattcaaaagtgactggaacaaattggctgacaccttactggtaacctgctattcttctggtgttatccttcaggattgttccactaaaatttatttttcaaaaaatttacttcacattattctatgtaagtgatgacttgtcagtgttccaggtgtatcttagctaaaactagagaatgccctaacttagatggtttttgaagcctatacaattggtattgtttgacccttaagcttttacatctcttagcatggaggacgaagaaagctgtacattgttgcttgagagtctgtacatttagtccagatttgtatttgcactgtcagtatggcaaatgagtgaaaaatgtttaatacactattggattttttatttcctttttttgattcagcttatacccgggctgaaaacctcaatttatgttcatgacagtggggatttttttaaatgtctacattctttctaataaactgttggaagacttcttggctgtccttttaagtgtctggcttactgtaatttttatgtatttaccatttactggaatggagtttatttgaggaagaatttgggattattcctctgtttgaaaaaagaggcttgctgtaatgtcacaggaaaccttttaaaagtggatctgtaatagcatattgtagatgcactttgcagcagttggaaaagaaagtgttgtgtgatttgattgaaataaaactaaatgtgttgtcctcctaaatctttgaacttctgcattttggcagttttcattccctcacagcttctgtatttgtcataatgtagaaacactatgtattttagtgtttctttgtcagatattcaggacctgtgttgcaggcagttaaagtgctggtgatacaaagattaatatttcagatgattgctgagctcagagagctcacaggctaggggagacaaacatgagacaaaaacttgatggaaagtgcgataatagatacgcataatgtattacgatgtgtagttcttagcttcaggggggaaaacattttaaaaaaacttgtttttcttcaaaaaatttatacttcagttttgggaattaatgattcactggcttactgcccagccttgaaacgcattatacaggccggcacggtggctcccacctgcctttaatcacagcactctgggagactgaggcgggcagattgcttgagaccagcctgggcaatgtggtgaaactcccttttttttttttttttttttttttttggagacggagtgttgccct

SEQ ID NO: 69838 - DNA, 1052 bp, Homo sapiens
gcctgtaatcccagctaccctggaggccgaggcatgagaattgcgtgaacccagaggcggaggttgcagtgagctgagatcacgccaccatactccagcttggacgacaaagctagactctgtctcaaaaaaaaaagaataccttaatacatgttccacctaacttaagatagatagctgtgcaactacaaatgaatcccattcttttccttaaccaccagaggtaaccactactcaagtagaatttttaatgtttgtcaaacctgttgcatgaatagctttgcttttctttagggaaaatttagttttaatttccatatgggtttttaggattttgtataattacctataatcttccttttccagaagggaaagatgcttatatttgcattttgcattttttgatatctgtggcagacttaaggtttattctgaagcatacagcattaataattagggcctaacttaacatcatttttaaaactaatttttacacttcaaatagatgatgaacaacatgggtggtgatgaggatgtagatttaccagaagtagatggagcagatgatgtaagtctaaaaattcttttttctgtttactttcatactattaaatagtaagaaacaacatatttacaaatggttttatatagattcacaattacttcttattttctaaaaaaaaagaaaagggaaaagcaatttttaaaatgtgcccatttttgacgaatgggggtatctattagggaactggttgtaccgtagaccattcctaaatggattagatttccaaagaatcattgtatagagacattatatattaataccgtactcaattataacagtcagtttaggccgggcgaggtggctcatgtctgttatcccagcaggccaggtgggcagagtacgtgaggtcaggagttcgagaccagcctggccaacatggtgaaaccctgtcttaaaaacttagccagacatgatggcaggtgcctgtaatcccagctactggtgagctgaggtgggagaatcgcttgaacctgggaggcggaggttg

SEQ ID NO: 69839 - DNA, 1136 bp, Homo sapiens
gattacacaactagtctttccaccttggccacccaaagtgttggggttacaggtgtgagccacctcatttagcttagtctattctttgtgtgctaattacatgccctcctaaaaatacaaagtcacagttcaaaaaatattgttttgccaggcaccagtagcatgtgcctgttgtagttaaaagctactctggagggtgaagtgggagaaatacttgcgcccaagtctgggttgcattgccatatgtcaggtaaccacgctaagttaacatcagtacggtgttgtcccaggaagcggggaccaccaggttgcctgaagagggtaaacaagacccttggtcagaaacggagctggtcaaaactcacatattgatcaatagtgggattgcacctgtgaatgcttgctgcactccagcctgggcaacatagcaagacctggtctctttagaagaaaagaaaacgtagtcttaaggttcatgccaaatgcaaattagcctaatcttagggtgatatttgtattgatttatagcttaattggcttagtgtcgacttcaataattggaaagactgggaagatgattcagatgaagacatgtctaattttgatcgtttctctgaggtaagttcctttaaatggacctctccccattcgaagcacacggtacctgtctatgtagtcaatttaatatggttttgggcacctaatggtattcatgatgcatgttattttatttttaagaccattttgcagtcatagtaaatagatgttaacaatggcaattttaatcctgaagttgaaccattttaatgattttaaaaggaattagtgttagctacaaaagttacaaaagttaatgcattaagacaaactaacacagctagtttgctaatttcatcattgggactttttttttttttttttttaaagcatgattgcagtagttgacttggattttgaagtcataaaataagactataaacttttggccgggcacggtgctcacacctgtaatcccagcactttgggaggccaaggctggcagatcacgaggtcaggagatctagatcatacgggccaacttggtgaaacctcatctctactaaaatacaaaaaaaattagctgggcatggtggcgc

SEQ ID NO: 69840 - DNA, 2300 bp, Homo sapiens
gtgctgggattacaggcgtgagccaccgtaccctgctttttttttttttttttttttttttttccgtatttgtatttgtagtagagtcggggtttcgctgtgctggccaggctggtctctagctctcctggcctcaagtgacccacctgccttggcctcccaaagtgctgggattacaggtgtgagccactgcacccagccaagtaacataatttttgataggactagataaacggctaactctactaagcattgtttggtttttaaatctttcctattatgaaattggaatcattctgaaactaaatcttgttagacccataggttttaacttggaatgtagctgttagggtaaaaatgtagtttttgtttaaaattgtaacaaactgccctgaaataatgctataatggtgtcgaaggttagtatgtgaatgtttagttaatgaattccagcttgactttccctactttatccttttgtaggcagcctgcttctgcaaagtggtacgatcgaagggactatgtcttcattgaattttgtgttgaagacagtaaggatgttaatgtaaattttgaaaaatccaaacttacattcaggtaagttaagctttttatccaatgatgtaaaatagtcattcacacaactgaataactttgactggcttgtcttttcattgaagttattattaatctttgtctctttgaagaggcttaattctttctttattattttatacagttgtctcggaggaagtgataattttaagcatttaaatgaaattgatctttttcactgtattgatccaaatgtaagtagtctttatgctttaatccaaattttagttgtgaggaaacagacataccaagtattctttttagcaatgagcattagttctgtttttcttaacagtgaggcaaactatgtatatttacattttgtagaatatttcctccaaaattggtttctgcatactttttgtttttgctatcactgtttgggcttagagtagtatccttgaggctcgtctcatcttttttatttgttttgtttttttgtttgtttggttttgttctttgagactgctgcagtacaatggagcgatcccggctcactgcaacctctgcctcgtaggttccagggattctcctgcctcagcctctggagcagctgggattacaggcacatgccaccatgcctggctaatttttgtgtttttagtaaagaccatgttggtcaggctggtctcaaactcctgacctcaggtgttccacctgcctcggcctcccaaagtgctgggattacaggcatgagccactgcgcccggccaaggcttcccttatctaagaatagaatctttaaaccattctgtggttatatcatttttagttaaagtttttaaggttttattctgtttatcgtgtgcaggaaagaaaaaaatggtaccaggttaaactttaaactttattgttgtgcagattatttcagtaggaaatagaagggaaaaaaaaatttttttttaaatgaaacttaaagggggttggggcagttggatagtttgaagtttttagtagtcaagggcatgtttcagagtccagagaaaatttaggtaaagaaatgagaaaggtgagaaatgacaagctattttctatcatgtagtgatgctggaaagataaatggtatgatggtccttttgtttttaggattccaagcataaaagaacggacagatcaattttatgttgtttacgaaaaggagaatctggccagtcatggccaaggttaacaaaagaaagggcaaaggtaggtttcattttccttttttgaaaagtttgatatttttattttaggtaataaaagatgtacttatttgatgtaaggaatatggctgtgtttttgtttcacagctaagtataaagcctcatgttcatgttttttgtctactcagttttaatacgaagtgtgatcagaatatcagttattaactggtgtagaatcttttgtacttaagagacagactttgcataaattactcagctatcacatgggaggggacaaagcttggtgaaaaaataatcaactgaaaatagttcttactagtaaatttgttttcaaaaggtatgtttaacaattttcagtgttttttttcccccaaaacagggtctctctttgtcacccaggctggagtgcagtggcacgatcttggctcactgcagcctcagtttcccaggctccaagtgatcctccctcctcagtcccccaagtagctgggactgtaggggcatgccacaacacctggctaa

SEQ ID NO: 69841 - DNA, 1389 bp, Homo sapiens
gagaaatcgccgaaggcgcatggcagggcagttgggccactaacggttttctaacgcgagaagacagagcgggaggagaggcgggaacgcgtagggactagcagggggcggagtgggggtggggtggcggacgaagggcggggccggcgccaggaaggatcgcgaaggagctgggaggccccgccctttccgtagatatctctagaaagccgcgccggagcccaaaaacaaggactgcgcacgcgcggcggcaaggcccgggcattttgctgcgtcaccagccgccgcccggcctcaccacccctcgtttgcacgcacgcacgttcattctccgtcctcgcgccccttttcctacactttcctcttctccccgaccggaggagccgctctttccgcgcggtgcattctggggcccgaggtcgagcccgccgctgccgccgtcgcctgagggaagcgagaagaggccgcgaccggagagaaaaagcggagtcgccaccggagagaagtcgactccctagcagcagccgccgccagagaggcccgcccaccagttcgcccgtccccctgccccgttcacaatgtgagtgcgacaccccgccgagggaaggtcgccgagtgaggccgaggccgcgttgggggctccctggaagcggccccctagcctttctcgcatcggtggtggcagtcgttcctgcctgggggcgggaggtccaggatccttgttccggttaccgttggcgggtggaggacatttttcctccagatgtctgcttcccccacccctgaaccgttccttggcttccccatgccggaaatcctacttttacccctttggctgtctgggttactcgcctctttcggtaacttcaccctaggccttaagctcccggtagctgctcgccatgcggcgccctgaagcgtgaaccttcgtgggtcgcctctcggctgcttgggcgctccggttctgttgctttgtggtcccggggccaggccctgagtcgagtgcacctgtggtgggtgccgccaggtgcctggcggagctcctgggagagccccacgcggacctcgccgtgagctgcaggtactgctaggcaactagaaggaagccatgcccacgccgcaacatacttccctctccagtgtctgggtttcttgagtgtgggtacttccagtccgcctcctaactccagtctcttgaaaacacgggaggttgccaaaactcagccgcttccctggcagcgaggaggagttaccattgagcaggtagttccgcacgtgtcgactttggaaagatacggacattttctgtgtttcatgttctacttgaggtgaggtttcactatcttgttacagtgtaggatgaaataggtatgtagtaggcatttaatt

SEQ ID NO: 69842 - DNA, 1817 bp, Homo sapiens
tgcttctaaagaggttgaaaacctgatactattttctcttctttaggctatgtccaaactgggtcttcggcaggttacaggagttactagagtcactatccggaaatctaagaatatcctctttgtcatcacaaaaccagatgtctacaagagccctgcttcagatacttacatagtttttggggaagccaaggtgagtaaacttttcttgggcattgttccagaccagggtttctcaacctcagcactgctgacattttgcgtcagatagttctctgttatggaagggctatccattacatccagttttgattacccaaaaactccattgccatatatctcctgggagacctaactaccccctagttgagaaccactgctctaaacctaaacaactactctttctactgtgagggcaagcagtttaaagctgtacaataagttacctgaatgggtttacagagagttgtgaaactatatgatttatttttcaaagactgctaatctactcacatggatctgtattttctaccctgtagatcgaagatttatcccagcaagcacaactagcagctgctgagaaattcaaagttcaaggtgaagctgtctcaaacattcaagaaaacacacagactccaactgtacaagaggagagtgaagaggaagaggtatactaggaaatctttcataatttaactctcgccgtatagcattgtgttcgtgttggtgagctatattaaaaactagattcaggagactccaaagaactgctgaaattgttcttgcctttaatttactgctttttccctctcatctctcaggtcgatgaaacaggtgtagaagttaaggacattgaattggtcatgtcacaagcaaatgtgtcgagagcaaaggcagtccgagccctgaagaacaacagtaatgatattgtaaatgcgattatggtaagtgttcaagcctttgttccttgactccctctgccctgaccaattatgagtgactttattttgtcttgctaaatatcagccaattaaggaacctcattccagagcctcttctgagttgccgtataggttttagtggcctaaattctcctgatttgcctgtaagagttttagtgacctgaattctcctgatttgcctataagaaccgctaattatcttttctctgttacaggaattaacaatgtaaccatatggaagcaactttttttggtgtctcaaaggagtaactgcagcttggtttgaaatttgtactgtttctatcataaataaagttatggcttcttgttggatgaattcagtcggtgactggtctcttccccgccacccccccacaccaaaaaaaaaaaaaacttaaaaaggttctagtaatttattaattactcctaaggcctccctcatttgataaggtttagtgccacagatttcccacttagaatctcagactttatacctcttttaagaagttactggccaggcgtggtggctcacgcctgtaatcctggcactttgggaggccaaggagggggcagatcacgaggtcaggagattgagaccatcctggctaacacgttgaaaccccgtctccactaaaaatacaaaaaattagccgggcgtggtggcgggcacctgtagtcccagctgcttgggaggctgaggcaggagaatggtgtgaacctgggaggcagagcttgcagtgagcccagatcacgccactgcactccagcctgggcgacagacagagcaagactccatctcaaaaaaaaaaaaaaaaaaaaaaaagttactatactaggctgttaggaccttcttaa

SEQ ID NO: 69843 - DNA, 1968 bp, Homo sapiens
ctctactccctgttcagaaagactcttcaaagacagcaaaaggcaaagatgcttctcattccccaaagggccccttggctcctcctgagtctaaggcgtccacccctctaacagcagctgcctttgagaaggtccttcctaaacctgaatcagcatctgtctctgcagcaccctccccaccagtctctctgcctcttgctccctccccagttcccactctgcctcctaaacagcaatttctgccgtcctctcctgggctggtgttggaatcaccctctaaaccccttgcccctgctgatgaggatgagctgctgcctctgattcccccggaaccaatctctgggggagtgcctttccagtcggtcctcgtcaacatgcccacccctaaatctgctggaatccctgtcccaaccccctctgccaagcaacctgttacgaagaacaacaagggtatttgccttggtttgccgtgtgcatggtgtgtctgtcgtccacacccctcttgggcgctacccaccaatactaaccctgtgatgcgccgctttctccagtgaatctgcttgggtttggatgtagaacatagaatgataattttaaatgcaaaagttctaggaatatgaaaccaaatcttggttttcattacttcagatagatacatagtacattgtgtatcatttttgtgtaatgtggcccggactaccctgagcctgccatgccatctattttacctaattgatctgacattgaaaaccaagacctgccagaccttttcatttgctctaatccctaccacatcactaactaaccttgtccctgggcctgagatttggtaaaattattggagaattgaactatttgtatttatttttccattattagacttagtaatgaccagttgcccagggactcccttttcataaaaatgtagaaatctgtttttcctagcctgaaaatggtgcaggtgtatgctttttttcctcagtagtctttactgatgcttggcctttgaattgaaagaaatttatgtgaattatgtttggaaaaactagagatataggtcatcatcattgagaatcttctaattatattgattagatcacattgctggggtgaatggtttgaaaatgaggctgaatatgtgtacgtgtctgcttttgacttcctccaacccagtttaaaagttgaggggaaaaccacccaacctgttgtgcctccacggtgtgattttggttttttcacttaagtgtatctgggggcaccttctgacagaactttacagggataattggactattgggtaaaattttagagtcatatgggtcattatttgcctgtgccaagaaacaaagaccttgagggaaagaaagcagttacagtatattaaactgctcagctatttctagtgattagtcctcatttctggggttagggctgggtctttactagatgtgtacccgctagttagtgactaagttaggggctatcaagctgacttcacacaagccagttggtttacatttaacattcttaggtctagcatgaggcattcacctctagtccagggcaggctgtggtgaagtaccttctcttataatttctactataaagcagtaaaagttgtttctcatcttagggtctggaacagaatctgacagtgatgaatcagtaccagagcttgaagaacaggattccacccaggcaaccacacaacaagcccaggtgggtattctcttactaactggtattgggtcaaagaagcagggttgatcagggcaacttttgtatttggaactgtgaaccttcataaaggaaaacccacaaggagattgtgctatccagatcttagattctggttaactaatagctgttttatcttcttagctggcggcagcagctgaaattgatgaagaaccagtcagtaaagcaaaacagagtcggagtgaaaagaaggcacggaaggtaagattt

SEQ ID NO: 69844 - DNA, 4202 bp, Homo sapiens
gaattaacatcacctaggaaggtttatagagactattacagtccttttgtggttggttttcttgtttgggttttgtgagtaagtaaactggtaaggtataaagaagctaagtgactttaatacttgatattaaattctgaagtgtttcaactttaggaagaactgaattgtgctgtgcacctccttcccaaaactattctaacagagtcagatgtttcctagcctagtggaagcctgaaagtataaaagcctgtgttttcttattcagttcagattccccatcatcgtcactgctcactaacttctttgttccagttttcagtatcttttctgttcatgatatttgggtggacagagtagcacagctgttcttctcgtgggaattctgttggctgtgagaaagacttgggaatacagtccatttcaagaagtaaggggagggcacaactgggaaaggatagaaagcatgttgttctcaacctaccaagagtctgtgctccccatttagagataggctgctcttagactgttctcctcaccctaaaatagttggtttactttggtagaacttggggaagtgtgagaaattaggaggggaatgtcttctcacttgaccactgaaaaatgtttggggaaggttgttgttgcctgtcacctttatctaatcctgcgtggtgacttagactgtcagattttaaactccagtgtttcctaggaggcatgttgtaccaagttgggctgcataactcaccttttttctcctccccctccccctttctttatctccttttgcctttctccagctgtgctacctatgtcttcagccttgagtgtcactgctgccttagggcagcctggacctaccctcccccctccttgctctcctgccccacaacagtgccctctctcagctgctaaccaggcttccccattcccttccccctctactattgcctcgacccctttagaagttccttttccccagtcatcctctggaacagccctacctttgggaactgcccctgaagccccaaccttcctaccaaacctaatagggcctcccatctccccagctgccttagctctagcctctcccatgatagctccaactctgaaagggaccccttcctcttcagctcccttagctctggttgccctggctccccactcagttcagaagagttctgcttttccacctaaccttcttacttcacctccttcagtggctgtagctgagtcagggtcagtgataactctgtcagctcccattgctccctcagaaccaaagactaatcttaataaagttccctctgaggtagtccctaatccaaaaggcacccccagccctccatgtatagtcagtactgttccttaccactgtgtgactcccatggcctctattcaatctggagtggcctcccttcctcagacaacacccacaactaccctagccatcgcttcccctcaagtcaaagataccaccatttcctcagttctgatttctccacaaaacccaggaagcctcagcctgaaggggcctgttagtccacctgctgccttatctctttcaactcagtctcttcctgtggtgacctcttctcaaaagactgcgggtcccaacacccccccagattttcccatttctctgggctctcatcttgcacctttacatcagagttcttttggttctgtccaacttttaggtcaaacaggtcctagtgctttgtcagaccctacagtgaagaccatttctgtagatcattcttccacaggggcctcttatccttctcagagatctgtaattcctccccttccttccagaaatgaggtagttcctgctactgtggctgcctttccagtggtggctccatctgttgacaaaggtccctctaccatctctagcataacctgcagcccttctggctccttaaatgtagctacctctttttcattatctcctacaacctctctcattctcaaaagctctcctaatgccacttatcattatcctttagtggcccaaatgcccgtttcttctgttggaaccaccccacttgtggtgactaacccctgtacaattgctgcagcacctactactacctttgaggtagctacttgtgtttctcctccaatgtcatcaggtcccataagtaacatagaaccaacttcccctgctgccttggttatggcacctgtggctcccaaagagccttctactcaagtagcaaccactctgaggataccagtctctcctcctctgccagaccctgaagacctcaaaaatctccccagttcagtattggttaaatttccaacacaaaaagacctccaaactgtacctgcctctcttgaaggagcccctttctctccagcccaagcaggactcaccaccaagaaagaccctactgtattaccgttagtccaggcagcccctaaaaattccccttctttccaaagtacatcctcttctccagagatacctctttctcctgaagccaccctagcaaagaaaagccttggggagcctctccctataggtaagccagccagcagtatgacctcccctctgggtgttaactcctcggcctctgtaatcaagacagattcttatgcaggcccagactctgctggtccgcttctcaaaagttctctcattaccccaacagtggctgcatttcctttggaaagtgctgaccctgccggggtggctcccacaactgccaaaggtacctcaacttatacaactacagccagcccttttctagaaggaactgtctctttagctcctaaaaaccacccagttaaggaaggtactcttactactttacccttggttcctacagcttcagaaaattgccctgtggctccatccccccagaatacctgtgctcctctggctaccttagtgctggcccctgaaatcccaaagtctgtgccctcaccctctcttcccccagctgggactcctccaggtacaaaaaaggttgatggtatttctcatacttcagcattggcacctgttgcttcctctcccaaagagtgcccaactgaggactctggtgcttctgctactgcatcttccaaaggaactctgacttacctagctgattccccatctcctttaggggttagtgtgtctcctcagactaaaagacctccaaccaagaagggttctgctggccctgatactcctattggaaatctctcatcccctgtttctccagttgaagcttcatttcttccagagaatagtctttctttccaaggctctaaagactcaccagccacgacgcattctcccactcctccatcccccaaaggggcccctactccctcagctgtgactcctctgtctcccaaaggagtaacactaccccccaaagagacccccactccttcagtggtgaatctgcccttccccaaagagggtccagctactccagcacccaaacaggctcctgctctatccatgacttcttcctcccccaaaaaggcccgagcaactccagcccctaaaggaatcccagcttccccatcccccaaaggggcccccacacccccagctgcaactcctccctcccctaaaggaggcccagctaccccatccccgaaatgggcccccacacccccagctgcaactcctccctccccaaaaggaggtccagctactccatcccccaaaggggcccccacacccccagctgcaactcctccctcccccaaaggaggtccagctactccatcccccaaaggggcccccacacccccagctgtgactcctccctcccccaaaggaagtccagcagctaccccattccccaaaggggcatccacacccccagctgcaactcctccctcccccaaaggaagtccagcagctaccccactccccaaaggggcccccacaaccccagctgcaactcttccctccccaaaaggaggtccagctaccccatccctcaagggggcccccactcccccagctgcgactcctccctccccaaaaggaggcccagctaccccatcccccaaaggggcccccatgcccccagctgcaactcctccctccccaaaaggaggtctagctaccccaccccacaaaggggcacccacaaccccagctgcaactcctccctccccaaaaggaggtctagctaccccacccccaaaaggggcccccacaaccccagctgcaactcctc

SEQ ID NO: 69845 - DNA, 1136 bp, Homo sapiens
tagttcctgcatcattgtgtgaaacccaggattgaaataaatccttttatcctcagcgtcgaaattaacgactgtgaaggctaattttaaattctggttaaaacatatctctgtagaaaacttaggaggaggtaatgaaaagttcttaaaatgatagcctttctgagtcagttgtgcagcgttaaatgaaggaaatcttcaggctgtaattttcattctcacctttttggttttttttaaatttcatttgttatttaagggcaattcctgtccctttttggagttacagtagagttgcttatagttgaaagcataaagtttcttcccacctgtttgattttaacagctgaagggattaatacagctgctaggaaggacaatagggggctctaagctggagtataaacaatatgaaattcttgaagtacaaggggcttaaggaagggaaaaaataaagtactgttctctaaagattctgtaatttcagtacaaaacgagattttagagattgtgtcattgaacaacttaattttacaaatacgaagatttgaaattcagatgaatttagaataatctgattcaagcttcaaaactaatgcatttacttctgaaacagtccttaatgctattaaacgtattcctgaatagtctgagttgcatagtaggcttatattaaggaagtaccaatgataaatacacaaggttttatctgtaatgatagtctattagaatgaagaaggaagctcaaggaattgttgatggtgtcaaagcaagtatttgagtgcttattccatttgaggtccagtcagaagaaaacatattccatgtttttaattctgattcattatgtttggtagcgttttcctgtaatcgttagactttggcctacccactctccaggaaaaactagttgagccaccttgtcttttccatggtaggatgccataagaacttcagaattactggttgagtgaattttgaatttgaattttggtaccacgggcttcccccccgccccccttaacattcccttctaagcattgagcatttgttgatccaattctgtgttacctcctgaatgccagagatactgtcttactgtcatgccaaacattggtgtattttgacataatgaa

SEQ ID NO: 69846 - DNA, 1120 bp, Homo sapiens
ttgttttacgaagagtttaacacgcatgagttgctgtcatctggtgacatcgtttgagtctctctagtcattgaacagaacaagaaaaatcgaattaaatttataatctgaactgaagttatatgtgacccatcacatctctcaagttttaaaatgggtttttttgttgttgttgatggggggggagagggtccagcagcttttaaatgttttcacatcgtgtgttccaaaaataactggttagcctaagtcacttccaccctccaatgttgtgaatgcagtctctagcattcgctatttaatgtcttcttcctgcactatttgagaaatcgcgaggtcgacttaataccgcagtcgccacttcgcggaccggagggcggagtctgcttagttctgaggactgcgtgggtccgcgcagagagctcctgctaggcctgcgcgtcccgttctaaattcttaccctttagtccttgtcaccacccccgccgtgggaacggcctgacagtcactcgtcaaaggaagtggctgccggcagctcttgacccggaatcggatcctagtcccaccccctccgctccaggcttccttctgcaacaggcgtgggtcacgctctcgctcggtctttctgccgccatcttggttccgcgttccctgcacagtaagtactttctgtgccgctactgtctatccgcagccatccgcctttctttcgggctaagccgccccggggactgagagttaaggagagttggaggctttactgggccacagggttcctactcgcccctgggcctccggacaaaatggggtctgcggttggtgtcctggcaaaagcagggtagaagggctgcggggcgggcccagaatccgagcctgcagagatgggagcagttgcagtgttgagggcggaagaggagtgcgtcttgttttgggaactgcttcacaggatccagaaaagggtaaggggtcacagccttagaacctgtaacaccgttctccctgtgacaagcaagtgttggacttaaaacaccgtctttcccctcctggtaccccaaagtcggcaaacgtagtccaggaggccccagcccagccagtgtgagtattaggagtggagggggtt

SEQ ID NO: 69847 - DNA, 1054 bp, Homo sapiens
ttttaaagagaaataaaaggcatgctggacatggtcattcacacctgtaatcccagcaactcaggaggctgaggcaagaggattgtttgaggccaggagttctgggcaacatagtgagaccccaactcaacaaaaattgaaaaactggccaggccaggagcagtagctcacgtctataatcctagcactttgggagacaactgaggtgggaggatcacttgagcccaggacatcaagcctgcagtgagctatgaccatgctactgtatgtactctagcatgggtgacaaagtgaggcattaactctaaaaaagagtaagggcacagctaatgtgaaagtaatttatatttctaaatactcttcttaacagataagtttaaccctttgtctaagccttaaataaaaattttaaccaaaaataacctgtaggagatgactataatgatttatagtccacaatcatcagtttataacttttgtgtcttacaggtcgcatatctgtgcctattgatttgcagaaagtggaccagtttgatccatttactgttccgaccataaggtatgtttcagatcattgatcactccttgtttgtaattgttgttatgaattttaaataaattgaattagcctccttagagaagtagttgcatgggaatggtatatttggttatggaaaccaaataaggttcaaaggttagatgacgatgccctaatagaacaatacaagattttcacctgctgttatgtaagaaaaagattttaaggtcaagtaaatttaggaaattctgacttaaacagattaaaagtatcttttactacagtatttcacagtctttcatatgataatatgcatgaaaaactccaagaagagatcatggtgtttagaatatcccaaatttagctggccgcataatttttttacagtaaattttatgggattcacatgctattatacactggataatgctgatcagaaaccaacattaaacttctcttgttcgtggtgaggcgcggtggctcatgcctgtaatcccaacactttgggagggcaaa

SEQ ID NO: 69848 - DNA, 1050 bp, Homo sapiens
tatgatggggagaacagcatgcactctacctgtctcacagttgtatcaatgattaagtgaaagagtaaatgtgatgcatatttgtaaactgcaaacattatatgattgttgagatattaatacaagcaattcacagtggaaagtgtaggctgcatcccacattctactactgatgtattatggtgtcctgggttggttactttctacccttattgcgtatattaaccttctaagttgtgaggtttaaaaagtaaacatttcttgtatacccattctgtgccaggttctatgtcaggttcttttcccttaaaagtgtctcatttaattatcataaccctgcacagggtagtattcccattttacctagttaagttctgaaaatgtcatgaaaataagcagtagttttccccacaatggcagcaatacctatgtggcatatgtgttactgatagtgttgggactctgttgttattgttgttcttacagaaaatctataaacataataaaaaaatactttgaagaatatgccttggttaatcaagatattctcgaaaataaagaaagctgggataagattttagcccttgttcctgaaaatatcctttcccgtgatcatttctgtgtgagctagttgttttgatctgtgatattataaatgttagacatgtctgcttgtaagttctcatatacttataagtttaatcttttttacacaaaatatctcctgtatttctggattttagtatctctggtctggaacataataaaaaatggggccatgttgcaaatcagttttctcattttggaagttggtcctagaattaacagctaaagaatggtgaattacatagtcaaaatacatgcagaccagggaaaactttacatcataccttatagttattttggcattctttctgttatatcatcactgtatttttacaggggaagatttcaatgatacaactggtgttggtttggtttggggtttttttgttgttgttgttgtttttaagacggagtcttatactgtgttgcccaggctggagtgtg

SEQ ID NO: 69849 - DNA, 1012 bp, Homo sapiens
gtcagccaggctggagtgcagtggtacaatgtcggctcactgcaacctctgcctcctgggttcaagtgattctcctgcctcagcctcctgagtagctgggactacaggcgcacgccaccacgcccagttaatttttgtatttttagtagaggcagcgtttcaccatgttggtcaggctggtctcgaactcctgacctcgtgatctgcccacctcggcctcccagagtgctgggattacaggcgtgagctaccacacctggcctaataaaatagttttttaaaaaagaaagaaattcccagcagagagaccaggatgggtaaagagatgaagcaagaacatggggagcacaggaaacaacaagtaatttaatatacattaattaaggagtttatagatttgttttaaaacctattatttctctcttcctcagaggactttggatttaagcatcgtctctgggtatattctggaaggagaggtgttcattgttgggtctgtgatgaatcagttagaaaactgtcttctgcagtacgttctgggatagttgagtatttgagccttgtaaaggtaagatcctcttaattctaatttgcattgctttagtttctagatgttaccaagcctgatatgtttactgtcaaagaaaatgaaactatcttttttttttttttttgagatggactctcactctgttgcccaggctggactgcaatggcatgatcttggctcactgcaagctctgcttcctgggtccaagcaattctcctgcctcagcctcccgagtagctgggactacaggctcctgccactgtgcccagctaaattttgtatttttagtaaagactgggtttcgccatgttggccaggctggcctagaactcctagcctcaggtgattcacccacctcagcctcccaaagtgctgggattacagacatgagccaccacactggcctaaaacttatctttaatggcattcacattgcagagtaaatgatcttaccaatagatc

SEQ ID NO: 69850 - DNA, 1305 bp, Homo sapiens
tgatcccccgggggctgatcagattgatcagggtggctcagttggtcccagtcagatacgtcataggatcagtagctcatgagatttgttgaccaaaccctctccctgttggtgacccctgtattcacacctgaacttcccgtttccccccaccccaccaaagtcatgtctgcttcctctgcctccagctcaccctcttctgaatggttttgcttgaaacactatattgtggcagagggcaccctgggatacctggtagaaggtattcattttattttgcatttttaattgttttgactttctgttcatttgattttgttgctccctctctcctggaacctagtttactactctcttctgtgttactctgaagttctgtttaagccttgaacatcctcttctcccattttcttggtatgtactcaggaccagctacatcatttgtggagccctcttattcataaattattaaaaatttcaaggtggtggtcatagagcattaaaccaaatatgaggccattcccaacttgttttccgaggggaaaatggtaatacttgtgtggcacccggggttaaacagcagaggctccatgtggccagaggcagagattagtatcctggcactccagtgacccactgggtgactcactgatgccacagcacccgctaggaagctctgctgaaccttagtatttggtcctaaattttatgactccatggagttcccgtagtccatggctagttaggaagaaaggaggtgggataagggtcaggcccaggtgacccctaagaaccaggagatgggtaaaagtttttttttatattctgcttttctgatctgtgagtacctgtttgtctccaggccaaacctttgggcttaaatatctttttcctagacaggtttttgctagtgttgaattttcttcttcctctggcctccttctgtgcccctttccccaagcccaagactgcttaacttccaaagcaaattctagatagacactgtatttattggtatgggagtgggctctatggggtggtctgcacccatctgggactcttttccctaaatcctgcaccaaatgagtcaggaggcagggtgcacagcattagtttcaatgtggttatgcatcataagcttaacatcagaatgaaaatgaaactcgattttgatgtttctttaaaacccttcccctgtccaatccactcgccgcccccaccttgaatagctaaagtctcttatgaaacagagaagagttgttgacgtctaactccttccattaaattaataagtactgacctcct

SEQ ID NO: 69851 - DNA, 1061 bp, Homo sapiens
actcctaggcactgtcagcacgggcatccagaccagcacgagctcctgccagccatacaaagttcaaagcaatggagacttcagtaaaaacagcttcctcacccctgacaatgcagtagacattaccactgggaccaactcctgtctgagcaatagtgagcactccaaagatcctggctttgggcagatggatgagctccagctcgaggacctgggggatgatgacttgcagtttgaagaccctgctgaggatataggcacaactgaggaggtgattgagctgagtgatgacagtgaggatgagttggcttttggagagaatgacaatcgggagaataaggccatgccctgccaggtgtgcaagaaagttctagagcccaacattcaactgatccggcagcatgctcgggaccatgtggacctgctgacgggcaactgcaaggtctgcgagacccacttccaggaccgaaactcccgggtaactcatgtcctgtcccacattggtattttccttttctcctgcgacatgtgtgaaactaagttctttacccagtggcagctgacccttcaccgacgggatggaatatttgagaacaacatcattgtccaccccaacgatcccctgccagggaagctgggtctcttttcaggggcagcctccccagagctgaaatgcgctgcctgtgggaaagtattggccaaagatttccatgtggtccggggccacatccttgaccatctaaacttgaagggccaggcctgcagtgtctgcgaccagcgtcaccttaacctctgcagcctcatgtggcacacgctgtcccatctcggcatctcagtcttctcctgttctgtctgtgcgaacagctttgtggactggcatcttctagagaagcacatggctgtgcaccaaagtctggaagacgccctcttccactgccgcttgtgcagccagagcttcaagtcagaggctgcctatcgctaccacgtcagccagcacaaatgcaacagtggccttgatgcacggcctggttttgggctgcagcacccagctctccagaagc

SEQ ID NO: 69852 - DNA, 1024 bp, Homo sapiens
atgtgcctactgcatgggggccaagccccaccaccctccctgtagttccaactgtgctcctccttgcccactcccgcaagaagctaggtgtgtccctctggggcaaagtccatgccagaagtttacaggagtgggtgtaaaagctagagatggaaaaatagagacagacatgtagcacatccagaggtcctgacaactgcctgtttgttggggaagcaaaccccactttcattttctttgggaaattccaatctcttatggaggaatcctgcctctatcctctataattctgccttgtcaagttcccattttaaaaatgaagctcactgtagcaatgacagggaaggagagacctttggaagaacttctgaaatggttatgggtaggttgggtgtctttaataggggctgtgagaggtaaggtgttgagaagaagcactgggggtagatggggagtctggaccctggccagggcccattgtaggagagagagggctttctgtacctggcggcagcacaagtctttgcttacactttcctcctcagccctctctccttcagtcacaactctgctcccccagttgtagcccactgggtgcctgccttcccctggtggtcagaggaaggtgttcctgttccacccctgccccacccccaccaactgtaacccaggcagcagaggatctcccccacctcctgctgagagtttcagcctccctattagcttgggctggtccagaggcctctcctaggttgggggctctctttagggccagggtaggaagagaggaaggctcttttggtccttctgccatcctcccctcaaacagttactggcccctaaagctgagtggacatcagcaaactgtgcctcttattcccaggatcagtggcccctctggacatgcctctcctggaaggttctgtgggggtggaggatcttgtcctcctggaacccttggtggaggagtcactgctcaagaatcttcagcttcgctatgaaaacaaggagatttatgtgagtg

SEQ ID NO: 69853 - DNA, 1051 bp, Homo sapiens
tttacataacaatataatttgccagttttaagtgtacaaatttgctgagttttgacaaatggagacagttgtataaccactaccacaatcaggatatagaccatttctgtaaccccaaaaagttccctcttgccccttccatggtctagaaatgttaatgggggaaaaaggaaggtgatttaggagtcaaagtagaggaagactaatacgctctggttgcttcagttttgcctagaaagcaggagattagaaaatcccagctgacttggatgtgtatttcatatcttgttaatttaggctgacccactggctccagtttgcctgggactttcctagttttaacactcaaattcccatgtccagagaaccccactgtgtcccacaggcggatcagtacagttggttgccctagctgtgatgttcatgtcattgttcttacacctgagagtgccatctcattttagagtcacttttctcgtgagtaagcacatagtaggcactcagttgactgaatgggtggacatgcaggtaaaccccagatggctgcagattcctggcctagagaacatgagacttgggttttggtgccagctctgccaggtttgcagtggtgtgaccctggaaaagtggttttctcactctagatctgtttcctccactggtaaataggtgatatttgtcacttctgcctctaggacatggatactgctccacctacacatagcattatgttttgatgtcacttccactcagctttctctcttttccttgcccccctccaccttcaaatatatgtagtagatcaataaattatgtaaaggcaggttgataatagaactgctgatgtgccaggcttacgcagagtgcttctgtgagagccatagagtttggaccttgcaccaagcagccatagctgagagttggagaatcaagtctctcttcagttaagtgtctataattacctaatttgttctttctgcatgcctgggagagaggatggtaggcagagggggcttgctgtttttaggaattttcctggctggatgaaggg

SEQ ID NO: 69854 - DNA, 2216 bp, Homo sapiens
tatctggtagttggagacctgagctgtaggcagtggagatggcaattggttctgcagcctgagagttgctctcacacagtgaaggacggtgctgctctggtgtgctgtgtgtccttgccctgcctgcctgtggctctgcccagatgcttcagatcctctgtgttccggagattgcttgacttcaaccttctttaggagctgctcttgtctccctcttggccacttagtttgctggctcagtcactacttgaagaccccatttaatttttctctggcagttatagctcttgtgatttcagtacagtctcatctctcagaccaatctcatcaagaaggattgaagggataactatgaggtaagctggacattggagccgtgtttgctgccacgtcagcgtcttgctgggtgaatgtcaagccataaatgggctccagggctctggatctcatcagcattggaaatctattgcctctcatcagtctgaccaaattatgtagagcattaatgtagagactcccattaatgggaatacaagaggcagctggcataaaacatttctttcactttcctttcccactcagattgcttcaagagaccaacagaacacagggatcaaaaacaaggaaaatttagcaacttcattaccttctaataagtaattcctgttagccactgcatcccaccaaaactagtttatttttcccctcaaattcatgatttttacgtctgttacaaagggaattttgctgatagctctttgggtcccactgttccattttatgctaatagattccattctagggcccagccgtctcttgactgatggtgttccctttaacccttggcatgtataatagaattttggtgaatgaaagaacccaaataggccagatagtccccccaggccctgatatccataaaaggcttgggaatgcattatgtaattgtccttagtctttttgttgttttagaaaaaaaaaacaagatgggctcagatggatgcctacgtaaaaatggttcctagctgtgtactcataacttttctttgaattgagtagtgaaaggaaggaggaggaaaggaaattaaatgtccttctagtattctctggactcaagtctgacatatgagataataacctatattgaaatgccaagaattgtatctgaaacaagagaacagtttgacacatttatcatgccttcatattacatattaactgaaaccaattaataaacatatgaaatatccattgcacaaggcaaaggcacctaaaccttttgtttctttttctacatagcagaaattgattttttttttatttttttaggggaacctatataattatgacccagtgatgtcttttggtgacttaagcttatgaattcaggttacaattgagttgattctagatggttactaccttgaaaaggatgttggtgccttatgtgacacgagccagagcctgctgggaataaacaaagcagattcatgccaacaccaactcgtagctttagtggcagatgggagtggtcacagactcccaaaatgtggggctttggatttccacaccatcccacgtgtgtgtcatcttcctctttcacactcttgatgataatttgaaaatggtgaaatcacctctgaatttgcctatagcatgagcacattcttatgacaacataacaaatagttcataatgtgaatattagaaactgttacagcctgcagttaccataattttccatgtttgtggaattgatattgaaatagcagggctaaggaattactggcaagttttagcctgtgggtaataccttagggttatttaaatatttgtaattttatttaaatgttcatgaatgtttgaaaggaacaaaattatcagggatggctctttgccatgggtcttattttcaccctcttttctgtaagaaaaaagaacaatgtcttaatgtatttttaaagtttttggtatagtttctaattccaattttaataaaagttttatagatatattgtggtctttcttaatgaacataatattttcttgtttggatttcttgttttcaggtaatcagcaatttactcctcagtttcatctttctaatgagatggttttgcatgccactgatttccctttttttcttagccaccccttcctgtcccgagtctgtactggtctactttcatccttggactggatgatttcccaggatg

SEQ ID NO: 69855 - DNA, 1053 bp, Homo sapiens
acaaactcatgttccagaaccagcaagtgctccagagtgacacaccccctaggcccctacatatttattaatatggattatccattaaagccccaggagctgttgttttaagctttgatttagttctcatacatatgatagaaagtcctatttgcctttaggaacatgcctgtaggctcttctgcaggtgagatgtactgggctttttattatattcaactttcaattccatcttaaaaaacatttgtattcttctcttcccattcttccttaccctgcctttgccctttcaggaagggtcagttcccttacctgtgaactatgtatgttcagagtagcattattcctgctagctaggagaagtcatcttgtttaggggatttggatgctttttatacgttctccattttcctgtcattgggtcatgttatctttgagttgctatgaaatcaggaaactgtctccttttcctttcccttcctttgtctacatgctctgtccattcctttcagccttttctcaccacccatactcccccaaatctgggtaatttttaagccttgaaactatgtagtttcttgatacacaatttgtagttatgcagcagccacaatttgcattgccaggaaataggctccaggttatcttcatgcctctgggtgctcattcagctgtcaagtttccatgaacttacacttatttatgattgcgtttctgacctgagatgtatgctgcctgttattgcagtagcattagtttcagattcttttgccattgcaaagtaccccttataaaccagcaatgtcatctgtgaggaagcaaattctcaagtgtctgtcatttacttggttctttttctttgtggtcttcacccttataccctggaaaagtctgtaattaccttagccaggaagatagatggtcatggcaagcgcacagcaccagacttactggctcaccaagatgatggaaaaaggcagatgattttttaaaaagccgtaatgactcctttagaccagccatttagcgtggtaattttgaaaggcctagctc

SEQ ID NO: 69856 - DNA, 1215 bp, Homo sapiens
tatacctttctttacacaataaacatctttctgaaaagctgtaagttgactttattaatggaatcatattttaaatatacttggggaccttaagtaaaagactccgcagttaatttttttctccttcatttctgaatgaactgctgtagattttatttacaaagtaaaaatccttggtcatatagatagtaacctttgagttatcctttgaagggtgattaatctggatttctgtatattggttttttaaaatagtctatttcagggttgttcaacatgtacctttaatgttctgtttgaaccaaataaatttgggacagcagaaaggatagaaacttagagaaatatattctaagaaaaaagtgtgaaaaattaagtaaaaatctgatttcctagttcaattggtgctatatagtaaattaactactgcttcccacacaaattatttttaccaagtatagatgaaaaagaatgtcttctgataactcttctcataggttatgtcctcacagttggattcatgagttttgcagtatgttacaagtatgggcccttggagaatgaacgaagtatcaacctgctgacctggaccttgcagctgatgggcctgtgtttcatgtattctggcatccagataccacatattgcccttgccattatcatcattgctctttgtactaagaacctggaacaccctattcagtggctgtacatcacctgcaggtgactgaaaggcaatgtaacttaatattgacaggtacattgtgggatgcagttgcagcaagaggatacagaggtgttgacctgggagcttctttgttaatgaaaagtcattgtattgtacttccacttttgttccttcccgagtctatttttttttttttactttctataggaatttttatatttttattctagtcattttatataaaatgtctagtaaaatgtcatgtgttcctgttaccacaaggtggtgcaaattctatcactgtttttttgagatggagtctcgctctgtcgcccaggctggagtgcagtggcgtgatctcggctcactgcaacctccacctcccgggttcaaacgattcttctgcctcagcctcctgagtagctgggattacaggcatgcgccaccacattcagctaatttttatatttttagtagggttccccatgttgaccaggctggtcttgaactcctgacctcaaatgtca

SEQ ID NO: 69857 - DNA, 1032 bp, Homo sapiens
ttataaccaacatttactcataatcagtggcttgtgacaatggattgaactcagcctgtcattacggaaaacatttttagttttctggggcagtttatgcctggcaattttcttaatattatagacctttgctttgtgtgatctctaataaatagctgtattgataactctttcagtttggaagtcttttttccctctatgttctgccctaatagtagattcagatcatgttaacaagaaggtattctaacagctgtctctctgtaacatgtgcagtgttatttgcccaattatgttttagccactgtatttctatatttctgataagctttgtggaaaactggcaccattactgatttggttgttagtctgagggttttttaaaaaattgtatttgtgaaaaattaaaattcctacttccttttttctcatcctgattttatttgtgttacagatccgagtaaatagttccagattggttcgagtcacccaggtggagaatgaggagaaactgaaggagctagagcagtttagtatctggaactttttttcctcctttttaaaagagaaattgaatgacacctatgttaacgtgggtctatacagcacaaaaacctgcctcaaagttgagattatagagaaggacaccaagtacagtgtcattgtgatccggagtaagtctcacctctgtttttctgatggattctgtagtgataaggactgagttctgaagggtataattagtgagactgagaagtcagcctaagacagctccagttgggttctgattataaccctgagtataccactgctctaaacagttcatggagacttcacccctatcagacaggcctagaattgaaactccacctcaggaaattctgagtacctccttacctggaactgtgaagacttttattcttttattcccaattacattgtgctgctaatgtccctgagcatatatgccaaatactcttagagtaaatcagatagacgtgttctaccttctggacacttctagacaaaggt

SEQ ID NO: 69858 - DNA, 1051 bp, Homo sapiens
tgtgtgtgcacgcacacatacccctctttctttttttatttttattttttattttttgaggcagagtctccctctgtcgcccaggctggagtgcagtggcaccatcttggctcactgcaatctctgcctcccgggttcaagcgattctcctgcctcagcctcccaagtagctgggattacaggcatacgccaccacacctgaccaatttttttgtattttttgtagagatggggtttcatcatgttggccaggctggtctgaaactcctgccctcaggtgatctgcccaccttggcctcccaaggtgttgggattataggcatgagctatcgcacccagcccccttctttctttttaaaggccttatgccttctttgggctggaaactgttatgtgcctgtgaggatgtaaactcttttgccccactgttcctattctgattctatatgagatatttcataaacccccgagctgaagaattactttggtctcatttatttcataacactgttaagtcacctggcaaacaggaatgtctggctgtaacagtgattgtacaaaataggtcctttcagaaatgtcgtagttgttataagcatagttactgataaggacatttgttgttcacatcaaaaacataagggtggacttgtggatttgttttttttttttgagacggagtctcgctcagtcacccaggctggagtgcagtggcacgacctcggctccctgcaacctctgcctcttgagtagctgggggccatgcccagccaacttgtggatttttaaaaaaaattctttaaaaaaaatgtctgacaagccgggcgcagtggctcatgcctgtaatctcagcactttgggaggctgaggcgggcaaatcacttgaggtcaggagttcgagaccagcctggccaatatggtgaaaccccgtctctactaaaaatacaaaaattaactgggcatggtggcgcacaccctgtagtcccagctactcaggaggctgaggcagaagaatcgcttgaatccaggaggtggcggttgcagtgagctg

SEQ ID NO: 69859 - DNA, 1034 bp, Homo sapiens
gtcctatcagggtcctactcataaagcgatctcaattgtaggcgtctcataacagaaaggtcgtgataaaaagtaaccgaaagaaaacggaaggaacttcagacagcttctatggaaataccgagtttggtcaaggaggcctctcccattccgattttctattggttaaacttaccatcaatcacaccagttgtaaataaactgaagacggaagcatgttgttagcggggtgggatcttcctgtcgccactgctagggtgagaacccattttccaataggctgaaagctgcttttcccgccctctctcttcagttgctaaggggcgggactcatagggcccttggagggctgggtgctcgaagccctgcccatcccattggttgataggggcgggtttcgtagaggataggctgctgtcgttgcccgttcggagttagttgctggggtaaggcacgtgaggaggaggtggcttgaggcaaccatggcgggaggaatgaaagtggcggtctcgccggcagttggtcccgggccctggggctcgggagtcgggggcggtgggacagtgcggctactcttgatcctctccggctgcttggtctacggcacaggtaccgcccgggcagcagctgccaagggggcaggtgccgagggggttatttttggaaaagggattgtcccgagggcgcgggccgttactctgcagaagggcggtggctctaccgagggccgccggcgtagtgtggtggaagaaacttggcaggctagtgggcgtcgggactgagggtctgggccctgaagcgggctggggcagcttccagagtggggaggagcctgaagccttttggcggagacaggaagggaggcctagactggttgagaagcagtcctgggggctgtgtctcgttgcagaagccttgagtttcttggttaaaagcgagaaaacctggggaccattctgggcaggcagagcagccgcgggaaagggaccatctcattcattcggcaaatcagcaaacaccatctgagcgtatgc

SEQ ID NO: 69860 - DNA, 1032 bp, Homo sapiens
ctgactggaagggaagttcaggctctgagacacaccccaacatgcctgcacctgcagcgcgcacacgcacgcacacacacatacagagctctctgagggtgatggggctgagcaggaggggggctgggtaagagcacaggttagggcatggaaggcttctccgcccattctgacccagggcctaggacggataggcaggaacatacagacacatttacactagaggccagggatagaggatattgggtctcagccctaggggaatgggaagcagctcaagggaccctgggtgggagcataggaggggtctggacatgtggttactagtacaggttttgccctgattaaaaaatctcccaaagccccaaattcctgttagccaggtggaggcttctgatacgtgtatgagactatgcaaaagtacaagggctgagattcttcgtgtatagctgtgtgaacgtgtatgtacctaggatatgttaaatgtatagctggcaccttagttgcatgaccacatagaacatgtgtctatctgcttttgcctacgtgacaacacaaatttgggagggtgagacactgcacagaagacagcagcaagtgtgctggcctctctgacatatgctaacccccaaatactctgaatttggagtctgactgtgcccaagtgggtccaagtggctgtgacatctacgtatggctccacacctccaatgctgcctgggagccagggtgagagtctgggtccaggcctggccatgtggccctccagtgtatgagagggccctgcctgctgcatcttttctgttgccccatccaccgccagcttcccttcactcccctatcccattctccctctcaaggcaggggtcatagatcctaagccataaaataaattttattccaaaataacaaaataaataatctactgtacacaatctgaaaagaaagacgctctaactgctcagataggtgctgcggtccagcccccagctggaggagaccctgagtccaacccaggcctcccgagggggc

SEQ ID NO: 69861 - DNA, 1037 bp, Homo sapiens
cctcggcctcccaaagcgttaggattacaggcgtgagtcactctgcctggccttgattataatcttatgggaccactgtggtctgtagttgacagaaatgtcgttaatgtggtgcatgactgttattattattttctgtcctgcccctgagagccactgtcacttctctgctgtattggtttttgtttactcatctgttttggccttgaaatggcctagacatttttcttcccgaagtatgacactcgggtgcttattaacttagtcaagacacaacatctcccttcccagaaggtgaggcgggagtgaggacttggggacttaagaactaccaaagttcagagtccaaagaaacattagaaattggctaatccacccccataacacgcacattttacagatgagaagactgagctcagagcatagaaatagcttgcccaggccatgactaagtcaggataaggagctggagcttgtttcctcactcagtggtcctgactttgcaccactctgcatttgcctagcctgccttcctctaactgtgctctccctacttccaggcctcacctgcagatgccccccagcctgggccagatgagcctgccctttgaccagcctcacccccagtgagtgacaaagcccctcctgaccccatgtgcctcttctttcctggccttgccccgctctccttatttccattgctggttcctggcaggggcctgctgccgtgccagcctcaggagcatgctgtgtccagccctgaccccctgctctgctcagatgtgaccatggtggaagacagctgcctgagccagccagtgacagcgtttcctcagggcacttggtgagtggcagcttgggagtggaggctgggtggcatctaggggagtgggcgccatgcctactccactgcttctcccatctccttgcaggattggtgaagacatattccctcctctgctgcctcccactgaacaggacctcactaagcttctcctggaggggcaaggggagtcggggggagggtccttgggggc

SEQ ID NO: 69862 - DNA, 1831 bp, Homo sapiens
ctgtaagatggaattattataatccctacttccatagcctggtaaagagcaaataaatatatggaaaggcttgaaatagtggctggcacgtgtaagcattaggattggtcgttgtcattgatggagtctcaggttcggtctgatcctcagccctgtgattctgtcgtgagggcactcacagctcactgcctgccctaaacaggctccagctctggccctccctcggctcacacctttccccctctccccctaggagatcctgctgggccgtggcttcaccttttggcagtggtttgatggtgtcctggacctcaccaaacgctgtctccggagctactggtctgaccggtgagtccccaccctgggtagtctgagcagccatacaccagtcacctccatactcactgcccatgccccatcctctccttcatcccggccaggctgatcattggcttcatcagcaaacagtacgttactagccttcttctcaatgagcccgacggaacctttctcctccgcttcagcgactcagagattgggggcatcaccattgcccatgtcatccggggccaggatggtgaggccaccccagccagtcctctgtctctgtgcctgtgccctctggggtttcttctgggaatgaaatgtcctgaccttcctgatgccgatcctgatcttcaggaagttcttccagcttctcttcttccttctgtggtctaaatgttcaccttctcactgtgagctctgtgggaacggagactagtgggtctctctccctcaggagccccaccctaggtcctctctcccttgccttggtggagtgagaacaggtcttatggtaggggttggggaaggggaagaaagtccggacagagggatctcagggtctccttcctaccataggctctccacagatagagaacatccagccattctctgccaaagacctgtccattcgctcactgggggaccgaatccgggatcttgctcagctcaaaaatctctatcccaagaagcccaaggatgaggctttccggagccactacaagcgtgagctggaactggcagctctgattccttcctgtcacccacttcctccctgctccccgctgccctcctctccctgcccgcgtgtcatcctgatgtcactccctatttcatagctgtgcttctcttacttccccatgatccatgcccaccttttccacctcccttcctccctaaccccagagcactccatggctgtcttttccttctcacaacagctgaacagatgggtaaggatggcaggggttatgtcccagctaccatcaagatgaccgtggaaaggtgagtgtggtggtatggacagtgggtaggtcaggggcttagtgcttatctgcaggaaggaggggtggcatcaacccttggtcagtcacatgtacctccttccctcctccagggaccaaccacttcctaccccagagctccagatgcctaccatggtgccttcttatgaccttggaatggcccctgattcctccatgagcatgcagcttggcccagatatggtgtaaggagctggaaagacaggaatgggagtggtctgtgcagatgggctaatcttagcatgggcagctgggagagctggcactgggggctgaacagggaatcttcctttccatgagagggacacctgttcaaaagcagggtgtggtggtgtccaggagaagggctggcatcagggggtctgttttctttccccaggccccaggtgtacccaccacactctcactccatccccccgtatcaaggcctctccccagaagaatcagtcaacgtgttgtcagcc

SEQ ID NO: 69863 - DNA, 1028 bp, Homo sapiens
ccacgcgggcggacaagctccggcgtgtcccctcgggtgtccctgtttactccgagcccgggagcgaggtgggggcgggtcctcgcggtccctccccaaccccgccccctccttcgcaggccccaatcccagtccggtcttccaaagtctccaaatcaaagctcagcctttccctgcaccttccccgcggactggcggtccctgtccccaccccgggcagaggaggcaccttcagggttcccctagaaaatcgagcctcggcccagaccactgagtcccggacgcccccggagggagcctgaaatcctagagtatgacactgagtttcaaaggggagccgctcagctctccgcccactgcccaatcccaccctcgaccccttctgctctctggagcaccagggaggagggcccagccaggggagagggcgccccaggccccaaactagccagcgagtccccgggaccctcactcttggaccgctttccagaactccgaaccctgtcgcgggtccgcgtcgccctcccccgggcagcgcgtcaaatcggcgcatgcgcactcactggattgccgcgtagctctttctccccccacccaccaaccttttttctttccccgccccttccctccctccctcctcaacccgtcccctccctctcccccatcagcccccccctcggcacttcagtccggggaacagcggtgcgagctccaggcccatgcactgaggaggcggaaacaaggggagcccccagagctccatcaagccccctccaaaggctcccctacccggtccacgccccccaccccccctccccgcctcctcccaattgtgcatttttgcagccggaggcggctccgagatggggctgtgagcttcgcccggggagggggaaagagcagcgaggagtgaagcgggggggtggggtgaagggtttggatttcggggcagggggcgcacccccgtcagcaggccctccccaaggggctcggaactctacctcttcacccacgcccctggtgcgctt

SEQ ID NO: 69864 - DNA, 1025 bp, Homo sapiens
tagtaggagttagaggaagacaaagagaaaacatgtcaaggcctaaatgcaccccccttcaccatcactctgtcatcaaagccagggggtgctggtgtctgatgagagtaaccaagaatagcaaaggctttgaccctgactcccaggaacaggcagcctagaggacttggaggggtgcagtaaaatgtgcttctggatcctccccacccccaccgcagatacacagtgtctaggaactacccaaagccaccccctgacacccccaggcacatagaccatggctgagggtctgggccagatggagactgatgctagggaaggaagagcagtactaggggactttgggttcacagagttggcctccatccttcatttatatccccttttctttccttgccctagcccctaagacttgcagccccaagcagtttgcctgcagagatcaaataacctgtatctcaaagggctggcggtgcgacggtgagagggactgcccagacggatctgacgaggcccctgagatttgtaagtaccttttctggattcttctccccaaacccttaacttatccctcttcctttggcagatgtttgggaggaggacagctgatccctagcctgatgtggaccttgctcagtgattgtatttgtccatgacacagctaaaactgtcctttacaccccttcaaaatgcttggcatggtgcctgttgggcttagaaatggcacctcagatttctccctcaagtgctgcaccccaagacagtgttctctgggctgacagctttgctagaagatggcccggcctccctttccttccagctcttcccttattccacctctcagcctccctgacccttgatgattggccccaggtcttgtcggatcctcagatcttcctctgtcctttggctcccaggccagaggccactggcacttgctcagccccataccagaagccccacccctgtgctcttcccgctacccccgccttcccctgcccccagtaagtggtgtaatcggaggc

SEQ ID NO: 69865 - DNA, 1009 bp, Homo sapiens
aggtgcatgccaccatgcctggctaattttttgcatttttagtagagacggggtttcaccatgttggccaggctcatcttgaactcctgacctcaagtgatctgcccgcctcagcctcccaaagtgctaggattataggtgtgagccatcactcccggcatcatcaaaaccttttactgacctcagtcgtcatcaaaaaccaggctgtcttcagcctgtctcctgagcatagaatgttgaggcactggggtccatgggaatggggcatttggagggtggactctactgaaggcctagtttctacctccacctgtttgcctacaggtgtgtggctactgtggggaatattgtaaaagagttccaggtggaagagtctaactagccccgaggcctcctgagatctgaaaccccagttttatctcccctcatccccagtgaacagctgaccagagagccaccatagccagcttgttcatgcccacccttctgtctgccctcaggtccacagagtaaggcccagcgatgccagccaaacgagcataactgcctgggtactgagctgtgtgttcccatgtcccgcctctgcaatggggtccaggactgcatggacggctcagatgaggggccccactgccgaggtaaggacttttccactctctactctcccgtctggatgcagcatattatcagcccaccttccgaggactgtcctggcaccttcagtggggatgaggccttgtcctggtcccctgcctagatttaccttcagagagcagatgaaattgatgtgccccttgggcctggagcttggtcagacagccctgtgggcctcagccgtgggctgtagcctgggcacttccctctggctatgtgttcttggactagtcactacctctctccaggtggcagtttttcttctgtaagatgagagatcagtgttttcatacttttttaaaaatagtatgatcctttcttcaaaaggttttctgcatgaaacctgagtgtgaac

SEQ ID NO: 69866 - DNA, 1054 bp, Homo sapiens
aagaaaagtaagttaattgaaataactggtaataaacagtagcgcaagctgtacataagcatggtagacattttgaaagtgatacacaaaagactaaagttctgaaaattgaggcccagagggatcaacaggcctgatagtcccttagtcaggaaccaggcctgcgcactctcacccccacctctgaccagtctctcagctccagaggcctatggagcctgtaacccagctttgtccagcctcctgccaggctgcccctgggcaggcctggtggtgcagtctaccgaccccagcccagccctgcatttcctaagctgagctcctctgatctgtattcccttcaccttggaggatgccaccactgtagaaagaatgaggcagactgcaagattggggtcctgggaacatgggtgtgtatggtgaggggaggttctgaggttgtaaatagaggccttgaaggaaatcgggtttgctgaagtcactcaggagtttggactgtgtgtgaaaggatggtctgaaggggctctcagaggtctcagggttcccctccctgcaccatgctgcatggggaagaaggaggtggctggggagctcagcaaagggcccctaggctgcaggcagcaaggttgcgaaatgggtcccaggtccagctggccaacttcacttttcccttcctctccctttcttttatttatttatttttttagtgtgtgtgttttcgaaatcacaacaggaaatggggtagtgatttgtctagaggggaggcaaagaaggggcagacagcagtccctctgagtctaatgaactggctgctgctgctggaaggggtgctacctccccactgtgctgggcacccctggaccctctcagcctcccaccctgcctacaaagcacttccagacttcacatgtgaaagctaaccatgcccatccttggcctttctgacccatgggatgccaggctgtttggggaggggtggctctagccaccccactctttggccttaggccccctgcatcctggcacttttgcttcccattcctgttctgagttt

SEQ ID NO: 69867 - DNA, 1445 bp, Homo sapiens
actttaaaaatttatgccatatgtccagcttccagtcagtgcttctggttagcatgagataactagatttactgtagatggtagataaaagtccagtgaaaagcaaagatgtgtaatgttttggtagcctcagtgctcttatcccaagtaaaagcaaagttaaaaaaaaaaaaaaactggactgagctagtggacctgtgctctctaccttttggtgccccaagaagatggtcccttttcaaggatgggctagaattgggaagtctgtcagtcaaccagccagccagcatttacgcaagccctcctgtatatccactctgagctaagcatgggggtgttgggtgggagggcgtccagagaaggtgggcttccaggtgtgggttctcaccagcaaagggtgggcatctctgcaagagggcctaccccaccccatggctctttcattcgtactctccagacgtggaacagatggccatcgactggctgacaggcaacttctactttgtggatgacatcgatgataggatctttgtctgcaacagaaatggggacacatgtgtcacattgctagacctggaactctacaaccccaagggcattgccctggaccctgccatggggtgagagtggcaggcggggttctggccctggaaggtgggaggctgaggctacagtggtaaggagggtgcccaatgtccagaccccatttaacatgcatcttcccacaggaaggtgtttttcactgactatgggcagatcccaaaggtggaacgctgtgacatggatgggcagaaccgcaccaagctcgtcgacagcaagattgtgtttcctcatggcatcacgctggacctggtcagccgccttgtctactgggcagatgcctatctggactatattgaagtggtggactatgagggcaagggccgccagaccatcatccagggcatcctggtgagggagctactgtctgaggttttgtgggggaaccatgatccagggccttctggtgaggggggaagcctctgtaggggaaccgttctctgagtctcctggtaaagagcgtggatgccccaggcctctagtgggagtggggtgggcttgaatactgcagagaaaggacaagatacgggttccactgtgatgggaacagtcattttagaaacaccacttctgtttacttcctgtttctcatttgacccttataataacccctagctgatgaacagggaggtggttcagttccctttcagcagatgaaaaagcaggatcaaagaggttaggtgatttgcctgtgtttacaaagccgggtgatagcactggaacttgttctagaagccttgctggctcagaggtggcatctccattgtgggataattagtgtgagcaaccagcccagtttgcctaggactgtcccagttttagccctgaaagtctggtaagccagc

SEQ ID NO: 69868 - DNA, 1031 bp, Homo sapiens
aaagtaactcatcaggaaaagattaggggtccctataccaagggaactgctatttaaaggacacttggagtgaaggctttggctaagtgaaaaatcacttcctaatttattcattttgttagttcaggatttttaggcctaggatatgatgtcacacttgtgcccagagccacatgcccgttgtttcagctctccatgcaggcacgggccagatgccctcacacgagagcccacatcagccatgtagtttaccatctgccacgtgtggttttgagaggctagccctgatacaaatggcagcacacagggctttcccctattccttttccagcctcctgtccctacccccacccatctgtctagggccccagagggtccctgcacccctctgtagcccagactgctcaaaggtacctgagtccgggagggccagaggcaggcagctttgaacttcctttgaagctgttcatcactggtccctcttcccccaacaggcatccacaatgtggagggtgtggccgtggactggatgggagacaatctgtactggacggacgatgggcccaaaaagacaatcagcgtggccaggctggagaaagctgctcagacccgcaagactttaatcgagggcaaaatgacacaccccagggctattgtggtggatccactcaatgggtgagtcctcccaggccttggggtgggaggagctgggagtgtgtgggcctcagataactggaggatgaaatggacagggaagcaggggaaggcaggtgaggcgggatactttagcaggaatgagagtctgcaaggggagaaggagtccctgtcttcagggaaatgggagtgattccttaaacatagaagaaatctgatcctgtcactcccagttcagggccttccaccagctccccttaccctgagaatgaggcccacgttcttgtcaggcctgcacagccccacagtgtctgcctggcccttgtctgacctcatctgcatcccgcttcccacacttgaagttctgtccccactgc

SEQ ID NO: 69869 - DNA, 1320 bp, Homo sapiens
tcaggtgtggagcggggctcagatcacacgaggcacccctcagtcaaggaggcaggggagacgagggggccaggttcagtggctcatgcctataatctcagcactttgggaggccaaggtgagaggatcacttgagcccaggagctcaagaccagcctggccaacatagtgagacctcccactctttacaaaaaaaatttaaaaaaactgccgggcgtggtggcgtgcacctctagtcccagctacttgagaggctgaggtgggaggatcacttgagcctgggaggttgaggctgcagtgagccatggtcatgccactgctctccagcctagacaacagagcgagacctgtctctaaaaataaaatgaaaggagcaaaagaatttagggcagaggggatggagccctgagcaggagtggggtctgctatccccttcccagcctgggaaactgagagggctgagcttgcaggggacagagcatagctctagactggagaggaggaacaaggcagggtagatctcctcctgggaggataccagagaccccttgagagaaagagtaaagcatccagtgagaccagagagatggttttgaattctctaagagaaatggttttggatccttggaaataagggacaccaaaggcagagaataatagggaagaagaggcagtgaagagagggtcaggacaatgagtactcacacccatccctgccccccagcccgcacctgcccccccaaccagttctcctgtgccagtggccgctgcatccccatctcctggacgtgtgatctggatgacgactgtggggaccgctctgatgagtctgcttcgtgtggtaagagggatgggcagagggagtcaggctgggcctgggggaggggcatcctgagagcatgccagttgggggtgccggagacacctgcaacccagcacttgggtggccttgagtgagttaatctcggtggcctctgtgagaggagagccccatcatcacagcattgtgtctcagcaaactcatgcaggaaaagcactcagcacaggtcctgtgtctgctgactcatggggatgagtgagtggagtttccagccgaggcactgctgcggggccttccccacccttcctgactgggctaagggctgctggttatgggagggccgctgcactcacctgcccagtactgtgatgctgtgtaatcgtgaaggccctactcagctactctttcttcctcacagcctatcccacctgcttccccctgactcagtttacctgcaacaatggcagatgtatcaacatcaactggagatgcgacaatgg

SEQ ID NO: 69870 - DNA, 1048 bp, Homo sapiens
gtattcagcagtgccagcctcagggcaggcctgtaaagcttgtctcaagccggccacgcctgcaccccacctacctctctccctccaaaactagagaaacccctgcctttcccccaaaagcaagcagacccctgttcccacacctgccagaaaggggaaatgaaatgtttaatgttccctgcacccagcctttctgagcttcagtgaggggccctccaggagccttctcctcctcctcatcctgaccacgtgggccatggtgcatgctgcagtctatgcagtttctgtgtcttttctgtttgttattttcccagtgggggggttagggtgggctgagggtgggttctgggcagggggcccaagctgggatcacagagaaggctgctccaccaactcccgctttgcctctccccttcttcccccaccgccagacaatgactgtggggacaacagtgacgaagccggctgcagccactcctgttctagcacccagttcaagtgcaacagcgggcgttgcatccccgagcactggacctgcgatggggacaatgactgcggagactacagtgatgagacacacgccaactgcaccaaccagggtgggcaccaggggcccgtggggtggggatgagatcgagccccctgcatcagacacccagcctatccatctgtctttcagacccacggtgtgtcggccaccatctgggagccagaggtagcctaggcatggctcttgtccttcaggagctcccggtcctgtgggagagggaggttgccgaaaaatcattgccacacgctgttaatatcatgcgctttgcagttggtggccttgggtttgagctccagctctgcagcttattatctgggtggccttgagcaagttacttaatctccatgggcctctgtgagtttcgtctgcaaagtggggtaataatagcaccaacatcacagcgctgatgtgggagtttagtgagatcacgcacgaaaagtgctcagcacacggcctgtgtttggtaaatagtagcttgagaaaaggatgctgcaggca

SEQ ID NO: 69871 - DNA, 1052 bp, Homo sapiens
aacctaagctccatgagggtagggactttgtctggttcagtgctggccccaggacagcgcctggcacacaggaggcactcagtaaacatttgtggcatgaatgaatgaaatagaggctaaggaggtgggcatttgggctcaggccttagcaaattgcttctccagctgagatctccggtgtcaatggggggattagatgaggtgattgtggggcccttggaggtgtgatgcctcctgactctactactgagttggtgcttccaaggagtgtcagcaaagcttggcagactctccaggcctgcctctgctcatatccccaggctgggcttaccggggtggcagggcacagggatgaggagggctgacctgggcaacccctccctcctgaggccctccactgtccctctgcagccacgaggccccctggtggctgccacactgatgagttccagtgccggctggatggactatgcatccccctgcggtggcgctgcgatggggacactgactgcatggactccagcgatgagaagagctgtgagggagtgacccacgtctgcgatcccagtgtcaagtttggctgcaaggactcaggtgaagaggatggttggagggcgtctggaacagcacaatgtgggcaggaggagaccgtgttgagagcagagtagcggcaaaggggatggcactgtgctgtgtggagtggtgctggggacagtgcaaggcaaaaggcagtccagaggaagcttgtgtgtcatgggtgggggaaggcatgaagggccagagcctgcacagaggacctgagaagccaaaaccctaccagagttgagcttcagcacctcctgctgcagattcctgccttgtttgttgcctatgtgaatttgacccaaaaagcctcggggttcctcgtggaccccacagcgttgcaatcctgaccctattagagaagcccacagggtctggaaggaagggcagggggagccccagtccccgggcctgggccctcatagtgcacctgtccctcagctcggtgcatcagcaaagcgtgggtgtgt

SEQ ID NO: 69872 - DNA, 2414 bp, Homo sapiens
gagacagagtctcgctccgtcgcccaggctggagtgcagtggcgcgatctcggctcactgcaggctccgccccccggggttcacgctgagggtgcctttttctgactttcatcaaagccctgagtgctgacagcagccctggggagaagtgaccgaaagattcccttggggcttgggaatcggggcctgagaggtgaaacctggacctgttgggttctcacaccttggtccttctgtctgtctgctctggccagcaaggcttaggggagggaatggtcccatgctcttcgctgggagggctgtggccagggcccagagggtgggcacctgggcagagctctgagggctgagatcccagctggcatcctcattctgctccatcatgctcttaggtcagatgccatttactcagcccgttacgacggctctggccacatggaggtgcttcggggacacgagttcctgtcgcacccgtttgcagtgacgctgtacgggggggaggtctactggactgactggcgaacaaacacactggctaaggccaacaagtggaccggccacaatgtcaccgtggtacagaggaccaacacccagccctttgacctgcaggtgtaccacccctcccgccagcccatgggtaaggggctcggggcctcgagcagccggaagggagccagcagcctctttagaagctgtagaagctcttaggagaggagagggcagtgagaacaggagcaagtctgtgctgggatggcaggggtaggccggctgttgacagaggcactgtctagcagcagagaagggtctagtagtagcggctgctggaacagggggaggagagtgggcgaggaaggggtggtccatgtagggagcagcaagtcacaggatgctctggcttcttctcttctccaccctgcccccagctcccaatccctgtgaggccaatgggggccagggcccctgctcccacctgtgtctcatcaactacaaccggaccgtgtcctgcgcctgcccccacctcatgaagctccacaaggacaacaccacctgctatggtaggagcccctccctccagagccagtgagcaactgaggctggagggaaggccgcaggccccaggatcccggttgtcagctaaggcagagtcccagtcgggagggtcccgataggagaggctccagagacagccactgtgagaaggggctgcaggtctgccaggggggctgcacccagcggggtatgtccacggagccaagggccagtagcaaacagacggatccagaagaaggcagggcctgaaaccggattggtgggaagcacagaggcagggactgccttcagtgaccagcccatgccccacagagtttaagaagttcctgctgtacgcacgtcagatggagatccgaggtgtggacctggatgctccctactacaactacatcatctccttcacggtgcccgacatcgacaacgtcacagtgctagactacgatgcccgcgagcagcgtgtgtactggtctgacgtgcggacacaggccatcaagcgggccttcatcaacggcacaggcgtggagacagtcgtctctgcaggttcttcctggccctggatgcccaccagtggacatgggcacctccacccgccccttgctcccaaccctggtctacttggtccgagtggtccttctcccagtcctgttccccctcagtgctccagcctggtttcctgatcccttttctccagaaggcacactggctcccctcctgacccactgccctgcagacacccaacaactgactccctacttgtgcccccagacttgccaaatgcccacgggctggctgtggactgggtctcccgaaacctgttctggacaagctatgacaccaataagaagcagatcaatgtggcccggctggatggctccttcaagaacgcagtggtgcagggcctggagcagccccatggccttgtcgtccaccctctgcgtgggtcagtctagggcccagggccggggagcatggggtgtggggctgggaagaagaggaccctgacctttccctcttggcaccctccccccaggaagctctactggaccgatggtgacaacatcagcatggccaacatggatggcagcaatcgcaccctgctcttcagtggccagaagggccccgtgggtacgagcttccctgcccacccccacagcccctccctaattccttgaccagcaggtgcttgcagggtccttcagttgcccctcagcctccccagagccctagcttagtgcctgttctcaccatctgctcccttccctggatccccagccctgggccagactccccggcagtgactcccccttttccaggcctggctattgacttccctgaaagcaaactctactggatcagctccggga

SEQ ID NO: 69873 - DNA, 1069 bp, Homo sapiens
gccaatgtcctgacccttatcgagaaggacatccgtacccccaatggcctggccatcgaccaccgtgccgagaagctctacttctctgacgccaccctggacaagatcgagcggtgcgagtatgacggctcccaccgctatgtgagtctgcggggtgggtgagctggcgggcggctgaggggaggccagggccagggtcagccgtcaaccaagaccgtccaggcacagacatggtgggaacagctgggaggaggtgagtgcctccaggccccagcctcggtcaaccccaccctgtccagcttgctcctcatcagctagacgagggagatagcaggatgcctctgcgggccctcattctgtagctgtcagaggccaggccaggctgtggtccggtggagactgggcaagaggcctgagcgatgctgtgacggtgatggtgctgtctccacaggtgatcctaaagtcagagcctgtccaccccttcgggctggccgtgtatggggagcacattttctggactgactgggtgcggcgggcagtgcagcgggccaacaagcacgtgggcagcaacatgaagctgctgcgcgtggacatcccccagcagcccatgggcatcatcgccgtggccaacgacaccaacagctgtgagtggggctgccgccagctgcctcaccctcctgcctgtcgtgcatggacatacaaacacacaccccacacacacatcgcacataccacacgcaccctacacataccacacacacacatcccacacatactacactacacacaccacaccacatacacacaccacacccctcccacacactcaacacatacacaccacaccatacacaccccccacacaccacatacacatacacccccaacacatacacacacatacacaccccacatacacacaccacacatatcacatgcacaccccacatataccacaccacacacataccacacacacaccacacaccacatacacaccacacataccacacacaccccacacataccacatacacacaccaccacacacactacacataccacacac

SEQ ID NO: 69874 - DNA, 1038 bp, Homo sapiens
tgcccctaccctcaccctggtcactctcctcacttggagccacacagacagccgagagcctgggtgcacgtgccctcagtgggcacgagtacatgccccagcgccccccaccacagacctgcagctttcccaggtgtctcccatgcgccctggggctcactactgcacccgtgatctcagggccctcagactcgaatctctcagaaacactcctcaaagcccacggtgccctgcctaaaagcacacacatcctcaacggcacacctgccgaaaaccccatgcacctggccctcccacagcagccatccccatgccctccccactggctgcaagccgctgtgcctgccgtgactgagcagaggcttgggagctccatgaagtcagtgaatgggtgggtgcactctgggtgcatgcacagcagagaacactctccagccctgcgcccaccctgtccctgctcaggtgaactctctccatgccgaatcaacaacggtggctgccaggacctgtgtctgctcactcaccagggccatgtcaactgctcatgccgagggggccgaatcctccaggatgacctcacctgccgaggtgagagaggcgggggggaggggctggcggggaacccaagcacacaccagggatggtgaccatctcccctacatgctccagcccagccccccaaagccttttgccaagaagacgctgatgatgacctcagctccccgggggaggaggcgtgggcactggggcccacagcgctggctcagaaagctccctccacctccctccccagcggtgaattcctcttgccgagcacaagatgagtttgagtgtgccaatggcgagtgcatcaacttcagcctgacctgcgacggcgtcccccactgcaaggacaagtccgatgagaagccatcctactgcagtaaggagccccctgcagcccctgcctcttccaggcccagagcccaggtcctcctcccccaggcccctgcaggatggagcaggatcaggacccagcttcctgaccatgagttttgg

SEQ ID NO: 69875 - DNA, 2803 bp, Homo sapiens
gggacgggacctgcatcgggaactccagccgctgcaaccagtttgtggattgtgaggacgcctcagatgagatgaactgcagtgagtgacgccctttgctggcacctcctgggctcctccccatcgctcactgcatctcccgccttcaggccctcctgcacctgcccacattcctctctgccttccctcatccccgctgacagcctccatctccctgaggccctgtccccatcccgctcctgctcctgggctctcgtggggttccgagagggggcagtgagcagatggtgcagacagtgccccaccagaagggcaccgttcaacttttggaaacacatgaaggctccatagggctggcagctgccccagtcgggggtgatccagggggaaccaggtatcaccctcacccctgcccccaccaggtgccaccgactgcagcagctacttccgcctgggcgtgaagggcgtgctcttccagccctgcgagcggacctcactctgctacgcacccagctgggtgtgtgatggcgccaatgactgtggggactacagtgatgagcgcgactgcccaggtgggcgggggcaggtgtgtggtgggtggtggcctgcggtgagcagggccctcacacctgcctcgccccccaggtgtgaaacgccccagatgccctctgaattacttcgcctgccctagtgggcgctgcatccccatgagctggacgtgtgacaaagaggatgactgtgaacatggcgaggacgagacccactgcagtgagtgaccactgcacccactcagtgctccaagagcctgctgggccccacttcttagtcccccccagcaaatgcccccttggaaaagggcatccagagccttcaaccccctgccccacaccccaactcttgaggtcagactcagagactctgcctctagctgctgctgagcccccccacagaggggtgctgtgggcatctctcctgtccttcccatggcatcagcctccccaggtgggtgacccccacccttccccatctaactgtggcttctgactgccccagacaagttctgctcagaggcccagtttgagtgccagaaccatcgctgcatctccaagcagtggctgtgtgacggcagcgatgactgtggggatggctcagacgaggctgctcactgtggtaaggaagctgggattgggccgggggaggtgccccagggagggacagaccccacccaactccaccccacacacagacacccctgcagacgacggcgaaccatcacctccactgctagacctgatctacccgctcctaagtctctcagtggccctctctccccctacagaaggcaagacgtgcggcccctcctccttctcctgccctggcacccacgtgtgcgtccccgagcgctggctctgtgacggtgacaaagactgtgctgatggtgcagacgagagcatcgcagctggttgctgtgagtggcggggccacgtggagcgggtggacagcaaatggccacagtctcactttgcagatggggaagccggggtgcaggagaggaaatgcctcagcggggtccactgggggcggagccatagctgtagcccaggtgtccagactcctcatccagtgccctgcccactctaccaggagaaccacaggaggttagagtgagggacggtcggccgctggccaggcagggctgaagggctgtgtccacctctgtccacagtgtacaacagcacttgtgacgaccgtgagttcatgtgccagaaccgccagtgcatccccaagcacttcgtgtgtgaccacgaccgtgactgtgcagatggctctgatgagtcccccgagtgtggtgagccttcggcggtggtgggaggaggccctgccctctgccgggccagggcatcagcctcacaggtccattcctcccccagagtacccgacctgcggccccagtgagttccgctgtgccaatgggcgctgtctgagctcccgccagtgggagtgtgatggcgagaatgactgccacgaccagagtgacgaggctcccaagaacccacactgcaccagccaaggtgggccccagacctggctcccctctgccccctccccagactgcctgagaccccgctgacctgccgcctccgcccctccgcagagcacaagtgcaatgcctcgtcacagttcctgtgcagcagtgggcgctgtgtggctgaggcactgctctgcaacggccaggatgactgtggcgacagctcggacgagcgtggctgccacatcaatgagtgtctcagccgcaagctcagtggctgcagccaggactgtgaggacctcaagatcggcttcaaggtatgcccagccctggggaggagcttccacaccccagacgtgccaggaacgcctttctccactgccttattcattcattcatcccctagacagtggggatacagcagtgaatgagacagaaatctgcttggttggggtctgcctctatctggcaggtagagagccagcagatttgctgacagatgagatatgcagtgtgagaggaagagaggagtgaggcatcaagtaggcaagagatacacaggtctggagttcaaggagaggcccaggctggagagggaagtctgggagttatcaccatagagatgctatttgaatctgtgagcctggatatgattcccaagggagcagtgtaggtggagaagagaggagtccaaagtctgagccccgagctgagcaacagccaggagcagggaagtgaggggaccagcagaagagcctgagaaggagcagctgc

SEQ ID NO: 69876 - DNA, 2009 bp, Homo sapiens
ggacgagtgcagcaccaccttcccctgcagccagcgctgcatcaacactcatggcagctataagtgtctgtgtgtggagggctatgcaccccgcggcggcgacccccacagctgcaaggctgtgactggtgagatgcgcgcttggagggcatgaggtgacccaggctgtgtgggactgcccgggtggcagagctccagacaggcaggagaccagggccgctagaatgtgccaggagctgaggcaagatcctctgtctgcagacgaggaaccgtttctgatcttcgccaaccggtactacctgcgcaagctcaacctggacgggtccaactacacgttacttaagcaggtaccaaacccaggccctcctccccgctgcccatctcccagacccagcacagcctcccttgcaagtctccccgcttaggtccaaccatccctcccccagatgcaaatgtggcccctgttgccacaaccgacttctgctgtccttcactccccaaatccagggcctgaacaacgccgttgccttggattttgactaccgagagcagatgatctactggacagatgtgaccacccagggcagcatgatccgaaggatgcaccttaacgggagcaatgtgcaggtgaggcgggcggccctcggcgaccaacactggcccgcctcagatgactgttttcagatcgtctctccttcccgccccaccaacccaaattgcttccttctcactccactagtcactatatgactgcttgttctagctgctcactctcctctgggcccagacagcaaggactgggagattcctcttgcccttcccctcgctgccagcctcatgtctccttaatcatcaggaagttccctgtgaggtctggccaagcactgtgaggcttggggcgtggtcccattcacctagagccccctctcctagagcctctgctgacacctacacagtgtcaggcccaggactgggcattttacttccatggttctcccaccagagctgtcagagggagctctaccccattttacacgaggggaggctgagcctcacagaggcttgcaggtcctcccccaggtcacccagagctctccctcccctgccccttcctgcaggtcctacaccgtacaggcctcagcaaccccgatgggctggctgtggactgggtgggtggcaacctgtactggtgcgacaaaggccgggacaccatcgaggtgtccaagctcaatggggcctatcggacggtgctggtcagctctggcctccgtgagcccagggctctggtggtggatgtgcagaatgggtatgtggctgaggagggttgggggagcccctgaaagcagcatccaagcccagcctccctgcaggccactggtgcgatgggttacgggatctcccagggctcactgcctacccatcgccaggtacctgtactggacagactggggtgaccattcactgatcggccgcatcggcatggatgggtccagccgcagcgtcatcgtggacaccaagatcacatggcccaatggcctgacgctggactatgtcactgagcgcatctactgggccgacgcccgcgaggactacattgaatttgccagcctggatggctccaatcgccacgttggtcagtgtgccagtgaggctgtccaggcacagcagactcagtggggatggaggtctgaagcgacaggggatcaagttttgggggcaagagtggacataaaaagcggaggatatggcctgaggacaccactcactggggtgtggggttcagagcaccccgggggcttccccagcctggccaccacccagctcccttgggaaggaagaggagaggcccttcccttgtatacacagttctggaggactggccccaaggagggtgggggtgggaggcctgcgattgagaactgcagtgctccccacttcccgaggggagccatacactggcagggcaggaacttgccatgaggcagtctaggtttgaactccagctctga

SEQ ID NO: 69877 - DNA, 1059 bp, Homo sapiens
gcatgatatagagacatagagatccagaaaacaaaaagcaccaaaactggggataaactgttccttcctccgaagaagttgctggcaggaccaaggccagggcttggaagagagagaagacagtgatggtgaactggagtggcaggtgtaagggagggccctcattctcttgcccaccccacagccgaggtgacctgcgcccccaaccagttccagtgctccattaccaaacggtgcatcccccgggtctgggtctgcgaccgggacaatgactgtgtggatggcagtgatgagcccgccaactgcagtgagttgcctggcctggagcccagcttccctccccagtgtctgctgctcacaccaccccgacgtgtgaccccctcagtggctgctccctcactctccccaccctcccggcacactcctggaaggagtctcatcctcaccccatgcccacccgcttgcagcccagatgacctgtggtgtggacgagttccgctgcaaggattcgggccgctgcatcccagcgcgttggaagtgtgacggagaggatgactgtggggatggctcggatgagcccaaggaagagtgtggtgagccgagaccccactccaggaggaagacagtctacctgggtgggaggcatggcacccctggcaggtggagggctgggggccgcctgcttaccggtctcagcgtggccctgctgctgggcttcctgggcctgctgtggggctggggaaggaggcctggctggagctcacttccccacatccacccgtgccccatgtctcccagtttccctatccctgcccctgcccacgcctcatccacacatacctgtgtggagttttccctgcccaccctatgggatctgttcatctccttcccaaggcagctgcccacacacacacccccaaccatgtctcctgtccccaaacctccttatagaccccacgtctcaaaacaccgcctgggctccccgcggctgacccttcccaagctgggatgcccaccctccctgccaggccagcctgaccatgcctgcttggaccctaa

SEQ ID NO: 69878 - DNA, 1316 bp, Homo sapiens
ggcaggtgaagcccgggatgagaaaagactgggccttggagcggaaatcccaactgtgcgggcagatgtcttggctctgccttggtaggccaggcacagggatgggaacccggtcttccattcccagcccagtgctgttcccgcgtccccgctgtggaactacacagcccagtgctgttcccacgtccccgctgtggaactacacagcacagtgccctgccacataccagagaaggagtgccctctgaactcctccagacacccctgaaaaatggcctcttctcccctaaataccagagggggcagtttggccccaccaagtagaaatttaagagacctggttccaatttggctgtgccactgcttgcctggtgacccctctgagcctggaacccccacctgtggagacaggggtctgggtgggctcatggctcattctatctcttggctccccctggcaccagtgcggacctgccccctggacgagttccagtgcaacaacaccttgtgcaagccgctggcctggaagtgcgatggcgaggatgactgtggggacaactcagatgagaaccccgaggagtgtggtgagatttggggcggggctcccaggcttcccagtggccagcaaccacccccactcccaagactaattctggctctgtgtccccctggctgctgcagcccggttcgtgtgccctcccaaccggcccttccgttgcaagaatgaccgcgtctgtctgtggatcgggcgccaatgcgatggcacggacaactgtggggatgggactgatgaagaggactgtggtgagcagggggccgacgagaggcctgcaggggacgggtagtgcacagtggggtgagtctggtcctcgtgggagctgcactggggttagggttaaccaggaggactcgcccaggaaggggaggatccattgctaggagcctgggggcttttcgttaggaaagagaagcccctggggaaggctctgggggctgcctgatgccttaggtcttggaggtggggctgggaacccaaatgtttgacctgctccccctgcaagccttgtcacttaggaattgggagccactgttatctatggggttgccgtgggaggaggaggcaggggagaatacccagggcctaaagcctctgccctcctcagagccccccacagcccacaccacccactgcaaagacaagaaggagtttctgtgccggaaccagcgctgcctctcctcctccctgcgctgcaacatgttcgatgactgcggggacggctctgacgaggaggactgcagcatcggtgaggcccggc

SEQ ID NO: 69879 - DNA, 1052 bp, Homo sapiens
tggggggaggcctctgggctggtggtaggaagcccccgggacagggttgggggctgcacccacatgcgtgcccttccctcccaggccagcctgaggacagagtccttttcagtcccttgggtcttctcggccacccctgcctggccctccccatgctgcctctgcccagggcccccagctgggcctgcttgggcagggatctgacctctgcttggccggctgtcatgcacagccacactctgccctggggaacagctctgccagcgtcggtggctctgaatgagcacactgtggttttagaggaaaagcccctcaacctgctcagaagcagactcccgcctgcttctctgtagaaggacagaatgccctcctcccagtccccagcagtccctgtccccagaccaagaagctggtgtcctgcctgggcctgcctcctctggccctccggcctgcccacactcaccccttctccctccccaggaccatgtactggtcagactggggcaaccaccccaagattgagacggcagcgatggatgggacgcttcgggagacactggtgcaggacaacattcagtggcccacaggtttgtggggcagggtgcaggagggacgggcatggagggggcccggctcgcagagcccagctgctgctgaagtcacacaaaagcaagggatgggatggggcttggactggggcagggcagattggccgtggaggcttttcccgaaagaggtgactgtgagtggcgtatgaacagggtggagctgtcccgggcatggaggcagttctttccaccccgagcctgggttggggaggccaagctctcacagtgctctctctctccccaggcctggccgtggattatcacaatgagcggctgtactgggcagacgccaagctttcagtcatcggcagcatccggctcaatggcacggaccccattgtggctgctgacagcaaacgaggtcagagcccggcataagtcgcagtccccagccctgtccccagccttgccatcctccctactgagccaaaggcctcacttcaa

SEQ ID NO: 69880 - DNA, 1050 bp, Homo sapiens
ccggtgtggggagagagaatttggtctggatgtgttgagtttgaggtgtctgggaaccacaggtgccagtgtcgtggacagcatggccagggcctgagtgcccctcaggtcccctctgactccacctcctcccccaggcctaagtcaccccttcagcatcgacgtctttgaggattacatctatggtgtcacctacatcaataatcgtgtcttcaagatccataagtttggccacagccccttggtcaacctgacagggggcctgagccacgcctctgacgtggtcctttaccatcagcacaagcagcccgaaggtgggggcagaggggagcctgggctggggaagggaggcctgtgggcattgagtctccaagctgtggccctgggacctggtggagagggggtcaccctgggctcacagggctcagagaagggtcctgctcagcatcctccccaccccacccatacctgcagtgaccaacccatgtgaccgcaagaaatgcgagtggctctgcctgctgagccccagtgggcctgtctgcacctgtcccaatgggaagcggctggacaacggcacatgcgtgcctgtgccctctccaacgccccccccagatggtatgcttatgccctcccagtcccagccatgcctcaggaccatctccttcctgtggctcctgacttcccctgaccttgttgcctgtccctctcctcctattcccctggctctgccccttgacgggcccttcctgcagctccccggcctggaacctgtaacctgcagtgcttcaacggtggcagctgtttcctcaatgcacggaggcagcccaagtgccgctgccaaccccgctacacgggtgacaagtgtgaactggaccagtgctgggagcactgtcgcaatgggggcacctgtgctgcctccccctctggtatgccccctcatcccgccacgcctgctccttgcccctgggccccagccccgccacccaccaccccacctcaggcaaatgcccagcccctgcctcgcctccagcctcctttccacaacccagc

SEQ ID NO: 69881 - DNA, 1053 bp, Homo sapiens
cccaagctgctggcgcttccccacaaaggtgctggcacacttcccctgaggcagtgcaccccctgcaccaagattatgcaaacagaaaagctctgttcaacctatggagagccctcatgagggtggggcttgaggcacttctctccctccccaaccacagggcagtgctctggctactgtgagaactttggcacatgccagatggctgctgatggctcccgacaatgccgctgcactgcctactttgagggatcgaggtgtgaggtgaacaagtgcagccgctgtctcgaaggggcctgtgtggtcaacaagcagagtggggatgtcacctgcaagtgagtggggccctcctccacagttccacccagctgggcccctgccctgtcctagccctgccctgcccctcccttcctcagcatcccaggcacgcctctgccagccccagccccagcctctgattccttcctgcagctgcacggatggccgggtggcccccagctgtctgacctgcgtcggccactgcagcaatggcggctcctgtaccatgaacagcaaaatgatgcctgagtgccagtgagttgggcccgggcttcacccaggcatagatcatcgctcccttccccagatttgagcaggaggaccgtcaggcctcagtgcccaccccccgccctgttttcctggcagcagtggctatggaggttatacctactcagccgtgtccctcctttctgcaggtgcccaccccacatgacagggccccggtgtgaggagcacgtcttcagccagcagcagccaggacgtaggtggcaggggttggggcaggcagggccaccgggacctagagcagggggaccgtgtgcctcctgcttccctgagccttggtgactcagtgtcccacctcttccctccagatatagcctccatcctaatccctctgctgttgctgctgctgctggttctggtggccggagtggtattctggtataagcggcgagtccaagggtgagtcacagggattctggaacattctggtcattattttgccatcctagc

SEQ ID NO: 69882 - DNA, 2733 bp, Homo sapiens
gctacagacgggaatcataaagaaaaaagcggtgagtgggcgaactacaattcccaaaaggccacaaaggggccaccactacgcatgcgtagatccctcccgttagctttggcgcctcagcgagctcttctcgcgcatgcgttctccgaacggtcttcttccgacagcttgctgccctagaccagagttggtggctggacctcctgcgacttccgagttgcgatgctgtacttctctttgttttgggcggctcgggtaagaatggggctccaaacgctgggtaatcagtggaaaggaagctcttctcctaccttagttcctagtcacaaactctggggttctcttggcttttccatgcacgtggattggggcctcagggagcggacgtgtaactggggaatccccaagacccctgggcgcgcgtggagttaactgcgagcctgtcctcattctggcgatcagacgccccagggcctcgtgaccgcccatttcacgtggcattaggggagaggacagccccggatgccccgcggacccggtgctggcaaatgagcggagttttcggcctggtctcacaagctgagcctttccggccagctctgagccctgcagatgatgcaaccgagcttcactgcttgcatcaggcaggggtcccggcggcagtgagggctggaaggaggtggaacgggtagggggctaagtaaggggaaagggtattggcttactctcgggcagatccccacccccaccactcccacacagctcttcctcacggactgctaaaggtctcccctcccacctgcattgctctacaatctgtggcctcagcccttgccaactctgcctcttcccccgctgactggggtatcagtttatggtgccctgcaggaagaccctcttgttcctgtgggtgggaaggttctggaatctcagttgccctctctggagttggggagacataggcttttggaggacaagctttgcagagtggttcatggagtgaggtggtgggagatttctgaggtgcggtgcggtgaatggagcaaatcagaaccaccccttggacgttgatctcaagcttggctccagaactggcttttgaaggtggaggtgggggtagtgagaactgaaacaggctggctggacaactggcagcttggtgtggccttagaagcatgagtgagggtggccgggagacgatttgtctggactgttgtgatttcaccctgacttttcctgccttcagcctctgcagagatgtgggcagctggtcaggatggccattcgggctcagcacagcaacgcagcccagactcagactggggaagcaaacaggggctggacaggccaggagagcctgtcggacagtgatcctgagatgtgggagttgctgcagagggagaaggacaggcagtgtcgtggcctggagctcattgcctcagaggtgggacctggggagatgggcaggggttgggccaccatgggtacaggaagtaacaaagttatcttaactgatatttctccaaaaccccctttcacactcaggacctttctttgggctttatcttcctttcttatctccctcaagcaaaggcagtgcaagtccagtttatggggttgggacatttagggagcctccagggtccctacagtttcatctgatcccttccttccttcctcctatgaggaaggaggagcctagaagcacaagtttgagtgggtaggtggcattgaggggccactgctcatggcagatgggtttctgagaatgctgcctctggctttgccccaggcctggtgctgagtgaatggagctttctgcagggagtactcccgctttcagctctggctctggcagggagggactgtgggagtccaggggaaggggctcaataccttctgacattgccccccaccaccccagaacttctgcagccgagctgcgctggaggccctggggtcctgtctgaacaacaagtactcggagggttatcctggcaagaggtgagggctggagggcagtgtcagggatggtgctcccagtgggggaacccacctgtaccttcccagtgttcattgaggagtgaacttcccagtcctttgctgatggttgagagtcctttctctgtgccctcattacccctctcccacggcagatactatgggggagcagaggtggtggatgaaattgagctgctgtgccagcgccgggccttggaagcctttgacctggatcctgcacagtggggagtcaatgtccagccctactccgggtccccagccaacctggccgtctacacagcccttctgcaacctcacgaccggatcatggggctggacctgcccgatgggggccagtgagtatggatgggctggctgatggtcttggcggcaggattggtgtgggaaaggagttatttattgaatacctactgtggaccatacagatggaacaggccttgccctgtcctgcatgtcacagtggatgaggaagataagatcccagttatagtgcctaccacagagtggacagagcagtgaggcggtgtgtcctaggactggtgttctggggacagagaactgtggagttgaagggagtggttaagtccgggggtccttccacccaggccttcttacttcctctcacttcgcagtctcacccacggctacatgtctgacgtcaagcggatatcagccacgtccatcttcttcgagtctatgccctataagctc

SEQ ID NO: 69883 - DNA, 2333 bp, Homo sapiens
acctgctggcagacatggcccacatcagtggcctggtggctgccaaggtgattccctcgcctttcaagcacgcggacatcgtcaccaccactactcacaagactcttcgaggggccaggtcaggctccctgaggtcgggccttgcctttccctgccttcaggcctattcctggggcactgttggcctggacctgagaggaattcattcccacctgcagcccttaagactcctgcccagtctgtgagagttctccttctcttgcccatggtggccatgccctggcaggggatttgtggatgggattgaggggctgattccctctaccactggaatccagtgtaccaagcccacgtgagctgtgcccttggggcccaggtccgccagcttcctctgccttctctgtcccttgtccttcttttcagcttagactctgaccatccacctctcacacaggtcagggctcatcttctaccggaaaggggtgaaggctgtggaccccaagactggccgggagatcccttacacatttgaggaccgaatcaactttgccgtgttcccatccctgcaggggggcccccacaatcatgccattgctgcagtagctgtggccctaaagcaggttggggatcctgtctttgtagggtgtgggggggcaatggcctggaggcttagaccctgcaccttgctaactgatgctggggctgatggaagggaaatgccaggatggaaggagtcaaggctggggtcacagagctatgctgagggtgcagggccagagggtagtgcagggcttgggtccaggcctagggtgacagctgctactgtctcatctccaggcctgcacccccatgttccgggagtactccctgcaggttctgaagaatgctcgggccatggcagatgccctgctagagcgaggctactcactggtatcaggtaagccagcaggtgatgggtgagggcctctgtagcttcaggcagaggcccaggactcaccactccccatttcttacccaccttaggtggtactgacaaccacctggtgctggtggacctgcggcccaagggcctggatggagctcgggctgagcgggtgctagagcttgtatccatcactgccaacaagaacacctgtcctggagaccgaagtgccatcacaccgggcggcctgcggcttggtgagacctggggtttgaggagggaaggggctcccatgctggatgactgccaggtgaccttgggctatgctcatccctccccttgtgcctcgttccaggggccccagccttaacttctcgacagttccgtgaggatgacttccggagagttgtggactttatagatgaaggggtcaacattggcttagaggtgaagagcaagactggtgagtgagcaagaaggagccccgggccagccagttcccactcactgtctgctccctcccccagctgatctcactgccttccctagagctctgaccacttgtttcctcaccctctctctctagccaagctccaggatttcaaatccttcctgcttaaggactcagaaacaagtcagcgtctggccaacctcaggcaacgggtggagcagtttgccagggccttccccatgcctggttttgatgagcattgaaggcacctgggaaatgaggcccacagactcaaagttactctccttccccctacctgggccagtgaaatagaaagcctttctattttttggtgcgggagggaagacctctcacttagggcaagagccaggtatagtctcccttcccagaatttgtaactgagaagatcttttctttttcctttttttggtaacaagacttagaaggagggcccaggcactttctgtttgaacccctgtcatgatcacagtgtcagagacgcgtcctctttcttggggaagttgaggagtgcccttcagagccagtagcaggcaggggtgggtaggcaccctccttcctgtttttatctaataaaatgctaacctgccctgagtttccattactgtgggtggggttcccctgggccaaacagtgatttgtctccctcaatgtgtacaccgctccgctcccaccaccgctaccacaaggacccccggggctgcagcctcctctttctgtctctgatcagagccgacaccagacgtgattagcaggcgcagcaaattcaatttgttaaatgaaattgtattttgcccacggctgcttctgtttgatccctggggacagaggggagcaagggaggggagtggcagggggaggcccaggtgtggggctggagggggtactggcggcagcgggaggcagtaggcttgggcaggg

SEQ ID NO: 69884 - DNA, 1815 bp, Homo sapiens
ctgtcccttctttcctgtatctctgggctaggagaatagaaaggttcatttgtttttctcctagttgccctgatcagagctgggatggtggggaggggaagaaagggctaagagagaaaggccaggcttttgaagacattgtatacagacttagtcagctggacacttctctgctgggctgctgtcaagtccttcctgtcctattcctctcacaaccatgtcctctctcctccccttccagtcctggggcgggtgctggaggtgacagatctccctgagggcatcacccgtactgaggcggacaaactcttcacgcagctcgccatgtctggcgccaagatccagtggctcaaggatgctcaggggctgcctggagggggtgggggggacaacagtgggactgctgagaatggccgccactcggacctcgctgccttgtacaccattgtggctgtgttccccagccccctggctgcccaaaatgcctcccttcgtctcaacaactccgtgagtcgcttcaaacttcgaatggccaaaaagaactatgacctgaggatcctggagcgagccagctcccaataaatggaggaggggaaagggactgtcacagaaggagcaagggcagggtggagggggttgaaggatcctgacagaccatggacagaggcaggaagtaaggaaactgatgttaaactggaacctaagacagtgatgaagatggaaacacagatacctacactggcattggactccttcttgctcccctgccatgggtcctctctttttccctggttgaccccccttgcatcactcttcttcccatcctcttctttttttttttttttttttttttgagacggagtttcgctcttgtcaccccagctggagtgcagtagcacgatcttggctaactgcaacctccagctcctgggttcaggtgattctcctgcctcagcctcccaagtagctggcactacagacacgcgccaccatgcccggctaatttttgtatttttagtagagacggagtttcaccatgttggccaggctggcctcaaactcctgacctcaggtgatccacctgccttggccttccagagtgctgggattacaggcgtgagccactgtgcctggcttccatcctcttctatcatttttttaaatctcttctcctatcataaaattaatttctcattttttggtcaggtagaattgggaaagtcccacactgtcctcctattaccttaacatcccaagcttcctttccttttttggtctttatgaatatatttatatggacagaattaagataaacaaaattgattgccccattctctcacttccccatcttgtcttcctagaccccacagagttaaaacttgggattcccctggcccccccagaacacttgtatattgtttgtttgaggttcgtgccgcagtaacagacacagtatttaattgcacatacagatgtttgctgggtatattcactgtaaattttatttaatctgtttttttgtttgtttgggggttatttggggggaggttggttttgtttttaaatataaaaaaaaaaatctgtcactggacatcagtcactgtttctctgttgccgccctggtatgggtaaagggttggaggccctgggtaggtatagccctacagctgttggaggtgtttgtcgtgggttgggatggctttctctagcatacgcacactattttaacaccattccctctgtctcatcctcttccctgtacacggttctgatagatggctagatctctaatgggaccatggctttgggctctcc

SEQ ID NO: 69885 - DNA, 1887 bp, Homo sapiens
cctacctgctcagcagtcgtgctactcatgtgaaatttcttctatgattattaaccttattgttccttccctttccctccccatctctgcccgcaccccccccccaccccaccccccgcttcccacctctcttttctcttcccttttccacatgcctctctgctggcccacagccagtcccggctctgcagccctctccgcagcctgttcagttctctccaagctcctgtccccaagtccttctgccagtctctccgccccagcagtacaacatggtataaactccattccccctttttgtcttgttcatgtgtggcctgtatctgtaggtatgtctgggtcagtctgtgatggccttgtaagcatgttgtgcttttggagggcatattgaaagctatttcttcttgagggaccagcacaggctgaactatactccatgctaatggcctcatcacagcacatcaaaagatgcttaaatgtaagacagaggaacactgtgttcccccaagtttcaggacagagaatgaaattggatgttggtataacctaggctcctcatctctacgatgtacatcctaaatctaatttgctccctaggcatgtctgaggaacctagtttcttctatacagaatggttctctataatttcctttaaaaataaaaacacaggccgggcgtggtggcacacacctgtagtcctagctacttgagaggctgaggcaggagaatcgcttgaacctgagaggctgaggttgcagtgagccgagatcgcaccaccactgcactccagcctggacaacagagcaagactccgtctcaaaaaaaaaaaaaaatgcagttgcagacttctctggtatcactggcaaaaacttaaactgttcccctgttttaccatgtcagtttatattttaaaaatcctcatccattgcgtagcacatgctgtttaaatcgtttgtactctacaaatcctttgaagatctgatttgcctcatagttgataacttccatcatagttgtaggagccctgaattgttttgctctgtcttaacatctactttttctctagaatcctctccctcctcctacctcttatttccatgttgattgtcctggaatatcgagttcaaaataatctgcagtccagttcacttgtcatctattcctgcccaataagtagcaaaacagctaacttgaagatcagatccttgaaaatggaatgaaactacagaaaagcattgtcttttggtttctgctagttgtgtgtgcgtgtgtgtgtgtgtgtgtgtgtgtattactgtccagggagcagaagggaaaaggaagctaacaaactctaacctatcaccatatgagtgagagatggaacaccatcacccttgctgcttaggaaagagagctgagagagaaggcaattacagcctggccagtcagtcttatcctccagcttagccactcactctgccctccttttggaggtgagaattggaagtagtttctgaagggcaggagaattctaggctagtgtcagagaacaaaggtggaaatgacctccagagggagtaaggagataagcagcaggagtgggagcccccagtcttgctgctgcataggcagagctgtgaaggcacatgaacctagctacccatgatccactcaaggtgttatctgggtcctttattataaaaacaggatttgtggcaatgtaggggcctttttatggttgggggcataaggaaaacaggaaatggaaagactctttaatctttttcgttaagccgctagtttgtcctgttttttctatatacagtaattgtgtcatagctcccatctcccaaggactaaccctaacaacaatcataggccaggcgcggtggctcacacctgtaa

SEQ ID NO: 69886 - DNA, 1020 bp, Homo sapiens
tttaaaaaatgtattgttattattattattttgagatagggtcttgcttatgttgcctaggctggtctcaaacttgtgggctcaagtgatcctccctccttggcctcctaaagtgctgagattacaggcatgagccaccatgcctggccattgtcattaaggtgactatgtttaaaagtcaccttaaggccaggcatggttgctcaagcctgtaatcccagcactttgggaggctgaggcgggtgaatcacctgaggtcaggagttcaagaccagcctgcccaacatggtgaaacccggtccctactaaaaatacaaaaattagccacgtatggtggcgggtgcctgtaatcccagctactagggaggctgaggcaggagaatcgcttgaacccatgaggcggaggttgcggcgagccgagatcgcgccactgctctctagcctgggcgacagagtaagaccctgtctcaaaaaaaaaaaaaaaaaaaaaagtcaccttaatactccgagcagagctgtgctgagatcttcacttactcccttctcacacgaatagagctctttttgaggagagccccatactttatcctgaagtattctctggtagctggaaagcccatgtgtctgcagtcttttctgctgtagtttacattctcatgttacctcccaggctccctcatccctctgcttattagtccagcttggccttagatatatttcttccctaggtgtaagaagcaagtcccaaacactaataccccatgaactagaaactagagtgcaaagaccccagaatggcccagtattgccctatctcaaatattgtgaaatgaagctgaaacaaagaacagtgaagatctaggaaatcctactttgtgtctaaatgtaatttgcatgcaagtcattgcagtcctctatcttagtctaagtcagttctttctatagtcctaactttcttgttctaccaccatctaccccagtaagtctcgttcacttcagtttaccttgctccctactgaa

SEQ ID NO: 69887 - DNA, 1059 bp, Homo sapiens
aaaaatgttcgtttctgcatcctcacctgaatagtaaaatccaaattacttaatatagcataacttcctgactccagtttgccattgctgtctaatttccagatctttccttctttccaaccatttctttctttcctttttttttttttgagatggagtcttgctcttgttacgcaatggcacgacctcggctcactgcaacctccgcctcccgggttcaagcgattctcctgcctcagcctttcgagtagctgtgatcacaggcacccgccaccacggccggctaattttttgtatttttagtagagatggggtttcaccacgttggccaggctggtctcaaactcctgatgtcaggtgatccacccacctaagcctcccaaagtgctgggattacaggcatgagccaccacacccaaccaaccatttcttgaatatggcattagctttgtttcctcttggtcttataagcatctgtcattcttcaaccccagctttcctgctgacccctctttaaatcctttcctgaccctcccaggagtttttgcttcctcatctttgctttcatgcaactttgtcgatatcactgatgtattccttatccttatcagattataattgtcatgtggatgtctatctcccatcagaagttcctgtgctgttggctgggcatggtggctcacacctgtaattctagcactctgggaggcagaggcaggcagatcacttgaggccaggagttcgaaaccagcctggccaacaaggcaaaaccccatctctaccaaagacatcaaaattagttgggcgtggtggtgggtgcctgtaatcccagctacttgggaggctgaggcagaagaatcgcttgaacctgggaggtggaggttgcagtgagccaagatcgtgccactgcattccagcctgggcgacagagtgagaccctgtctcaaaaaaagaaaaaagttcctgtgctgttaagggcaaggactgtgtttcactcatctttatgtctttagttcattatacagtgcttggcacatagtaaagtatgttgtgttgaat

SEQ ID NO: 69888 - DNA, 2084 bp, Homo sapiens
gttcttggttgcttaatgattaagaagcagtgagagctcaacaagacagggttttcaggccaacctggctatcttgaggcatacagctgttaataatcatagacagtgattataacatcaagataaccctgctgtttacagagccaaataagagagggagaacccctttccttaatagttttgcttagggagataggattatgaatatgaaggcaactaggcacagtcaacccccctgctcttcgccatcctgagtcccaagagcatatttgctgaagactttagcccttagagatcctgaaaccaattgttcgcagacagtaacatggaatttccacaaaacaggttggatcaatcctagactatcaaactgagttttccatagttagtgcccctttagttcactatactcttcttgcaactcctggaagggtggccataagcagcacctctgctggcttagacatgtgttatgtggaagacccattgtgggttttatccatgtcattggctcctgccttttagcaatagcaacttctaggagtccttttattttaagaactttcagaaggaactggtacccctctgttccccattattgcttgcatgtgtgggattaccctcagagggtggggaagagaccacagccaatctcagcatcatgtatatggtttcccatccacctctggtctgatgtattaaattagttgccagtgcactgtcttccagatttgcctctgtgttctttgttactgtactggatcttgttctgtctgctcccatcaactcttagttggccagccaactaacaataagtcagtgtccatcctccctttaattcttacccattctttgttattgagagaatagaaatgaattatctcctagcccttctgctaaagtggtgggtgggaggtgctctgaccactatggtctctgcagggggaaccgtgaaggactgagccgcacctcaagcagccgccagagcagcacagacagcgaactcaaatccctggagccacgcccttggagcagcacagactctgatggctctgtccggagcatgcgaccccctgtcaccaaagctagcagcttcagtggaatctctatccttacccgaggtgacagcatcggcagcagtaaaggcggcagtgcgggaaggatctccaggccaggtattacagcttcttttcttccatgtcatacccatcccttcttgcttgtctcctgtgaaacatcactgatatttacttttttttttgagacagagtctcctctgttgcccaggctggaatgcagtggtgtgatctcagctcactgcaacctctgtctcccgggttcaagtgattctcctgcctcagccgcttgaatagctgggattacaggcatgcgccaccacacctgactaatttttgtatttttagtagaggtgaggtctcaccatgttggtcaggctggtctcaaactcctgacctgaggtgatctgcctgcctcagcctcctaaagtgctgggattacaggcgtgagtcaccacgcccagcccatatttactttcaataaaacatttgtcccagtatagtttcctggaaacctaatacagccaggggaagggacatttgaattttggatccattgtccttgcttggatttagtcctcctcattttctttcaaaccttctgcctgattggaaaaaaaaaaagaattgattgtgattagattattttctctgattttcatgtaaggtggaacatccatatcagcccaggtctcaagttatatactaagatgaaaatgatagccactttcattctatgactcttgagattgtagaggctttgtagagcagagggaatccttagagtttagtagtttgtaattaattgataccagctaataggctagaatttagagggatgctgctatggctgcttctctggagctcagtcactggaaaggagcagacactcctatgttccacatgaaagctctgtaaccacccatcagctctcctgctacaaaaccttctctatctatttctgctgctctcttagcagaagggcatttagacctctatttcatcgtc

SEQ ID NO: 69889 - DNA, 1052 bp, Homo sapiens
ttcagctctaaccccctttccaaagggtttctctcttattgactactacacttgataaggactgtctgactaacttggatttgagatctcactcctactactgtagttgtcctttccctgttgtcctttctaaagctagccaaaccttgtggaaattggggtagtgagatttcccattcttggggtagaggattttccatctctctcaagtctttttttcttaggctgtcctgccctgtggttcatctgaaaaccccaggcagagaggaccttgcattgttggtggtagtagagatagatagagtcccctgcattaaaaacaaaaaacaaaaaatcaggattcctgttccacagtctacacttcggggtcatagatcatcccaggataactgtaagaaataggagttttaaaccaactcctatgtgtgaattaatgcacagtgctttacagtcaccagagtatactttatctgattcagttctctcaacatcctaatttggtcagctggattacatgtaagaaaacaaaagcagagagatttaagtggctagcccaagtttacatggctaatagaagcaaaaatggagctgattcttagtttagtgtcctcttcgctacaccacaccagctctctacagatgtcaccccttcctctcttagtagtgttacatttggagccctaatccagattcactggttagaatgatgctcttattagggctatggaccatcagactacatcaaactgtgcagataatagcttgaaggatctactgagtaggtgcagccctttcctctccagaccttttttttttatttccctgagatggagtttcgctcttgttgcccaggctggagtgcaatggcatgatctcggctcaccgcaacctccgcctcccaggttcaagcaattctcctgcctcagcctcccgagtagctgggattacaggcatgcaccaccacacctggctaattttgtgtttttagtagagacggggtttctccatgttgaggctggtctcaaactcctgacctcaggtgatccacccac

SEQ ID NO: 69890 - DNA, 1674 bp, Homo sapiens
gatccccaaagggaatgtttcaggcttttaattttctcattttttctaggccctgaaaagtaactgcttccccaatatcccaccctccttgggtctcaggtcagaatgtctttcattttggccaatgtaggagacagaaatggaaaagccattgaggatgatttccaaaaacaaagtttctttctcttgtctcccttttcccttcctttgaacacactctttaggaccaaggacatcagttattattcccaagttaccaataaattcagagctaaaaaggaaataataattaggttaatactttcctcttcctccttttcacactcctgcctttgtcagcctcttttttttaaacacctatccaaaggctaaaaccaccagatgttctttctcattaaaggtgagaagtcagattgggtatgcgggtatgggtcatcctgtccctggcccctctctccctgttggtggggtgagctttggtttgaggaccttgggtattcatagcatcatggacatccttttcggtcatgccatgctgttttcttataagttattttccgttttctccccctcacctagactggccagaacggatatctaaatgacatcaggttagtaccacttagcatgttccctgcttctcattgagctttgccagtgaggttaatataatcctgtaatgatgcttttctttgatgttaaccaacagactctccaaagaagccttttcttctagctctcacaagagaaggcagatttttaggtacctctgtgtgatctatatctctcctttttatttttaattttattttgttttgctgtaatcttttcagcagagtgggtttgctccatgcatggctgcttgtggaataattaaatttgtggtttttgcaacattggatatttttccccatttaaaaaaatggctcctggtcaatgactttatttttattgttgctgatttcatttcgagtcctaaacaggtggtgaaggggaccaaataggtgtgtctgggataggtacagcttcctcccagaaattagctggaattgggcatttttgaaagattcaaacatatttatgataaggtaaaagaatgggtgtcttctggctaaccttttctgaatctatggaaaagatgtgtagacattattcctgacccagcataggaatattttttcttaaagatatctttaagaaaaaataatacatatatatatatagagagagagagagagagacatatacggacacctttatgtatgtagttttctcttgaggcaatgtaatgtgtaagatgacctcagaaaggacctggccaggcgcggtgactcacgcctgtaatcccagcacattgggaggccgaggtgggtggatcacgaggtcaggagttcaagaccagcctggccaagatggtgaaaccttgtctctactaaaaatacaaaaattagccaggcgtggtggtgggtgcctctcgggaggctgaggcagagaattgcttgaacccaggaggcggaggttgcagtgagctgagatcacgccactgcactccatccggcctgagcaacagagcaagactctgtctcaaaaaaaaaaaaaaaaaagacctaagggacctctctgccttagaatggacttaaagtgtgtccttcatacgattgttcattacttact

SEQ ID NO: 69891 - DNA, 1207 bp, Homo sapiens
atcaaagggtccgagagagaatatttgcccgagaggtaagtgtagcatctgagagttgtcagcccatagcttttagctcttaatcattggaactgtgaatggaatgaaccctccacaaatgtttttgggtttgtttgtttgttttattttaaccaacatcagccaaccctagatttgatctctaaaactaaatgtggcttattgggaagctgcagattttcacttatattgttttcaatacattctgccatatggtattcaaagagaactataacttggagtggctgaatttggtaaatttgcctagactgaaaatagaaatggttttggcagggtctgaatcttgcctctaaaaccctccttctgcttaccctctttcactccctctatccattttaggcatctttgcttctaagtggaagacatagtgttcacacaggctgtacattcatcttgtttgaccagcctcatttttaggatatgttggtgattgttagagcacaggtctggcatccatcctctatgagctccacattctacatgcacagagagtaccactgttctctccagtctctacctgaaaaggaagtctctttcttcctatatttcttaccttgcttcctacaacaggactagctcctagggctaaaagccaacatgaatcagtttaggcaatgttactcttaaatgtgtggactatatcaaatatacttggtacccctgtatctggttgcctttgcctaccagattgaagagaagaatagcagaaattcaggaaaggttgtgggtgtacaagagggaaacaaatctccagaaaatgtagtatccagatatgagcaccatctcacaatcacatgagtaacaaaagagggaaagccagtctcccttcattgtcaaaagatggtcagggttttctttgttttttattttgtttttttttgtttttttttttttagatagggtttcgctttgtcacccaggctgcagtgcaatggcacagtcacagctcactgcagcttcaacttcctgggctcaaacgatcctcttgcctcagcctcccgagtagctgggattacaggcacgcattaccacgcctggctaacttttttattttttgtagagatggggtctcactatgttgcccagactggtctcaaactcctgtgctcaagtgatccttccgccacagcctcctaaagtgctggga

SEQ ID NO: 69892 - DNA, 2984 bp, Homo sapiens
ctccagcttgggcaatacagtgagactccatctcaaaaaacaaacaaaaaaaatttttttaagtattttgcagggaaggggattggggttggggttggttatataattaattcctactctttctgagccttggagatagattctagagagactgatgtttcatgaagtctggccctagcctctcttcacttcactgataggacagatataactatggaggaagagaagttatagatgtataaagtacagaccctgaagatttcattaaaacctgcatgtgactttttggattccttactccagaaattccctgagtgtgagttgtgtaatttaggagagctgtacctaataggtctgcttcctaacaaaacggtctttgtcctcctttcctttcacatttctctccaaatctcagccctgaacagaggttctcagaacatataaaggatgagaagaatacagaatttcaacagaggttcattctcaagagagatgatgccagtatggaccgagatgataaccaggtgaagaatggaaaggggtgggcctatatagagagtttgcagtaagagaaactgggaagggagaagaatttttgtgggatggagaaaactcaaaatatcttagtacggagaaatgtattgagctatacggagttggctttggcttaatgttgagaactgtttatttgttgaactggatgccaccctcttagccctagagagacatggtgctgaggtttgctaggtgatctcatttggcctggaactccttgggtctgccactgacttctaacaccacatcatttggaataaagcaaggttgatccctgcctcagccttgatccaactgttggtttcattcttttttttcctttaatagttagggatttctttgggaaccacaaaaagctactttgtcccacttcaactcttatcctagcttagggctagccttgaactggcaaagttgtgatctaatttacccaattataaaggtgtttctgatccctttctgcaaactccttaatctttttccaactccttccaccaaggtgagtgagttaatttgacatttgatgctgggaacctcagatagatcccctttgtgatccactgctgtgggaataagaagggaacagcctatcccatccctttaaatgggcctggctattgctttgacctgaagcctaccctttagatagtaagtgattatttgcgggttagctaagaagaagatttagatccagcctgcctctgcttggcctccaaaagggattcgatttgaagagcgtggttgagtagagcctacattaatcttgctaattaataactataataatatcttacctctagtgtcaaaattagttttcttgggatattgtatggtcttgagaccaggacctttcctgcttgctgcttgagtatttgagggagtccttttgagaaaagtgccattatctattgtggacaaacacactgggactgattgaaaacaaagaaacatacaaaaagacaaaatttaaaaaacgagaaagagcctttccatcctgatgcccttctccattttcccaaaccctttttctgtggatcaggaattattcaggcctagaggcacattggggcaaagtggagtctgtccctattgtgaacttttcatctctcagcttcaggcttgatccaatagggttgtttctgtgtactttctgtctgtgacgttaataacaagcataataattgctatcttattgagtgttttccctgaactaggctgtgttctaaacacatttgtatgcattatttcctttaatcctcttcacaacccaatgaggatgggggttattatccccactttacatataagaaaactgaggctaagaaatgttaagttacttgtctaaagttatattactgggaggtggcagagctgagattctgcctgacctcaaagcccattatgttctttctactttgccattgatttacctaggggctgaggacaatatagctccttgaggccctgtgtcttcttggaatggaatttataagaggacatttggtaggatttaggttcttgaagctaatgagaactaaatctaggcaaggttgatattcttgaagttatggttacctttggagattggtaaagatcaggaagaccagcctagagcagcaatctccttagttgcttcatgtgaagctttcaaagcctctgggttggaagtcagaatcttttataatctggtgatattcatttgatgagttttctcccttagaactccttgccttcaagagcaggatggataaggacactctattacaccctaccctggacagtgttcaccaattacaggccaggagaggaaagatcatgatgaggatttagatggtaggctactcagaggtggtgatctccccagccatcccgtctggttacctcactacattttctagagaatgtaaggttcttctctatcctctattttcttattttccttgtctatctctctgtctctccccttcctccactgtaccttacttctcttcctttctctgcccctctttctatctgttctccttttctttctctttgtattgctctgttctctttcttctttatttctgtaatttgtctctccccttccccacctccagttaatatagttaagttcaggaaaaaaatgcttaggctttgagtttagcttcgcccttgggatttcatttccaaggccctctttgctgagctgtgtgtgatttgggtcttcaggccatggcattagtgactaaataaggaataatgccaggtgctagttctataaacctcctcctctactgttcagctctgctaaacacctgtttcttctcccgttccagcttccctctgtcctttgctttccctctaaagcagtgttgttccttttcccagggctattttctcgatccttactgactggaggctacctgattactagagggaagcaaccc

SEQ ID NO: 69893 - DNA, 1015 bp, Homo sapiens
gactatctttgcctttaaactcttgtactggtagcaaaaagacatagtccataaaaatgataattgataagaaaaggcaaacaggattaaaaaataatatttgggcatatttactgagattctggaaaattcagccctgactgcccttacctggaatttattttccttaataaaacctgctatattttgatcaggacattcagtaaatacctattgatgatagatggcttttcagtgtaatattgatgtaatactatggcccagattctttcttctgtcattctgatgaggaattttgggatctagcacatcaaggtcattctggattttatgttaaaaccctggaagtttgattttgctttcctattcttttttctcctggttaggttgtggacttctgcttaggattagatagcatgcaaagcagtttcatgtattttaatttcttttgttgtggtggttctagactccagccaggaatatacggactccactggaatagacctacatgaatttcttgtaaatacactgaaaaagaacccaaggtaataacatgatgggtataagaggaaaaggggttaggggatagcaagattccaagaggccaaacggcttcccagaatttttccattcttagaatctaggatgctcatcttcctgtccccctagtatttgtcaggtatagttttatattctgtgagggattcaaaatactctcacattgaggtttctgttttcagaagaattgggaaaacttctgtgaaagaagaatgcagaaacaaagaaatatgaagtcttgggagtatactgattaaaaagcacacattgggagtgatagtaagaagagctaaaataaaaagcacagaaggaaaaaataattgatttgtacataagctaaattataattcctttaaaattgtttataacaagatggaatacagaatgacgattagatttataacgtgtgtttatatgaatatgttgttaacagtgagatttctgatatggtataaca

SEQ ID NO: 69894 - DNA, 1013 bp, Homo sapiens
ttccatttatataaaattctagaaaatacagactaatctgtagtgacagaacagatcagtagttggctggggttagtgtgaagggaggaagagattacaaagggacatgaggaacctttggggcatggtgaatgcgctcactgttttgattggggtgatggtttcacaggtgaatgcatgtgtcataatataaaattatacattttaaatacatgcagtttatgtcaattttacctcaataaagttttttttttttaaagaaatgaacccagggacagcatttattaaataactcttttctgggttaaaggaaggctgctggaaaaaatgtacccgtgtgaaatacgagtcttgtgtatttgttaagtatggatacatacctcctgcttaatgcatttgatgtttctttaggagtccatagaggccactgtattctattgaagaacatgtctaacagtaacactactcaagagaccctggaaataatgaaagaatcagaaaaaaaactggtggaagaatctgtaaacaaaaacaagtttatatctaagactccaagtaaggaagaaattgagaaagaatgtgaagataccagtttgcgtcaggagacacaggtaacgattggaaatgcattgtatgcacactttttttttttcctttagagacagggttacccagctctgtctgttacccaacctggagtgcagtggcacaattagggcccactgcaccctcaaactcctgcatcaagagatcctcccacgtcagcctcccaagtagctgggactacaggcatgtgcaaccacatccagctaatataaaaaaatttttttgtagagacagggtctatgttgcccaggctggtctcaaactcctggcctcaaatgattctcctgtctttgcctctcaaaatgctgggattataggtgtgagccactgtgcccggccaacattctttatacctgaataaaagtggagatgtgtaagaatcagtcacttttagaaacacttgattc

SEQ ID NO: 69895 - DNA, 1058 bp, Homo sapiens
catttacctcttcaggcacgcagttatactgtttttgtttttgtcctttgttttgacactgtaatggaaagaacatggaattttggaaccaagtagacctggatttgaattctagctccttgcctgtagtgtatggccctgaacaagtcacttagtatttctgagtgttgatatctttattttttttggtatcttttttataaagtggagataacactttataccttgagaatattgagtaagatgatctcaataaactgtaaaaaaattcaaagtcatagggatggacccaggttgaggggaaagatgagagtttacaagtctaattttttatttcaaaaatatgttcccccactggtactcagaggcctcagatctaggcacccttcccatccgacactccacaccccagaatgcttctgaatgagcagccaccctggaacacctaggactttaacttttggatcagacacagctaggttggaattctaccattgcctctcttgtattgacttgggaaagttattagatttatctgagctttggtttcttcaactggaaaataccctaacaaagagttgtgttaggattcaacaataagtaaaaagaaaaaaataattaaaaaaaagtcgagaaagaatgcagactttggaatcagacaacatggaggttctggtctgtttctgccacttagtgacggaaccttgatcaggttgcttagctgcacttggtggatatgagttgaagtacataaagcaccaggctcataatcatgctcagtaaacctcagtaaatcatgtaccttttcattttctcctaattcccaatgtcaaagaatggaagaaaaggcttgtgacacaggagcacctagactgttttgtttttaagctaccacttaacccctgtggatgtttgttcctactgtttgattcctaaaggaatttttgggtttgtttgttttggtgtagttaaataatgtataataaaatgcacagatcttaaccattttgttaatgaggtttgtttgtttgtttgttttgagatggagtctcactctg

SEQ ID NO: 69896 - DNA, 1056 bp, Homo sapiens
acagatcagcagtactaaattatatatatgaaaaaatatatgttatatattttgtagtgaccgagtcttgctctgttgcccaggctggagtgcaatggcccaatcatagctcactatagcctcaacctcctgggctcaagggatcctcctgctatagcctctcaagtagctgggactacacagaggtaccactacacccagctaacttttttttttttttttggtagaggtggggtctcactatgttgcccaggctgctctcaaactgctagcctcaggtgacactcctgctttggcctctcaaagtgctgggattacagacatgagccacgacacctggccagcagtcctaaactaaagtctttagctctccgtatattgaggcatgggaagtttaaatattgtgatttagctgaacactgattcctcactgattcctcaatatatccctacactgattcctcaatatatcctggtgttggttttccagcagtttaaagattcttgaatttctttactgaaattcaacaaggaaaaatctccagggtttttgggatcccttgttatttgcatagattgattgtctttgctattcactccttgccccattcatttttagtataacagaatggcagcatttcttatttgtctgtatagactattctctgacagtttttgcagcagtttctatggaaaatgctttatttcaaaaaaaaaaaggcaagggaaatctcatcttgaggctcttagtgatagagcctgttgccatggagtcttggatcagattggctgacccaggggccaatgaacagatagaacataaacacattatcatttaactttgcagaatttattattcgataataggtgacattaacaccctaactgtatatagaaactgtgaaataaaatgtttcaaaaatggtgtaaggtgttttttaaatttgctgttaaatataaatttgataattgcatattcttaatgtgatttgattgggggaggatatggtgggaaatacctaccacctatctgtgaattgagctgctactgcagcc

SEQ ID NO: 69897 - DNA, 1031 bp, Homo sapiens
aggtcctggcagccagctctgagcatgcctctgcctcccacacttgcgtgcccacagctggtcagtttactggatgaccaagcatagatctgtctcatcttttggagggattacagagggaacaggtaaagcctaggtttttattagccatgagacctcaaagatggttctggaaggatggagggacggggtgcctaagaaagaagaggcataaagtgtgagatggatacaatagttcagttctgaggagaccatgtgaagagacagcagagtaggcagactacagcataagcaggcaggctctgtgtcatctggggtgccagttagggcccttgtaggagatagaggacttttcagctgtctgtttttgcttcatcaagagaacttagtgaaggaattatttacagaggtataggcagagttaagggaaccagtatgagatgttgaggccccagggactagcaagatagaaagcctttaggaccccctagtgttgaagcagttatatcagaatgtaggcagagctggggccatggaagggggtagccaggtagtgtagggacacagaatagccacagttacacagaaccatgacacctagacagagagggaacagggataagaaatgccctgacctcagcaggaagccagagggcaggggagctcaggtgatagagctcaggcaagtcagcccttaagggcatagagaaaggcagagaaggacaaaaaatggatgaaggtatgcaaagagagctttagtagttcacctggacaactaagaaggacaggggctcacaacaaagaggggggtaggtaagcctctattttgggcagcagtgatctaaactttggtgaatccaaagaagggcctctctggagatccacaaaaattgggggaaggggttgtgtcaactcatcttggagtggggaccattgagtagaaaggacaggaaggcatagtgggttatggggtctattaaaggtgagctaagggtgtctttgcctgggaaccagatggcattgctcatggt

SEQ ID NO: 69898 - DNA, 1146 bp, Homo sapiens
gatcctctcacctcagcgtcccaaggcgctaggattatagacatgagccaccacacccagtcctcactggctttaaatggggggggacccagacccctccacattgaattcatgaaggtgggcctcatgctagcttttctccttatgccccaatttctccaagaagcttgatggggagaaagctgtgggggaagtgggtgtgatttggaaatgtgtctttactccactttgctcatctcccctctgtttagatgatgggggctgtcaagagagactattagatctaggcgacagggttcctaattggaaggctggacctcagtaccaccagtgtccaccatgtggcagtgccgtgcctctggacagcagctggcttgtagctggctggagcttcccagggacagggaaggggcagctctggggaatggagtgatgaggagtgcccctcgacctctcactctggggacgctgcctcccccacaagagacagggacaagctggttcctttgttctttccccatcacactgccagagaagagagactgtcttcaggatccacatcactgctacctttggttttggacctcatcacacaaacacgtggcaatggagcttggtgatgtaccaggctcttcctagaacctcagggcactctttggtgggggtggagtggggtgggggcgcactgagacgattagaccctcctgtccaccctgcatttctccccaagctctgaaacacattcaagagctctgtccagtgttctccccagctcccagcaaccattctgttggttgggctgggaaatgacagccctctaccccctcgggtctggaacattggtcagcaaagtggaggtatctatccatggtggtgcctcagacggcttacctgttggtatcagtaggcagtcaggggaagtgacaagaagtggctgcaggagtcactgaccccacctctccccaccctcactgtcagatgcccccagtttccagctcttcccacccgcttgctgctgtgcctggcctggccctacctccccactgacacttacgtcagagctcagctataaatacgctcttagcatcttagtcacttttcccaagaagtgctcctgggttataaataccccagccatctgcctca

SEQ ID NO: 69899 - DNA, 1001 bp, Homo sapiens
tgaaagctggtgttattctggggtagtttaaatcaggcccacctaatctttttggtctctgttttgggggaacaggaaaggaagtatgaggggagactctgagagaatgaaaaaaacaatgtgatccttataaaagcgtagcgaggaagaaggtgctgctgtccgtttttcttttcaaactccagttttgactccatcccgggttttccagtctcccgggaatgagggtggggtggggcgggatggggtggagaaccaccgggagcgggccgggccggccggcgcggtgggtgatcccgggatgctgggatttagggtgagggcggggtgagatggggagcggaacccggaccccgcgacccagcccggcccggcagcctgggctgtacccttttctaactcctccttttccaaccgaggtgcggatcccgcatccaagacctcccaactcgaccttggaactaatgttggggggcggggggcacagctggttggcagctggatggggggacaattctcccgcctccttccctctatgactcacccaggggaaggagggaagtttgcaaatgatcccccaaacactagagactcccccaaacttgcctactcagtcatctttctgccccactgcctagctgccgaagagcctccaaggaaatggggctacacccctcctcgcccacgcgttccacagcccacccatatctccccttcaggctagtaaaaggaaaatgtcgccaacttttttagcttcggtaaagtttttctggggtgtgagagttcgggatgggacagggagctctagggttcccctgccggagccctaaaccatcttcggtgtctccctgttttccagcgtccccctcgcacccccgctccccaactcccaggagtcggctccgcccccctactcccggtcccgccttccccgcccccgtgcctcctcggcccacccaagtcgccgccgcaggcactggctgcagacggctccgctcccc

SEQ ID NO: 69900 - DNA, 1117 bp, Homo sapiens
gtcatttcaaagacaactctcctcagtacttccctgggactgcctcaaccactacaaatcccaagtcttccagaaatcctccaaatagcccaatccttcctgagacttcctaattgtcttaagtaactgcctcctctcctcctcagcccatctctgggattcccagcccagatgaatcaccaaaaagggccctcgccttcctttggggtccagccttgtggtccccatgactctgcccggggtgggatgatcccacatcctcagtcccggggacccttcccaacttgccaggtgagagtccccatattgctacctgatttccctcagctcagggtgggtgggtggtggattttgtaggggaaaggtgaaggaaggacaagggatataagttttcagtactagaaaagtaaagaggtgtgggtgctggggttcactccttgcagttgagtcagacgcttccaaatgggatcccaccttttgcccatcccattcaccagtgtagtctgaggaggaagtcccttccaaacccaggaggttccagctgcttgggtgggggcacttagggcaggaagacctggcttggtttcctcttccttctgcttacttccaccctcatcaccgtcacctcttcccctggggaagctgaagtctgagctggacatgctggttggcaagtgccgggaggaacccttggaaggtgatatgtccagccccaactccacaggcatacaggtaaggggatgggcaggagctttacctctgggacctgagcaaaactaaagctgtcacccaagtgaccctgagattgcctctcttgccctaggatcccctgttggggatgctggatgggcgggaggacctcgagagagaggagaagcgtgagcctgaatctgtgtatgaaactgactgccgttgggatggctgcagccaggaatttgactcccaagagcagctggtgcacgtgagccccagggggtaacaggaatggctagccagaacctttaggagattctgagtgggacatggtggaatccggctgagggcaggaggtcagaggagactgaggttgaatgctcagttgggtaggcagaagctcagaagttgtagctttgcctta

SEQ ID NO: 69901 - DNA, 1010 bp, Homo sapiens
caacagagcgagactccgtctgaaaaaaaaagaaagagtttgggttggatgcattggctcatcccagcactgtgggaagctgaggtgggaggatcgctcaaggccaggagtttgagaccagcctggtcaacatagcaagactcgatctctaaaaagaagaaaaattagccaggcatgatggggtgtgcctgtagtgatcacttgagcccagaagtttgaggctgcagtgagctatgattatgccactacactccagcctgggcgacagagcaagactctgtcagaaagaaagagagaaagagagagagagagaaagaaagaaaggaagaaaggaaagaaggaaagaaggaaggaaggagagagagaaagagagtgagagagtgagacagaaagattctaaaacctctagatttggggaagcccaaagagcaacactaagacaagagacaggcagactggtcacagaagagtgacttctataggagggaatggatgggttgggaagtaactagaaagatgtccacagggtgggctggggtatggaggtgagggttgcctgggctctctcaccatggcaccctctggcacagtcagtctgctttcctccctgatgggacctccttcccgctccctcttgggctccactgtagaaatggatggtgcccgaggcagggggccatccccacggtgccgtttggtcacatgggcgtcaggaccatgcactgtcttgacatgttttcgcagcgagctaggatctgtatagcgtttggtgcagccagggagcttacatacatacggcttctgttgagtggagagtggagacagaaggcaaacggatcaaagcggaagaatgcagaagaaatgggaaaaagtggtgacaacacagggggcaggggaggagcacacagcaccaaaggaagtaaggaggatggaggcctccggtgggagtcaaagatgcagagattaagtggagggttaggaaaactgacagcctgggaaagatgaggggg

SEQ ID NO: 69902 - DNA, 1050 bp, Homo sapiens
agcttcgctttctggtggacagaggtgagaaggcttgtgggccagtggttgtactaagaatgtcttgcctgagaaccatgggcggtcctacatgaggaagctggcagaatagagaggccgtcaggctggaagtgtatgtcttagctcctgatctctcctcattcatgttgcagagcgtgcggtcacctccgatgggaggtatgtgttcccagaacagccaggacaaggtacttacatggaagacccttcagatccctaaaacttccacatatcctctttgcttcccgtggaaacccccatgtactattcctgggagggttgtcctcatccccaccttagctaccttgccccactgcagaccctctaggcattcctatagtctgctttgactggatttctccagaacttctaatctctcagtctctaaatctttctggcccttcatgagcccctatacctccttctccctccagaaggtcggttagatttggacagtactgagtgggatgacattcatgtggtcaccggagccctgaagctttttctccgggagctgccccagcctctggtgccaccactgctgctgccccatttccgtgctgcccttggtaagggttggagctttggaaagaacccttgatgtgggggacacgggtggtaaataatagaatagaggttcccttatactcttctttcccattctgactttagagatggaaaataatgttcaactcaggtgcctactccagttgcttttttgtgaatgtttagagggctgaattgaaaagaattatgaggctatagttgggctatgtgaaaaagaaagctgtgctagattaatgatgtcttccatgcctgtgggaaagagcagtgcatttacccatcctgtcctagcaccttccctaaccttactaccatgcctttcccatcactctctctagcactctccgaatcagagcagtgcctctctcagatacaagaattaataggctcaatgccaaagcccaaccatgacactctacggtacctcctggagcatttatgcaggtc

SEQ ID NO: 69903 - DNA, 1050 bp, Homo sapiens
gactcatgtcccctgcattttagccagctttgtctgctgccctgtactatttagtggtccaaggcaagaagggggaagatgttcttggttcagtgcggagagccctgactcacattgaccacagcttgagtcgtcagaactgtcctttcctggctggggtgagttgggtcttgagatgaggactggggaaggcttatggtgtaaggattaagagggaagactgtattcagagtgttcgaacccaacactgccacttactagtagtgtaatcttggcaaatcacttaatctctctaatcctcaatttttttcagttgtgaaatgggataatattagtacctatctcagtgagttattgtgaggattaagtgagatcatataaagtgcttaatacagtgcttgacatataaagtgctcagtaaatgttagatattaccattgggaagaaactgagtgtctcatttgtgtacattttccttttctatccccaacaaaggagacagaatctctagccgacattgttttgtggggagccctatacccattactgcaagatcccgcctacctccctggtgagaactgtgcatatcactccaaccctaggagcttggtgtaggggttacagaatgggcagtagaatactgagaactcccttcaaggtacagcttgactgggcaactatagcagaagatggttgagggaactggggaaagcaactggagaaacctcacaaagaaggggaaagatgcccgctcctgcctaccaggtccttatgtttgctgattttcttttcttccatacccacagaggagctgagtgccctgcacagctggttccagacactgagtacccaggaaccatgtcagcgagctgcagagactgtactgaaacagcaaggtgtcctggctctccggccttacctccaaaagcagccccagcccagccccgctgagggaagggctgtcaccaatgagcctgaggtttggaatagggcagagccttggggcctgaggtgggaggtggctaggagatggactttgagcatggccac

SEQ ID NO: 69904 - DNA, 1441 bp, Homo sapiens
acccctgtacccttagaaggttttgaagacaaggtaaaaacccttttttattcatatcattcagccttagtgttgaaaccctgggctagcagagtagactgctgattatgtcttgtttcagtttgagactttggattggtccctaacatgtttacctccttctgacctccaggtattctatgtctggtttgatgccactattggctatctgtccatcacagccaactacacagaccagtgggagagatggtggaagaacccagagcaagtgagcagttcttggttaggctgtgcatggggagggtaggcggtagggtgtgggtgttagggttgggtgtctggtcttccttgggcctttgaaggaggtctcaggaaatctctcctaaccacattcccctaggtggacctgtatcagttcatggccaaagacaatgttcctttccatagcttagtctttccttgctcagccctaggagctgaggataactataccttggtcagccacctcattgctacaggtaagtaccctggaagactactgatggggtgttcataggaaatgaggggtgaggcagtacttggaaaaagatcttggagagctgctatcttgagttaggagttgagctgaaataggaaataattaaaatgagaactcaacctagagaaacgaacaagaacctgaagaaagcaaaagtctaaagctaaaactctttagtagatataagcaaagagaaaaaagggccagaatggataggaagggactcccaaaatctgagcataccagccccttaaggagaaatgttgctagacacccatagttgaggttagaaagaggaaagaaggaagagttagtgggctagagaggggaaggatgtgatgtgagcagatggttctcactcattctcctctgtccagagtacctgaactatgaggatgggaaattctctaagagccgcggtgtgggagtgtttggggacatggcccaggacacggggatccctgctgacatctggcgcttctatctgctgtacattcggcctgagggccaggacagtgctttctcctggacggacctgctgctgaagaataattctgagctgcttaacaacctgggcaacttcatcaacaggtaggacttggtaaggggtcagagttagcagtgagctggggtggggctcattttccctcaggagatgggaatgtggagagaactagaaaatgggcaggaggctgtgaggacactgtggaaagttgatttctattaattgggatctgttcctagcacatactaggctatgtgtgcttgatggaacagttagctgtagagatgtgatttagcaaagttggttataaagtgggtttttgtaaattgtttccttattactgttctttgtagaattgaagatgtattctctcccagcaaaatagttcacctgcagat

SEQ ID NO: 69905 - DNA, 1017 bp, Homo sapiens
gagaaagctaaaggctgtgccctcgctccacaacagccacagcatcacttccctaatttccctaagtagtcctcacccatcactctttccatcttttggccctgccgcttcctcacttacagtttttctttcctgtcttaactagaagagaccttcgacttaaaggtaaccactttccctctgagatgctgtataaaactggaggttaggggatatttatggttgctggtgataactttgttgttctccaggcaaaaacgtccccgaagccagcagttgtagagactgttacaacagccaagccacagcagatacaagcgctgatggatgaagtgacaaaacaagtatgaagcttaagccctgtgggagactggacaagctgaatcctaaatagatctttttcttgcctcactgttacctccccacccccctttatcttagggaaacattgtccgagaactgaaagcacaaaaggcagacaagaacgaggttgctgcggaggtggcgaaactcttggatctaaagaaacagttggctgtagctgaggggaaaccccctgaagcccctaaaggcaagaagaaaaagtaaaagaccttggctcatagaaagtcactttaatagatagggacagtaataaataaatgtacaatctctatatacaagctgagacctttccttttgtctactccaagccttccccctgcgtatgtgggattgagggtcacatcattggcactagtgagagggtagtcagtagccacttctgggaaaggtgggtagtgtggcccaagtgggggactgatgctcccaattgttcatgcttggtgcagattcaccattcggtcaatcagagctcggcgagtcgcctctacttccctggtcaggcgctcgatttcctgcttgagccgttcattctcttcagctagctgtgccactttcctttcattctcctgttctttctccttcatgcgctgctttccagcccgggctggggaatgaccactctgtttccgtttc

SEQ ID NO: 69906 - DNA, 1784 bp, Homo sapiens
ttctgggaacggaatccccagggctgcccctggcccccatggcgcatgcgcgggaggccgctcggtgatccgcggcggcggcagcggcgcttcctgctaggaccggccggggccgtaccggaggctcgggctccaccgaccctcctcccaccccctcccactcaccctctgggccgcgactgcgcagggcggggccggccgaaccatgggccgcggtgagtgcggggcccggccccccccaccctgcccctccccctcccgtccctaccctctgccccctccgcgtcctctcggcccctttccccggccccatccccactcccccgccctcacctgcccccgccgcttctccctctcactgccagacttctgccttcctcaccgccctcccctcagtgcttcgcccaccctccgcccgccctctccccaagttccttcctacttcgtgcgccttcccctcctcctcaagctgagggaagcagtctgggtgacagggcgccttgttgtgagagggaaagtttggaagccgccagtgtggggtgggagcaatggtgaggctggggaggatacctgcaggttggaggggcttccccttctatcggaggacaggctctcttggagataatcggaagccagtggaataggaggttctgaatccctttgccgtaggcttgagggaaaatcaggagcttcccaggatcctgggagaagactgagctgtgatcctcacctcttaagacccgaatgaactatatcagcgattgtctgatggagcaggcatggggggagttctgctggtaccaccccagcgggcagttgggcaattgcctggtgacctgtggggcaatctgtactttttatatcatcttcctgggtagagaacaacaggagccagacactctgggaaacttcctagtggcctagcattatgggaatgtgcccatactcctggttgaagtcttctactccgaatggagggaggccttgcccttcatatgcctaagaattgggctagactttcttggtcccagggagctgaggttctgaccctctggtccctagggactgggcttggaaaggatggttgtagactaagccagcagatccccgagatctttataggtgcttgcctcacattgttaaggatctttcttttgagagggtgctgggctgtgctgctctttagagttgggcagactcctgacagtcccatctctctacttgcgttgcaggtgtgggctaagctggtggccccggctttagactggaccccacaatgtttgcagagatgttcaggtagctgtggtgatacggcagaggactcctcagtctccctcccagctgaggggttccccttgctcctctggggcttcccctgagttttcttgggtctccccacaacctttgccttcctggagtcctctctcaggtacttcgctcagtttaatcctcctagtgcctacatggatgtctgtgttatcaggcacgcgggagctgattacacacaatgaatgggggcaatgagagcagtggagcagacagagctgggggccctgtggccacatctgtccccatcggctggcagcgctgtgtgcgagagggtgctgtgctctacatcaggtacggatcttcacaggtccccaagctctgccactccagttgcccaggttttctttcttccgtttcttctctcagctcagctctctggtacccgattgctctcctctcttccccttccttcctcagcctttttgctttctgtagctctgggcctttgaatccat

SEQ ID NO: 69907 - DNA, 1087 bp, Homo sapiens
gttccttgagagggagcaaagagaaaggggagtgggtggggagctgcatgttgaaaggagggcacagggaggttgggaacttgtgggagatgggactagagaagacaaaagagtttttggaaggggagccacaggctgacccttcatttttcatttattgcaggagagggagcgagcccccaaatgttccacactgtgtccccagggcccccctctgcccgccctccctgtcgagttcctcctacaactccacttaatgggggtcctggctcccttcccccagaaccaccctcagtttcccaggcctttcccactctagcaggccctggggggcttttccccccaaggcttgctgacccagtcccttctgggggcagtagcagcccccgtttcctcccaaggggcaatgccccctctccagccccacctcctccacctgctatcagcctcaatgctccctcatacaactggggagctgccctcagatccagcctggtgccctctgacctgggctctcctccggcccctcatgcctcctcctcaccaccttcagaccctcctctcttccactgtagtgatgccttaacaccccctcccctgcccccgagcaataatctccccgcccaccctggtcctgcctctcagccaccagtgtcttcagccactatgcacctgcccctggtcctggggcccctgggaggggcccccacggtggaggggcctggggcaccccccttccttgctagcagcctactctctgcagcggccaaggcacagcatcccccactaccccctcccagcactttacagggccgaaggccccgtgcccaggcaccctcagcttcccactcctcatcacttcgtccctctcagcgtcgtccccgcagaccccctactgtatttcgattgctagaagggagaggccctcaaacccctagacggagccgtcctcgggcccctgctcctgtcccccaacccttttctctcccggagccatcccaaccaattctcccttctgtgctgtccctgctgggactccccacccctggcccttcccactctgatggaagctttaaccttttggggt

SEQ ID NO: 69908 - DNA, 1050 bp, Homo sapiens
ccctgttggctctgggccccacagctggggatggggagggatctgcagagggagccgggggtccaagtggggagccattttcaggcttgggagacctgtcccccctacttttccccccactttcagccccccctaccctcatagctttaaattctgcgctgctggctgccaccctggatcccccctcggggacacccccccaggtgaggatgggggtgagtaggtgggacagaacaagatgtagaataagagatgggagctgggaatcaaaagctttcagtttcattcctgagctcttccttggggcctttggggaggccttagttcttggctgggggtaggatgactgcaagaattgggtctgtatttaataagcatggcctatctcacttgaggcttcagtcagatagtggatgtgaaagcactataaatctgttgagtattttacacgcgtaagtgttagaatcattcttttttcttagccctgtgtcctgagtgccccccaacctggaccacctacctccagtgtcaccacggcaactactgacccgggggcctcctctctgggcaaggccccctccaactcagggagacccccccaactccttagccctctgctgggtgccagcctgctgggtgagtctgagggagtgtgaattcacactcttggtgtgaaaaagcaggagtaaaacttgggagtagtggctgaataaattggggaagaaagtctttggccactggataaagcctaaagagaatagtaggtctgctcagcctaattggtttgcctagggagagacccctgactataatttctcaacaggtgacctgtcttcactgaccagcagccctggagccctccccagcctgttgcagcctcctggccctcttctctctggccagttggggctgcagctcctccctggggggggagctcctccacccctctcagaggcttctagtcccctagcctgcctgctacagagtctccaggtgagggtgtgggcatatatttgtcagggagataattttttctcaaactggaaattt

SEQ ID NO: 69909 - DNA, 1141 bp, Homo sapiens
ggcagggctctcggggggtagacagggggcttctggctgctctggagggatctgctggcaaaaaaataagttctcagtcaatctcaaataccgtccctcttctactataactcagaaagccctaaatttccagtttgagaaaaaattatctccctgacaaatatatgcccacaccctcacctggagactctgtagcaggcaggctaggggactagaagcctctgagaggggtggaggagctccccccccagggaggagctgcagccccaactggccagagagaagagggccaggaggctgcaacaggctggggagggctccagggctgctggtcagtgaagacaggtcacctgttgagaaattatagtcaggggtctctccctaggcaaaccaattaggctgagcagacctactattctctttaggctttatccagtggccaaagactttcttccccaatttattcagccactactcccaagttttactcctgctttttcacaccaagagtgtgaattcacactccctcagactcacccagcaggctggcacccagcagagggctaaggagttgggggggtctccctgagttggagggggccttgcccagagaggaggcccccgggtcagtagttgccgtggtgacactggaggtaggtggtccaggttggggggcactcaggacacagggctaagaaaaaagaatgattctaacacttacgcgtgtaaaatactcaacagatttatagtgctttcacatccactatctgactgaagcctcaagtgagataggccatgcttattaaatacagacccaattcttgcagtcatcctacccccagccaagaactaaggcctccccaaaggccccaaggaagagctcaggaatgaaactgaaagcttttgattcccagctcccatctcttattctacatcttgttctgtcccacctactcacccccatcctcacctgggggggtgtccccgaggggggatccagggtggcagccagcagcgcagaatttaaagctatgagggtagggggggctgaaagtggggggaaaagtaggggggacaggtctcccaagcctgaaaatggctccccacttggacccccggctccctctgcagatccctcccc

SEQ ID NO: 69910 - DNA, 1059 bp, Homo sapiens
atggacaaatggaaaggtccccaagaagaacccaccattggcagcataatggggagctggctgaagggggtgctgagcccaaggatccaccccctcccgggccccattctgaggaccttaaggtgagtgcagagtgctggtagtctgggctcaggggctctgaggaaaggttggggctttggagcctttttcgaaatttcccacacacatagtccatcttttctcaggtgcccccgggagtagtcagaaagtctcgtcgtggccgtaggagaaaatacaagtgagtgttgggcctactatagtgctggcctttgcctacttctttttggtttggacagttctaatgtccaaatagtggcttggttttcaaaagggcagattcttatttgaatatgaataaggatattatgcctttactatccaaatgtagaaagtttcccacccaaacttctgaaattcacctggtgcttgggagctgttcctgatcatctgtgccccttattgcagccctacccggaacagcaatagctcccgccaggacattaccttggaacccagccctacagcccgagtaagtgtgtgtttgggtggatgggtggatgggtagggtgtaagggatgaggcggcaggaggaaaggagggttagagggagtggggagaaaagaagacttcctgatacctagcaattgaccacttctatcaacttcccctctgatattaggcagctgtccctctgcctccccgggcccgccctggccgtcctgccaaaaacaagaggaggaaactggccccatagcagccatacctggagctggatctgaccctgattggggagagctgagtgctgagccttgggagcccctgccagccacctgcacctgtggacagtgggtgggggcactactccccactcagagcacaaatgcaactccttcccctacaatcccatcctgagccattgcagggggcagggaagttcacccccccccaccacccccccgcccccccgaagccatgtcactgaaaaggcctgggggggatggtatatggccctttccc

SEQ ID NO: 69911 - DNA, 1291 bp, Homo sapiens
ctggccgcaagtcccaatttctgttggaggcactgttctcagtgctggaaggagcattaaagtcgagagaccagcatcaatcacaggatcactgagataaatgaaaaaatatataaaggacttagaataatatccttttcctccagagcagttttctaacattttgaaccagtgaaaccctcatttcaacaaaatcttatttagctctcattacataaaacagattttaaaaaactgttctggctgaagtcaggatgggaattctcgagtcctacctgcttgggctcaccccaagcgtggtctatgtactctaagggtagcttgaaaattggtgctataaacatcccccctctgtggcccacaaattgtgcttccatttcttgtcttctctctcagagaattccttcaggtcctcatccagttaagcaactggacctgacaaagagtaaaacctctctaccactttgtaggtgcagacaaccatgcgtgaaaacctggccacagttgaggggaactttgccagcattgatgaacggatgaagaagctgggaaagtgagcacatttgggagctggagaacaggggttatccctacccctgtgaactctgttaacagcttacatagggtttcccctttactataactctagcatccccatcccatttgacactgggggcaagggttcttcttgcatgtggggtttatacccctcccctgatgaatacagagtggtagctaggggttggttatcatcagaaggtggtctcccctcaggcctgggggataaggacgtgggcccagccacatgccaactcatgtccaatactgctttgcctggtgtggggaaggattgggtcttgtcccccaacacagcttctgtggctgactgtaatactgtacaactgtttctgaccattaaatgctgttgtactctgtgtggcctctgctgtgtttcctggggaggaagcagcactaggatatagatattcattcgtcataacaggcaatctaagccactctatactacaagagatggatttaaattgtaacctgttcttaccaaagaactaaataaaaaatgagtacagagccagagccagagtttcaaaatattctcatctgttaaattaagagtgtctcccatagaaaagcagtggaggccccacagggcaagtacaaaacagaattaaaactcccaagggtcttgtctttacaaaagaaaaggcaggaggcagcccctggacagctggtcatgctggccgctccggttggaccacgttgcataatcctc

SEQ ID NO: 69912 - DNA, 1059 bp, Homo sapiens
ctatgtttctttcttttttttttttttttgagacggagtcttgcactgtttcccaggctggagtgcagtggcgcaatcttggctcactgcaagctccgcctcccgggttcacgccattctcctgcctcagcctcctgagtagctgggactacaggcacctgccaccacgcccggctcattttttgtatttttggtagagatggggtttcaccatgttagccagaatggtctcgatctcctgacctcgtgatccgcccgcctcggcctcccaaagcactgggattacaggcgtgagccaccgcgcccgacctcattctctatgtttccctcgcccatctacctttggttaggattttaagattgtggctaggtatgtattccagggaaaggaatcccttggggtggtgagtggcaggcagagtagagcaggatcgtattcctcccattgcagcagcagggaagcagatggcaaatctcacctccttcctcccactaggtcgcagaacttgaaaagcgcctgacagagctggagacagctgtacgttgtgatcaggatgctcaggtcaggtgttctcctgtacataatctgagccttagatcctgcaactctaggccttaaggtctacaacattccacataagcctgggaggagtcatcaaagggcttcagttacagggatcagctagtgggttcccagctagaaccaggaaagatgggagaagacgataatcatggagatataaggaccactcacttcttcccttcctttcccaccagaatcccctttctgcaggtctacagggagcctgtctcatggtgagtttggaagaaactggagtgtttggatcacagaggggatagttgggtttgggtttgctttgaggattatttttgagtttgtagctatatattaatttagtggaatatgggaggcctcttgctagtctgcctttcctcttcatgatgcttgtcccaacttccatccccaggagactgtagagctgttgcaagcaaaggtgagcgccctagaccttgcagttttggatcaagtggaggctc

SEQ ID NO: 69913 - DNA, 1074 bp, Homo sapiens
cagtttcctaggttaagcctgggtaggcgccttggaatagagccacccttctttccccttggacaagtagggcccagtcacctaatggtttggggattttgtggggtagagtaagttctagagtgggaatgagtgtgtccctggcctaaactacctgttcttgcaggaggagctgacaagcacaagtgtggaacacatcattgtcaatcctaatgctgcctatgacaagttcaaggacaagagagtggggacaaagggacttggtgagactgggctggaagctgggtggggggaagactggaggataagcatgagaagtggtttcctgtcctaaagtcttagtgagttgtgcttgggggaaggggtccctcatggagatattttatggaagccctcacagtcacctgagaccatgactgccttgggcctagatcaggccctcagttccatcttcttttcttggcagatttctcagatcgtattggaaaaaccaagaggacaggatatgaatctggagaatatgagatggtttgttgtgtgtgtgtgtgtgttgatgggaatggtgtagtgaccctatctagcagacatgtagtagggagatcaagggatacaggcgggattctgttcctcctctgttcctgaggaagcagcaggatgcagccagggaaactctgccctactgctgtttgttctggagagcctccagccctctagctgtcctcagttctttggtactagggtgttgtggattctcaattggatatgatacctttatgacttaggcccagggtgtggatgaattcttgaggctccctgtaatgagacatataacattaccctctgtgcctgctctctagcttggagagggtctgggagtgaaggagacaccccagcaaaagtaccagcgcctactgcatgaggtccaagagctgacaactgaagttgaaaaaatcaaggtaactacaaactctcttctcccttctctgctgtgacttacacagtagaggaagacctcaagcaagaagagaaagattccctgcctggctgggtgcggtggctcacgcctataatcct

SEQ ID NO: 69914 - DNA, 1367 bp, Homo sapiens
gatcttgccctctgaggcacagccacttagccaaacagccctggggggtctgggagtcccttagtgaaagagactgggagtcacgtactaggtaagctggcacccggggccagggcacttgaaatcttccaatcaaggtgactagtactactccaggttatgcaggaatcatgcctaaaatctcatcaaccttcaacccacccataggacagacctggaggtggtatatactatctgcaaactaatataccacttttccttttatttgattttctgtcctccctattctgcccaatccgcatggtttgaaattgagcttatggcccattgtcttctttctctccttgagtttctcccaagctggttttagcttggtgggacaaatcagagaaaggtatagtgtgtgtacttctcctttgtgtttgcatgtttgcacttatgggtgcttacacccactctatgcagagacatcccagcctcgaccacaggatctggagccacctctaccctgagctgaaagaggaattttttttttttttttgagacagtctcactctgtcacccaggctggagtgcagtggcatgatctcagctcactgcaacctccgcctgccgggttcaactgcaacctccacctcccgggttcaaatgattctcctgcctcagcctcccgagtagctgggattacaggcgtccaccaccatgcctggctaattttgtatttttagtagagatggggtttcaccatggtggccaggctggtctcgaactcctgacctcaagtgatccacccacctcgccctcccaaagtgctgggattacagatgtgagacaccgtgcctggtggaaagaggaatcttggctgggaccctagcatcgtctagggaacagagaggttgtgattaagaggtatctggatgaaatcttggtgaaaggaagcacttgtttttaatcccaccatggtttttcatatgcatacaaccatcctcaaccatctgcccatcagcagagctcctagaaaggcaggacataccactggatatccccttctggcagttctaaaccagccttgcccggaagtgggagccttatctatgtggcccagactcaaataaggcctcttggaaatactctcacccttcccctttgtttaccctccaacccctgtgaatcttgtgaacagagggttgaagaaacatgttctgcacatgtgctagtacctgtgaatcttgatgtcccctggaccctctgtgtaagtacatcatggcagaattgctctagatccttcggagctgcagggtgagttaccagccactcaaggtggaggcaaacatgccaggctgcacaagggaccaggagcagctctg

SEQ ID NO: 69915 - DNA, 1291 bp, Homo sapiens
tgcacgggctgtagccctttcctcctcaatctgggaagatctctttgcacttcagacactcccaggttaattggggcaataggcttgcttggagatttttcttaaaatgtttggaaaactaattcccaaatagaattccacccacacacacaccccgaccctaacccctgggcccacagcctgccttgggtcagtgaggctttctgctcatggcttttgaactgctggaataagggaagtaaattaagaaaaacctcattagaaacaatttagcttctctctttatggcataactacccgcagtaaaaggggaaaaaatgacctagccatagtttgatggggccctggcagaggcttcatttctccaaaaggtagatattactggacactcctgagatgagaaacagtacttccttacagtttagaagatcctggagtatgcttgattgtgttcattgactgttggcgcacttgaacttacctgagtttttcctaatgcttcccccatcctccctcctcaccaccttgcctggacactagtttgcacaagtaagaccattcaatgcttcttctctgcatgtttttttcatctgccatctcgcatgcaatgctctgccactgtgctattgttgtagctaatcgttttaaattccagtgagtccctggctgggtcactgaggggcctgctggccttatgtttaaagatcattaatcaagggttagaaacagctatgatccatgaatcattgtctcttccccttgtgaggtctgcagagtaaaactgtccagtggaggatgggatagaagcatggaggctttaaatgtttttgaacatgaggcatttaggggctggagttagaaggcagtttcctttctcctcctcagactaagatcaaatgaagatttttttatggaatgacttttagctattctagacaaggatagaaaacaaaagggatgacagccacagtcctcagttcttggctgtatgtggattatctctgggaaaaactcattttaatattcccctatgctaggtctttagagaaatgtaaatgggatgagaaggaggtttatatgcaattgtaagataacttggattatttgtgcttttgtgagtctttctgtttctgcacccctccttttgaaatggatggatggtcagcaatatattgatccatcccggacagttttactctacagctctgtccatcttccttgtcatcatggttttgaagtaccctggctgcagtgttggcgtacagcctgaataggctcagagagtaacagt

SEQ ID NO: 69916 - DNA, 1444 bp, Homo sapiens
tgtaccttccttttgtgctgccctgcctgcttctcaaggtgagggttgggacacaggaccttgagtactaaggtcctgagtcactctcaatccttgtgccagggtggtggtgtacggggcctaattggaggatagccttcaccttctttggcaatagtgattgccaaggacctgcccgcctctagatttagggtaacatcgttgctatcacttacactcaccgtttactgtcaggtcccaattgtttccgctgtcatccctaccccttgagacatgggaactgacatactgttgactcacggggcaggtggaggagaaaggacagaaccctgacatcacaccccgccttctctgttagcttattcaaatggagtgggggaaggggtgttgttggatgctgggtagtgaggttgggtggtcactgcttctacctgcaggccaggaatgagccagatgtttatgaaactagcgacctacctgaggatgatcaagcggagttcgatgcggtaagaatgtgtgctgccacagactcctccggactctgacctttctcccctagacaggtccttccctttctcgggggagctacagcaataagcgggtatgccaaccccagcctgggtggtatataggttgcagggcttgcaaagaccttgctgggcttgcagccaccaatgagcaatggcaggagggagagtcaagtcagcggaattacagctaacaacatctgtttgcaaagccctgattcttgggccttttaaataaaattgaaatatctcaaaacaggtttggagctagtgacttaggcccctgggttctaacccatggaaatgaatcatgaagcctgggcacttgtaataaactgctaccaagaactagactttgaaatatggagaaatactttttccatatgaatatccagtatccattgggcaaggaattaagaaagtgattccaagattttagagcaaaacaaatttgaggaagaatgtaaatatttcacatcagcggatgtgagactgtggttgcatttttagatccgagaattctgaggatggagtaattaggtacggatacattttaactgtgaggggaaacatttagtatggtttattgagtgtgttcattctgtggttttttttgtgcaatgcagaggaagaaatgtctctgcccccaatgagccccagactaatggggaattaggatacatataggaaacatatagaaggaaaaaaaaattgagtgaatggaaatcaacatagtaaaaactctgtttaagtgccaagaggtgtgtttataggatgtgttttaggttctattatttctgaagacagctgggctgggatcacattgatgatgtgagttctcagtaaagatgtgtccaagagtcattgcaatatgcaggctcagtatgcttgtctgtaagtcctgtggctatgtctgt

SEQ ID NO: 69917 - DNA, 1037 bp, Homo sapiens
gatgaggtgaaggaagtgctgcaggccctggaggagctggctgtgaactatgaccagaagtcccaggaggtggaggagaagagccagcagaaccagcttctggtggatgagctgtctcagaaggtggtaagtggtgtgccaatggtccaacagctccctgaccacagaacatctcccatgtcgaggggacctctgcatccttccagggctgtatggtggctgcacctctgcactgctgttcagtgcattgtgagtccctccccaaccctgtcactgcactttcccctcacagtccctctgtctttcagactcttctgcagggcctgtgttctcttcatagcagccctcagggtcttgcatgaagggagaggcctctgcctgggctgggcaagggagcaggaggatggcaacaggaatgacctgaggggctgtccccaggccaccatgctgtccctggagtctgagttgcagcggctacaggaggtcagtggacaccagcgaaaacgaattgctgaggtgctgaacgggctgatgaaggatctgagcgagttcagtgtcattgtgggcaacggggagattaagctggtgagtggtgagagacagcagccttgttcaggctgggcactagtggaagacgcaagatgagccatccaggccttcacagatactgagaaaggcagccagagagccaggaaacatgcctttgaactagacccaggaagacaggtagaggcttgtatagacccaattgaaaagatacattctaggttgggcgcagtggctcaccgctgtaatcccagcactttgggaggccgaggcaggcggatcacttgaggtcaggagttcgagacctgacctcgccaacatggcgaaaccctgtctctactaaaaatacaaaaattagccaggcgtggtgatgtgcacctgtaattccagctactcaggagactgaggcaggagaatcgcttcaacctgggaggtagaggttgcagtgaactgagatcacaccactgcactctagcctgggttatagagtg

SEQ ID NO: 69918 - DNA, 1027 bp, Homo sapiens
ctgcagatggagagtcaccgggaggcccatcaccggcagctggcccggctccgggacgagatcaacgagaagcagaagaccattgatgagctcaaagagtaagggttcccaagggcgactccagcccctcccgggtcctgtcaccttgctgtattgactcacatgtcccctctgggtctgattctttaacatccatgtgtcattccctcaacaatgccacaacttcgtagccccacctcaggagacacatggaataacgactagtccctatccttgagggtcccaggattagagaggtcagggttcctggctctgtcatggaaacagtggcctgagtctgcctctggtatctgaaggtggacacatcaattctaactggactcactcgttcaaaaaggaagaagtttgaagagctggccttcccttccccctcattaacatctttctcccccatctccattaccttctgatgctctgtagcctaaatcagaagctccagttagagctagagaagcttcaggctgactacgagaagctgaagagcgaagaacacgagaagagcaccaagctgcaggagctgacgtgagtggcatggatttacctgtaaaactacagccttgtaggctcagaactgtgaactcagacacgcttgcagaggcaggacacacatgcagacatgatagggtgactcatgggaaaaatatgatggggtagggacgggaccaaaaggacactctcagcaaagactgccgttgagtattcaccagtatggaaggaggtttacgtgttctattcagtgtaaaaacaggttacaaaaccatatgcatggtatgatcccataaaaatgtatacatggatatgtaggcatagaaaaaagtctagaaaggtggacaccagaaggttaatgttggtttgatctgtaaatagtagaatcataggctttttataaaaactcaccttatgtctctctttaaaattcttttctaatttttgcacagtaaacatgagtaacttgtgtaataaataa

SEQ ID NO: 69919 - DNA, 1079 bp, Homo sapiens
cccctctttttcctcctctgtccccaggtgctctcctctagcagcacaggaaccttctttgttcttgtgtgtcactgggtttctcaccaaggttgctttagggcccagaagtggcacagagaacatggccagtctcttactgggctgcatctaagctgagccctctccaggggtttcccagaatagtaaaccaggcacacacaggcagaaaagtctgagaagcagagaagtaggaatgcagaagaggagttggggagacctaggggtggaggtgcaagcctgggtcacggggggcggtggtaggggggtctgcttgttggtattaaaggaacaggacagtaaaccaaagtgtgtgcagatgccacctgttcctgttctgtgactgagctacaagctgggccctcacaccctctttctctttctttcccagtttctaagagggactgaggcctcttctcagcatgctgcaaacctgtggtctctgatactaactccctccccaacccctgttgttggactgtactatgtttgatgtcttctcttacttactctgtatctctttgtactctgtatctatatatcaaaagctgctgctatgtctctcttctgtcttattctcaagtatctactgatgtatttagcaatttcaaagcatagtctaccttccttatttggggcaatagggaggagggtgaatgtttcttctttctcatctactcgtctcacactgagtggtgttagtcactgagtagaggtcacagagatgacaaaaggaaaaatgggagctagagggttgtgacccttcatacacacacgcacgcacgcacacaaacatgcacacacgcatgcacacacacaaagccttaagcagaagaatgtcttagcatcatgagacagagaaatagactcttcctccctcctctttcacatatagcacaggggaaggtaaaatggaagggctgctaattgagacatataattttcttcatacacccctcaccttaatcaaaggattcaggtgttacttctgccctacaaagtctgccttttgcctccctcttcctgttttcccctggact

SEQ ID NO: 69920 - DNA, 1109 bp, Homo sapiens
gaaggctgatggaggtagggctgcctctcatatgtaccttccaggtgattcatccattccctgtgggatgcttaacagggagggttttcccttgttaaggattgggggagttacatgtaagacctacctcagcttcactaggtatatatactttagccccagcaccccaccctctgccaacacacatctacttcaagtgtttggaatggagaaattccttgaacatatgtcttagtgatgattcagcttgcttagcaggtggggaggagggggcaggaggagctatagctgaattttaggctgggagtctcaagtggctttttttttttttttaatctggagggatatgttctgtcctccttttctactgagaacgggaggagttggttgcactgcagtgtgtgtgatttaggttagactgcagttcatagcctctgtggaatgatctagtaaggataggcaaggcattcatttattcaattaatagacatgtcaggatcactgtgtgccaaacattgtgctagttagacacctgaaagatgcagacgactagaatgagcccttgttcttgaagagctcacaatctagatgggagaacttacataaactagtgattagagtcatgcagtaacaaaggcaggtgaaaggtactgtagcaacaccaaggagaaagcacggctcaggatttttaagtactagagctccctttctaccctgaattagcagactgcagatcctgggggccgaggagagcatgtgatgcttgtgtcctttgggctgtggattagtttggctttagggaacagacgcctaatgagctcatatcctctgattgcctgcattcgctctgaaatcagctgctcttcctttaccttacaccttagacaggtgggggcctactgcaaacaactgggtcagagtggtctaggaagactggtcctgtttgcaaagagatgccttttgcaggatatggacatttatcctttttgctgtggttggccccacagaatcccattaacactcttgtgcatttttaaaatgcctttttttttctttttctaatggaacatgtagctgccttgagcttgcagagtttttttttttttttt

SEQ ID NO: 69921 - DNA, 1003 bp, Homo sapiens
aaaaaattagccaggcatggtggcgcatgcctgtagtcccagctacttgggaggctgaggcaggagaattgcttgaacccgggggatggaggttgtggtgagccgagattgcaccactgcagtccaacctggcaacagagtgagactctgtctcaaaaaataataataacaaataaaaattaaaaaaaaaggacctcacagggttttatgagaatcaaatgaggtaatatgtctgaaggtactttataaactaccaagtgtatgtaaatgtaatattgtttgttttcttactttgaaaacctgaatttcagggaaaatctgcccagtcatttcaagttcaaggagtattgtccccaggtcttcaggaacctccgtgatcgatttggcattgatgaccaagattacttggtgagagtccattaaggggtgagggtagccctttctccccagcaactgaggagtactatttgggacagccatatttggagaaatgagagtcttggcaaatataattctttacctttttgtgattgcagcattttcaaaaatttaatgaaaattataaaccttgtccttgggggaaaagatgtagatacattaagaattttggccaggcgctgtggctcacgcctgtaatcccaacactttgggaggccgaggcgggcagatcacctgaggtcaggagttcgagaccatcctggccaacatggcaaaaccctgtctctactaaagatatgaaaattagccaggtgtggtggcgcacgtctagtccccgctacttgggaggctgaggcaggagaatcacctgaacttgggaggcgaaggttgcaatgagctgagatcgtaccactacactccagcctgggtgacagagcgagactccttgtcaaaaaaaaaaaaaaaaaagaattttgcattcagtttccttcagtccacatatggacacctgatgaggaactgtgctgaatctcctaccccagggattcatccactttcagctgac

SEQ ID NO: 69922 - DNA, 1007 bp, Homo sapiens
gttttgcaaggggcgtgatatatttgttatttagaaatatttagaaaatgtgacagcgttttagagaatggattggtgggagggaacactggaagggtggataccagttaggaggtaattttaatagtccagggtagaaacaatgaaggcctgggggagcgatggtggtggggatagaaaggaagacctatgggagaactgagagttaagacacaggggcctccaagttcctggttagggataactgggtgcctattcaccagaaattagaaacagaggaacaggtttttggaggaagaaagttctgatttggacatactgaatttgaggtttctgcaattcatccagatgaggatgtccagtaagtggttggggtatgtgtacagaattcaggaaagaggattagactgggagtataggtttgagaattatatgtgagtaagtgatcattaaaaccatggctatagatacgattattgtagggaggttgtgtgcagtgaaatgaaaagaaggttgaggacagaacctaaaggaacaagtgaagaaatgagcccataaaggaaactaagagtagatggacacttttaattatttatgccatgctacattccatacgggattcgacgacagagaggaggggaatcaggagggtggtataataagagctgaggatgaggagacttttaaggagagactggtcaataggatcaagtgccacaaagctgaaatatgacaatgactagaatacttactagatttgacaactgagggatatgggggagatttcagaggagaaatgaggtataaacctgatttcagtgattcaacgtgtgaatgagagacaggaaatggatttcttgctgattactttcctgagaaggttggctgtgaagagaaagaggcagcaacacagaaagagagatggtaagcactgaaggagtaatttttgttttttagagacaggatctcactgtgttccccgggctggtctcaaactcctgggctca

SEQ ID NO: 69923 - DNA, 1031 bp, Homo sapiens
cctgggaggaggcgggggttacagtgagcctagattgtgccactgcacttcagcctgggcaacagagtgagactccatctccaaaaaaaaaaaaaaaaaaaatccaaattgtaggccatcatgcagacttttttttttttttaggtataaaaatctgtatttatattacagtgacagaatgacacagcacagcccaacccaatgcagacattttaaattatgggaatctagcctatgaagaaacactgctctagataaaatgatttcattgataagatataagttgtaatcctggttctgtgccacttgcatatagaaagggtctaaaataaggataataacacttaaccttcctcatctcaaagaatgataaaggtgaattgagagatgacacttaaaaattaagagatgtacaaatggaaggaatcagaggaaagggggattcagaaacggcatggataacctggagtgttttggggaagcttccaccacttttgactttgtaatctctctacttgaagtcctctgctctaccctggaatggcagtgtttgaacttccctgggctgtttgtgtatctgctactcagcctctccccattccttccccctctttcactgtagtacattgtgaagtgccatggcaacacgcttctgccccagttcctggggatgtaccgagtcagtgtggacaacgaagacagctacatgcttgtgatgcgcaatatgtttagccaccgtcttcctgtgcacaggaagtatgacctcaaggtaagaagagggtagctcggacttagagggaggctcctgatagcctgagaatggggaagaccctgggaggtctttggatgattccttttaagggaaagaaggctgggtttgagtactcatcttaggggctgggttctgactgttcttttagccacttctactgacttggtgtttgggtctttctgcagggttccctagtgtcccgggaagccagcgataaggaaaaggtgatagtaattttatgtgctagggtgagggatga

SEQ ID NO: 69924 - DNA, 1004 bp, Homo sapiens
tagagagtgggtcagcagcctggcacctcacagaggtgggacctaagaggactcatgattatgcagagaattggattgggtctctgtcatagattgagtaatctcttcccttacctcaattccatctccacccatctctacatctgggcacagcaacccagagatggccaaaagcattcaagcctgggggaagatgtttgactattgctgctcttcaccagaacctcacacctctcctgggactggaacccttcagtgggtgtgtggccagttttggaggctggaatgatgggccagggtgtaggattcattctccatgtaaagtttcctttcatcctgcctagccatccccaaggtttatttccagaagaaaggaatatctctacttggatcaattctggtcatttcaagaggatggaggcctcaagtgtgggaacttcccctactccctggatgtgtgtacctagcacacttccttctcccacccctttttccagttggatttgtttttctgttctcttctgtcctgtcttatactgcaactgtgtctcctaggggacagatggccttctttgtcatcttcactctccacccccagagaggagtcagagccataactcaatcactcagcccctccaaagatagttgatgtgtgataatctcataatgttgagaaccctgatgagatacattgtcttcctctccctacaatgcctctggggccaaggcacccattcttcttgctatcctccatcccccttgaggcttccactttttttttttttagacataaagctgggcatcagcaactggcctgtggtgatgcaaagctgctttgctctgtatctggctggactgatctgtctcacaagaagccatgaggccatagggagaagctccctctccccttcatcttctgctccaaaggtggtagcaagaggagtacccagttaggggttggagcccccatataacatcttcctgtcagaagactgatggatctt

SEQ ID NO: 69925 - DNA, 1068 bp, Homo sapiens
gagactggttccttgtccggcctgggttgccacagaggaatcacagacccaccctaaactggggccccgcctcccttttctgtgccagcaggacttggacctaggacacctaggtcctgggtcccccgtgatggggagagaagtgttgcatcgcggatagactgtatgggctgagactctagggttccattttcacttatgaatctcgaggtgcatctggccttgggggacgatgatggaggcatgaagggacagctgctccttcttggatcagtcaataaatggaggtcacactaatggcccttctttctgtttgagctgcatttggaagtgttgtggagacagccccgtagcccaatgcgaccagactcagggaaaacatcaggcccctccagctgagcccttgtgtgagccccgcccctccctaaatgccagacttgggagctgacagacagcactgcctgtgctgggtttaaaaggtgacaatgagaactttgttattgcaggggctgctgccactttgttcacatccttaacagacttcagcagaagggactgagttagctctcaaggaaggctccctggcaataggggctgaattatttggcaatgtggagcaggcgaggagttggggagcataggaaatattccggtccatgtgatctgagggaggtggcaagaagacctccacctgtgtgggcgttttctttcctgacttctcttatgtgtgccctaggctttcttgggggcctcagagctggggaagaaaggaggaaggttagcatgttgaagttccttcttgagcaacttggggagaagctgataatggaattctgcagagaagagaggagatggaaggggagtttttatttctgggttggctgaggggaatggtaacatttgccatcataactttttacccttcccccactcccagtcctggtcagctgagtggaaatagaaggatttctgctgccatcatcttccatgggctttccaggtatctcccccgcaagggatcctcaattttcacccttaaactggtttccttcattccatgttccaagt

SEQ ID NO: 69926 - DNA, 1478 bp, Homo sapiens
cactttccttccatttttccgccctaccaggtcacacgacctacaagtagggagcagggaaagaagagtgagcctgcatgccaattctaagctcttcaggatcaaagtaagcaaaaaggaggggcaaagagtctccctcccctttaaacagcccatttttccccaagaggtgggaggggcaagttgtttctatgatctgggagaaatgacaggagaaacaagactgatacttggcttagatgataatatagctctggaaacttttttgctcttcagtgggttttgggtttggaagataaggggagacagaatatgaatttgggtgaagggttggggattaggctttgagaaaacagaggtaatagagggtttggaaggaacctgaagtaggaggcactgatacttgtcaaatggggaccccccaccctgagtccctttcaccctgggggcagtgtcgttcgtcctgtccagaatggcagcctgtggaggcacctgcaagaacaaagtgactgtgtccaagcccgtgtgggacttcctgagcaaagagaccccagcccggctggcccggcttcgggaggagcaccgtgtgtccatcctcatagatggcgagacttctgacatctatgttctccagctttccccacagggtcctcccccggcccctccaaatgggctctacctagcccggaaggctctcaaggggctgctaaaagaggcagagaaagagctgaagaaagctcagaggcagggggagctgatgggctgcctggctctggggggtggaggggagcaccctgagatgcaccgcgcaggcccaccccctctccgagcagccccacttctgcccccaggagctcgggggctcccccctcctcctccccccctgcccccacctcttcctcctcgccttcgggaggaggcagaagagcaggagagcacctgccccatctgtctgggggagatccagaatgccaagacattggagaagtgccggcattcattctgcgagggctgcatcacccgggctctgcaggtgaaaaaggcctgccccatgtgcggccgcttctatgggcagctggtgggcaaccagccccagaatgggcggatgctggtctctaaggacgccaccctcctactgcccagctatgagaagtacggcaccattgtcatccagtacgtcttcccgcccggtgtccagggggtaagaagaccatggcctgcccttaccctttggctttccccaagctctgacctaggaaaaccgggtgagggtgagtgtgcttgttagatgtgagacagtcttgctgtcttccactgtgccctcctactcagtgccctggacctaggaggtccccgtgaggcccagcctttccatccctgtgatcccaaggcacacgtgaaaatcagatatgagctaggaaaaaaaaaagcaaatcagatatgagaggaaggaattgcatattatttccttgatgaac

SEQ ID NO: 69927 - DNA, 1703 bp, Homo sapiens
gttcggtatcctggcaccacacgggtggcctacctcccggactgccctgagggcaacaaggtgctgaccctgttccgcaaggcgtttgaccagcgtctcaccttcactatcggcacgtccatgaccacagggagaccgaatgtcatcacctggaacgacatccaccacaagaccagctgcacagggggaccccagctgtgcgacccctcttcatttcctttcccttggctcctcccctttgttccatttccactgagggacccaccaacccctcgctcacggagcctcctaactggagagaaccacttccaaactgttcagccatctcagtttctcctacattcaacctggtcctggtgtgcccagcttagcctacaaaaataagcagaactgggctaaattatcttggatttggaggtgtcctcccttaggggaggtggggaggtgtctgagccacctagaatgagggtgagcatggggataatagcaagttcaaacagctaacaaccctcaccctcatttctctttgctcccaggtttgggtacccagaccccacctacctgacccgggtgcaagaggagctgagagcgaagggtatcacagatgactgaaggacatcgcctttgccaaggcccctgctgtctgcctctactaggacccagcagaagcctctttctcctctctgccccctgccccccacaccacacctgtaggggacctgtctgactgggaagggagttccgagagggagggggcaatcccttcccccatcccccactggccaagtgtttcaatgcagtgtgagccactcccttctggcagaggccgacctccaaggctctgttctcccctccccgtgtacatatactcccggtttccctgcccctccattgcccttggctttttctggtatgtgctgtgctccacgaccaagccgagaaaggacctagggtggggaagggagggtctcttgattcctaaccgcccccacatactgctccaccgctgaacttcgggtgccggggaggagaaattgggctgatgtgagctccccgtcacccgccatggagccggctgtgtgtgttcatcagatacagttctcccttaaccttgtcctttctctcctgtgtctcagtctccgtcagtctgtctttctccgctcttctctgacccctgtgaggaacctccttaccctgttctggaatcgctgccagactgtagcttttaatttaataaaaataaagtaaaatatgcaactctttatgccacacccgttcttttccagggactgggtgggggtggggtggggagagggacctgctggaaaggggagaggggatgatggggtgatccctgcgtgcactcccagtccctctgcctcctgaggacctggggaaacgggatgcaccagcgggctctgtagtaacactgagaaaccctgggtcacttcgatgttggaattagtattaagagggtgtttttttgttgttcaactatggttgtagagaaaacaaccctagccactctgcgaagtttggctggggtgggagtgggggcggagccgggcagggggcggattccgcagcagcaactccccggacgcgcgcaggcctcaaagccccccagcttcagtgccccctcgaccctgaaacttggagcagggtgggggttcagtatgaagcccccggaccgccccgcccct

SEQ ID NO: 69928 - DNA, 1783 bp, Homo sapiens
tgttggggaggtgggctgcagaagtcttttctttttatagtgattactgcaattggtggaggaggggactgggagtggcagatggacccagctcatcctcccctcttcccagagaatggtctgtacccattgaaagagggagggttgtaggagagcagatggccacccccagcttccaatgtctgcccagatggctgcccccacccccatatctatgctatgctcaggatatggggaacctccacatgtaactgggggttccaggcctggagagccaggcgtttaccttactgtgctttctcccaggggtgccctggtgaaattttctatcctggccaactcaaatgaggatggcaagagagtgagcccttggagagagaggctgagcatcatgaagagaagaccctgggagttccctggggaccctgagtctggagctggggcaaggtctatcacctcctctctttttcctcccattagaatcctattccattgcgggcagtgaggggagtatatcggcttctgctgcctccggtctggctgccccctctggccccagctctggcctcagctctggcccctgttccccaggccccccagggcccgtcagtggcctgaggagatggttggatcattccaaacattgtctcagtgtggaaactgaggcagacagtggtcaggcaggaccatatgaggtgagcagggaacggcaccaaagcatgtgggacatctatgaaggacactggcagagagggcaagttggggccacccagctactgtccccgacctctgacacttgatttctggcccccagaactggatgttggagccagctctagccacaggagaggagctgccggaactgaccttgctgaccacactgttggagggccctggagataagacgcaggtgtgaggacaggctctggggaggctcctttcactcaaggggcattcgtttgctcaccctaggatgttctttccttccagccacctgaagaggagactttgtcccaagcccctgagagtgaggaggaacagaagaagaaggctctggaaaggagtatgtaagtgtccacagcccttccctgcagttgcacaacttccagaagactgtccctcacattttagatggaatttcctccaaggttggctatgatgataaaggggaggagggaggaacgggctgaaccaaggatgagctccgacgctgaagtgggggcctcctcctgctttcatcctaggtatgtcctgagtgaactggtagaaacagagaaaatgtacgtggacgacttggggcagattgtggaggtagctccctttaccccttcccagcccctcctgcctgcttttccatctgcccagggctattttcaggaggtgcctgggcgctcctctgtcccacctctcaagcctccccactcctggaccttcctactctgggggcagggcggctcccaccagggagggggaggtggaacacaccctggatttgtgtacaggagcaccattaaggtggggagagggccaccacatgctcatgacccaacctcaactttcccacagggttatatggccaccatggctgctcagggggtccccgagagtcttcgaggccgtgacaggattgtgtttgggaatatccagcaaatctatgagtggcaccgagagtgagtggtggaactctgacagctaggtgctggagaggggccctcatctggttgtcctgtatcctaacatcagcccattgcgacttaaggaatgtttggagaagttttgtagg

SEQ ID NO: 69929 - DNA, 1067 bp, Homo sapiens
gtgcaaagcggcaagggtcaccttggaggttcccctccagtcccaggcagctcacctgaattggcagataggagacagcccccagattcctcaggccctccctggctcctctgagacatcctctcagaggcctcatgccctctctctctccaagccctccctcgtggccttctccccaccttaatgctgttcttgtatacatatccaggctgtgttccacctctcactcctcctcccagggcttcactgaagatgatgatttgctcaaagaggaagacgcgcctctctcgacctcgggaagacagcagccctccagcctcaggctcggtgacccagaaagtgtcctggcccaagagcttcccctgagcagtcagtttgccctgaaaccaaaaggatagtggccttggaaaaagaacaagaaaaaggacaattctctgctcctcccttcctcgcctgacatgcccaaccaaccatggggtcagccccaggagaagacaactccccataaggacctcctgaatgctagggctggggcagaagagcatcgggcctccagtttcttgccctatctccgtacctcaaatccccgcaatctccccagcgtcatcatatcgttgcagcgcttgggcacaaagcacatgacctccacagcttgctgggacacaggtgagggaggcgcattgttgggcgaagagagtcattattgggaaagaggcctcctcggccagttgcctcttcagacggtatctcaaccccaaccagcctccccctaaaaaccagacagctgtaaaccacccaaggggctgggggaacccatgagatactaggaggataaggagcacatggtgtgtcctggaagatctggggtcctcacctctaggtctgcagtatccatcccagctctattgtaatacttgagaaaatcctaagacagagagaagaaatgctcagggaggtcacgaggacacccttagaagctctcacatcctcccctgaggacaccagtgagggccctcaggaagtctgggggagccctaagaaccctggggagatgaatgaggaaacag

SEQ ID NO: 69930 - DNA, 1073 bp, Homo sapiens
acgaatagagctccctcattgtagggataaaaaggggagagcctctcttgttctgggaccccaagttccctccccatatcattccttccttttatctggtccttcctacttcccatcccttacgcttctcccctctattttaactctggagaagctgatagtctcagacagtctaagatatctagcaagaggaggtggcttggctagggacttaaactgaaaagagagaagtgagggtagatttctggcctttttgatcctctgacttgaatcttttcttcaggcccttggtgacatcccccaggctccccatgactctcctccagtctctccaactccaaaaacccctccctgccaagccagacttgccaagctggatgaagatgagctgtaactggtgaaaaccatgggggtggtgctgactcagccgcctattccccaaggagcttcagggcagtccttctggcactgctccagaattcctccttcttggtgtgtctggagggtgggcaaggctgggagggatatcaacttggaggagaacacctagacccaaggacttttttctgcccaaggaacacagtttccttcagctcccatccctatgcatgcatcatggtccccccaaaaggaggatatgtgggtgggtgggagggctggggcaggggccagatagaaattattggttttgttttttaattttgtttttcctgttttctgagaataaaggttttgttatatcaccgaggctgctgtcttggcagagggaaggggaggctgtagtgggggtaggtggggtgaagtgatatggaagagatcggttggccccagccattggaggagggggtctggtgaaaggagaaggggacagggtgtaagataaaagatgttgctatctttgtccctcaactgcagttgcagcagttgagggacaaagactgaggcatggaaccactggaaagcccttagattcttcttcttccctttttttttttgtagagttagggtctcactatgtagcccagggtcttgaactcctgggctcaagtgatccaccagtcttgccctcccaa

SEQ ID NO: 69931 - DNA, 1164 bp, Homo sapiens
acccctgctctactcccagggcttcccctagttcagaccacagtcggtgcaacccatctggcgtttatttaacctctgggagtaggggtaggtttttcgattttcaaagcacaagtatattgactccatttacacaagagtaagactgagacccagggagttgatttacatgctcagggtccttagaaacaagcctttgcacacacactttccacaccctaaatttgagagttctcccttaccagtcggccttctgcaccctcaggatccctcactgtgtactcccctccacccccagaattcttcttggatgggcttggttcccttcgggttggctcctgctccgacgtcgtggtggatcatgcatccaaactgaagctgccttggacatcaagggatgccggagcagagacttacgcccggtaccgttacccaggatcactggacgagagccagatggccaaacaccggctgctcttcttcaaacaccggctgcagtgcatgacctcccagtgatggcccgctggggatttctgactgtcaggctgggcctgcctccttgtccctgccaggaatttccaacaaaccccaccaccctgtgagcactctactggctgtccctgagcctctagttcctcactcttccttttcagaacctgatgcccagtaggggttgtcctggtgacacccctcctttttccagtgcccagaggcctggtggagccataacctctcccacagccagtgccaagtcctccccctgcccattctcatggggcaggaaatggggggatcactttccaagtgccaaagagcccagagggactctaagaacctaaggtggaaacactgtcctctcatcttgggaccgagggggtggggaagttccccaacacataatcccaagactgtgcccctcatctgcatcttcagatccagtactctgtgtacctgctccagccccacccccacagagagaacttgtggctctggggctggggtgagggctggtggttggtgaaagccattcttagttgtgtctctgcaatgctgtgggcacaaaagaaggggcaccagagtccctgtgcaaacacctagactcacttcatggattccaaagctctcagcttcattttattagttacgttaggtaagggggttcaa

SEQ ID NO: 69932 - DNA, 1228 bp, Homo sapiens
cactctctctataaacattgaaatgtctttaaagtcccaacatatggaggaggagaccacacttttccaacctgcttcttcaaacagaactttgttggtgcaggtggcctgattttggctttagaaaacatttgttttcctataggtgacgggcagaattattgggtagggcgggaagatggaaggctgcaattggtggagggagctctacaggctgaactgggaggggcggggcacacatttttttgagccctggctcatatacatgttgagatggaagagctgccaaagccaactgatgttttagggggagatgacccccacacccctaaccctggagtcacgcctctgctttgtgtttccctgtgtgtctccccctctaagaggaggatcctgagcacagagtccgggtccgggtcaccaagctccgtctcggaggccctaatcaggatctgactgtcctcgagatgaaacgggaaaacccacagctgaaacaaatcgaggggctggtgaaggagctgctggagagggagggactcacagctgcaggtgggccctggagggcggctggacccagtgctgtcggaagggcaagctgccggaagtggaggggctgggaccagtggggcagggggcctgccctgaggctcccaaccatcctctcctctcactgcatactgctcctttccagggaaaattgagatcaaaattgtccgcccatgggctgaagggactgaagagggtgcacgttggctgactgatgaggacacgagaaacctcaaggagatcttcttcaatatcttggtaagaggcttctacccccgagtcctggcccccagccctcctggagtggaggtgcgggcttgccccagccacgccattgctgagcttccatttcctgatctgtaagacaaggctggggttccagtggctcagagtgctgccatgcaggaagagcccctcaggacatgggtgtcctcattccctgccttcccccagctgcctggcccaggacttccctgggctcaacggccagtagctccagcccacctctaccctctcccaccaggtgccgggagctgaagaggcccagaaggaacgccagcggcagaaagagctggagagcaattaccgccgggtgtggggctctccaggtggggagggcacaggggacctggacgaatttgacttctgagaccaacactacacttgacccttcacggaatcc

SEQ ID NO: 69933 - DNA, 1127 bp, Homo sapiens
actcagaggctcccagactctgccagggccaggaaatgcttttccagcactcccctgtgtcgagctggtgggacttggtctggatgcctgttctgctggtgcctatctccacctgttgcttgcatcctggtttcttgctgcagagtgggcagtccagccatgacccatgggcacccaaccttttcctagttcacaagctggtgtcctcccaccagttcagggttctatggatttgcagggcagggtgattgtcgctcgcgcctgggtctcagctatgtagaccttgtcaggaagcaccactcagcagctctggagtattccttgaggacacacacacacacacacacacacacacagctcacccagctaggtgtgtgaactgggcccagtactcagaaagggcttatgtactcccattccacctggtcacagaaaagatgatctctcacaccccatccccagtggacccagcctgagggcccagtgcaaggataagggaattgtgaaaaatcgaacaaggtggggctccttgttcaatcctgcccctttcctgtcccctcagacaggatcagtgcttcctcccctcgggtggtgggagatgctcgtgccagagctctgtgcgcggacatgaaacgctgcagctactatgagacttgtgcaacctatgggctcaatgtggatcgggtcttccaggagggtgagtgtagtgatctccagcatatgtgggaagccagagcaaggggcctgggatattctcagtggtcaggcatccaggcctctctctgtgagtgacaggaaattagcctttgtgggagggaggagagatcagggaggccagagaaggtttgcttaatagtcgcaaggtctttctgggctggaggagctggcaaggccacaggtggcatggaggccacagtgacaaggaagttgggtcctgtgttgtctactggggatttctcaaagctgggcatggaagggtggtcttgggtatctggcctgctcacacctccttccgtcaactcccctcagtggcccagaaggtggtgaccttgcgcaagcagcaacagcttctggctgcctgcaagtccctgcccagctccccaagccactcagctgcatccactccg

SEQ ID NO: 69934 - DNA, 2060 bp, Homo sapiens
gggccctccttctacgggcggagccctttttgcccagctctcagagcggccccctacccgcccctcccgccgtctccccttcacctaagttcctccagagccgtctccctgggaattagccctctcctaactccgaccacagaaagctcagctttcaacctaagcttttggagtttaggctgtagtccctaagagagtctctagaaaccctgcccctagttttaagtttcgcccaatgaaaaaacaaaaggagagggacagaaggcgggtcggtgacgtaatgcgggttgattggcatgcaggccttggacgtccaggattagccacgcatttcgccaatccagaggcaggggagggacggtgcaggcgcagagtattgggtttggctggcctcgatttaaagagacagaagctgtcggggtcctggaagacggtccccaataccctccccccaagtccttgggaccacttgggtccccagagctggggagatggtttgtggcggctttgcctgctccaagaatgcgctttgcgctctcaacgtggtctacatggtgaggttttggaggtgggggaagcttcaaggcggaaaggccccgtggggagaatctctagggtacttccggtggggagaggggtgtatgggggttccgggaagattcccaggaacttccggcgacgagggaattcctggggacttccgtgggagagaggagacttccggttgattaagggggtttgtctgagggtgggggaatgaactgaaggccgtgggcgtaagttccatacctccttcctgtgaacctcagtttcttccaaactggaagtgataggatgatcctgagggttcatcttttgcattcatactaccatccctgccaccccctccccgccatcctagccattctaacctttgggagtgcctagggatgctcccggtgcggatagcaccatccccagctcccattcacacactattccattattccttccccctgccccgctcccaagtcctcttgtatggccttgggctgtgccgcatgctagaattgttgagatgtatcctgctctttcttcgtagctggtgagcttgttgctcattggagtggctgcttggggcaagggcctgggtctggtgtccagcatccacatcatcggcggagtcattgctgtgggagtcttccttctccttattgcagtggctggactggtgggtgctgtcaaccaccaccaagtcctgctgttctttgtatcctgacctgaagtgatgggggcaaccgggggcttgggagggctgtcatctaaggaagatgttagaagggtaggggacctcagggatcttggacacgtctccttgccctgccctgtcccataatctacgaaacaagagctgattttattgctttcaatttgacatggtggtgtaagttctatgaacagatgagaccagacagttattatagatgaaacataaaggaatctaggacttttttccataacctttcctctcagtacatgatcatccttggtttggtcttcatcttccaatttgtaatctcttgctcatgtctggctattaaccgaagcaaacaggtaagacagtaccctttcaagtacttacttgctttttaaaattttcctcttaacctcgaactccttccttagtctggccccaactacccaaagatcatccttaggtgcactgcttctggcctcttgggctatttgcttcctctgggatgtctggttaattttccatgaggatgatctagagaacctcaaaaggtagatatttatcgtgtctataattgttgcacaccgttatgcttctgtttgacttcctttgctgggctagggaaattgaggcacttgaactgataacaggatgtagggagacttaatttccctctacccatatctttcagacagatgtcatcaatgcttcttggtgggtcatgagcaacaagactcgggatgaactggaaagaagttttgattgttgtggcttattcaacctcacaaccctgtatcaacaagattatgatttctgcactgcagtg

SEQ ID NO: 69935 - DNA, 1057 bp, Homo sapiens
gctggagtcattcttagctgtttcccttcctctgtccatatactggatcacctcaacataccctggtgtggctctaagggtaaatcagggatagggccaaggagaaaacaaccaagaactctttcctgtaataagcaggatccagtttgagaaagtttagcgaatataaaagtaaaagccatttaaaaatctatattctttttttttttttgacacagagtcttgctctgttgcccaggctggagtgcaatggcatgatctcggctcaccgcaacctctgcctcccgggttcaagcgatcctcctgcctcagtctcccaagtagctgggattacaggtgtgcaccaccacgcctgactaattttgtatttttagtagagacagggtttcaccatgttagtcaggctggtctcgaactcctgacctcaggtgatccacccgcgttggcctcccaacgtgctgggattataggcgtgagccaccacgccccgcctaaaatccatattcaaagaagcaatttcagttcctttctaagctttgtcagtcaaggggctccactgacttcctaggccctgtaatttaaccagtctttaaggttttgcaggaaagtcccttcttccaagtggtttttccaaatcgcacaatggcaaagccaaacagaggaagaaacattaaaaaaaaaaaaaagaccattatttctttgttttgtttttcctgtataaaaaaggaccccaaatataaaggtagggaaagggacaagagggaacataccccttagtgtagagaaatgggaaggagaaggagaagcctcaaaaggagaggtgggaggggaatgtcattaaggcagcaaagtaatctctgtagaaagatggaggaggaccctccatagcctcagagataaaggcaaagattgccctctcagtgtccagaagggaaatggcagcttttcttccttccatggcagccactccattgctcactccggattaccttcatccttatgtagataagagtgctgcagagctcgaaaggcagagattcgcttgtgtgggttaaaa

SEQ ID NO: 69936 - DNA, 3516 bp, Homo sapiens
aaatggctttagattttagacaaattctcacaaatgagacactaaccgctttcctcctttactcccatacccccaaagggctgggagataaagaccttggagccaataaaacaaagtaggagaaatctacttgtgtctacctaggtgtctgggcagaggccatttgggaacaagtgtgttctggacagtgctaagtgctaagaaagcggcactagggaaaaagagggaagcacaataactccaaatgagtagtcacaaggtttgcagaagggggcatgtcattttcattcattgtggtggtctggagggtgcagggggtgtggtggtaactttcttgcacatgtgcaatcctgtatccgtcttatatatgatgtgataaataatatcatatacatacatatatacatagaagcatatatgcacacatacaaatatcacataatcatagaaccttcctactggaaaaaaaaaaaaaacttaaaaggtcaagtattcctgtctcctgctcatcaataacttctctgccagatggcctcaggtctttgcattaacactcccagggaggtttggaagttggaaaagtgagaggattaccttgtcactgagcctgttggattactgtattaatctgccttccgtcatcctttaatcgtagttttgccctcaaatgggcattgtttactccctattgtagaagaccccattgttggctacatctttatagatagtcgtaccactactttaaagggccagtgacagacaccaaaaacaaaataaaaacccacatacacactggaagcaagcactcagtaaaatgttgtagaattaatgaatgaaacaatgacacaaatgagagtatgttttctcatggtggagcgaaaaggtgacagcatcacctctggtaccccaactcccaccccctccccaatgcagacaggctgaaagaccggtagtgagactggagttcagccttcagaccggtagtgagacaatccttcagccgggagttgggctctgggtggcctaggttgccatggcaccgcctcgggctccaccctctcttgtccccctcaccgctccccccctgcagcgggggttgtggcagccagtcacgtgcccgccgcgtagccacacctctgctcctcagagcaatgtcaagcggtcacgtgtgatagcaacagatcacgtggctgccatcgcccctccgcccccttacactcttcgccctcctcccagtcgaagcacctcctgtccgcccctcagcgcatgggtggcggtcacgtgcccagaacgtccggcgttcgccccgccctcccagtttccgcgcgcctctttggcagctggtcacatggtgagggtgggggtgagggggcctctctagcttgcggcctgtgtctatggtcgggccctctgcgtccagctgctccggaccgagctcgggtgtatggggccgtaggaaccggctccggggccccgataacgggccgcccccacagcaccccgggctggcgtgaggtaagtgcagtcccttcccaggaatgagaaccagtgcccgcccccctcacagctttccacgcgttcgtttcgcgagctggttatggaagggtcgctcaagggcgggaagtggggcctttgtggtcatgggaaagtataattttagggactgaggtgtaggatcttcgatgcaaggcatgtgtcatgtgtgatctttgtgcggggcgcgattgtcccaaaggaaaaagcgttttctattgcagggcctcacgtggctggaggggttggtattgagtcattgtgttatctctggggccggccccaaggaagactgggagcgggggatgggatgctggtggtgttctttgcgctttttttttgggagtccctttgttgctgcaggctcataccatcctaactctgtaagcgacttttggtgataggagtctgtgattgtagggtctcccttgatctgagaatggctacctctcgatatgagccagtggctgaaattggtgtcggtgcctatgggacagtgtacaaggcccgtgatccccacagtggccactttgtggccctcaagagtgtgagagtccccaatggaggaggaggtggaggaggccttcccatcagcacagttcgtgaggtggctttactgaggcgactggaggcttttgagcatcccaatgttgtccggtgagaaggtggtggagggttgggcgtggggagtaaagggaaaagacagcctataggtggggtgtgatgatctgtagagaagtggggaccctgaggaaataatgagaggccatgttgggttaaaggggattgaaaagtgagcatttactctggtcaggctgatggacgtctgtgccacatcccgaactgaccgggagatcaaggtaaccctggtgtttgagcatgtagaccaggacctaaggacatatctggacaaggcacccccaccaggcttgccagccgaaacgatcaaggtgagtggggttggtaggcattgagaggtggattgggacctttgtagtagaaccttctgggatttcaggtatggtgcctagtttccagtgcatctgtacctcccctttgaaactaggatctgatgcgccagtttctaagaggcctagatttccttcatgccaattgcatcgttcaccgagatctgaagccagagaacattctggtgacaagtggtggaacagtcaagctggctgactttggcctggccagaatctacagctaccagatggcacttacacccgtggtcagtagaaagatggtaccaaaatgggttctggttgggagtaggagagtgattgcccgtagcaattgagaagtcatgtgcttcatgtgttcagtcaagcaagttgtgtttcatggtaacccatggggtccccatccattcttcctattccctttaggttgttacactctggtaccgagctcccgaagttcttctgcagtccacatatgcaacacctgtggacatgtggagtgttggctgtatctttgcagagatgtttcgtcgaaagtatgggacccacataccctggactaccttgaattccccaaatcgcttgttcataaaccacatccataccttgcccattctttttttttgagaccagggcttgctgtgttgcccaggctggattgcaatggcatgatcacagctcactgcagcttcaacctcctgggctcaagtgatcctcccatctcagcttcccaactagctgacactacaggcacgcacctccatgcttggctagtttgttaatatttttatagagatggggtctcagtatattgcccaggctggtcttgaactcttgcactcaagcaatcctcccacccctacctcccaaagtagcataagctactgcatctggccccattcttttacttgcgtactactaacttgcccatagcagaaagctctgaaatgttctggaattaggaacttcatatccctttattctctttattttttatttatttatttatttatttatt

SEQ ID NO: 69937 - DNA, 1133 bp, Homo sapiens
ggcaacacagcaagccctggtctcaaaaaaaaagaatgggcaaggtatggatgtggtttatgaacaagcgatttggggaattcaaggtagtccagggtatgtgggtcccatactttcgacgaaacatctctgcaaagatacagccaacactccacatgtccacaggtgttgcatatgtggactgcagaagaacttcgggagctcggtaccagagtgtaacaacctaaagggaataggaagaatggatggggaccccatgggttaccatgaaacacaacttgcttgactgaacacatgaagcacatgacttctcaattgctacgggcaatcactctcctactcccaaccagaacccattttggtaccatctttctactgaccacgggtgtaagtgccatctggtagctgtagattctggccaggccaaagtcagccagcttgactgttccaccacttgtcaccagaatgttctctggcttcagatctcggtgaacgatgcaattggcatgaaggaaatctaggcctcttagaaactggcgcatcagatcctagtttcaaaggggaggtacagatgcactggaaactaggcaccatacctgaaatcccagaaggttctactacaaaggtcccaatccacctctcaatgcctaccaaccccactcaccttgatcgtttcggctggcaagcctggtgggggtgccttgtccagatatgtccttaggtcctggtctacatgctcaaacaccagggttaccttgatctcccggtcagttcgggatgtggcacagacgtccatcagcctgaccagagtaaatgctcacttttcaatcccctttaacccaacatggcctctcattatttcctcagggtccccacttctctacagatcatcacaccccacctataggctgtcttttccctttactccccacgcccaaccctccaccaccttctcaccggacaacattgggatgctcaaaagcctccagtcgcctcagtaaagccacctcacgaactgtgctgatgggaaggcctcctccacctcctcctccattggggactctcacactcttgagggccacaaagtggccactgtggggatcacgggccttgtacactgtcccataggcacc

SEQ ID NO: 69938 - DNA, 1021 bp, Homo sapiens
ttcctggaggagctgaaagatggggaattcctgaggatgggcctaaaggggctgggctcactggtagaagtgggaatatcagagactgactagtgtagcttggtcacctagtccctactaaaaagccttatagcctttcctaggatgagactttgaggctcctagacaaaggcactctcccaggaggaaaatcttaggccctccctcccatgagggtcattgcaacatgagacccaagggagttgtgaagtcagccccagccccgcctactgttcctgggtgctaatccccagcacagaccactcaggaggagggattggctgaggagcttggagagggggcgtcatcacctcacccaaaggttaaataggggttgagatatgatgctcaggagaagcgctttctttcgcgagcaccctgaaccagaccatgacccagaccctcaagtacgcctccagagtgttccatcgcgtccgctgggcgcccgagttgggcgcctccctaggctaccgagagtaccactcagcacgccggagcttggcagacatcccaggcccctctacgcccagctttctggccgaacttttctgcaagggggggctgtcgaggctacacgagctgcaggtaggaagggacgcctttcccgagacagagtgctggggaaactggttttgacagcgtcagaaaggactgactagtgcagagcaaatgtgggacagccagagagaacggatgcccatgaaataaggaaaaggcgagttgaggctgggggcggtgtggctacactcgggcagagcccgtcccgactcttagcagagggcgctgcgaaagcgccttctcgctgtcctgaggtgtggagatcctgcagataaagtacaagtgcgcgggagggggaggccggagtgggcagtaccctccgcctgcttgcggcttaaagctacatgggttccttttcattcactgaggactcgtcctgagatggacagtccagacatggaacttttagagatttctcctcgac

SEQ ID NO: 69939 - DNA, 1436 bp, Homo sapiens
tgtgtctgtctcacagctgacaaagatgttcttcctcttccccgacccacatttcaagcggacaaagcacaagtggcgaatcatcagtcccaccctgctagcagaatatgcctacgtgctaagagttggggtgagttgggatcggagggatgatggggtgagtggcctactcaggggcccttcactaagaattcagtgggggtgcatttagggactcacaccaccacttccttcatctggctgctgacgttgcatgcagcctcctgtctagggtgattttgcctatgcaggggctggtgtataccataaccgatgtgctggagctacacgactggatgtgcactcatttcgaagagcacccactgtttgagcgtgtgcctctggaggacctggtgagtaggggacctagaggaggtggaggccctttccagagtggttctgtatttggacttaactcagtgccaggaggatgggataggtgtctaagggccaggggcagtctgaacagtgggcaaggacttattggacccttccttctcccagagtgaagaccccgttgtgggacatctaggcacctcaactgaggaggggaagaaagttctacgtaatggagggaagaatttcccagccatcttccgaagaatacaagatcccgtcctccaggcagtgacctcccaaaccagcctgcctggtcactgactgcttactctaccttagctggacctcgtctcccagggattagagaaaagagcaggagtcctgggtcttcccagttgagactgctggagctgagacacagtactctcttaaagaaggtggggagctgcccagggcagaacccactggtgttcatgactacccctggctcctctcaccttgtccctccactgccaacagaaaacaaagcagctgactgagatggtcaaaggactttggaccataggggatctttggaaggctgtggggtcttgctcttccttagcactcctttctccttgtgagatctctcctcagctggaatgaggaatgtagtccatctaaactgcttgctaggctcaattaccacttctgtttgctttgtggatcctgggataacatgtatatgtgtacacatgcctattctgccatttctcaggaaagggtggagtatgtatcatatgccttctaccatcctcctgtcctctccctgcgtaagacttgacctggggaatctgtgttccctaagtgttgtctctggagagtccttgggaaggtgtgggggtggagaccctctcctttttcacattgaccttcaattccagaacttcagagctagctgactggcacagagcctgatagagttgcagtggggaatgagggagtaaggagcagagaggtaaactgtgggagattcttttattttaattttttttagagacaggccctctctctgttgc

SEQ ID NO: 69940 - DNA, 1050 bp, Homo sapiens
aacactcaggccctctttttggggtgagaagaggcctagtagcttctgctgcctcagcaacttttgtggggggtcataattggcctttcccctttcgtccagacactggtgacatcagcatggagaggctccacctaccctctactctgggtctgtgacctttgccctggagagtggagggggctgcctcaaatgcttcttaaaacctgggttgtcctttctggcgtcaatccctacatgagccatttcatctgccaggttccgggtcagtgagctggtcagcacaagcatcagagattagccgttgtggccagtgatcctgaactgtcttttctcagagattctaccatctcccctcccctttgcccctccctcgccagatctcattccttctgccccactctcctgttttttgggttcctcttgtattgtctgtattgtcccacccatgcatgccaagccactccctatttttagatcttcccaaacagataacagcctgatagagaagaagagcatggtacatagaggcagaaaaccttggtttaaggtccagttctgcctgggcacagtggctcacacctgtaatcccaacactttgggaggctgaggcaggtggaccacttgaggccaggagttcaagaccagctactcaggaggctgaggcaggagaattacttgaacctgggaggcagagattgcagtgagccaagattgtgccactgcactccagcctgggtgacagagcaagactccatctcaaataaataagttccagttctgccccttcttaactctatgatcttcggcatatctgaccctcagtttccttatcttcacaatttaccacagagtgttataaggatgaaataacacaatgtgtgaaaacactgtggaaaactctaaagcaatggcaaatatacatgtatcctcagccctcccattctggtcctggtgacaattttcatttctccccccgcctcttgagcataaaactatccatatatgtatctctgtcctctcttgccgttctggactttggtagttgca

SEQ ID NO: 69941 - DNA, 1040 bp, Homo sapiens
tttttttctttttttctttttttttgagacagggtctcactctgtcatccaggctggagtgcagtggtgtgatcacagctcactgcagcctcaacctctgaaggcccagatgatcttcctgcctcagctccccaagtagctgggactagaggcatgcgccaccacacccggctaatttttgtattttcagtagagacagggtttcgccatgttgcccagggtggtctcaaactcctgggctcaagtgatccacccgccttgcctcccaaagtgctgggattgcaggcatggcccactgtgctagcctaggatttttttttttttttaagaaagaattaagccttaaaaatctattgtgcaagaacccaacttttactcaggagctgagaaggaagaagcctcaaaccacccatttcctgctttttagagatagagtctagtggaaccatggctctaactgggtcaagtcctcctagctctgaagctaaggctgcagagctgtcctttggactgtatttcttcatgctttccagagttagagccttgatcacggaacatcattgtgtgcagaagaatactgtacctagtactaagttcttttcatctttgatttttctttagcttcatcagtccttccttcctaatctctaatcccctgaagcctaacacagttcctaatgtgttttgccttaacctcttttctcttcccacattggtacttctggttggggctctctttacttactgcttaggcacatagtcaccttctctggactccctgcttccatgctttctccttcagtccattccgcaaactcttgtgatcttccaaaattagctctgattagctttcacttcctgtagaagcaagaacaagctcctctgcttggtacttagtctgtgtccatgtgatccaaaattaccttcctattgcatttcctactcctttgctacgtgtattggacctctggccaaattacaaaagatgtactctttgttctctaaaaccacactaaagttttctgacttctttcacactc

SEQ ID NO: 69942 - DNA, 1072 bp, Homo sapiens
tttcctctcaatttacaggcagagatctggctccacaaggaggcccagaaggagggctggagcaaagctgccaagctccaagggaggaagaccaaagaaggcctgattgggctgttgcaggaaggaaacacaactgtattagtagaggtgagttgttggaaattccagataccaagaacagctgtcccttgggtgtaaagcttgtagtaggccctaaaggggcctgttcttgaagaagagatctgtttaagaaccataaagcgtagttgaagttaaactcatgaaaccctgggtattagttacgaattcgtttaagtatagaaatgtactggtgtgttgatgagaaatggcctgacagtctagaatattactcctgaatgtgagtctggcacaggcttacaccttgtcactgattgtttcctggaacagttagattacaagttaattatattaattgttgctgaatagagagtaggtattttagaggaggtttgggggccataattggtgaagagtcagatgtggattagtttagagtgagagatggggataaacaagataatagcataagtggtttggagttgggatggctggagaatgaggtgatgatggtgtgcagacataggtaagtggtgaacttgtggtgagtccttcaggacattattgaaccatcttctgaatatacaggctattgctaactcactggcccaacataaatcacttcattctgttccaggctaggagaggaagcgtagctttaaaattttggagtcattttttttccgttgagtctgtagcttgttctatcagtatcttgatttattctccagccttaaggcacttttggaaattatcattaaacagcttatacagctatatcaatttgttcccacaggtaaactgtgagacagattttgtttctagaaatttaaaatttcaactgttggtccagcaagtagcccttggaaccatgatgcattgtcagaccctaaaggatcaaccctctgcatacagtaaagtaagtttgggatttgtctccagtgtgctgaatttgctgtcctcattgggtctt

SEQ ID NO: 69943 - DNA, 1053 bp, Homo sapiens
gaagttaggctggaggatgagagtggaatgtaattgggggtggtgcagtgatagaataaaatgtttataaagatggaactgttaccaatttttaacattcttgcctttatgaaaatattgtctacacttagttgtcttaaagaatgttttctttctttcttttttttttttgagatggagtctcaattctgtttccccggctggagtgcattggcataatctgagctcagtgcaacctccgcctcccaggtttaagcgattctcacgtctcaggctccccagtagctgggattacaggcgtgtgccaccatgcccaactaatttttgtatttcgttggagacggggtttcaccatgtttgccaggctggtctcaaactcctgacctcaggtgatccacccaccttggcttcccaaagtgttgggattacaggcgtgagccaccacgcctggccaatacttttcttagagatagactatttttgcctattcttttgataatttgaatagtacagaatcagttcatgtttgttttcttcgtgcacttagggtttcttgaattcctctgagctttctggacttccagctgggcctgacagagaaggctcactcaaggatcagttggctttagcaattggtgagtatttgtaaaggttctggaaactggaaattagggactggatctcttgttatcttgttcctccaaatctaggtcaagaatcatgtgcctacaagggtcagatgatacgaacgtgagaagtggtgtgtgtgttagatgttagggaacattaggcatcttttttttttccgagacagagtcttgctctgttgcccaggctggagtgcagtggcgcaatctcggctcactgcaagctccgcctcccaggttcctgcctcagcctcagcctcccgagtagctgggactacaggcgcctgccatcacgcctggctaattttttgtatttttagtagagacagggtttcaccgtgttagccaggatggtcttgatctcctgacctcgtgatccgcccgcctcggcctcccaaagtgctgg

SEQ ID NO: 69944 - DNA, 1027 bp, Homo sapiens
tcttcctaagtatccttgatggagggtgggtggtagggaagggttggagcttgctgggaatttactaatctgaagtttccagtcaaggcatcagttccgtttttatcaggtcatcttgtattatctatgatgtttcaatgagtcatgggtgagaaaccaggcagacagctatgtatgaggcttattaagaaattctggaagagctgggtgtttcagccttgtcagtttctgggaattaactattgggtatatgctttgagctattttaaaatttgttttggtttctggattctcctttttcatgacttttagatatgactatggctaatccaggcatacttatacagacccttttgtttattctcctacccctttttaccttttggcttatttggacttctgttagaagagaataacatcctgagagaaaggggaaaaataagttaaaatctgtttctggttctcataaataactcttgacaatgttatcttttctgtttttgatgagaggaaattgaaactatccgatgacatggtgctttgagctgtggactttttccggatagaagggatgatcaggagttgtctgtgtcagttatggagtattcaggatggtgggaaaaagcacctaattgctttggagtcagatctgagttttaattctaactctgccttgtgttactaggtgggttacctaagttctctaagcctaagcttattgtaatagtagctagcatttgagtgctatgtgccagatactatagttaatgctttatttatttatttatttttgagacggagtcttgctctgttgcccaggctggagtgcagtggcacaatctcggctcactgcaagctctgcctcccgggctcacgccattctcctgccttagcctcctgagtagctgggactgtaggtgcccgccagcacgcccggctaattttttgtatttttagtagagacggggtttcaccgtgttagccaggatggtatcgatctcctgaccttgtgatccgcccacctcgg

SEQ ID NO: 69945 - DNA, 1030 bp, Homo sapiens
ggcatcaacaatactgctgctcccttcaacatagatttattatggtatttctgaaatttctaacttatatgttctgtcttacaccttttatgacatagaactcttttgttctgtttttgctttgcgacactgtgaaccgtgcttctgcctcggaacctccctagttatattacttgtgccacatggatttctttaggattattgattcaaacctagagttgtctggaaaatgtgggttctcttctttgtgattgtctgtagtatgctttgaaggtgctctgcagtggtagacacactggttctggcctcatttaatgaaattaataacacatgcccctatttctcttttggatgatgtgtgggtgggtgggtactgaggtttcctggccagctgtaaggcagattttgacattcttgtgccagaaacagaaattagagtagtccagttacccagagagctcacttaacattgcctctttacttccccagtactgaaacatttcttcaagtataacataaaattaccgtaacaagcagacccagaatactgaaaataactccatttgttcattataggtatctttatttgaaaagtgaaaaatgctttgacacattacagatctgggtatttggattttgcctatggagtgcatatatgatttcaatgatttacaggctaaatagattttagaaataatcatcttaaaattgaaaacaaaggtaggtcctggtataatattaaacataaagttattaaacattttaagcattgttttttggttctctttcttttgatttctccagatttatgcagttttagtgctttctgctgaggctttagctagagggccacaaaacccaaaaactatatggttaacattttaggtatataacaagcaaggaatgcaaggatgagaaaaaatggagaacatgccgtgatttgcagactctattatatctaaattaagtagctgaatgtcaggcagaaattggtggataaattatttcctgatattggcactatctgctc

SEQ ID NO: 69946 - DNA, 1107 bp, Homo sapiens
gccattgcccgctcatccccactagacccctgagagtggggcgaggagagcacagatgttagttgcacaggggcacttcgatgtggaaagaaaagcatctgagactaataactcagtgtgccaggatcagctaccaaaccacagtccctcagcctgggaagacagacaagtttgttctagtgctggggagtggggaggaaaacagtgtggggcaaagaacaggactaggctttgaaacccacagtgggtgttggcaaaagtcacctttgtttcagcttcagtttgaatttaggcacctacttttgatttttattttagagaaaaaatttaaatttatttttaaaagtacatacaataaaatatactcttttgacatacaattctaagaattttcacaagcagaatcatgttactaccaccacaataaaggcacagaacagtttcttcctcagtccgtcccaaaattatctggggtgcgacccctttggagtcaaagcctccctgaatccttaacctctggtaaccatgaatctattctccatcactatagttttgccttttccagaatgctgtaagtggagtcatacaatatttagcctttcagtctggcttctttctcttagcagaatgcatatgagatctctgttgggtttaccagcgcgctgctcatccctttttattgctgagaagtattccatcatgtggatgtactactgtttgtttatccattttccagtggggttgtttctgattatgaataaaggtgctataaacatttgtgcacaggtttttctgtgaagatagttttttgttttacttgagtaaatacccaggagtaggattgctggatcatacggtaagtgtatgtttaactttgtaagaaactgtcagctgggcgtggtggctccctactgtaatcccagcactttgggaggctgaggcaggtggatcacctgaggtcaggagttcgagagcagcctgggcaacatggcgaaacctcgtctctactgaaaatacaattagctgggtgtggtggcacacgcctgtaatcccagctacttgggaggctgaggcaggagaatcacttgaacccaggaggcagaggtt

SEQ ID NO: 69947 - DNA, 1467 bp, Homo sapiens
ggcaataggccaccatgcctggtcagcaccaattcaagccatgccaggaatctgcctacctgccaggttcagttcttttaaggtgcctcttcagggacacagtgtgtctctctgattgggcttctaaatcaaaagcctgatgttcgtgtccctctcatagggggagctttggacacaggaccagtttggaaaagggtcaggtaagggtttccactctgcacattgtagagggaacactctgtaggcccatgggtcccttactagagaggttgagtgaatttgccttcagttaacatgggaccttctgtttagcttcctcttgcttcccaaagattttaagcattttgtaaatgtataaactcacctctggtaacagtggcccagacgctgctttgtgctaaaagcatgggaaatgtaaaggcagtctttctctgggaaatggatgctattctattctgctgcccctacctgttcctgaggcctcatttagaaagaaaatcccctcagaaggctgtctggcacccagtgtcctagccaggccaagtatatgagaaaggtaagtccattttccccttcaggtcctcagtggattacttaaccactgctgtccctcggtccctttttcctaaacgggtttagttctgtcttttttctccttttttctaaatgctggtaaatatttacattcagccagggaagaggaggccagaggtcgggccagctgccccattcttttaacgttgtagggcctgcccatggagcggaccctcctctttgggcctcgtgagcttttttgcttatcatgttccatttcgtgccgctttcccccttcaagatgccatttggagggtaggggatctgcttcccactgtgactgggctatgggattctgactaccttgcttacagattcatggtttgataaatttgttgtattcaaaaacttgaaatgcaggacgccattaagtgtctgtttatatttttggaatatttgtattacttacaattaattaataaaagtgggtttaaaaaacctttccaggaatgtgagctgccaccaaccttcattggcccttaagtgttcactgggcccatggcaagcaccgcctttcttctcgcaaccccttccatcatgaagcagctgcacccccgggctgagtggggtgttgcacccaccgggaggccagctgcagatgccacacagggcttccgctcaaggttacacaagttctgctgtgatcaaccccattgcagtcaggtgcttagcacgtgtatatgcttgatgtcctattgacttctgggcatgaaccagaagccctaagggaatggattattatttttttttttttttttgaaatggagtcttgctctgttgcccaggctagaggcagtggcatgatctcagctcactgcaacctccacctcccaggttcaagcgattctcctgcctcagtctcctgagtagctg

SEQ ID NO: 69948 - DNA, 1062 bp, Homo sapiens
ggaggttttctccctgcccgggaagaggacagataactgatttccgttcttttgactgtgttttaaaattctctttctaaacacagagtgttgggcctggtttgtttctgacaaagttacagtcctgggcctgtaatgaatgtcggcggcgctggggttgcagggaaaagacaaatcctcaaagcgtggacgtgtgtccccatggcttgtggatcagctaagctcgggatcatttccataagtctgcttttcagggattctctgctggtgctggtgcaaggacttctgttccaaaggctgggaaaaactaagctgtcccagcccctcccatttcttgggcagggctcttttcctgttgtgtcttcccccagggcctgtcctgtaccgagctctgtctgttccagccttcatccttcctggctgttgcttttcctcttaagggcctcagaactcttgctcttcctgggctgagggggaatgagtgttcttgccatttgccagcctaatgcgcatgctttctgcctctggtaacaggagtgagtgagcccctcagacctgcactctgggtgtctcctgctttcaaaggttcttaatagtgaatgctttaaaattaaagtcatcacgaaatggaagttttcccagggtggaaaataagaggaagtgctgctgtaattgggagcacaaggggcctcccaaaaaggagccccacctcagcatcactgccttaatcgtggcctccctggggtgggtggggttctctcctccctccctccctcctcctggggtgggagggcgctcctgttcccatctctgtgttccctggaggcaggtatcacaaagcatttgtgaattgctttaggtgcagggacaccacccactcaggactcttccccatcatcccttccattgccacaccctagatccagcctcaggaactaacaagttttgagaaaagcaggtagtagagcagcagcttcgtgctctcagcggtggctggctggcatttttctctagcgttgtggtgccaccttcccttcttgtcccaaggttataaggccttgt

SEQ ID NO: 69949 - DNA, 1031 bp, Homo sapiens
tgcattctgatgaattctctggagtagtatttagaaaggaaaggaggacagccagcctggaaaaggatggagggaagcagggccccatcaagggagtggggaatgagggatgcctgaggtattgaccttgctgttgtgggtctgaggtactctgcttcaagctcctgcccccaaggtcaaggcatttgtggtctcagaggcccaggggctgccggccacattgggtttttgagaagaccctcatcccctgcagagtccaagctccctccccatctaggactgaggcgcttctgcctgttgggctccctgcagcgggcgcaagccaggcctttccatgcccccagccagctgcccctttcacccccgcaacctctcaggattactcagccttcacagcgtctgtcactaagatgctgagtgcattcctgacggcctctcttcaggaaaagcccaggctgtgtggccttttaaaaaagactctgtgcccgggttaagcctctgattgtggttctgcatgaagaaaccataaaccaaagggaaagcgatggttcagctttggtcttggagctttgtgtcagcgtctgtcctgagtccctgagcttagaatttaatgtgagccatgcaggcaaggtggggaagctgtcctttccctccaatttcagcatagaaatagggaaagtccaaggaacctctgtcttgctgtcttttgtttttttctttttcttttccttttttttttttttttttttttttttttagccagagtctcgctctgttgcccaggctagagtgcagtggcccgatctcagctcagtgcaacctatgcctcccggattcaagtgattctcctgcctcagcatcccaggtagctgggactacaggtgtgtgccactacgcccggctactttttgtatttttaatagagacggtgtttcaccatgttggccaggctggtctcgaactcctgacctcaggcgatccgcccacctcggccttccaaggtgctgggatatcaggtgtgagccaccacg

SEQ ID NO: 69950 - DNA, 1003 bp, Homo sapiens
ctttacatagttagactactctgttcgccctcctccattcccccaaggacacagtgtaaacagcacgtagtcttgtgggttttatttttcaagacaggtggccgggggtcagaggggacactgattgtgggggcttgggccttctggaaggatcaacctcttaggcttacaaacagccttgctgcacagaccccttctttgtgtcatgtgacttgggatgtgatttgttatctgcctgggctgtgggactttggccattctgtctggtgcctgggcatctgggggtgggagaaggccaggcatgtgccccctgtgagtctctaaagtctaaacttccttagaggttctcaaatatggatataacgaatattcaggacaactgtatgctacattctctcactgtctgctttgagagttaatgaattcagagagattgaggtttcttttaggtaattttaataagagggggaaaaagaaaatggggtttgaagagaaatagatgttcttaagctatttgtttgctcctgtggttttggggtacaacattgagaaagtacaaaagcagcattgatctgcttttcatcttgtcttagtctggccagctctgggaagcatggaattaactcgcttgtctttgggacgtgggattgggtgtggccctgacatatttccctcacttttctgaaatggagtagtagttctgaactgggatgcagatgagcacattaacacgcaaatcttacaaagaaagtactagaaattaaagtggataagttgacgacttaaaactggaagcatctctggaccagagaccaaatagaatggagtttctttgtctggcaaaatgcccagcccttcaggtctgagtatgcctgcaccaggatctgttatcacagggtactccagtgagcgccacagcctccctctaggcaaaagtgtgtatgccctgttttatgttagctattctaggagttagccttgaacctgatctctgagtggatct

SEQ ID NO: 69951 - DNA, 1056 bp, Homo sapiens
agtgagatctgatggtttgtaaaggggggttcccctgcaaacgctctcttgcctgctgccatataagatatgacattgcttcttatttgccttccactatgtttgtgaggcctcctcagccatgtggaactgagagtccattaaacctctttccttcagaaattacccagtctctggtatgtctttattagcagtgtgagaacagactaatacagtcttctttactcccctttcagggagagctgtgcttttcagggaggaagctgcaatgatggtagcagacatcagacacgtgggacaaagtgttgagaggccaggcagtggctgcagtacccctgtggcccagatggcacaactagtcagctgtggtgctaagatggcagcttctcacgtttttaatcaataatttttatgaatttacgtgataggttagagttctagaagtatttagcaagacataagtgttcaatctatttttcatatgaaaacttagcttattctgtgttggtggaagccccgtggtcagtccttgggaagagccctgtagaagtcaggtgagaggcctgagctcacagcacctgtaaccaacggtgcaatactaggccgagggcagggctctgcctgtagccaaaatttccctgtagaaaacatttttccttgctcaggcctcattttttaacattgctgcaagttcaagatgcaatcaggatggaaacgggtcctttgggcctgcatcaggagtgaagaggagtggagggtgtgtatgattactggtggtggcatcctcacaggattgactttgtatattgatggaagtccttcctgaccatgttattattcattgcaacaattttagttagttaattatttattacattgttccccctagtagatgtaatggaacaagaatctttatacaaggactatacaaatgctgtccttctaccttatataatggaaggcacttttgccagttcaagataattgctatcattaaatattgatagagcatagctgttttttttttaaatttctagaagtagaaatagaggaaag

SEQ ID NO: 69952 - DNA, 1032 bp, Homo sapiens
gaaggtgggccttttaacatttgagattctgcaaggtctgtaccaatattacccaaactgattatgacaagtcttgtcaatgagagattttaagtgctgaatatctgacactaagtccaaccttctccccaaaattcaatatcctcttagttaagatctgagtggttcttgtagatatctctaaaaccccaggtaccttctctttcacctttatagttatcccagtcaaccctgttactaacagtctaatttcaggtgcttcctggggcaatgtcctccccaaaggtttgccttcaaacattccatcttccgtgagaacttctgctaccacttgttccaggagcccttagtgaagtcaccataaaaatcaccatatttaatatttcccacctcttgggaaagatttggagctaacaaactgttgtcatataagtatcaccaaaattggtttgttcctttttcaggagatatacgtcattgcatcaaatggcatatataatacttgcaaaattactgtgaaaaatcttgttccaaaaatggtgccagatttctctttaacatggttagcaaagatcagcgaggaacatgattcattcaataattcttgaatggggtgactgagttatgaatggagttcatcacagccagtcatttctgtctaaacagattacaagaggcattggatcaatttctttttcaagcaggcacttgtctaagggctaaatcttctacatctacttaccagggtgacaggttgaaatctgcttgttcatgtgagataaagaatcacctcacagagggcttagacaagggtggtaatacctgaaagctgtgtaagattattttgaggaaagaagtaaggatagaataactcttgactcacctccaggtcttttggtcagtcctgaaatttctacctcattgcttatttatttatttattttttgagacagagtcttgctctgttgcccaggctggagtgcagtggcactatctcggcttattgcaacctctgcctcccagtttcaggtg

SEQ ID NO: 69953 - DNA, 1029 bp, Homo sapiens
ttaggtagtgaattttttcgtctgatgcatggggataataggatggaagagctgaggtcatcttttcactgaacagagagatggaaaaatcagccacaacttgccatgttgacaataaaatttaaaaaaggagaattttcaaatattttacccaacttctacgaaatgttatgttttatcacagtgtaattatttatattccttttttggaaaaaattaaaataatatgctttgtataactgaggcaagaatttgattcaattgagtaatatttggctacaattaatgaagaaagggcaggacacaggtttattttgaaagaaaatttctttatttagcctcagttaacttggatgttaccatccaacacacccgtcaccaaaattgggctctcagctaggatgtggggaaacttatattggggaactttattgcatgaccattaacattactacaggtcatgagaaatgataaagaatagatgcatttgttcagtggatgtaaatatgagggaaggcaaatgtcttttgctccattctagaagtgatctggctgtaagacagatgtacatgtatgtgagtgccataatgtggacttgtagaaaacacttactcatattcatggggtaagatgttccttcatttgcaatgggttttattgattcacatgctagcaaagggacccatgtgctcaaggtgtttctttctttcaggtacctttggaaaagctctcaggagacctcacctagatgcctattcaagctttggacagccatcagattgtcagccaagagccttttatttgaaagctcattcttccccagacttggactctgggtcagaggaagatgggaaagaaaggacagattttcaggaagaaaatcacatttgtacctttaaacagactttagaaaactacaggactccaaattttcagtcttatgacttggacacatagactgaatgagaccaaaggaaaagcttaacatactacctcaagtgaacttttatttaaaagagagagaatctt

SEQ ID NO: 69954 - DNA, 1164 bp, Homo sapiens
tacaggcgtgagccaccgcacccagcctctttgagaagtctaattctgacccttgctttcaatgctgcatagttttgagaataataatggagacagcataatacaagagcacaggtttggtacaagacctactacttactgcatgtactgtggggcacatacaatactttctggtgaggtacttgtgcaaatgaaatgaagatggaaaactacatggcgctaggcacatattaagggctcagcaagtggaagccatcgatgttattctaaaatatatgaccaacttttcccataagtatttattatacgctctgtgccagacattgtagttgggagagaagtatatgttttcaatttcacagtttcgtcagaggtggataaactaaaagtgcttggcaagccagaaataaagagcgtagagttacaggatctgagcatagaagtgagtattctggttagacccgtttagaggcagagtggagacccaagctcattaaagcataatggggttaactgaaaagacacttaaggaaaacctaaagggacagaactggggcataataatgccaggctgcctagatgctgaggctggagatgaggctgctcccagagtagctctgggccaccagcattactgtgtcacgttctgcatatttgcttttctctcagcccaccacctcttgctgcccagtttctgcttcccagacacatgcgtcatcgtgacatctctaaccctgatgatatcatttactcttcacctgctgtgtccagcagtaaatggcgtatatttctgtgttgtttggttcagatactcatgagatgatatgtttagctgagcttatctttgagatgggcattaagaggtcattggccaagtgccaatcctggttctggtcatctgggaccttttgtaagaaggggacagtgctgatggtatgtggtttagaccatggctgctttggctgcaggatctgcacatatcagtttcccgtagaaaccaagtgagcaataaggccaccacacctagcacaatggctaattaagtcctctaataaattttttaaaaccctactgtaaatttttgcaatttttttgtctatatgatgttctagtcaaactttcatctataaatatggaagatgccaaaactggggagaatgttga

SEQ ID NO: 69955 - DNA, 1629 bp, Homo sapiens
tacacccaagatctcacagttgattgttgaggaaactaaaaagtggcagaaaatagcaggaagaccttcattctgagaatcagatgacctctgttttatcctgacttcattgtttctgtatctgtaaccttgagcaagccttttaatctttccatctcaactttagtttccttgacttgaaattggaattaacccctgcccaatctatgtcagggacaatctgtaagtatcaaacaaacaaacaaataataaaaaggaatgcaagtgaacctgtaagactccactgtgctaatgcctatattgtttctctgatttcagtgcttccctcattcaccaagacccccatggatctcaccatccgagctggggccatggcacgcttggagtgtgctgctgtggggcacccagccccccagatagcctggcagaaggatgggggcacagacttcccagctgcacgggagagacgcatgcatgtgatgcccgaggatgacgtgttctttatcgtggatgtgaagatagaggacattggggtatacagctgcacagctcagaacagtgcaggaagtatttcagcaaatgcaactctgactgtcctaggtgggtgaatttgttaagattctgtagtataaatcagtcttgaagatactagctcatccaaggtccctaagtatcagaagttgtgagagtaagagatgaagatgtatggggcattgccttttcctagaaagtattaatgcaaatggcctcttgaacactttgaagtcagggattgcatgacatcctcaagtctggccactgaggtgaatccctgccccctccatcctgaagagaggggccgaggaaaagttgggatgctttcccttttatgggggatcaccctcctctaatttccccactgtgctgtctatatcagtagtcttaacaccataaagaacattaaaaaaaaatgtgggaacaaattgggaaggccttactctcttttctcagcctaccatacctctccggaagtcagagtttttttttcatcttttacctaaacaaatgctttttaaaaatgtaaacacaattattattcacgtatctttgaaagagctaattaacgtaacctattaagatactaaataataaaagtaaattattgtcagagttttaatataggcccaggcatccggccctaaaaagtttcacttaaaaaacttaagcattctgattttttttatttatcaacatacccttgtgcttgaaattatttttgtactttctatttttaaaaagcttttgtttcccactctccccccctactaccagcttcccgacttttgcaaaagtgagggaagctgagattttaaaaatagtagatattatccttaactggtgttatgagtaaatgacagcagaatagtgaaatactgaatgttgtatatgtttaggctcttagaaaagtgtgtccagtaagttgtgggagaataaaattttaggttacaatttgaataagtttaaatgctacattttatgatatggaaactaaattttatttgggaaattaaaagcataacttgttatttcagaaacaccatcatttttgcggccactgttggaccgaactgtaaccaagggagaaacagc

SEQ ID NO: 69956 - DNA, 1083 bp, Homo sapiens
tttatgatctctttataaagcttttatttctgctgaggtagaggaaaatgggtctatagtttgctgattattttaatttcacagatgggaaagagagttttctaaaattgcttcatctttgttttggcatcaggatggtgcggtggaatgagaatgaaattggatcttgggagaatggaagggtaatctcagcccttctacttaacttaaattccctaaatattagtctctgcatccatgaaatggggactctcctttcttctcttcccaactctgaggcttgttgggaggtttacatgaaagagaaaattattaatgatttatggggtgctaaaaaattaactattggtcggtaaaacatttacaagtaataggaaatgtgaatttattataaataattttaaggtccattgttttagcatccaagaatctcagcattagaaatctagttacctgaactttacatagctagttagtagcagatctggatttaaaagaaaagttttcatctctggtgtaactttctgtctattacatgatgctgccatttactattagctgccatggagacctctgtaaaaataaatatgttttataaaccaataaatcagaatttgcttttatttaagcatgggtgttaaaatattaagaaccttcttttgcattggcatttaaaaatttacttaaaactgctttgtccacgatatatatttttaggttgcagcattaagcagtgccagtagtttctggaaataaaacctctgatgtagcttttggaactgaataagcttttggcattcatctgtaagggcctgaactgctcctttcccatggtccttgtttcatagttttttagtcccaagatctgatccccctattacgttgaaacacatgtatagtatccatcgtttttttcacttccttgtgaatctgaacatcgatttattagatgagaatttcagaatagtacagaaaacacctcgattacaatatgcagacattgaaaaatagcagccctggagttatcaaagcatcccctataacccattcaatacacataaaaagttgtcttttcaaatagta

SEQ ID NO: 69957 - DNA, 1064 bp, Homo sapiens
ctaagagaaagaaaagggagttaaattaattgacctttgaaaaatttctcaaatggtaatttaaggttgtgcaatgggcttttgatttttgctctgtcagaaacttttgctctgttcgctatttgaagcattacgtaattgaaagacatactgtatgctttggcgaacttctgcatgcgtggttggaagagtggttttaaagtttaatgtatttttcagactgttcggatcattcagaatgtagtcattttgatagaggaattaatagggccagtgtcagctttttcggattttagggaaaaacttaaaatgttgttgagggaatcaggcagggtgtaagaggtaagttggagaaaaagagttttctattattttgagagaggtggagataatgtggggaattatgagaaattttttacaaatgatatgccacctgggtggtgatactaggctttctgagcttatcactctaaagggaatgcttcttttaaaattagggatctgaagaacaatgaaatttcctggactattgaagacatgaatggtgctttctctgggcttgacaaactgaggcgactgtgagtatgaattgcctcataatttagctcactctttgatttaaaaattttgtcttcactgaagtcagctatacaagttgacatcatgaagagatgagaaatcagtgcttaatctggttaccacccttgatcctctccccaaatgcctgctgttgcgcaagatgtatattattaactttttcttccttaggtgaaagtgttttattcaacattttagtatgtgtaatttactttaatatcctcataataattttcatctatgttgagggcttacacttttggaattatcattgcgtaaaagttagtgcaggcacttccacatcttgaaatcctcaatgttgtactgtccccgtaggaatttttttaatgaagtaatctagtagccactgataatgctgtggtaggttacaagcaaaacaggatgaaaacatcttataattaaccataaaatggtcttgcagatggtcaaattacatgtgttaagcc

SEQ ID NO: 69958 - DNA, 1052 bp, Homo sapiens
gttgcgtccagtgtgcaaccaaggctgagaactactgccttaaagagaaagcattaaacctaaaaagaagggtgaaagatagtaaccaacttgtaaacagattgtacaggataaacttgaggcccagctccttgatagacctcatgttttagtgtaacatttaataatctcattctggattgtttaaaaacaaatcttaatttgtttgtgtctatactgagtggacaagactttagaaattaaagtgcagtctagtttcagtattttattattccaaaaacacatgacacatttcagtaggaaattcactgcctgcttaacaaattgaaattctttgcaataaaaatgtttagaaactgaaaacactgtatgtaattgaacactgactggttgaactatattgtagtaatgacacattttattactacctccagaatttaattgtcatataagctaactcttgtaatactcaatgcagcgaattgaaccgaaacaagattaaaaatgtagatggactgacattccaaggccttggtgctctgaagtctctgaaaatgcaaagaaatggagtaacgaaacttatggatggagctttttgggggctgagcaacatggaaattttgtaagtgtgggttatcacagttcctactgaggtagtatgatcatagaatgctcagtgtacattcagcaggtcttatgtgaaatcctatgttaaaatctcatcatccacaatcttatttataagtcagtattcagttttgattcaggtaatgtgatcgataatttataagtacctaaatttagtatagtataaactatatagtatttttttgctgacgtcttcatataacaaaagctaaacatctaataacaataggaatctgtaataggttgtaatcatatgtcccctttgaagagactagataatgaagttttgatcctgcttttgattcttactgtaaatgtaggcagctggaccataacaacctaacagagattaccaaaggctggctttacggcttgctgatgctgcaggaacttcatctcagcca

SEQ ID NO: 69959 - DNA, 1117 bp, Homo sapiens
cgactgtataaaaaaattagcgagatgaggtggcacttacctgtagccctagctacttggaagctgaggtgggaatattccttgagcccaggagtttgagctgcagtgagttatgagtgtgccactgcgctgtagcctgggtgacagagtgagaccctgtctctaaaaaataacaataaataaaaatttttaaaaaaaaagaaaaataggataaagaaaaatcaaaccactgtctttaagtgcatagcatttagacagccacagctgctaaacagaaccccagatttatataggaatgttttccacatatttgaatattatgatttataatttaatgaataacttaaaatggccatggtattgctctttaacttttaaaagtactgttcagattagtcagttccatatttctgaagaaccagtcaggaatagaaaatatttttcttctttcagattgttgtaccgttaaccttgttaactgtggtttcttttaattctagggctggaaacaggattgttgaaatactccctgaacatctgaaagagtttcagtcccttgaaactttggaccttagcagcaacaatatttcagagctccaaactgcatttccagccctacagctcaaatatctgtaagtgaagttttctttagcaaaaactttcacctgtaatgaaaatattacaatgaaaaaataagatataacaaactttgtctactttactactgatggattgaaagtataatttattgacttgaaatttgctgtaagctcgaatgaccacaatcttcagtttattcttacacttttagattacaaaaaattacatattttttattagaaaacctagatggtgtgaaaagtgctcatttttaaaaaaacaatcaaaatcagaccattgctatgttttattaataaatgaatgtcataaaaagtggatatttataaaaaaattttgcatccgtcacatattttaatcactcttttcccagcaatatgtgtgaatcttaacatctgtccttgaggacctaaaaagtaattattttaagtttccattgatggttaagttctctggagactccttctaatacagagatggcctgcactttaacttgcaa

SEQ ID NO: 69960 - DNA, 1125 bp, Homo sapiens
aggtacatatctgcataagaaattaaatgccagaatatctttcatactctgtattctgtgaaagaagccttaagggattgctttaggaacaatcagacttgttctttgagctggctcgggaatgcttgaacttgttaggtgaaaagccctaattttaagatgttttgtaatgtctgtaccagagaaattttattatgattaaagggcataatatatgaaaagtgtttagcatagggcttggcacttaatcgatcttcaatattgttagattttatacacattctaagggtgatatatagagagaattctgcttctaagaatatctcagtatggcagagaagaccagtggtgtaagtttgacgtcagcttgcagcacaagattttgtgaaaatatgtaagaggtacacctcacttgggaacctactgtgatagtgagagactgatgagttacaataatgcagaagagctcagaacactgtagaaatccagttttgggtgcaaaaaatacacaagatatattttgtaagttttctttttaatcgaagattaactgcagaccgtgtacaaacaccagtgtgtgacttatgtaagacacagaattctgtttagagcattcagattgtttcattgtttctcgcgttgtaaagaggagacctttctatgatttgtaggtatcctttctaccttgacgttattttctcctgccaaaagatggtctaaaaaagaccaaactgcctgatctaatatgacaattatgatggcttgcacatccgtttgattgccattttctaacaaaattgtcatttaatgctgcattttcccttgggagttactatattgattgatgacttttgaagaactttgaaatgacttcttttttttttttctgtttgtttctttccatttgttcagtataacagtcaccagtagaactttacacaatggtagaagcattctgtatgtgtgctgtaccatttgatagctaccaggagtggatggctattgagcacttgaaatgtggctactgtgactaagtagctaaattttagcatttaatttgaattaatttaaatttaaagagcctcatgtggctagtggctgccatactggacgtcatggtctgat

SEQ ID NO: 69961 - DNA, 2291 bp, Homo sapiens
atttatatccacttaagagagcatgaaggttcttttgagacacttatgctttctggagattacagtgaatcaagaagtagaaccagtcatcacactaagtggtcatatcactaacctcataagttatattttactgttgttaatttggtccagatttagattcaaggcaggtgttaagagtatccgaacaaactagcacagttcttatatgtgagaataatgcacttatccattttcttagtgattacagaggcattaaaatgccagtattgggctgttctgggcagtagcatctcacacctgagcacagggggaccctagtctgcactctgtgtcttagaaaacctcccatatcagaagcaccaaatgcaatggtaatggatagtgaatgagaactccagtagagctgaactgggtccctgtggccagaggctgcagagctggaagagctgatcctgtatgtcagggaaggagaaaagcacagtgtgtgccctggaaaccagaggaagtgtgatgtttcgccccccaagtgggcatcaaggtcgctcgtcatccttctgtcgtctgtcctgcatgaagttaggagcctccgattggtgcccttgcgcctggtcatgccctcttcctcccagtctttccacccacagccatcagagtagccattctaaaatgtacatgtgatattgtcaccccaccatttgacatcctctggccccctccccacagttgatcttgagataaaggtcaaatgtctgatgtggtttccagggcccaacttgactgctgtcatctcccggcggcctcactcttgagcctcttctttctccactctccacccgtgcactctgtacttagccatcaggtgttccttcatttcctctaagggaagctttgctctgctctcacttgcccaaatctttgcctcggcttagagcactagcctctactgtcctttgctgagctaactcatcccacagatctcagtgtggccgtttcttcccttcctttgggaagttttgctgacctccaacattctagaagtctgtccacagtacttccactgcccactcctcctttcctgtcgctgcacttaccacactggacagctccctgttgcctgctatcctccccactagactttaagctctgtgaggtcaaggggcatgtccatcttgctcatgtagaactccagtgctctcagagtaaatatcatcagatgaaaatggtaagccatgtttgcgtctgcattttaaaggtatttggcaaagttggctgaaaagtgaaataggcaacaaaatgaaaccattatcactggacccgagaagctgaggccaaaatacgtggttctcctgtttttccagtggtctcttagaagcctgagggaaccatctggtgttcctgaccaacccaagtccccaggtctgtgtgtccacagggactaattatacttcacttcagaaattagttaaccatggaactccctgtactatcaacaaacatagaagaccaaaatattcctagtctctaagatggatttgtacaagactgaaacaccttccagtatttacagtttattttgtgatttttgaacaatggaaagatggtgtttccacattaagtaatggaaaaaggtattcagagttttgtttttgttcaagcgttgcacatttcctgccaaaaatattaattaactacagcgctttttaatgtgttgatcaagtttggcatttattcctatttggagaaaaatgaaaggtggggttgagttgaatctctgtctactagaagtgggtatttttgaccaactccataaaatatgtttttttttttaggattctagatgataaaaaagattttttaatctagcttttttaaggtagttgtctcccatttttagccccctttattatacaaagcaagttttttgtttgtttgttttgtgttaaactggtatggtgtatatcaggtgggtacttgccagttagtctgagagctaataagaaacgagtatttggatttaattcagttccattaggacagatttaaatttttgtgatacaaggactattattctcacagttgtaagggatttttgtgctaggaagcagtgctgacaaagacagcactgtgcacgctccgtctagaactgagcactttcacactgcgatttaggaggtgtgcagttcaggaaattgctggctttggctggagcatacttttactgcaaggaaaattttattcgtcactcaagtaattggcagttttaataccttgttcataattaccttata

SEQ ID NO: 69962 - DNA, 1034 bp, Homo sapiens
atatttcttttttcatttttaacatgtgttatgactggtgcatgaataagacactgattattgcaggacctctatattaaaatattaatacatggccatctttattatgtttgtgatccaaaggataattatattttatgttgacctgactttttgctgaaagaactgattctttgcttcttacaccaacactcgtttgctggttagtgtccttaattcttcatcaagaatctgtctccttacacaagtttcctcagttggctttattctttgatgctgcagtaccaatggaccagtctaaacatgtgttcttttaatgaaacctcttaattatctttttagaaaagagatgagcagtttattttttatctatatgagaggagttctttgcttgccaaacttctgttaaaagttgcctgatattatggggtgttagttattccagtcaagatagttttcaaggaagcttttcggagggagtgggggttattgttggaaatataagtgacctttaatgtgtttgcagaatgtagtgttttctttaacagtttgtaattcctttataaatggtgctaagctggttgtttgcaagttatatatagaaattagtatttccttggggccaggcttgactgtaccagtccatacatttaatctgcttgctcgatggttgtttgtatggaatgaccacagattcagcaatttgttagttgcaatcactgaattggacttaggggatgtggttagagtgatgcattctaaggaaagacggtattgcaaacataaaaaatggcttcacattaaatttcagtgcacacatcctctaaaaggcaaatgctgcatgcagataccttctctaaattgcctagattgcatgtccttacacatcacagctgcaaggtcttaagctgcctgttatccgtgtactaggtaggagacagctaaaactattgacagatatacattattcaacaggaagctacacttttgttggtttaggaattccagtgtgagaaaacctgatattctggttc

SEQ ID NO: 69963 - DNA, 1067 bp, Homo sapiens
acagcaggggactgcagccttcaccagtacatacaaaccagatattacgtttagtggaaataaacttatgcagctcaagtcttacaaaataaacacataaacgtcttaatatgataagttgtaatcttttattggattttaaatgtttatagatgacttacacataaaagagagtttactatacacagagctgtatttgtgacaaacactgtaagtttatcttcacatttaaatataaactggcccccagaattcaaggttgctaggtttttgaattctcaatttagaatgactgtatttgacacataaatttgtaattgctgcatgattccttaaacccttcaacagttcccattgctctgaggtgaagaaaaaaatccttctcaagacgtacaatgctctgcatgatctgcatcctgttggcccattgagcagtctctggagtcactcctcagttctccagatgtgccaggttgttccagccctgtgttcttttgcatacgtatttcccactgcctagaatactcaccctgcctgcactgtttaaatcagactcttaggtttccccttatacatttttatatcttctttattataatgtctactttatcatcatataagtaattgtattttttactcatctatttgttattcttttaaaagaagtttcccccaccaaaatgaaattttacagcagctgagatcatgtcttttattttctccattgcaaccctggcatgtagcatagtgcctggcccatggtggatgctcagtacatgtgtgttggatgaatgaatggatggcttagtccagattaatatatatgggtaacttttctgttcctgtgtctccattgttttccttaataagacttgttttttccaaggtaatgacaattttagatttgacaatgacccattttgggcaacctttctgtggtgtttcttgaagcccgtaaaattcattcccacctgcatgacttgacttttcagtatagcttgccacaaaaactcttgtattaccgatacttatcctgaacccacactattccctcatgccctctctca

SEQ ID NO: 69964 - DNA, 1719 bp, Homo sapiens
aaacaaatatgtatgcaaagcaatttctgttttccttgactgcaataaggacattgatgcttaaatgtatgacaataaaaagatttctatagaggctttagtttcagcaacctgcctaattagctccttttcttaaaccatgatgtcatcatatcaggttaggagtggggagatgggagggtgaagcagacctgccagttcacaaaagatctgttcaccacgtgccaaaaaaacatctcttaaaacatttgtgggcttaaagtatttgaatctgccagtctccctaaactaattttgtccttggagcttgtatttttgagtttggcattttggttgccatctagtttgtggacagaatagaccaattatttctcctgctctcactggtgttcatagagatacttcataagcccagttagcactattagtgatttttagaaatgacttataattttatttttgttttcttatagggacttaagtcacaacagattatctttcatcaaggcaagttccatgagccaccttcaaagccttcgagaagtgtgagtcttcgttattttgtttttaaggtttgagtaaaatacgttaccccttatactatttaaccgtaaggaatacttggattatagtgagttattcaaaacttttaacttgggtggtatcttgaaataatatgtaaagttttcacctctgtgaattacagattacctaatcagcttttctttttctttttttttttggcatttgtaggaaactgaacaacaatgaattggagaccattccaaatctgggaccagtctcggcaaatattacacttctctccttgtaagtgaatatcagcagaattcctcatgtatgtttgcaggaaccttgagtgggagttccatagggactagcatagagatcttagaagaaaaaaatggaatatttttttcagggcatagtaaagatacgcgctttaaattggttaacttgttttctagcctctaactctctcactgctaaatttcatgtattcttataacaacacactttacactttgctgttgttgccgaactggtcttcgagattcaaagaggccagctttacaccatagaaatgtgtattttatcgtattctgtagactaggactttaattttagtatcgctcaatggttggcatggggatctgtgggttatgtattacgtagttcctagtggagaatgatcagagttgctttgtgaggagaaaccggagttgagaataagccattggagtatcctgttttaagtgtggtacctgcagtgtaaatcagagttcagagacatcaactcaaaaaaagtaaatatgtgactgaagacagaaataactttgcaggttgttttgcaaatatgagttttcaaatacaattaaggttgtaccaagttttctgtatttttagtgtaggtaacgttgtatatacatgcactgacgtaggttttggaataattctgactttcagcatttaaaggtagcatttagaatgcctgtggtttaatttctaaaatctaattagcttaccaccttaatcttaaataatttaaaaatatatttaagctactgatgttaaaaaatgtttttctttaagcaacttaaggaaaaaaccaccattgttagttgcttctgagagaggtgttgggagggttgaaattatacagtaaatttcaggaaagctgttcaattaatagagtgatca

SEQ ID NO: 69965 - DNA, 1226 bp, Homo sapiens
gcacttttcagaaaaagttcagtgtctatcttttgtttcatttgttgaatttgcaagtttaagaaaaattacgtgtgtatgtattttttccactttatttggttgtgatttattactataggagtcccatgtgtgaaaagtcgaatagtttgagctgtaaaataataatactgtatcagtactccttttagaaaataacctctaatgctttaatgaaagtggctcttaaagagtaactatgtgagcgagactttgtctaaaaaaaaacaacccagtaactacgccaagccttgctcacaactgccattaaaggcaagctagagtttatgtcaagagtttgcgcttaaacagttctcaacctaaagaggaatgcttgttagaatgttatttagcccagagacggaaaagttgctaaattgccaatgagaacttccagtattattaaattctcactggcatttcagaattatttgtcttatgtagaaatgtttgagttctcaacaggacccaggcgaaagtcccaaaggtagtttctgctggtgtgacttctttagtgttgacctgttataaatcttatggtccggaccacagttgggggtggggtgggggtaatagtccttatggttttcacagctgtttttctgtattttccagactaaaacttgaatatagcaggctgatttatgagtcactttggatcagtgtcttaaaacagctatagcctggctttttgtttttcagctttccagatttgtgctgaattagcagctctgcaggccccagtgggattgcttaagaagctgtgctggatttgcatttaaaatttgacttggaagtcagatttccaaatgctaaaaggaagaaaatgacagcttgaaccaaatgttgcaaattgattattttcatatatatttattcatttgctaatattcaggaagagagaagtctgtctaaccatatagaaagagtttgactttcaagtgttggccagctgagctctgggtacagttaacacttccgtaccttactacctttcccattcattaaccccactacaaaaagtttttgtaaaagttttgtggggaagatgctattaatggaactctaaacatgaagaatctgcctttcttattgaatgttttatgatctgggtttaagaaaacatcgacgttgtacaacttgaatctgtttttaatggtctagccataaaaacaatgtaaggaaga

SEQ ID NO: 69966 - DNA, 1042 bp, Homo sapiens
ctacatcaacacaacacatgagaaggttaaatttagcagttcaaattgccagacttggccaccttctttgacccatgatataatttaagccaagcttactttagactctgaaaagtatgaactaatagtgcacgtcaaagcaggttcttgaaaaagagaaataactaactttgccctatttgagagaagagagaggggagggcaaagcagagtctctggagatatgtatgtaagtttgcttgtggctaaaagttaatgatcagttgcctctcttcttagccctgagcctggagaaaagtgtcaaacgcaggttctctctctattcaggtaactttaaaaattatacaaatcgtattcgtgttcattgtagtttagattatagagatgtgattttttttcctttagtgtcatgtgatttcatactctaagcatattggaataacaatgagaaactttatatatgctggctaatgtaaaaatattttacttttgaagtacaccaagttaaggctaaggagagattctgtattgtattagatgggaagagaatttttacaagtttttatgaaactatcaattgtggttcttaatctaccagctgaaagatgtattaatcataattatttaaaataatgtacattatatagtgtgccaagtcttggctagtaaggaaaattaaaaacttttttaacattgacattctgaaaataagactaaatgtttaatcactaaaattatttgtatttcatattataatgccaaaagtaacctatttttcctattctaaatcattatatttgtaactatgtatgtgtactttgttgaaaaaaaatagtaaaaattaatagatttttattataggacttaggtaatttcatccaaaacatttaggatagtataatattatggtatgatatgaagttattgtacagttatatttcagggatgctatatgtataattatctgtaattaaagacattgctcactaagttttaaagtcttcacagctggtgtctaaaaataaaaatattgtatacattt

SEQ ID NO: 69967 - DNA, 1046 bp, Homo sapiens
catttaaatctggattgaaactcacataattgatagtaataaccattaaaatttggggttagaaaacaccttaaatgatttttaccatccacttatttctcaggaaataaaaaccaggtgagttgacctgcctagaattacacagctaatggcagttctgtggctaacccataggcaaccctgtgggcttttcaccagttgactctactgcaagaaaagtgacatgggtcactgtgtatgaccaaatatcacatgtcacagaaccaacttctgttaagagaagtagaacatttagtaattatatagctgtggtgtatggagaattgggttcaaatagggctcctctgtttgctaacaatgatttctggcaagtcacctctatcctctgaacaatggtctccataacaccccctttggataactgttgcttcaattagattagaaaaaaattagtgaataaacttagcactgtgttttaaacatagagtgttcagtaaataaatatttgaaatttggatccattttgtgaattaatttaatgtatcctgacaacctagctaatttagattacaaaacaaagtttgcctcagatgatcttttccttaaattgtctaaacatccttttaactctgtggttcttgaggcttctggaagcttagccatgatggattaggatagttaactttcttcacatttccataacaaaaattgaattgcagctgccaagttttgacacagtttccctacataatctcttacttgtgattatggaactttacagtattcttttcaccctagttactcattccactgccagccagagaaggctaagagttgtttttttgtggtgttgttactattatttttcttcccccgaccttagccataagataggcagatctgcctgcctgtcttattttaaggccaaagtgacctacaaaaggggattgcctttaattggatctatttatattctcctttatttctgctagggcactgacccatgccaggagctcttctgcccagtggccgccccaaattgatac

SEQ ID NO: 69968 - DNA, 1039 bp, Homo sapiens
ctcacatgaaaataggatgtcttgctgtcctggtaggatcatgatttggtgactctttgagaaaattctctttatttctttattcaatgttcatttagaggagtgccatggagggtggagaaggggttctggggcagcttgccaggatgtatggctcattcagtaaatccatacccacctccctagaagacatattacctttgtgactttgacatatccactggaggttgtactccacctaatgagacttatcaaagtattctttcatatatctcctccttaagaggacattgtttaatataattttctccatcttattatatttcaactgatagcttagcaacatgaacagctgcatgggtagtctgcctcttagtgtggctctgtctacagatattttgtctaaattgtttaatctttggatgacatattcctctcctttggtctatctatgtcctatatatgcagtactcagctgaaatacacactgctggtcgtgctgtcatttgctatgcagtaactaaattgtgatagcaaagtgtaggccttgggttatgcagaatcatttatttctccattttattaatctattaacaattttcacattaagcttacttatcataaggcttatttgtaataataaaatgacactagtgggggcaaagtaataatgaatttgatataacaacattatgatcaaaggttgaacagtaaatagagtaaatggtgacaaatgaagatttgaaaattggggaaatataatcaggaaaaaaatgagctgctaagtgaggattttaatttccagtattccatgagtattgatatggttaggctttgtgtgcccacccaaatctcatcttgaattaaaatccccagaatcctgataatccccacatgtcaaaggagagaccaggtggaggtaattgaatcatgggggcagttttctccatgctgttctagtgatagtgagttctcacgagatctgatagttttataagaggctcttcccactttgcttggtacgtctcctccctgcttc

SEQ ID NO: 69969 - DNA, 1050 bp, Homo sapiens
tgggttctcccactcgtaacgaaaagcccagtcactgagctgctacattttctgccatatcttagccgtccccacgcccccacaccaccgccccaccctacctcaccctcaagcgtgagtgaatgcgcaaataagggttttcaaggcgtcagtgggaaagagggaggggaaggcaacgctgaggacgggaggacagggcggtggcatccctctagcgagagagagccagagccctcggcggcgaggaaagctaaaacccggcagtcccgggccagaggaggccaaggcaagatgctggacgggcggggaccgatggggggcagcagaccatggccgcgcacccagtgcgcccccggggcctcctcttgtcccgaggagcacccccgctcccggtgtcttttggtttcgaccggccgactgggaggggccgtgggacgccattcccataatgctctggggcgtgccgccgccgtcgctgccacctcccctaccgctagtggaagaagatggcggaaggcggagcggcggatctggacacccagcggtctgacatcgcgacgctgctcaaaacctcgctccggaaaggggacacctggtaagagaaaggggttgagatgcccgcggttgcccgaggatagtggagaagtgggcgggagccgcgagctggttctttcgctagtgacaggtgcgggcaggtccggcggcggccgccggggcagcgggattttggccgcttctgaaatgttggggcaaaggttggactctagatgagggtcagggttcttggcttgccagggcatgctgaaaggtatccggggagcggcggcggcggcggttctgactcgtgcggttctcttcgtcctccttccttccgtagtgccgctcccacctcaggccttcccgaatgataggttatagtggtttggtttgagtcttatatacgccgttttgacaggtcccggtgccgcggcttatcacgatctcaccggctttacttctctgttcatttcctttcctagaattgtcggcgtccaagttcccttttattct

SEQ ID NO: 69970 - DNA, 1019 bp, Homo sapiens
tggagacgggatcttactgtgttgcctagactggtttgaaactcctgacctcaaatgatcctctgacttcagcctcgcaagtattaatagctgggattacaggtgtgaacccctatgcccagcctctgtctcttattttaaagattcattttttaaaaagtagattcactttaaaaagaaaagaacctatttttctttttaaaggaagtctattttatatttagtagcagaattctaccatttgcctcttgtgactgttcagtttagatatgatagaacatgtaggaaatcttaacaccttgcttctggatattaaaacatgcttaaagattgataggtgaataattgaatgtacagagcaaatgtcattttgatccacaagtacattcagacaaaaaaatttgaggtcatttactattgagcttttgaattttaattgtctatcaataatcataagctcttattagagatgatatggccccttcacatatagttttacagaaataacccatgaagcatatagtaagatcttgtaggctattttgtttcggtacttggtccatattttaaaagtatggtattggtttactataagccacaaatacatacggctttcttcttggacttaaatccatatgaaccactcagcacagaaaatgcaaatatgaatgcattattatgttcaccaactgattttttccctagagataactcttaaagaatttttgaagtgaaagaacatttaaattaagatagtggaagatacaatgataataaaacagtcaattttgctatcttagtcttgaatttatcttatgatgtgagtttagagtgattcttctttttttcactgaaaatcacttcattaataagtcatgattattgacaaaagtaaattgaaaccattgggcatattggtagggaaataaggggaagatagagaacaactgataaaggttgattatgtgcattacgagatttgatcctcaaaagaaggaccaaaatatatatatttatat

SEQ ID NO: 69971 - DNA, 1631 bp, Homo sapiens
aacaattactaaatactttttttcttccctgagtaatgtcagtctagcttgtttcttttaatttcctcacttaccactgtaattcacattctgtgtctcatattcattcctctgaagccacttcgccagactcgttctcccatttatcctttaaacaggggaatgtagatcctttagattttatcacccagtttacacaaaagtcactattcaagaaatctagcataagcctagtaagtagcctcagttttggatacagattaaaattatttgagggaagggtcaaaaatggctccttacaaagaaggaaataagttccaattataatataaaacagaaaacccctgtaggattaacctgcatttgattatgtctagactgcctttactacttccatcactaagattctacatggtttccttatagctctccaaaaagaaaagagtaatgatgcctttttttcctccaaggaatggagaactaagaatgctaactgtcccttccattctccctttagttttgagaagacccagatattagcgtggtaattccccaccataagagaaaatcatttagcagaagtaccagtagcaaggacttctttgtgaaggaagtcaaagatctcacaaagaagttcaagggtggctctgaggccagggtattctaagtttagagccagttaaatcaagacctgagaacatttagagacaaagttacttaactgaaaagagcatcaagttccttgttccaggtagaaaacacctggtaatctggattgatttctgttatttacccatatgtttttacagcttaacaaagtttaacaggttagtcaagagatttgcctttgataaaaagatgggaaatttatattcatacatttgaatggatttcaagctgaagaactttttaattctcaggagagatgtagctaagtatttatatgtaccacatagttgtggctatggtttacaataacttattactcatttactatgttaagagcattttaaaagttctctagatacaggttccatatataatgtaatatatttattccaaatatattacatatatgaaatacatggtagtattctcattttaccagtacagaaactgggatagttaaatgtatatggtcataacacttagtcagtggtagagcaggaggtctaacttaaagcttgcattttaaattctaagtgtactgcctgcctatgtgtgatagagccatacccagattatggaagcaactttttgaaagacaaatacttgaaagtattaaaatcaagaaatgacagctttgtaatacttgttaaacacattttcatttgttattaatatcaagagcctctagaattttgtgagtcttcttgttttagccttgtagtctcagcagtctcatttctaattaacatatctctgttttgatacagatagtgtctcccatttcctgcaaattatttgctttttcctgcttttggggcctttatgccccatttctgttgtttcagatacttcttaaaaattactgactttcatttcaaaacctagttcaaagtcagtctctaaaaccacctctaatctcatccaaatttgtggcccctccattctttgcttttaaaatatat

SEQ ID NO: 69972 - DNA, 1034 bp, Homo sapiens
tgtatttcattactccgtataaatgacacactcatctttttgcagcctgtcttcttaccttctctcattcgaaatctaccccatctctttatttcttagaggtatgtggtatagtagtatttgcagtgaatgttttgtgtcatttaacccatggatctctcttccactcctaatctcatgccccaaaagcacaaacaatgcgctgtcttaagaacatagataagtgtgctaattatcaaaaacacatttacagtacctggaaaatgtaagacaacaccctcagcagatgaaaatgacctggcatcctaaaaggaggctaaactcacattaatccttcaaatgaaaaaatcgtcacatcataccctttaaataatgctttaaaacattcaaaattatttatgaataattatttatgagtctttgtggaaatgcagttatgcaagaaaagtataaaaatattcatggaatgataaatgctaaatcagagtaagggtattccaagagaggggcccacaaggggctatattaatatttatgataattttctttaggtgcttgttttgatggtatgtatatagatgctcgttattattcgaagtttaatgtatgcctttatatgatacaaaatacttttaaaaagcgaagttgattgtaagagctttttattttgaggaagtcccaatttttcttagttttttctgtttattatttttatattgttaataccaaacctaattctcccggtgtagaaaagttacacagagctgagagaatttatgtagagtcaagcattattaattatcatttccttcttgcttcatatatgcttatcacgcttatatgtcacatatggttacaagatatctttagtatggagagacatacacatttaagatattaatggtcatgtatgtgtattctggatgaatagtttaaaaacaatcttacttggcctccttgagtttcttatttgtcttagtttagatctaaaaagagatcataaaaattatttattgctaggtgatggatttaat

SEQ ID NO: 69973 - DNA, 1056 bp, Homo sapiens
ggttatcaggttgactgttgcagtatcacaatccttatgttcaagtatcccttattttatttaataatgacccaaaatgcaagagtagtgagagtaccacagttgacagttaacccgcagaaagtgaaactgcagataaaaggaggctactgtataactgtaaaggatttattaagtactttgggagataaaactctatatcttaaaaatgtctaagtaactataaatagaatttctatacttttccacaaattgtttttaatgtgttttataaatgatatttgtaactgtagtattaatgttatctcaagtccatattctatttttaatggatatggcattagctttttaagaaaactaacgggaaattttgcatttccattttaaagggaaaaatcagtaactaagaaaaattaactgaagatcagagtctaccctcccaaatgatactatactccccagtagtttttcatacaagtaaatcattaaggggcagataacccgttacaaactacttttgtagatagtagaagagtaaaagctattccaggtttgttcagaagagtacaggagaaaaagcttggcaagtgcagaaaattttcatcacctttaacacttagtcatgatagtctaaacaaatgttgaatagaaaggaacttctctaagttcataagcagtatttatcaaaaacctacagcaagctaataagcagcatttatcaaaaatctacctagtggtgaaactttaaatgttgtcataaaaaaaaagacaaaaatgtttgctgtctcttcacctatattttaggagccctagccaagaaaaataggcaatagacaagaacaataggaatacaattagaaaggaatgattaaacacattatttgcagcaacagtatgagtttttacatagaaaaatctaagggaacctacaaccaggtaaaactactaagagttcaggatgctggtggatatcagattaatcacttaaaaaaattaggctgagcacagtggttcatgcttgttatcctagcactttgagaggccgaggcaggcgga

SEQ ID NO: 69974 - DNA, 1112 bp, Homo sapiens
ctggaacttgatgtctttagtcagccatcttgaacctctctctctgattatgattattataattaaccttgcaacccttgataactggtttcctttacctccgaaacacacaataaagtacataaaattatttgcaagcttcttgtaaaagaaccattttttctatttaccatattgcatttttaaatttattttgacaaattcttacggttatttccatttttattcaatgagaagcattttcttgaatacgtatatttgtatttttatgtcagtatttgtcattaagtagtatatatttatagaacaataggaataatactttatacaaatgaagtcttgtctttctaatactaaggggcattacagttttcaaatatcctttgaagtagatatgtcttttaatataaaaggaaatatcaaaaaatagatggctgttctactgttcctgtattttcaggtattttccttaaccaatttcttttattttttaggtacctagtcgatagtcgctggttcaaacagtggaaaaaatatgttggctttgacagttgggacaaataccagatgggagatcaaaatgtgtatcctggacccattgataactctggacttctcaaaggtcattattttcttccttcagtcaagttgtaaatgtgttaaatttcattatataaatgtcagtgggttgaatttggaaaatgttagcgcaaataagttgataaagttttgcattacagattttacctaatgaactcattattctaataagttattaaaaattttattagttattattctgtatgacaagttttgtttttcatttatgatgtaataaggttttattgttgtttaaacccttaaatgaagaactgatttcttcatttaaagatttcattattaagtaatcattatttaatgattatttattactaaataataagactcattatttgttattaaataattaaacactgattattttgagaaatgctatgtcacatattgtttttcctagtggacacatgacattttttaaaatttgaggaataatcatatatgcttaagttcttaaatttttgcattagctttctacaaccctcactacttgc

SEQ ID NO: 69975 - DNA, 1073 bp, Homo sapiens
ataatatagccattaagttcaaattgtataaacaactttttaaaggttttctgcttgggatcactactaaaagctaagaagtatgtttgtatcttcaatcagaactctgtttatttgtattataatgtataaacagagaacgtacatatatatttgcacatagtcattttgggtaatctttctcattataaatactgaatattaattatttatggtgtactagtgtatcttcatagatcaatagaatgcctttccaaactgtcacttaatgttttaaaatcatgattatttctttcttttaaatatcaaaatttccaaaaagttttcttgcttttgaagttttaactatccaatatctttttttatatatattggcaggctttaatagtgactggtttttcactggagatctgcagttttctaaagtctctttaaatgtattgttattagagtgaaatatattgatataggtgacactgatttgttttgtttcattattttaggtggttgaacagggtatgtttgtaaagcactgcaaagtagaagtatatctcacagaattgaagctatgtgaaaatggaaacatgaataatgttgtaactcgaagatttagcaaagctgacacaataggtaatgcaagatcctgtcttgtttttaatccattgctattagatatttaattagaattatctttgtatatgctacttggatgataaccattttaaggatttatatatagacatttgatttccagctttgatacaatgtcttagagttaaattatttattgtttcttgtatgcttttgcatttattaaatgaattttaacatttgtgctgttttgcttttttataaaacatcaaataattattgtttttatttagcaactggtgtgtcatttgtaacatagacctttaaataaaaacttaattaaaacttggtaaggtagcatggaaaatgacaattggttatttccttttttctcttagtttattctttggtactataaatacagtcaagtagccaaggcagcaggcttagcgttattttgacacattgatttttcaaattaa

SEQ ID NO: 69976 - DNA, 1050 bp, Homo sapiens
aagttaaacaagcaggtatcttcctcttatagataatgaagctgagatttagaatctacttcaattcaccctggtaccaagtggtagagctagtactttaacttcataagcagagctcttaaactagagtctcatctctcaattgctgccttacacaatctgtgtatgctaaaggaatattcgttttggagatattaactgggctgattttgtttttctaaaggaagtgggttttgaaacacagaatttacataaggaacttaagatggatatgtatttttcccttatggtcttttaagaaatcttgattgaaaatgattaaaatagctatgtatgtgaaatacagctgtataaattttatgaacagatttaggaaatataagtgtctgttttctcttgttaccaaattaataaaatattctgttttcagctagtactacctacactgatatatagtaaaaatgatagcaggccataggccatatctaaatgatttacctatcagggccaaaatcttctgccttcaaatgttttctgccaaaattgatatatttgagcattgagcatgtttaagtaagagataaaataatagttttattttcctttaagattaactaccaaaaacataaaacttcttgaaaaatatgatttaatttctatgacctgtattaatattttttaatttctaatttttgtgagtaacctgtattatttttctacctctgtatgcttttcattaactggctagtacagttgaattaatatgtggaaaaataagcacacactgtcagtcctttgaccattctcaacttcagtgatctcaaccatcagccaagctcagccaccaattattacagttaaaccctaggctgttgttatctgtaactgcacttgccagatctcaattttagcatcctgcattctggccaccactttctctgctcccattttctcttgagcccactacatgagacatcgaaacctaccactctgttggtactactactgtcatagtctctcatgaccttgccattgacaaatccagtggta

SEQ ID NO: 69977 - DNA, 1267 bp, Homo sapiens
caaggcactttcttttttattgtgtccatatattctagtgagctgttcagtttaatataaattatttttaaattgcttatgtggtacttaaaaaattttgcacactaaaaaaaatctgtaacatctcttaatcatactttaatttctaattcctacatctcctcagaaaatatttgaattatagtatgttaaaatttaaagtttatcctgtgtagcataaattgtattttagtgttaggtgattgaactcttaccttttgagattttaaattccccaagtaatttgttggagtacaaataccattttttccataaaaacttggtcttaaaaacccttttgttggtttgtgttttatagatttattacatatttagtcttgattttctattagtattttaaagaatttttgtgctggtaacatttagctgtatgtggtatattttgaaatacatactatatttatatatctttcctccttaaatctagatacaattgaaaaggaaataagaaaaatcttcagtattccagatgaaaaggagaccagattgtggaacaaatacatgagtaacacatttgaaccactgaataaaccagacagcaccattcaggatgctggtttataccaaggacaggtattgtttattttaagcatactgtattatacatgaaggtttttggattcacaaactttaataattatcctggcaatatataatgggctgtactgtttctggcttcctctttctaaactcatctcttgtctttccttgctggttactgactctgacttttgattccctccttgagcttgggaataatctacttgttaaaaagaaatcatttttaattagaaaaaaatcccagctaatattataaggtgggtcagcaaactttctgtgaaagaccaaatagtaaacatatatggagcatctcttatttacacagttctttattacaaattacagttctctgcaggccataaagtagcatctaaaacattgccattgtagtacacaaaaacaagcatagatgatacatgaataaatgagtatggctatgttctaataaagctatttatataaatgtgcagcaggctaagtgaactctagtttgccagcccttgttgaaaggtgtcagctcccaatttggcttttttgtttgtttgtttgagacggagtctcactctgttgcccaggctggagtgcagtgatgcaatctcggctcactgcaacctctgcttcccaagttgaagtgattctcctgcct

SEQ ID NO: 69978 - DNA, 1022 bp, Homo sapiens
aatttttgtgtttatagtagagatggggtttcatcatgttggccaggatgggccagaatggtctcgatctcttgacctcttgatctgcccgcctcagcctcccaaagtgctgggattacaggtgtgcgccaccgtgcccggccggtatttttttaataaagtattgagaaatgaagaggtttagtcactgtcagcaagtcctactgattctatcttctaactgtgtcttgaagtaatctctgtgctccattctcagcccttatctttcatagtctctttacaaattcctgtatctccaggctcttgtatgtctgttcaatctttcttcctttgtttttttgttattagcagataaccataggacagtcttgtttttgcaagaatactcattctaaaatgtaaacttcactgtcttcctttcataaacttttcctggttccttaataattaagtccaggcactttaagccagcatgcaagttatggtttaaccttgtacctactcttccaccatctctagattatctttgttttgtggtttatactcaagcagtaccaaactgagctgcttatagttccctgaacacactatgctattccatattcttgtgctttctgatgtgttattccatctgcctgatgatgtaaacgtctttggagtccctgtattcatccagcaaaaagtccttttaaccatccatataataaaattaaccatcccataccatcatgtaggccagccgtatcagattattcatccttcaggttctagctcaactgtcacatcatctattcagccttccctatttctctcaatgtccattgaggtataggatgtttctactttggagaaaagaattgcttccttaacttccacaaagatgtatgtatatttgttttgtatcgttcattatatgctttagttatttgtattttaatctccccagactatgaggtccttgttttggttagactttgtaccctatttttattttcagaacctaacatgcccggtgctctgat

SEQ ID NO: 69979 - DNA, 1196 bp, Homo sapiens
tgtgtattgcagaaattcatgccttgtttatatttgagtattttgttcttagtatacaagctatctaaatttgctcttaattaatatgttactattttaaaagcctccaattcaaatatcttaaggcatagtataaatgtatggtataaatgagaaagttgcgttgtctgatacagtcaaatcattaaacatttgtttaatttcttgaagctttttcgtggtttttaaaagtatcttaaaatatttctttatcaaaatgaatctgatgtgaaagtaatatatttattcaaatgaaaagttttagaataaaaaagaacaaatagaggtagaggagtatatgaggtatttttgagggtaaatgaaagaagaattaggaatctttttatctgttttagaactaatagatctacactccattatcaaaacacaaggccagttgtgtttaaatatacagacttctcaaagctctaagaagtaatatggtacatgtccctccattactgtaatgtttctgtttctgcaaaaggacacttctttataatcaaacacattaatattttttcagcaaatattcacactaagtgggataaataaggactataaatagcattatatcagttcaggttaggttgccaccaaatgaactgtgaaaaaatttttaagtttttggagctttggaatttcacatgttctgataagggattgtgaacatatattttgaaattcttaaaataatgatatttttaaaaaactaataacaatttagtacattttaaccaagtgaataaaaaaatctgctactttatttgatttaaaactacaatgccctccgggtgcagtggcacatccctgtaatcccagcactttgggaggcgaagacaggcagatcaagaggtcaggagtttaagaccagcctggccaacatggtgaaaccccatctctactaaaaatacaaaaattagccaggagtgatgatgcatccctgtaatcccagctactcgggaggctgatgcatgagaatcacttgaacccaggaggcagaggttgcagtgagctgagatcgtgctgctgtacttccagcctggccaacagaatgcgactttctccaaaaaataaataaatataaataaataaaataaaactacaatgtaccttttataagtggttttctatccttttttatcttacgtgaaatt

SEQ ID NO: 69980 - DNA, 1106 bp, Homo sapiens
actgtaatacagaaaaagatctgcacctatgtatgaaaagattctcagaaaactaagaataaagggaaattctaacttgatacatcctgtgcacctcaagtctatagcaaaagttacatttcattgagaaattttgagcacaatttaagtaagaggagaagataagaaagaagaaataaagttcactattcgtatatgatatagtcatttgtataaaatccaaaacagcaaactactagaactgagaaaattcagcaaggttgtctaatataagattaatttataaaaagcagttgttttttctataccgagagatcagcaatcttttttaaatgttttcagctttgtgggccatatggtctctgtcataactataactgctgatgtagtatgaaagcagccttagacatcatgtcaagacatggcaatgcctgtgttccaataaagctttctttgtaagtagatggcaagcttggatttggcctgtgagccataaatttctaacccctgccatttatcatgagaaacccacttagaaaatagtctaacaaaaattaacttaattaaaaacgcataaaaccttcatgggaaaaaaaaaatctaagtttattagaaaataaaagattgttatgtgatatatggcttaacctagtaatgcctgttttctttaaagcacatcagtgtctcctgttcaaaattttttttttcctagaaacttgacaaattcattttaaagttagcatagaccaatacaggtccagaattagctgagtcagttttgacagaaagaggaaggaaggaacactagacctacaaggtaaatgagagttactgtaaaattatactaataaaaacaacataatgctagcaaaagaaaggcaaatagattggtataaactagtaatctcagaaagattcatgtatatttgacaacttggtatatgatgtggcacaactaggtagtgaggttgcttaaagaagatgattatttagatttagtaggagtactggctatttggaaaaaaaagctagatccctactttcaactttatatgcaaaggctaactcttgaaggattaaagacctaaataagaaatataacactt

SEQ ID NO: 69981 - DNA, 1025 bp, Homo sapiens
tataaaaatctttaaataactgttttgctgtctcaacgttcagacttaacttctctgtattttggttgcttaatatggtggtagatttccatgagtgttaaatgtttagttgacttactaaaagcaagttatgtttttctattgaagtaagaggctcaacttagccttgaattgcatgtttttagttgaaacatattgggcatagggaaattcagatactacaaacttccatttgtcaggagtaaggctgaattttctgtcttcatgaaaccacttcagctaaatggaagtcttacctttttctgtctgagggcacgatatgttacacctagcccaaactggccaaaattagtttaattctaggtaagtggtttgatgtctagttaatgtatgatattcttagcacttttttttctcctttttctagaaagccactagagcagagttgctagtgaacagtttaatttccacatacgtcacagaaagagagctaaagggctctggttatcatccacagactgaccagtcaacccctaaataacctgatattaactccacaaatgttagctagattggaccatgtgtaatctgagtcagaagtcggaatcagaagagataaatgatgcgttatcactcaacagtaatgtctgcaacagtattgtaaaattgttgtactttacctgtcgaccacatccatccttagctctctgatcaccttactatttaaggacagtccctctactctacctgtagtatttatctcaatgcttcctggtccttgctttttcttttattatctcctctctcctacatatataaatgcctagcatagtgccacacatatggtaaacaccagtttattatttttatttcttttctaatgtcatcttccccctcagcctatgaatataaacacatcttcatctttaaaaccaaaaaccatatacttcctccatttaccatccttaagcttttttttctttgacagccacctacatttaaaaggctatacttaatgttgcttg

SEQ ID NO: 69982 - DNA, 1169 bp, Homo sapiens
tttcctgtattgcctatttcaagtaccatccaagagccatcctgagttcctcctccagcctttcttctcttgtctagttagtcagcaagtcttgcagattctgcctcctcacctgaagttttcaaacagtacccctttacattcttgaaaattattaaagatccaaagaacttctgttatatgggttatagctgttaatatttgtcatattcgaaattgaaataagattttaaggtattttaaaataacagtacaaaaccattgtattttgacatgaataacacttttatgaaaataactatattccaaaacaataaaattaccaaaaagttgcattgttttttatttttgaaatttctttactatctgactgaatagaggacagctaaattcttgtatattcttctgcatttaatttattgtaatacaatgtttgggttgaagtacatgaagcaaaatcagcctcacacagatacatagttgaaaaggagtattttcagatcattaatactacatcaaaacttgactagtggtggtttaagtcttaaagttaaatgatagaatctgaaaccatatcaatgaaccttttatagtattaaaatctttcaaatgtaaatttcatgcattttggtcatttgggaaatattcacggagttatgcagatcttccaaatgttgacacattttattctacaatttttttcaaatcacattttttaaaacatcacctatcttatgagaaacgcctaagtattgggaagctgtcaactttgtggtgtcagagtcaagttttccaagattctaattcttcatcgaaagcccaaattttatcattggctgcaaatacattgttttccttaaagacacagccttccttcattcatttttcagaaaacctctgcttgatagctgtattagtccattttcatgctgctgataaagacatataggagacggggcaatttacaaaagaaagaggtttattggatttacagttccacatggctagcgaggcctcacaatcatggtggaaggcaaggaggagcaagtcacgtctcagagcttgtgcagagaaactcccgttttgttttgttttgttttttgtcttttttaaattttattttattttaagttctgggatacacgtgcagaatgtgcaggtttgttaca

SEQ ID NO: 69983 - DNA, 2217 bp, Homo sapiens
aactgtaatactcttttacttcccacctatccctctaattgtacgtcatttttaaatcaccttatgtcaccacctacaaaattttatattagaatttgttatcatacttgtattgtattatagtcattttgcttatatgtcattttttcctattgtgagctgtttgaggtcaggaactgtgtctttctttgtattcccagtacttatcaagggtgaggcatacagtagtcatttaataaatgtttgagtgtttaaatgaactccataaaaactgaaaatacaaattaattccatggtatttcattttcttttccaatatagttctcagagttgctaattaataataaaaaaggccacagatgagaagaaaaagaaaaaagtgtgtgtgtgtacatatatatatgtacacagacatacacagtgtgtgtgtatatacacaaagtgtatacactgtgcatatatattatatataatatatatgtctcagtcactttattggatgaagcaatggatctttatttccataatttttactataagattcaggggaacattcgatttatatatgtttttgaaaagttgtaatgaattacattttaaaaaattaacctccttaatttattataactcagtctctaatcaatttagacgttttttcctaatttagaattcttaatgtggaggcaaaaatgccaggatatttccatttttattaatattttaaaactactatctgggaatattaggattattaaaattactttttaagtgtgttctatacattgttttatgagaaaacttggttgattctattttgtttttgagtttagtacagtaaaataaaatcttgttaaagggacttctatcagaagggtacgtaactagaaatcccacttaacagaatccagtaatatatatcatttatcagctaaaacaacctcgttgaaaagaaaacatttttttctaagattttataatgtataaaactttaaaagttaaattaggcctggtgcagcctgtaatcacacctgtagtcccagtgctttgggaggctgaggcaagaggatcacttgaggccaggagtttgagactaggctgggcaatatggtgagatctctgtctctgcaaaaaaaatttgtttttaaattagctgggcacggtggcacacgcctatagtttcagtttctcagtaggctgagatggaggagctcttgagcctgggaggtcaaggctgcagtgagctgtgattgtgtcactgccccccagcctgggcaacagaacgaaaccctgtctctaaaaaagtaaataaaaatgaaatttaaaatgtacatttttttatatttaaaaaattttattgcccaccatttgttctgcataatgcattgtagatatatatatttagataaatccaaatcacctaaaagcaaattttgtagattatgcttttctgcctgttgaccatttcattgttcgttagcataatatttaaaagtgaatcattcggggcctcactgatttaaaatttacaatgactgagtcactggactgaagcctagctttttacagccccttgcctagatgttgcctagtaaattaaaataacatgtttacaaaattacaaggggaaataaaacttttagtgacctttatgtacttaaattattgctgtattatagatttgttgattataagtcatgcctttaatacatacttgttgattaaaaaccaatagtaattgcagtttcttcaaaaagattctgaattaataaggtatgtatactatagtcagatttatgacttttccctttggccaaatatagcatattgggattatgcttggaattattttatctattttgtccccattgccttaaatttttaaaaattggaatgttctctgatctctgtgtcagtgttgtacataattagaatgccatggtgtaccagtgagaaacaaagtagaatagtttaattccattgactgatggaaattgatcgtaaaatgttaaaaatggttacctaaactcggaaatgggtatatgtagttagtagatttataggaataatagcaagtcgcatatttaatttgataaattttatttgaaaatagttcccttttgtacttttatgtttttataaggaataatacattcaaaattgaaaaccaaaggataatagtgattttgctcataaatctatttttcagcattcatttac

SEQ ID NO: 69984 - DNA, 1040 bp, Homo sapiens
ttgatttaatacatatactgaaagaaataaaacacttaaattttatatactaaacactaatcattaaaatatatttagaagtttgttagaacacaactttttaggaagaatttaaattcagatgtcattttagaactagatgtgtaatcacatataataaagtatttttaaaaagtgtgtatcagtgattctcaagtggaaagcacacaataaatttttgtttatgaaaaaggcaatcactttttcttgagaagttcagaaaaacaatttccttacctcttgccaaataaaatttagaatcatggaatttataaaaattttattgaagtgtgtgttatattgctataagaaaaacagttgaaagtcaaggttacacagcttcactctgagtgtattatcttgtattgactcttagtgtattaccttgaacattgacatgtttttttaattcaaaaaggaaaaaagaaaacctttattatttgtaattagcccaaattgtgggaagaacattgatctagagatgattatccttttatttttttttgacatgtatagtgccttttatggattagattgaaagtatttagatatttgcactaacatattagtattagatatttatctaatacttatactaattatgtattactattatactaatcaaaaattttagtatttagatttttttcagtttctaaatggcatctgattatctcagtgagtaaattctaaaagactaaagctatttgtgaaataatctttaaaattaaaacaccaataattaaattaaaacaccaataattaaaacaccaatagttaaatttattttctaacagctcagaaacagatctttgtataaaaagaatttaatatgatcaggaggcattgtagactaatacgaatgggcagattatccaggaaatatggttgagaaaattggctcatatctgagaattcttctctggaattttaaatccaagataattgttaagcatatttaaaaaggaaaaataaatggaaaaaagaacttgttacaaatg

SEQ ID NO: 69985 - DNA, 1608 bp, Homo sapiens
caaaggaagagggatcgtttaacttattttcttctttctaaaaattatactgattttgtaacttttagaatattacagttttttaatattaacatttaaaatatcttgaggttatatttatctgattaaataaactacattgttctgagaaaccaaaagaaagaaaaggcaaataacactgggatatacttgcgtggaatcatttttgcattcctgttcacccaggcttttttctgcatttgaatactagtttttgctggtctcgcatagaaactataaatggaatcttcagtgcatcataacagtgaggtcacagtggccttggaaatctctgctcttacctgtaactttttaaagcataactcttactgtttctaccatttttactctattacaataacagaatgcaaagggtcataaaggagatgatttgttgctgcgggtggtatttaaaatctgaatgttttaaatttgatggagcaatggggaatggagcaaactgtaaagctgctctagttaatcaaaggtaggaagatataatagtgctttgtattggttggtgtggtatatgagagttattttgttgattggataaggagtatcttaattcagggtgagttatttttttgaggttcaagtctttaaaaaagtatctgagttgagtactttataaaagaaatgtaatgatcaaccacatatctcataaataggcctaaagtactctttattataaatatgttgtaatataattggctgcattatgaaaattttttttcttccagtgtgaaaaactcaaattactgtcttccatcatataccgcttataagaactatgattattcggaacctggaagaaacaatgaacagccaggcctctgtggcctaagtaacttgggaaatacgtgtttcatgaactcagctattcaggtaggtctttgtaaacaaaatgaaactcatgtttcatggaaatctgtaatacaagaagataaagttgggtttttcatgccagaacatgagtatatgttttgaaagttcatttttcatggaagatttaagcatacatatttgacttattcattctactactggtagtggaatatatgtttctcaattaggtgacctgtgattgattaacataatgtacaagattatatatcactttgcaaaaatataatatcagacagaaaacttaagctgtctaaaaagggagggaaaaaaaagcaaaactaatgagttccctccattattcagtagaagtctgttgcactttttttttcttttttttttttttttgtcttaatgggaaattaaaattttaaaaaggaaaatcttgggaacttctttttgtatacatactttaacaaatcactttcccttaaaggtcttttaatttggggatataagagataactacttttcccctgcccccaccccctttttcttttctttctgctctagtctatatcctcaacttgttaaatatttatgtctttgattgattctgaagtaatgagagagatatattttttaatatcactgttactgtgtataaacttagggctggttattttattccccttttacagataaaatttctgtgtttataaa

SEQ ID NO: 69986 - DNA, 2436 bp, Homo sapiens
ggctgaagtatcttgtatcaattattataattatttcaaggattttttttgtaattaaaagcaaaacaaaagaaatgtcaatctgtagtctgtaatgggaactacagatttgctccctccctccaagaaaataaaaggaaagaaaaacctatttcagatttacttctcttacttaaaatcaagcagctcatttttttgatgtcaaaatgttttctaaaagtttaccatttacttctttacaatgatttataaactattctgggcaggggagagggtcagtgagttggttacttaaaccattgttcgattaatagtaatatctaaatcaattactagttctcatataaacccatattaaaacattaacagccctgtattgaacctgcagcctctgttaagagtggtacccttctttgcataatgcaggttatttttttatattgtttttcacttaattttctcttcacagaggtctgtgagttagggcataagaatctctattccactaatgaggaaattgaagcaaggaaagtttgatttccagtcactaagacaagttattatgagttgttattcagtacattttgagataatgtatttttttgaaattatgccaatcaacctataagaaatgcttatgttttgttttttgtggtaaaatataacaatttgccagtttaaccattttaagtgtatagtaacattaagtatattcacatgttgtacaattattaaaaatgtttttatgtttagttcaaatgattggcccccataatacaagatgctctcattaagtagcattaatgttgtgccatttaaaacagtttccctaggaggtgatatacacacttactcattcaatgttcagaatgttaaaaactattcaagtactccttttggaattgcttttattcttctgagtatcactggtggatatttttcatccttcaatgacaaagttgatttttgaaagccagaagttattcagagcactattttcagaatattgtagattatcaagctgggtaatttttttcaagtaattcataagtaatgaatgactgatgaagtcatttactcagcaaatatttattgaaggtctattaggtgactctcactctcataatcactaattatgccatgatgaacaaaacagttttttcccatggagtttacagtctaatgagggagacaaatattaaatcaatcatgaattatgataagtatcatgaaagagaaagtagagtgctaacaggaacttggagagcacctgttttaagctgggtgtcatatttacgaaaagtaacatgagctttgaccaaagaatatgtatgagtttggcaggtgaagttagaaggaccaaaaacatgtgcaaagccactaagaagggcaagtttgaggaatcagaagtgtagtttgtggaataatgtatgaaggggagtgagacaaaatgagtttgaaggagtaggcaaaagccagatcatatagggagaatttagattttaatgttacaaaggcactaaaggtttcaggctactatcttcttaactggttcattccatttgtctgctagctggtttctttgcttctatccttaccctccacaatctgttcttaaaagaacagccagcaattcgtttcaaacctaaggcattttctattacttaggcaataacacaaaatgccttctcatttcactcaacgatcaatgaaagccagagtccttaaaaaaaagtacaaagccctgtaggatctggccccatgctagcttatttcctatcacttacctccatgcttaccttgttccatcctcaccctcacatgtgccaagagcgtgcctgccttagggtctgtgaacttgcagtttcctatacctgtaatgttcttcctctaaatatatatattcttgcactctcacttccattaggtcgctattatctatcagtgaggtgcttcttcagtcaccctgtaaaaaataatgactgccccacattccacacagtactcataaccatctggcatgttttatttctattagggttttttgcttgtctgtgtatcttcccctactcccaacacagacaccctctccccgcgtccccaccccgtgctctctctctccctctctccctctctcccatgactgctggaattttgttttagtcactgttgtagccccattgcctggaatagtgtctggcatgtagaaggcactcaaattaatgaaaggtgaagggaatcacaagtgtctctctagtttttggcttatatatcataatgatagatgtaaccatttaatgaaattccagagtagtaggaagaagaacatagtaggagaagtaaatttggggtggggaggagattatgagttaattttaggcatgttcagtttgtgatgtctgtgaaacatccaagcagatagatcatagacagttg

SEQ ID NO: 69987 - DNA, 2975 bp, Homo sapiens
aatcttgatggatttatagaagttagtaaggccaaaaaaaaaaaaaaagtacatttccaagtagatgaagtaatgttgcagactttcagattgagagagtatgtggaggaatgactaattaaataaagctggaacagttgaaaagaaaagggtattgacaaaggatgaggctacatagatgagcaaaagacagacccttctaagaatttgggcttccaatctgtaagcagggagagccgttaaaggatttatagcaaggaagcaacatgatgagatgtacattttagggagagcactctggatactactggaaagctaaaaaatgttcagttatacctttaagctctttccaagataagagtatatgtgaataattaagttataacaaagtttaagaattactcaggtttgtgcaacttggttcttttgagatatttgtaaattaggttctttatataattgcattaacagacaataatggaatgttacattcttagcataaccctgagctgatcaaatataagaagcggaaaactattgataattgttggaaattcctatctgacctgtcctttgtctgactatttaatgttgatcttattttgtactaaatcagatgatactaagtgatggcatttaccctctgtgtagctatgatgcattctaaattgcctggatctccctttagtgctgggtttataattaaaaggacatataatacaaaggaagaagagaaactgaaactcaaaaggagtataagattatgagagaggttgagatctaagaggtaaaaagttagggaagcatcctttctcttaattgcctcctacactgtagcatacctctctttctcctgctcacatatattaaaaagttctactgctgaaaatatgtatatgactctaaaggcctatatagctcactccaaacattttagctgtttttattattttcgttgcctaagaattatataatcgtaaattccatgatattataaccagttgtcccttttgccttgaggtaggggccaggctagcaatttataataaataatattatttttattatatagaaagtttctaaatagatattattgactacttcagtaaacatgttgatttataattgaaaccacaaaattgagtaccagaattattctaaaaaactaagtaaatgttgactctgcttattttggaattttagctaaacaatgcatagtatatagtcgtagtttatggcatgtaagttatctgtgtgaattcaacaggctgaacctttcatagctaccaaacctgtctaacttaatacaaatgactataagcaagcttcgaaaaactctgatttccattaatgtgaatccaggctctcataagagtgagtttctactattttccatgcaagcaactagcttccttgcagcactttgccacttaattccaacacaaatatcatcctacagcaaaaaaaatttacttatgtgaccatatgtctgtgttagtcgttgcatattatagacatctaattgataatgtaatactgggtttgtattgaggtcaaattatatggatcatcaccttaaaattattccaacttgagataaaatgttgaaaaattgtacgtctgccatgttttattttaaatatgaaattttttaattcggaattggaaagagttggaaaattaacttatttatagtttttattttgccataaaggaaaattgtatcgtttatgaaattaaagagctggaagtgagaacacacttaccagagttcacatactaaagtttgttctctcaggctcaagtaatctgtactgtctcttctaaaaatggttgaccatatggaaggtttaaaggctgctctttcatgataaataattgacaatggaagcagtaaatacctctattaagttaatttcttgcttgcactctatctcagtttttacctactcaggctaatttgcaggtgcctgggatgagtagacaatccataatttctaccaatcaagtaaaagaaggaaagaaaactgagcttctctcccagttaccaggtagtttgctgtggttaaaattaatgcagattttacagcagcggatattagcatttttatttattataagtaattattttgaaatttgggaaatgaatagttgagtacatcatttgagtgtttatttgaccagttattagtgcaagaaaccatcatttaaatgttctctgtgttatagcaaatcaatttgtttctctcttcatattaatgtgttttaagaaaaattcattatgattacttttacttgaaaatatattttattttttgcagtgtttgagcaacacacctccacttactgagtatttcctcaatgataagtatcaagaagaactgaattttgacaatcccttaggaatgagaggtgaaatagctaaatcttatgccgaactgatcaagcaaatgtggtctggaaagtttagctacgtcaccccaagagcctttaaggttagtgtggtaaatgcattttagcaagggtacctgcaagggtacaaaagttggttcttggggatagggggagtgaaaaatagtagctattacaatggtttgtggccctccaaaggaacacagtacataaatagatatacagtacatctgtgatataaaatttaggtgggagggatatggaacagtttatctgttttgtttttgtttttgtttttgttttacatctaaatctggaatggagagaataatgaaaaaaagttgaaaaacactggtgtggtacaagaatgagtatagagacagcaatgagcgtttgtatagttgttttggaatatagtacatctctggaaaacctatgtgaatattctatacaaatgtaaaagactaaatttgggcatgttactgaactctaagaacccattttactttgagagtcattatgaatttgaaaaattatcaaaatgaaaatagtctgcaaaccaa

SEQ ID NO: 69988 - DNA, 1757 bp, Homo sapiens
cagctttcttgcatttaggaacactagctggcatgtttgtacttcatttagtgaccattttaaacactgaaattaacaacaaaacaaacaaaaatgtgaaaaaacataacactaaataaactacaaaggacacttgtttatagattcagagctgaaacaacaagccaaagcatcaccttgttcaaccccagctggtaacatgcatatcaggtgactcaaattttttgccactctgaaaatatctacaaatgaccatgaattgattttggggttacaaatacattttagaaagcaggcaaattcacaaatgtggaatccatgaataatgagaatctattgtacatatgtttaaaaatcaaccctgttcctagaactgatttgatggttttgcatttcttacagacacaggtaggacgttttgcacctcagttctctggatatcagcagcaagactgtcaagaactgttagctttcctattagatggattacatgaggatttgaatagaattaggaaaaaaccatatatacaattaaaagatgcagatggaaggccagataaggtaaatttcatgatcctattgtcaccattgttataattttgtgatacctctttctaatttgtgtctattatccttgtaggtggttgccgaagaagcctgggaaaaccatttaaaacgaaatgattctatcatagtagatatatttcatggccttttcaaatcaactttagtttgtcctgagtgtgctaagatttcagtaacatttgatcctttttgttacttgacacttccattgcccatgaaaaaagaacgcaccttggaagtttacttagttagaatggatccacttaccaaacctatgcaggtaaatcatgggttggtttgttttgtttttttttttttttttttgcatttgttatttttattaaaaaattagtgttgagtccttattataaaaattaagtattgaattatcaagcccaatcaataatgtttatttgtataagagattttataagctgaatactttggaaatcagtgtaactttttacagtcttgaaagagcaacgtgtgtcttataaaaaattctcaaaaggctttttatagaggtttatttttataatattggggtgaatattagcttatgaagatcaacataatatttttaatttttttaaacttcaactttctttagtgttaattgtaatttttttttactagtggctattggaagtaaagctaatacttttaattcatagtgtgatagtagtgtatttaaatacctgtaatttttaggcattttaggaacttaaaagaaagtagaaattcagttagactaaaaatattttgttcagtgatgttctctaatttctaatactttgaagtatcacatattgtttattctgtgcaaaagtcctgtggtaagtcttactgtcaaattgtctgcctgattccgttacctagtgttataattggattatttatattttgtgggtaaagcactatcttttctcccttatttattaatcagttaatcctcttctgacacttgacccatcccagtgaaagtaacttcttctttttctacctctctttccctaaattctaacacttaactaattttgttataacttttggcttacttttatcttttatccctagactacaagtctttgaagacagagaccttgtaaacctttgtatttccagcttttgtggctggtaaatattaatgcacaagaagtattcaaaaattt

SEQ ID NO: 69989 - DNA, 1050 bp, Homo sapiens
taaaaattagccagtcatggtgtcacacgcatgtagtcctagctacgcaagaggctgaattcggaagatggcttgagcccgggaggttgaggctgcggtgagccaagatcatgccactgcactccagcctgggcaacagagtgagtgagagcctgtctctaaacaacaaacaaaaaaagatagcaaaagtgggagcagtttcaagtaatgacaggatctaataagttgactgaggttgaattaatgcaagtgtctttgaattgaggagccaaggaatgataaaactaggacaaattatccatgtgggcattgtcacacaggacccaggatagtggcaagattggagacaaacactaatccaaatgccaaatgaatgtgagatagcaaccatgaggtcactctcatttactgaattttttttccaaaataataaattcattacaattttttttgttttttagtacaaagtggttgtccccaaaattggaaacatattagatctttgtacagcattgtctgctttgtcaggaatacctgcagataaggtaagatgtttctggggttgaagtatataagttggtatttagtttctcagtgctgtaaaaccagcttaatagaaattcgtttccttttagatgatagttactgatatatacaatcatagatttcacagaatattcgctatggatgaaaaccttagtagtattatggaacgggatgatatttatgtgtaagtataaaactcattgtgcaaaatattacttgaaaaaaaattaatagaagtaacataaaattttgagagtttatggtcagttttgtccttgtaggtttgaaattaacatcaataggacagaagatacagagcacgtgattattcctgtttgcctaagagaaaaattcagacactcgagttatacccaccatactggttcttcactttttggtcagccctttcttatggctgtaccacgaaacaatactgaagacaaactttataatctcctgctcttgagaatgtggtaagtgccagacaattctacattgacaaaa

SEQ ID NO: 69990 - DNA, 2009 bp, Homo sapiens
ttcatgattaatagtattgtaaggcagcctattttttgccttcctgaataaatcccttgatttgaattatgaagttatcaagaatgtcatttgatcccttttatccttgaaagctggtatatttagtattctttcttgcatatctaattattatagtttcataacccatatataaagatcacattatacaaatataagtgtttttagcaacaatatataccatctaaatagggtaagttgagaaattatttgcaacaaacatttaacatttaacctaaaaggtaacatattaattatttttataaagatgagcaaaacaaattactagtcagttatacttatggtactaaaagtttgaatttatctttgaatctactaagtgaccactgttactgcattaaaaagttttgttttactgatagaaggaaaactttttaaaagtttttatctttgtagtactgaacttgtttgatttttgattttacttaagccgatatgtcaaaatatctactgaaactgaagaaactgaaggatccctacactgctgtaaggaccaaaatattaatgggaatggcccaaatggcatacatgaagaaggctcaccaagtaagacttttctgttaaattgtacaaatgtttcacttagataattgcctcagagaaaaagttaagaaaatgggaattaaagaactaaaaaatacctggaaacctaggattaataatattaataatttaaaaatatagcattgggtttatttaaagctctctaatatctaaaattaggtgaaatggaaacagatgagccagatgatgaatccagccaggatcaagaacttccctcagagaatgaaaacagtcagtctgaagattcagttggaggagataatgattctgaaaatggattatgtactgaggatacttgcaaaggtcaactcacgggacacaaaaaacgattgtttacattccagttcaacaacttaggcaatactgatatcaactacatcaaagatgataccaggcatataagatttgatgataggcagcttaggctagatggtaagtatttgtgaaaaatggcttgaacattaaacaagccgagcatgttattttttttttaggtgaaaaccatgaaattcagctctgtcaagaaatataccatttacttttctatctcaaattttacatgaaaggacttaatatctaagtagactaaaatgtgtgtttgtgtttcataaatggagattgaactcatgcttcagttttctatctttttttaaactcttaaattatttcaatggcttggaaactgctgtttgccctaatcaccagtacaagtagaaaagattgctgtttgtttattctggtgtatatcctaacattaaaatatactttaatactaagacatattaaattttaaagaaaaaatatgttttccaccttagaaagatcttttcttgctttggattgggatcctgatttgaaaaaaagatattttgatgaaaatgctgctgaggtaagtcatcactcactcacttatttacctttccttgatttactttatgtgattaccagagataatcatactgttgtgttacactctttgcttccaccaaatatgtttattttgccagtaaaaaattggtcatgaactagaaaaaaaagtctttgcaaaaataccttttttttttaaaggttcagagttcattttgaacgtgttttggtcatccatatagaagtgtacaggaattatttagaagtatataaatctcaactgaaataagctttatgattcttttgagaaagtttaggagttttcattattattcatagtaagatggtatcactaaaatgagttttgtttcatttgttctcttaactcaagaaatacttctctttaggactttgaaaaacatgaaagtgtggagtataaacctcctaaaaaaccctttgtgaaattaaaagattgcattgaactttttacaacaaaagaaaagctaggtgctgaagat

SEQ ID NO: 69991 - DNA, 1016 bp, Homo sapiens
tcatggtgtttgaagaactccagacttttttctttaagatatttattacttcttaaggataaaatatcagatgtgtcttgcatatagtagttcagtattgattaatgaatgagtcagcttttgaaccttttttttttcacatagggtatagagaattgagttcatcatactcctcagttcaaggcctagtagggaatgttgtcccatttagagtgcatttccctccacgttctccttcccctttgctttctaacatgtttgatgcatatactcttgtaaatcattaatatttattcatttatataattggtactgtgctgtagatatcactaggtctcgacacttatgaagacttatctgtgttgctttgtgtccatttagtcagttgtttctcactgcttatgatttacatctgccatattttatctctccacttacctcatgatagacatctaaattccctttcacttcctaccactgtaagactgataaaccattgtttatggtatcgtatgtaagaatttatttgggctgcgtgcccaaaagtgaaattgctgagtttaagtgagtaagtgttgccagattgccccccaccccccaggatggctctaacactcgacactctgcaagcagttgatttttctgttgaacagtatttacattccttggatatatcctacttatcattatatatttttagacacacagttggattcagtcagatttatttagggttgttacaatttcattcataagtgaaatggttttgtaagttttttatattttcattatcttagtttggaataaagattagagtcataaaacaagctgagatgctttatcctttttctggtttttggaacagctagtacaatataggaattaactgttcatcaaagtctagtagaattaacctgtaaagccatctaggctttgcagccataattgtttttatttatgtcatgcatattggtctattcagttttctttttccttttctgtatattttgatgttc

SEQ ID NO: 69992 - DNA, 1058 bp, Homo sapiens
gaaagttgtaacatgtcttaatacatggtcagttccttaaacgtgtgtatgcttggaaaaaaatatacattccccatttagatacagagttctttatatctctgataatttaagcttatcaagtgtattcaaaccattactatccctggttattttttgtgttcattttattcctgagaggaatttgtcaggactcctactaaagtgttgattgacctgcttctcccagcagttttattagttgttattaatattttgcataattatacttatgttcataatgggtagctcttctttctctgttccttttaacaccaggatttgacattctttgcccctttttttttaggtattacaagtgttactctagctttctttttggtatcatttaatttacaaactctgtgcctttttgttgaatgtgtctcttatagatcacacagatctaagtgcagcatctgctctgcactgatcttgggttgagatcaacaaactcacagcacgcaaaagcattcacccagcaccaggtttacttagatttaagaaaggatacaggtcaagaaacaatacagcatgcacagcaacagcttagcagaggtcctgtgtagctggaaggagagaaaatagggaaaagtgtgctcaaaggaagctgttcatcccatggctatttccttccactcctcaccaaggctgatttttaaccagagttcatggggtacagtcatattagttgtcaaatattttgttagcccaacaggacttttaaacagcaataagactctgattcaggtagcctgagtattgctgatttctgtgacaaaaattgaagcaagaaatttaaacgctttcttctagattgttttctcatttctgcctccatccattctgtcgcattcttcagccatgttgcatgcacacaaatattcttgagttcatatattgagaacagggttctcaatttttttttgttagttcctttgactctaacttccatctctttctacggtttctctccatggttgatatttgaggagagggaaccaacaacagatagaata

SEQ ID NO: 69993 - DNA, 1066 bp, Homo sapiens
tttaaatcctaactgctagctaacagtatagtaccttgagtaaattatccttcttttgatgccttaatttcccatctctcaggtggggagaataataatgataataccttctttatgagacaatacatgtaaagtgcataacactatgcctggtacacagtaagcactacatgaatgttaattaccatttattatcattagtgttattatgtgaatttaaaaataatctgttttttcctgagatgaaaaaagaatgtttcaacttacatgaaaattatttttggcatctaattgtagaaattagaaatcatttgaatcaattgaatatgtaataaataagcctcatagatgattatcagtgttaatagatattccttatatagatgattatagagttttgaggagtccccagaaaaccaagatcattttcgtcacagtgattatatttttttcattagatactgcttttgcaaaaaataaagatgatggaaaatggtactattttgatgacagtagtgtctccactgcatctgaagaccaaattgtggtaagtttgtcttatatttcctgagaactatgggattcactgtcttaaggagtgaatataaattaataaaaggggctcatggaacactgtagtctatattctagcagcttgagtagctaaaagacactaactcttatttaaagaaatgtcaaattgtcccctaaatggaaatttgtcttctaaatttgcccactaacaaaagcataaattgcaaggtgaaaaaatttttggtagttttcaacatggagtttctaataaaaataattaagttttgctttggaaagtagattcagctcttaactttctagacattgagtacttaaagccagaatgtttaaacaagagaaaaaaaatccttgaagtaccttaccgtacctgtgatctttaaagtcatatcctgccttatgaaaattaactaaactcaaaatgacataattagataaaacaaattacagatttataaaagattaatacttgtgtacttactactttgatattttctgaatagtaaaaaaaatg

SEQ ID NO: 69994 - DNA, 1694 bp, Homo sapiens
tggaaaagttatttccctttgtaatacctttaaaaatccagagtattatattcattttactgccactgtggaaacaggttctagatttcatactccatctaaagtcatttttcagttacatgtaagtattatttactgctattgggatctattcttcagatattcaaaaacattttttgctttaaaatgcatatctttaattgggtgttggtccaaaattaaaatttttgctgtctgtttttctctaccccattttgtggtaatttggcaacttgagctctcccaattattgtaatataaggacagacataatagtattctgtacccatagtaataattgcatcaagcttagatgagaaatttttttcatatactggcctttaaatcattaatggacaattggctataaaggtaggtctgttaactttctttgtgtgttcctgatggaattcaccatagccttacagcttttctcagaaggtaacttgttataagagaaatggcatttgcatgttccagagtcagaacctgtacagtatataaagcataaacaccttgaatttgattttagttcaccacattcaaggatccaggatgccaaaaatatgtgtgaacatttgaaacatttttatttgctgctttttccctttgatatagttgaaagaatgtattgtaaattggcatacaatactgcctttaatagaaaacctaaatgctggggcacatttcacatatcgactacctgagaaattgctttgtgtcccactgttattaaagcaaaaagtataatgttcttcacttgaactaatcaaatacaatagattataaattgtgtattgtaaataaaagttcactctgtgagtgcacattttggtaaattatttatttatgttagcatttaaaagtttaaaaaaaatgcatttgaccaggataaatgaggtatgttgatcatggctttgctttatatcttgatattaaagctggtttatcatcctggtattttaaaagctgctttggggttttttttttcttttttttttttttaatgtaaactaacctcctgcatgacagaggttaaaattttgtctgcacttgagttcacttgagtttacatttgaaatgtgcatgtttatttatatagatttcaataaagctattcaaggccttatttagtcttttatttcttactcttaatcttttaataaaaatcccctactttatggttagatgactatatgctagactttttagttataaatagttaatactagaaaggaaattatgtcagagcaaaatgaatcctactattaaggacgttttaaagttgatttttgtccactttaatatttattcattaaacatatgtttgtgtaccaatcactgttgtagagtctggagatacagcagtaaacaaatatccttaccttcacagagcttacattctttctgccatctaccaactaatgaactatatttccatttttctgaagatttaaagaaaagtcaaagctaaatcttttaaacctatattgtggtctccatcctaattcttcagagaccactttctttttaatgcctgtcattaacttctgttcccactaaaagaagtgatgttaataatgccattgaaactgccaaactcaaatgtcatttttcagctgcaagaagtatactttaaaaatagtgcaaaagga

SEQ ID NO: 69995 - DNA, 1077 bp, Homo sapiens
taataaagtgaagcagaataaaacaaggtatgcctggtttttgttttgttttgttttgagacaaggtctttctctgtcacccaggctggagtgcagtggcacaatctcatctcactgcagcctccagcctctgggctcaagtggtcctcccacctcagcctccgaagtagctgggtctacaggcatgtgccaccacaccacacctggctaatttttgtagagaccaggtttcaccatgttacccaggctggttttgaagtcttgaactcaggcgatccatccacctcggcctcccaaagtgctgggattacaggcatgaaccacagcacctggccatgtattttcatttaaccagtactaaataactacatgtctttggcagcctataatgtagcatcccatttttaaaaatagaagtgtgtattcagggtgcactcaataggattacatctggctggcagtcccttcctacttcagtccattatcctgctaccagaatgatcttcatggtttcatttaaaaaaaaaaaaaatgagatcctgtttctgtcttaaagttctcttctaattccttgtattaatcaggattctccagagaaacaagaccaataggatgcatatgtgtatacacatatatgtatagctctctccctcatatatacacatatcatgtatatacatatatatcatatatgtacatatatatatatatatatgagggagagaaagatttataaggaattagttcatgcacttaggctgagaagtctcatgatcttcagtcagcaggctggagacccaggaatgccaatggtgtagttcaagtccgagtccaaagggttgagaaccaggaaaaccaatgataaaagttccagtccacaagctacctggctaaagacccaggaagactgaatgtttcagttttagtgcaaaggcaggaaaagactgatgtcccagttcaatcaggcaagagaaattatccttacttgagccttttttgttctattcaggccttcaattcatgagagccaccaacattagagagggcaatctgccttactcagtctactgacttaaa

SEQ ID NO: 69996 - DNA, 1049 bp, Homo sapiens
accataggctcaggagttaaaccacctctgagcctaccacttttgtgcaactcacctcacctctctgcctttcacctctctgtaaactagagcagctcccgaatgtccatctaggaaggcttggggtgagcaacctgattagaagggaacaatgtgacttaaaactgcatatttgcttagcaaacctatgacttttctcagaatatacagtttgcttgtgatggagggctattaatatttataaggaaaccaaatccccattcacttaagccatccactcctaccactgtaattgaatattacctacctttcagaataattgcaaggttttgtgtcttgatcattatgaaaaatgtggcaggtattattactaataaagaagtacccaactatgggaatgattgttccttccttatgaatgagagcagctctctgttcaatacgattcatactcaagttctaataaactttctttagcaagagagcaaagagtatggtacagtcagtccacccaggttgcctgttaacctggtgcttgaaggaaaaaaagtaagaatttgccctcatctaattcctcacttgccctcaaacatgtcatactacttgacaatggggctttcccacatttgtcccacatttgcatggtctgccttatctcttacctggcgaactcctacactccttcaagacttgctccaaaatgcacttgctagatcttctgacatcaactgccaccttgggctataagttacgtgtgtctcttcccccactagacaattacctgatggaagaatattgttcttaagatgttaagatggtgtatgtgtggcatagtatttgttcctaaatgtaaaagttattaaacaagttttctgaaagtctgaagctttattgtgtttattgtgattgtgttgtattcctgacatgttgctggctacatattttaacagctttaaaagtaatttaccttatgaatgtgcactaaaaacgtacattttagatatactaacattttaagttcggtatttatgaatttggaatattcaaga

SEQ ID NO: 69997 - DNA, 1039 bp, Homo sapiens
aagagaccctttctttccttcaaaatggtgtcatatgaaatttgaggtgtggaatggctgcagccgttgttgccaaggttggatgtagcctgaggatgaacctactcatggaacagggcagaaccaagagaatggcagataagtgaaactgcaaccctgatgacattgtaaatctctggatcagacttcctctgcatgtttcaatttgtgatacagtaaagtccatccctctctctcccctttttaagtgagttagaattggcacttgtagatataatttgtgtgtgtgtgtgtgtgtgtgtgtataaaataccaacaagtttttctggtacatttagaactttccatttcttcccttgggaacatttattatatagctactgtatgaaaggcactgggatagacaataatatagagctatgaatgagatctatttcttatctttattattcttataggtagtatgaagaaacagacataatgagatgaataagataaagtgttacaggtacaagccatagacagtactaaaggtagaaagacttttcagtagttaccgtagaagaaagtgatggaagaaaagatttccgtcactgcttatgacactaggagggtgacaaaatcagaaggacctgcaccataagtctatagctatcatcttgttgttactaatggtttaatttcagcaaagcattatttgtcacattaaattagtacaatttgggtttgtatttcatttgtgaatatgttggcattataatttaagacctataaagagtatattcctgattgtatttatatatacatgtaaatttgtcaatgactgggtaggtccatagtttgtttcttccttttaaaagatgtccttacactactgtactaaattttgagaaacactggtaggagtgggcactagggaatcattgaagaattgagacagtggatggatggaggacatgattgtaggtagagacatttcttcatttaggttgataatgagtgttgaactaaagtgtgggagtgagatttgagaaaaagg

SEQ ID NO: 69998 - DNA, 2281 bp, Homo sapiens
tgtgtggtggagagagaggaggcttgaaatggggaaaaggagcctaattattttcagtagattttgtttttgtttgttatttttattctcggaaaatttaactttgcaggggattgaggtattccagataatgccttaaggcagaggaaggcaacatgttgtagtgcattcagagtttgcatgtgaataatcaaattaatcatgttttattacatttaacgtatatgtcactactgggcttagtatctgatggtttgaaaattaaaaaggtggtagggtagtgactgactttgtgcttgatattttgtctatcacatatgacttattttccatagataattcattttggcagtaaattttgtgttctaattatttttattcttgcaggctgctgaatcaggaataataaaagttaaaacaattgctgcacgaaacactgaaattttggcaggtaattttttgtattaaaaatttaataataaacaaaaatttgactaatagtaaaagtagaatctttattgtaaaagccatcagttttctgtaacatctcttcctcatgccctaacatatgctattcataatgaaacagaatgggcaaaagtccataacttatgaactgactgtatttcccagagacgaatgctacaaaaattctctgaaatcagaaagcttaacactactgactccttaaaggcaaggaattttttcttactcatcttcgcattctcctccacttcctgctaatcacctgagacacaccataaaaagcattcagtaatatttgttccattgtattgaatgaaagatttgttctcagtccaccttctgtgatctactttctctttaatataatacgaacagttcataacatagtcttctgtatttagttgtaccgtatgaattttgagtcttgggattaaggcagtatgatcatgaaaaaagaatgagagtgaagtagagaaaagaaaacaaaaatgttttcttaccttctcttgattgaacctgattttcaaggaggaattttcaggagtttctctttggcatccttcttttctacccagtccactcctttctcttccttggtgccttttgttcttgcctcaataatgaacatggaaaagaggtaaactggcttttttttttttttttttttaagaatctgttatatgcaaggcacttgtgtcattctatcttacataacaaccttgtggggaaatattatcttatttgatagtagagctaattgagatgtgaagaggttaagttacttgcccaaggtcacaggaaaggtgatagaaccagattaaaatccaggagtgttcaggagcccatgttcttcctgctacagtgtgctaccatggtatcaccaggtttccacgttagccacttactcccaagtattacatatgtaaccagtgcttgcttcagtgatcctttaatctgcatttccagttccagtagtgctgttgatctcagctaatctatgaggaaagtagtcctattaaattaatttacagagtccaaatagtaaataatctctttaactttcatatactttacattttttaaaagggataccagtaaatctgtaactggtgggatttcagagtgttatgaaatgaaattaagatttttggggtcagattaaggatcgggggcaagagtggatttcacttaggctatccagctttgctggaaatttgcccttagcataagcgctcctcaattacatctgtttcccacagctttttccctgattttgaacagtcttatcaaaacacccaatagttttataacattatgcacagaagtaaataatgctctgtgtgcatattgagaagtggtatagtgaaagtggtgggtaaaggcagaggtgcacatggtagggttaggaaggctggcaagtgggttttttttgtttgtctgtttgtttttcctgagatggacttttgctcttgttatcccagctggagtgcaatggtgtggtctcggcttactgcaacctctgcctcctgggttcaagcgattctcctgcctcagccacccgagtagctgagatttcaggtgcccaacaccacatctggctaatttttgtatttttagtagagacagggtttcatcatgttggctaggctggtctcgaactcctgacctcggggttctcccgcctcggcctctccaagtgttgggattacaggcgtgagccactgcgcccggccagcatgtgggttttaatgggagatgtacattaggcagattagctactgtggggaaattggtg

SEQ ID NO: 69999 - DNA, 1598 bp, Homo sapiens
gggaggctgaggcaggagaatcacttgaaccggggagtcggaggttgcagtgagccaagatcgtgccactgctctccagcctggggacagaacaagattccatctcagaaaaacaaaacaaaaaaaaccaaaaagacacacacagacacacacacacatacacacatacacacacacaaacacacaaaacaaataatcgcttatgagtttaatgttctcttgacttggaattccgtgttatttattcaaattctgtaaggatgacaaacttgtcttatccatctttgtgtagcctttcagtaaatgtgtgtagatttaatttcattttgtaaatttaattatgtgtaattcagtttgtgcattttctaacctcgtgcattttctaacctcttacatttttattgccacttaaaaacttctgagtgagctggcttggtagaagaagttaaattaaggttcggaattatagcatgtgtacccaattaatttaaagtgctgtttcagtaataagaggagtaatgttattgtttttaatgaaatgtgtttatttcttgaagaaattagggctgtttaaattcaaggcatataataaaattctaggaaatttcttaatattcatttacaagtattgtggggatgatgtatgtactatttttaatgattctattctagggtgggaattcttatttatgttttccctcctgtagtatatgaagaaatagagtgcttttttgaggtgggaaagaagttttgaaaatccatgtcctaatagagtttgtagcagaagatggaggagaaccaaaggacagagtgttaggagaaaagcatgggaaagcagtagttaaggcgtatagcttagatacagagtctggagtgtctgtccaaggtattttaactcttggtacttgatttttgttttggtgtttattttacgtaaagtggattttttttgagatcgctattactggttgtaattatataaaaatgcattcttaattatagattaattttaataatttactttatatgtgttctaaatgaagcactgaaagagaacagctcagaggttgtacagccttttttaatgggttgtggaaccaaggaaccgaagatcactcagctatgtttggctgctattcagagactcatgtcacatgaagtcgtgtctgaggtaatatgaagattttatctaaacttcacctaagagttgaatcagaagttttcatgaaaggagaatgaaacatacctgatatttaatataaaacttttacaaatagcaatgtgctcggagaaaatggctttatttaaaaatattgccaaattttctcctcattaaacactcacaaacaagtatttttgcaagtcatttgtaatctaagaagtcacagttcagtaatgtagatgaaaattttgagactcaagcaagttttcaatttaattggttatttaatttttcttttataaaaagaggagggaagagcgtgactctctttcctagattatatggagtaataatttgtttttcattaacttaaacgtattgttcatatctaaccttatgatggaaaaatgagaaaaaatatttcttaaccatgaat

SEQ ID NO: 70000 - DNA, 2612 bp, Homo sapiens
ttgcggcactattcacaatagcaaagacttggaaccaacccaaatgtccaacaatgatagactggattaagaaaatgtggcacatatacaccatggaatactatgcagccataaaaaatgatgagttcatgtcctttgtagggacatggatgaaattggaaatcatcattctcagtaaactatcgcaagaacaaaaaaccaaacaccgcatattctcactcataggtgggaattgaacaatgagaacacatggacacaggaaggggaacatcacactctggggcctgttgtggggttgggggaggggggaggggggagggatagcattaggagatatacctaatgctaaatgacgagttaatgggtgcagcacaccagcatggcacatgtacacatatgtaactaacctgcacattgtgcacatgtaccctaaaacttaaagtataataaaaaaaattcattcataacacagacaacccaattaagtatggacaaatggtttcaacagacacttcattaaaataatatattcaaatgggtgacaaacacatgaaaagaagtttagtgttattattagggacacaaattaaaaccataaggaaatagtattatgcttccattagaatagttacgatgaaaaaagaccgtaccaagtgttatggaggctgtagggatagttctaaattcacgtatactgctggcagaagtgtaaaattgtaaaaccactggggaaactggcggtttctttcttttcttttctttttttgagatagtgtcttgctctgttgcctgggctggagtgcagtggcgcaattttggctcactgcaaccttccacctcccaggctcaaggaattctcgtgcctcaggctcccaagtagctgagattacaggtgtgcaccaccacacccaactaatttttgtatttttagtagagacagggtttcaccatgttggccgggctggccttcaaatcctggcctcaagtgaactgcccacctcagcctcccaaagtgctgggtttacaggcgtgagccaccatgcccagccaactggcggtttcttaaaaagttaaacctattcttaccagatgacccatccatttcacttccagatatttacccaagataaatgaaaacatatgtcctcacagtgacttatatatatgaatgttcatagcagcttttttttttttttaacaatagtcagaacctggaaaattcaccagcaggtaaatggataagcaaaatatggtgtactcgtacaatagaatactgcttggtaataaaaggtacaaactactgataaacagaacaaagtggatgaatttcacaaatattattctaagtggaagaaggtgggcccaaatgagcacatactgaattaatctgttcatataaaaatcatagaaaatgtccattgatctgcagtgaataaagcacatgggtgtttgcctggggccacgggtagaggaagagatgggtggcaaaggagcacaagaaaacttttggggtgatggaaatattttgtttgtcaattgtggccatagtttcatgggcccacatgtttgtcagaactcatcaaattatataagtttaagggattctataatttattgtatataaattacatctcaataaacttgagttttaaaagaaaaaaatgactccttttaaaagtttcataattttatttatttatgtgcttagcaatcacatagcttctccagatcattaagtgatacaacaaactttgagttcatgttatttgcaaagcacgtcattctggggaaataaaagcataacacattgttatatagatgttaaaaaaccaaattttaaaaggtatgtttcacattaccatagctaatcttctgtggctatatatttactgacaacttggattacatcaaaatctgaggattttatattttattgtaaatggtgggactttccataatggtgattgaaacaaccaaacataaattattcaataaagataatggctttgcttttcaatcttatttcacactaaatgaaaattgtgttttcaggcaatcgttctttgttttcgactacacttcacaaaagataatattacaaataatacagctgctgctacagtgcgacaagttgttactgttgtttttgagaggatggttgctgaagatgaacgacacagaggtaaagtgctagaagttgttttactttgtgggtggttcttggatgatttcatttgtattaactttcggcctttgctcagatgatcaacattattatgtctataatggcaacttaaaaaataaattcctcacaatttgatcccctgaggaataggctccttgttttccttgtttatttctagtgtatgcataattttgtattaaatatgataatttcacattttaaaccaagtattgcattatatgtattttttaaccaaacattacattctatgaatttttcatgttattgcttcgtcctcataatttaaattttaatgattgcattatatttcatggccattctgtaatttaactgaactagtctcctattggacacttgcattctgttcagtgttttataactgttttgggtggtttcctacgtatct

SEQ ID NO: 70001 - DNA, 1050 bp, Homo sapiens
gggaaacaccatcctagctgattcttagctggtgagtatctgtaactgacatggtaacagcagcagatcaagcagtaattctcttgaaaatagtgaaatggtagaggagttaaccatatggtaaacgtttatgtttgtttgatatttaaaagcacatttaaagatcatgtgaattttaaatccatgaaaaaaaggggctgaagaatgggagactgggaaaccaaatgtatgaacaaagatacccagcttattagagtgaatgtaaggtagcaaagagtgatttttatggtatttggtgtaaaaacagattcccatttttttttgttttggaggcatatgttaacattggaaattttaattctgaaattataacttcaacttatataaacaaatatttattttaaacattatcttttaaacagaatatataatttattaaaggctattatgaactcctaaaacccatcctgttttgattgcagatattatagaacaaccagtactggtacaaggaaatagtaacagaagatctgtcagtaccctcaaaccttgtgctaaagatgcatatatgcttttccaggtattttagttgataaaagtaatttttattctaaaatatagttttgtgtgaattttttagttggggattttatgtctaatttttttaatgtgaatttttttgaaaatatgtcaaaggtagtattaagatagttctaaagaacaacttttatatttactttatagctaattaacatgataaaacgttattactcactttaagaaaatgaaataaatgcagaactagaaaacaggtatatcagaaacaactagtcatacaaaaaaaagtttctttaaaaaaggaaaatttaagtaataaatttggtctgtgtagtataatttgatacatagatacctgatttttacatcacttgtcatgaataaataattttaggtaaaacaagattaatctgtactgaaaatattattacttcggattaaaagcttagtttttcatttgaaataatgttagattaatcatttatctgtcta

SEQ ID NO: 70002 - DNA, 1033 bp, Homo sapiens
tcaagtgttccttccacctcagcctcccaaattgctgggactactggtgcgtgccaccatacctggctaattttttaattttttttgtagagatggagtctcactgttttgccaaggctcatcttgaactcctgggctcaagctatcctcccaccttgggctcccaaaatgctaagattacaggcatgagccactatgctgggctctgatgactgttctgaccttagactctctaagtgcaatacgaatttcaaaattgtgcgtaaactataaaataataaaacatataaacttatagtaaagctaaattattaatactggttattaagaagttttgtttcctagtgagactgtgtttttggaagtattaagtacaaataaagttaattatttttttctttcttttttccttgcaaatagcaccaagaatttagtttcctcctcaaagaaagggtatgtcctcttgtgataaagctcttttctccaaatataaagttcagacaaggttccagcacctcatcttctccagcaccagttgaaaaaccatattttcctatctgcatgcgtttgctgagagtagtatctgttctgattaagcagttttacagtcttttggtaagtgctaatttccttatgtatttgtgtatatagttgcatgttgtgccctttgtaaaaagtggtctgttgtagcgcatttagttttttcaattcagttcaacagaatttttttgagtacctacgtgtagtctaggtactctaaaggtttgttctatcctttcttgaatcttgcttatgtttatagagtattcataatgtgtgaagcagagtcattgcctgttgtctgaagccagcataggaattgtcgttttggaactcagcttcttagctaattgtctgtatctcatttgaaggattattaaaattatagtctcttcagtttattctgctttcatttatactgtttcatatgtcttaacagattaaagcaaagacattaaagatttggtcaaatctaagattagaaaccaattat

SEQ ID NO: 70003 - DNA, 1131 bp, Homo sapiens
agggttcagatatctccacatcctcagcaatgcttgttaatcttttttatcgtagtcatcccagtgagtatgaaatgatatcttaccatgctttgatttgcattccctaattactggtgacaagcatctttttgtgtgcttcttggccatttatatgtcatgttgggcgaaatgtctattcagattcattgctcctttttaattggattgtctttttcttatttaattttaagagttatatattctagatgcctgtctcttatcagatatgtgatttgcaaaagttttctttcattctgtgggtcttttcattttcttgattgctgctttttgaagtacaattgtttttaattttgatgaatctaatttatcaattttttcctttgttgcttgtgcttttggtgttatatctaacaaacctttgcctaatccgaggtagtgaagatttttacccatgttttcttctaagagtttttatagatttagctcttacatttagatcattgattcattttggagttaattttgcatatggtgtgagataggaccatcactcttctgcatgtgaatatccagttgttccagaatcattagttctttgtcaattgaattactcttttttccaggaattattttgccagatgtcaattttaagaggtttagaaccatagttcactacctgccatgatttaaaacagatttattgtccttccttctgaaaactttctcctaactatggggtaaaaaattgctccgcagtttgaacttgacacactgatgctcttattctcaccttgttggcagattgtatttgaaatgataggtgagctgggcatctcacagcatgaaaagcatcttcctcttcataggagtgatttgatttgatggcatcttattttttttttattttttattttttttgagacagagtgtcactctgttgcccaggctggagtgcagcggcgcaatctcggctcactgcaagctctgcctccttggttcatgccattctcctgcctcagcctcccgagtagctgagactacaggcacctgccaccacgcctggctaattttttatatttttagtagagacagggtttcactgtgttagccaggatgatcttgatctcc

SEQ ID NO: 70004 - DNA, 1101 bp, Homo sapiens
aggtctcattcaaattttgccagttgccctagtgatgtccttttatgtgttgaatttagttgccatgtctcaacttggaagtttcttagtttttccttgttttatatgaccttacttttttgagtacaagtcagtcagtttgagtttgtgttgtgttccttcataattacattcagcttattcatttttgacaggactggcacagaaatgttgctgtgctgtacttactgtatcattacattaggaagcatactacagtatcaatttgtgtcattattggagatgctcacttctatgagttggttaatacaatgtcagcctggtttcttcagtgtacagttaattattaactttttgtggaaaaatactttcagattgctactacaaaagagtgctttcccttctgcatttttttattttttaaaaattattcacttatattagtgtagattcatggattcctattttattcagaggattatagtctttattattatttggtttgatgctcagattgttcccaacatggccaatgggacctctttcaagatgacccgtgtgtcctttggacatgtcccatgcccttttgacattctctgagcacttcctatttgatagaacaagatgttccaggctgatcttggatgattcttgtccatcccaggtgtcagtcatttctccaggaagtcctggttccttttagtggagaatagtattgaaacgaacacaggtatactaggtatgcttttcaccacttggataggaaatacatagccacatacacacacccccacacacaagcacacgtctctgtacatttctaaaatgtctgtttctctatattgaattaccatgacatcacactagtttcttcagttccagttcagtaccacaaggtttatttttaactttctgtatttgtaattcccttctccaacagtgttggaacctgctcacattttgctcagtgtatttacttatttgcttgattctcagtgtatgtaatcagtctcctggctgagccagtttgttacactgcgccctgccctcactccaactggtcacacaggctgagaaagtttgggttgatgaaggcaaagg

SEQ ID NO: 70005 - DNA, 1073 bp, Homo sapiens
aatacagtcctaaaattacagaatgcctttttcatttcaagacttacaactacttttgcaattatgattatatttaatttctttgttctttttctttaggatttaaaaatttactggtttcaaaatgcttgatattttaagctaaatctttatgttcttggtcattttcttcagtaataaatacatgtattattattcattgcttttacccagttcaaatttttgaggttatgttaatagattaaaattccttcttaagtatattggtaatattttgacaatatttttgtatagattttcttaaaatgtcactgaatacttaattccacatcatgctttacaatgtaattaaaaataagttaatcagattaaataaaatactttcttttcagcacagatgaagctgccactgagaatattttaaaagctgaactgactatggctgctctttgtggaagactgggccttgtaacttcaagagatgcctttataactgcaatatgcaaaggttccctgcctccccattatgctcttactgtattgaataccaccactgcagctacactttccaacaaatgtaagacaggcttactcaaaattctctctatgtagtgggatgatatggtgtagacagaagattataaacatctgagtttaagtctctgctttttcacatactgactgtgtgaccttggggaaattaatgtccctgagagctctttaaaaatatggggtggggggtggggggtgggcatgggatatccaaaaatccagaatctaaaatgctgcaaaatctaaaacttgttgagcaccaacatgacaaaggaaaggctcattggataagtatataatgtgaataggtatataatgcaaacataagtatttacaaatatattatgcaaataaatgcataagtatatataatataaatattcaaaaatctgaaatcggaaacagttgtgatcctaagcatttcggataagggatactcaacttgtaataccaattttaaacaataattgtgagaggaaaataagataaatctggaagtcctttgtaaactatgagatacc

SEQ ID NO: 70006 - DNA, 1625 bp, Homo sapiens
gacagtagcaagctgtacaggtttgtagcccaggagcaataatataccatatagccccggtgtgtagtaggttatatcatctaggtttgtgtcagtaaactctgtgatgttcatacagcaacagaatcgccgaatgacacatttctcagatcatatcctcatcagtaagcaacacatgactgtagtttgttatgccacaaaataagaaaccttcagcaggaggaggacagaggcaaaattatgaaggagatcttatatggttatataaatgatttgaatttatccaaaattcatgtgggagacattttgggattttaagcagaggaatgacttaatcacatatgaattttatagatatcactgtgacagcagcatggaagggaaggtaggaaatgagaatggctacaagtgctcactagaaataagagatggatttgagctacttaacggattgactgtagcgaggcataggggaaaatagcaatcaggagtgacttctagatttctgacttaggcagtttagtgggggatggtagtatcattaactaaatagggaaaagacaaggaagagcaaatttggaggggacatatggacttgtttaacttttggggtaggagattgcagtggagagattaagcagacagacattggatagatttttctgtaattctgcagtatcacacttttgttttgatgactagttcggaagttgtagacgaccaagatgcttgagaatattatggaaagttaatttttcttaaatatttatagtaataaaattctttactacaaaatattgagatgcttaaattgaagaatcagcttagatcaagcttaagtgtcttctcccaacctataatgtggtgtactaaatagggcattgtagtaagggtataatgaattaatgggtgtaaaacagttagaaagtatgtgacatactaagcactcagagtattagcaattatacttatcattttcattactattttttaccaccaggatttttctccaaaactaaatacttcttattatctttatttgaaattcaaaatttactcttttctcactgactggatgtgggtttttatatttctttggagatttaaataagatacagtacggatataaaagaatgaggagctctttttcagtaaattgtgtgtatttacatgtactggacactgtactagatatcagggatacagtgaggagaaaaataactgtagcaaacttgccattctcatttattgtctaagttttctttggttagttggtatgaaatacaaatagaagtaatatgatgttaatactttatttttaaatttgtttttatttcttattgcctgtaagcttctttctttgtttttgttaatttgtttaagtaagcatgtcttttttacatttatgtaaatgttaaaatactttatgatcaatattaggagtttcttgtttaaattctgaaataaaattttacttcaaattattgtaagatatgtatttttacacatttcttttaaatgcataagtaaggctgggtgtggtagctcatgcctgtaatcgtagcactttgggaggctaaggcaggaggatcacttgagcccaggaaattgagaccagccaaggc

SEQ ID NO: 70007 - DNA, 1026 bp, Homo sapiens
ttcaaatactacaccattttatataacagacttgaggatttgtggatttgggtatgcagtgggaggtcctgaaaccaatcccccacggataccgagggacaactgtattttactattactattatttttcccatttttacatgggaaaaaatgtaagcatgttgcatatatgattgcaagtgggtggctagtgcaacattgcttaaattactgctggatagcacctcctttattttacatttatgttcacagtactggattctctacattttaaccattggcataattatcattaatataagatatgtttggaaacagtaattgctcgtgtatgaaattacaaacttattaaacaatattaaggaattgttaacattgttagggtgataatgatattatagtttttttttatagttaacagttgttatatttaggtggtagatacatcaatatgttcaagttccttatactattcttggttttttgtatgttcttgacattttttataataaaaaagtaaaaaaaaaaaagttagctcaagattgtttccccactttctcctgaaataatgtagagacactgacagaagaagagatgttttcattgaatctattctactaggaaagagatttttgaagtaatgtttttaaagttttactctgaaaggtaaaacagccacatgttgcatatttatgtgtttaaaacaaaaccttggatgaactaatatttttctactttgctttttagtggaatatttcagattattttttccaaagaggggaaactattgaaaaagaactaaataaggaagaggcagcacagcaaaagcaggcagaagagaaaggagttgttttaaatcggccattccaccctgcaccgccatttgattgcttgtggttatgtctttatgcaaaattgggtgaactatgtgtggatccccgtcctgctgtcaggaagagtgcagggcaaactctgttttctacaattggtgcgcatggaactttattacagcattcaacctggcac

SEQ ID NO: 70008 - DNA, 1050 bp, Homo sapiens
ggaggtcgaggcgggcagttcacctcaggtcagaagttcgagaccagcctggccaacatgatgaaaccccatctctactaaaaatacaaaaattagctggtgtggtggtggacacctgtaatcccagctactcaggagtctgaggcaggagaatcacttggacctgggaggcagaggttgcagtgaggcgagattgtgccattgcactccagcctggatgatagagtgagactccatctaaaaaaaaaaaaaaaaaaagaatgtataattactctattggtcagtttcctccaatatatagggattgataagactgtcaagtatattttttgtaacaatttgtagattcttatgctgttgctcctatgctattacttaagctatattatcaatgcattttaaatgacattttaataaatatttaggtactctttcatctactggacagagttcgagagtcctctaccactgcagacaaagaaaagattgagtctggaggtggcaatattctcattcatcattcaagggacaccgccgagaagcaatgggctgagacgtgggtattaacattggctggagtagcaaggatcttcaacactagaagatatttgctgcagcctttaggtatacgtacatttttttctgattatacaagtaattaatgttaaaagaaatttggaaaatacagacgattcttttagagtctatcttaacttagtctttatgtgtggtgtgtgtgtaagcatctgtgttttcattcgtttgtacctactgtgggctagcctctagaggatacaatgaaaggcaaaatacacgtcattcttgctatcatgggcatgaggaagtacccataattacataaataaaggcgaaatttctacaatgatgtgttacaaggagtggtactttgtgagcttcggtaagtatttgacctggccagtgaattccagatggactttcctgagaaagcaatagttttcctgagatctgtagggtaagtaggagttcatcaggcaagagtaagacgaagtgtggagagccttatagtca

SEQ ID NO: 70009 - DNA, 1078 bp, Homo sapiens
catatattttccagttctgtaggattttaagcagaaaaattaagcaaatatgctttcaagtgtctaatatgaagagaaaatttgatcgcttttatgataatagtttttttttctcttcctaatataggagatttttcaagagcttgggatgttcttcttgaccatatacagtcagcagcactcagcaaaaacaatgaagtatctctggctgctctgaaaagcttccaggaaattttacagattgtgtcccctgtcagagactcagataagcctgagacaccacctgtagttaatgtacctgtgcctgttcttatagggcccatatcaggcatgagcaggccatttgtaagaacagattccattggagaaaaactaggaagatatagtagctctgagccacccattgttactgatgagcttgaagatttgaatctatggtgggctgcgtggaatacctggtatagaattggatctgaaagtactaagcctcctattacttttgataaactaacttttattcctagccagccttttcttacagctttaattcagatatttccagctctctaccaacacataaaaactggtttcaatatggatgacttgcaaaagttgggagtcatattgcacagtgctatttcagtcccaataagttcagatgcatccccttttattcttccatcttataccgaagcagttttgacaagtttacaggaagctgtacttacagctttagatgttctccaaaaggtaatataattttagtggctaagtaatactgcatatagttctctgaaattttttttattttgctatatatttgcggggataaattttagatcatcaagattgttttatatgtatactttgggataaactgaggattgtcaagatctaggtattttgaaaacttgtggatttctgttgcattttgaaaggtaattcatgtatgttttgaatcttaaagaagctgcctgcatcctaatgtttcacttcaccaggatttttggtttgtccacgcaagtcttcacaagaggatataatatttggaataaaagttttagtaaagtacttttat

SEQ ID NO: 70010 - DNA, 2354 bp, Homo sapiens
aaataattaaaatctgcagtatcatgatatgcattttattctttcttcctatcaaattatttgaagtaagaaacctagagaaactagttactatttattaaaatgttttcttatattaaaatattttattttaaatcaaatcgatatatttagatacatttcacattaaatatacacagccctgtcaaaaattaatccatacatttcttttagaaacaaattttcgtagatgacttattttcccaactgtaacacacatgattatttgtttaagttggtggaccaggcatggtgcagaaatcagatgtcatttcaatgaactgatatcacagaatttgaagtcagtgtcatcgtggtcagtcacacattcttaatggcctaatggctgtattactgaacaaatgatcagattgtagaacctgaggactgcctgggacttcactttgttggccctttttctattcttttaagaaataaatcacactgtaaaaaagaacattttttagctgattaacagtttcagcctatactttattctataacagtttaaaatagtttgtgtcctttagggctcagaaaagatggtataatacataaaataagacagtttttaagattctgtggttaaacaaatatatacacagtaaagaacttaatggagttcagattatgcattctaatgttcttattttgcttttataggccatttgtgtaggaccagaaaacatgcagataatgtatccagctatatttgaccagttgttggcatttgtagaattttcctgtaaacctccacagtatggacagctggaaacaaagcacattgcaaatgcaaaatataatcaggtaatttactgtaaattttatttactttgtaagatttcatggcttataaatacagatagttccacttaagatggactttgattatctcggaaaaggatacttttcactcacaaatatatttatacatgtctgttagcagtttaagctgaacagaaatattgtttgggaaactagttctgtgttctttttctcctcatttatgactttcctcttccaactgattcttcagaaagtttggcctttcatattactctccagtacatctttcttgaaaaatataagttcctttgtacctctttcttggttgccccatcccaatacaaaacagcttctaaatccctaagtctaatcttacttaaaacagatacctgccatgcaagatgaagaaactgtttgtactaaataagaagttgtacactactggtgtgaagtttagttggattttatataaaatatttttatagccatagttggcaaattttaactttgtttaagtaaatttctgaatgcatgcccatgctgattttgttcactcaacataaaaattataattttatatcgtccgaaagtagtttaaatatgtattaacttttctcattctatttgtcttgcaacacaatggaatcacaatagatccaactatttgcaccggtgagttaaatttcctaaaattgtcctaacctcttggcaacaaataaagtacatctttcccggttcttggtagaatgctgtatgtgctttttccaatagttttaatttttgcctggctgaaaattatttttttcatgaagtacatatctctttgaaaactttgcatgtaatataatctgacctaaaaccaaggcctgaactttaagacaaagatgctttctctttgaaaacaatatgattaatttaatctcagtttatttttaactgcatgtgaaaatattactttctaggcggaatgggtagccttgaattatgtgccgtttgctgaaaggtctttagaagtagttgtggatttataccaaaaaacagcgtgtcacaaagcagtggtgaatgagaaagtgctccagaatattattaaggtatctttttttcatttctacactttcattagatggtgtgaacattattgaaattattccttaggtaatacattatcattatattgggataaatagaaaatacaatttgtagtattatttgtaatgacttttctccaatattcatgaattgtatttagcaagccatttttctaaaagttctttttagtgaaaaatattttaacataaatatgcattaaatttgttacagttcttaatgagaacacatggacacaggaaggggagcatcacacaccggggcctgttgtggggtggggggagggggagggatagcattaggagagatacctaatgtaaatgatgagttaatgggtgcagcacaccaacatggcacatgtatacatatgtaacaaacctgcatgttgtgcacatgtaccctaaaacttaaagtataattaa

SEQ ID NO: 70011 - DNA, 1047 bp, Homo sapiens
gatctcttgacctcgtgatccacccaccttggcctcccaaagtgctgcgattacaggcgtgagccaccacgcttggccagaattttctaatccataacatcgggttaagaaaaggtacagaattgtgtttccttctcttaacttttcagataatatccctattatttatgatgaaaaactgaggttcaaaaatgttatttatgtaggctcattgtttataagatagagataggatttaaaagtatatctttccaggcagtatttgaggactacgtctgagaattggcctttctgcgaaataacatcctttttaaatgaaaataccatcctttttaagatgaaaatacctatgctattttttctctgctgtagtttttcttaattaaaattgtgtgtgtatgttttaattaatgcttatattaaactgtctttattttcagactcttagggttcctctcagtttgaagtattcctgcccttctgaaagcacatggaaactagcagtatcctctctcctcagagttctttctattgggctacctgttgcccggcagcatgcttcttctggaaaatttgacagtatgtggccagaactagccaatacttttgaagattttctctttactaaaaggtcagctcattcatttttaaaattaagacaagaagtggcacattatatcttcagttgctctaaaaacagttgtctttattcattaacaaagtaattgattataaaggttgctagattgtattaaaaacacacctgaattagccatttatccattgggtacattatccatgaacaatggagatttttgctttttgtatttttgcttataagacaggaatattatatataaaacaatacaaatgcatcatatttaagaattttaacttaataaaactaagaagattcagtttttaatttgatgcccattgggcattgcaagagaaaaacaatgttagaaaatcagtgtattaccagaataaataggatgagtggcaatataatgatcagctctttaagatgtttagatttgtcaaaga

SEQ ID NO: 70012 - DNA, 1069 bp, Homo sapiens
tcaactcatccttagttacctccaccatcatcacaaatcttttaatattactaaacccttaccttccttggttataaattaaaattaaacacaacttttgtctctagagatgcagatatagtctgtgaagctgctttgatggcagtgattgtgaaattcctctgattggttcaggtttgggtaaatttctttcagtttttttactctagttcctactaccaatttatagttagcttaggacttggacaccagaatctaagttctatgagaaatggactgagtctgtcctgttcacagctagatcttgaacacccaagaatataatacctgatgcaaagtagttggtactcagtagatatttgttgaatgaaaaatgtccaaatcaaagaaaccacagtctgatgcccatatattcctatatacaaaattgtacattatacttaatatacagaagtgtatattaaacctaaatgttctaatactatttttacatctacaacataaaaaagaataatgtaggctcaaatatcagataaatctaggttgagattgtggcctcatcatttacttaaagtgtgttcttgggcatattagtaggcattctaagtttcagttccctcttctcttgattatataataattactacatggaattgctatgggagattaatacaaataaagctcatagtactgtggctgtctaactttttagctgtcattattctaacagttattactatcctattctcaactgtttttaaatagtatcttgctgttttttaactttatgtccattttactgttcactcttatgagccacagagtctggaatccaccttggttctctcagaactattgattttctttgttcttgttggaacaattttctgctttagaaaatctgcatcagtcttcttctttacagattttccctctttattgtaaagatctttaatccattgtatttattacaaattaatgattaatggactgtctctgagtgaataattcagcagctgaactaaggctgtcttaaataaccaccaatataagtgaattcaggtaacac

SEQ ID NO: 70013 - DNA, 1050 bp, Homo sapiens
tgtattaaagctcttgtggactttaaagggcaaaataacatactacatgttagagataaactatttgacaaaaatgaatataactttaatttctcttacagctgatagtttttggttataaaaagtgatttaaatgttattcttaatcctattttgaatattttaattctaacatgggtaaatttcatatgctatttttctctagagccctatttgcagttatcatgctgaagatcaacatttgtccaaatggttggcatagtaaacagttatggtactgactattttgtattaaagttactaggacagatgagagaaacagattagtagtcattctgtatgttaacattaaaatgtttgtgtacttctttaaaggagagttctttaactgattttcatttaaagtaaaatttaaattttactctagaaattattttagtctctttcaaagaaaacaatacatttgcatttgcctcttttgttttaggtagttcaacttatcagcaatgagatactaccttatgccaattttattcctaaggaatttgttggtcaaataatgacaatgcttaacaagggctcaatacattctcagtcatcttcatttacaggtatgttaatttttttaagtattaaaaagtattgaagtacttttgaagaaactgtcagtagaaatgtttaatcctatgattttggtaatgtaaactggagaatggtaaggtgatttttaggattgtaatatagaactaagctttatgaggagaaatgttatgacatgactattctgtggaatagaatgtttttattccatgtttctattctgtgaaatactgtgtttctgatcatatatcagaaacactgaactaaattttttaaatatcataactgcaaactgtgaagaattaaattgcaaagcactttatggaatccatggatgtcactgcaggctgacagaagttaccagttttgtgaagtcatagattggaaaggaatataaaaatatgaatgtatattctgccacttagcagtcaattaacttttgagtctcag

SEQ ID NO: 70014 - DNA, 1016 bp, Homo sapiens
ttgttatggggtgcttttttagatccctcatggagattatgtaacatatgatacataggtaccaaattacctttttgaattaaaaaaaaataaactgaattccaaaatatatcttcttccagagatttctggataagtacttgtggatctctatgagcacatgatattatttctctaaagtgaaaatcataaatcatattttaggaatatcctagtttgttttacagtcatttgcaggtttctctctgtgtcagctagcctgatcttaggtcttcttttcatccaatctgcttagttaagcccatggacctaaactgatttatttctcatctgttcagcctgtgtcagtggaaggtgcactaggcttttctgatcagccaaggctaatcagagttggagtacagaccagaattcaacaaaggatacagtcataaattagggttaggtttgcaaatacttttataatgtggaaattagagtttaaggcataactaatgaagcaaacagaaaataacatgggaaaacaaagttatcaaagtcaggaaagacgaaaatcattgttcccgtctcataaggtaggactggagaggcaaatcaccagtgttaaatctttgtgcacattttaatttacttataataaatttctgaagttggaattgacctgtcaaaaggcacagacattttatagcttttgatatgcattaaccaaatttcccaacagagatttataccaatttacattctcccaggaatgtgtgaatgtccctttcctcaatttttagcatttttaaattatttgccagtttatcatttatctttttctaatttgatgaatgaaaaatagtcatgtggtactttgctttcattttttaattaccaatgcatattagctatttgtatttcttcttttaggatccagtgtattttgaatttctagaacttaaattataactccttatactcaaatttatacacaaaaacactccaaagacagatgttagtaatttggctatggg

SEQ ID NO: 70015 - DNA, 1004 bp, Homo sapiens
ggcgcggccaccacggaaaccgttagtttcacattttcctagaaggaattgaggggagtggggtggaccgcgatgcattttaaaggttgggaaagagctaagccattggattccttttcttgaaggaaggagtggaattgtgtaagataattgatacagataactttttcaccctaaaaaattctaacacttctttcagcagttaaatgccaaatttagtgtgtacctgttttacttcattctttagctgtaggttggagtggtgtgagcgatctgcagaactggcattagaggggcagaagaagtagacctgataattaaagtttatgccttaacattttagatctggtttctgatatgctctcttagtaaatctgagtgtgtctttaaaaacgtaaacccaaagcaatttaaagtttctctttaaactttgcaactcgcgaatgagaagattgaaattatttgtaggtaattgcactattccgattttttaatgtatgaggcaaacaaataaattctatgtacagtgtgctgtgaatggttttgttttttgttttttctttttagtttaaccttggggctcagattctgctggtgtggtgggttggttttttggtttttatggcctttgattctaatgttatgtggtacttacatctttgaggttttgtatgggagaagaggactaggaattgaaagtggtttctagatttgagtttaaaatctactaacactcattttgattcctgagtggccactactcctaataggaaaatacctttgcatagagaaaaaaggtagtttggataactaatgaaaatactcagtgctctaataccctgaagtctgcgtggaaaacaagatacttgtatttttattttattttcactgagggaagtaagtggtcagttttagtacttttcgttgaaaactgatctgtatttgtacagaataagtagttttgaatataatgtaatcgcagttttctatggttttctgatgct

SEQ ID NO: 70016 - DNA, 1069 bp, Homo sapiens
gtcctatacagataaactattcatactttatatcttgtgtttttaaagtaaattttatccacaactacatattgcccaaatagtagtaacatttttgagttattggatgtaaaggtactttgagaggttaactgtttcctaagttacaagagaaaatactgccaccagctgacttgttttaatcccatagctatatttctgctctaatctccagttttaaaaatgatctgctaattacatttctctacacaccaactgaaaattaccaactgaacattttccttgttgacagtttcccacaagatgaatttgatttatcaaaaatacagctttctgaacttagtattattgacatttacttggtgcagttaacttttttgttaaaggtctgttgtcaagcatttaagtaatttgtagttgtaaaaagccactggtggaaagtaataaggcagtattttgagtgcccttctcaataagtacatactaaaccaaaggaaagctgggttatggtaataacattttaataaatgtcatcctcaattggaaatggagactgtgttatggtatataggacacaccatatggagaagattcttggagaacacagttttgcttcatactttaaaattcctgattgctaatcttacatagaaaagctttgtttacaagctattttaaaataaccttttggcaggtaggcaagactgactggcaagggtgcactcaagacattgtgtcttgtggagtggtccccaaagaattcctgacagaggcacctgacagcacaaattagctcttcagtgtataagcacaaagcaccaaaaaggctgagatttcttcctagctacatgctctctcccgctattgtttattacactccacccgctccatggtgaagctgacaaaggagatactattaatttcctttcccactgaataatcccctctgtaatttctacaacaaaaggtaaataggacaatcatcttcgaaaatgaattaggccagattggtagtacccaaaaggagaattaatgaccattgtcataaactctgaaaagctgttggcgc

SEQ ID NO: 70017 - DNA, 1055 bp, Homo sapiens
gaagggttttccatttaacaagagcactagtatgaaaacattagggacaaatctcccatgtctttgaaattcggattctcctcttgagatccccttcctcacctgccaatcaactttataaggccacaagtggtcactggttttccttccacaggtttgaggttctcagctttccttaagcgacccagcagctccgctgttttcagagtgaatatgttaagctttgatgagattctattttcagtaagttagtgcttctgggacacttggagaaagctgtgagagtcattgtctacgcaaagaacaacgaagctgatcctaaaagtgatccaatctaagaaaatggtaaaacgagctctggccacagcacagaattttatgtgaggaactcagatttttgaagacttaacaattgcagagaaaggttgcagcctgcacaccatagcccacctctctgagcagactttggttttgtgtggtgacgtggcacatgtttgtacactgggatttttcaaaggacgctacgcgagcagactgacttgcctcttctgtgagcactgtggcttttgtcagatggagtgccggtctgcagaggactgctctttcgaatccacagtgttatctgtgtaaatagctttaatttttcttctgtgtcttaggtgaagttttgttcatgtagcaaccaggtagacagtgaccaaataaggctgtaaatgtgctgtagttttctactgtgatgtacttgaaggagaacctgtgtcctctacttttctgatctcccacaagtattttgtgtttgtttcctgagtcctgaggttattattttactcctgttttgcccccagttttctttgttttttttctggagacccagggaggcccatggtggagatcatttgtaaggaatggatcatggtctgggtttccaaaactaccctagtacagtgaatgagagaaatctgcctggaaattgtttcagaaccatgtacctttatgctttgtgattgtgaaacattgacttttttgtaaccccaaaatgaaaactgtttagtaaa

SEQ ID NO: 70018 - DNA, 1029 bp, Homo sapiens
tatttatacaactgtagtgatgcctcccccttcccagcctcacttgaccctggcttctgtctgatgctctactgactgtctcgttcctggttctcctgtgtaggtacacactggcagctcaggacctggtgatgcgtgcccggggtgtgctgaaggacagaggatggcggatatctaatgaccgactgggctcaggagacgacatttctgtatatgtcattcctttaatacatggaaacaagctgtcatgaaaatggcccaggggattgggaggacagaggggaagaaagctgggatgcctcttggcaggacggaactgggaagtgccccagctgagttccaagtgatgcagtctcttcccagcccaagcggggagttcatggccaaaagactatgcttcaagatgaccctttggtttccatttcttctttagtaacaggtcaactcaacaagagcaaaacacaaaggctgctaccaagtgttgttgtatttcagttcctttcataggcctccgaggtggccattgactatttggggtatatatgtcatatttattttatctagagtagctggggcagccattttcaggtgtaaatggcagaggactcttcagcctgtcaagctgccagcttatctacgggttaaaaagtgctgcattggaaagtagggggtcatgcctcaaaatgtaagtaagtgcccaccttctaggaagcctgaggtttatttcagggattgccgtctgccccccgccccccttctctttttttcttctctgtttctattcttttatggcagtggtggagtgaggcagggatttttttttttttttttcgtgtttttgacattccttgaatctgttttttattccccttccacagaacaggcctgggactttccaacaccctgctaaggaagttctgtgtccaagtcccacccaggctgggttgtccccacctcctccagcccacacagcccaggcagcatccgggccagtgccctgcatgacagagggtctttgttgtgtaatgt

SEQ ID NO: 70019 - DNA, 1058 bp, Homo sapiens
ctcaaaaagagtagaagtcagaagtaagcagaataatgtcttcaaactgctgagggaaaataacagacaatctagaattgcataacaataaagctatcagccaaaatcaaaggtaaaaataaagattttcttaatccaaagactaggtgagcttaccactcacagaccattgttaaaaaaattactaaaaatgtaattcaatggaaggaaattaaatccagaagcaaggagtagtttcataaaaagcaaagaagttagtatgttggtttatttatgtaagtgtagattgtaaatgataatgattaaggcaggctcaaaaaaaggtgaattaaaataataggcagtaacatggaaaatgaaagaaggcattctaaggtccttttattttcaggaggacagaaatacgattaacttatatactaaaaatttaacataactgataatagaaataacacttccaatccagttgggggaggggaatattaaagctatccacctgacagaaaacaagaaagaaggaaagaagcacataataaattaaaaacacaaaataagttttcatatgtgtgtgtatatatgactgcaaaatataggtacaggtctaccagtttttgcaataaacaaaattatcatcttagtgactatatggattttgttttaattagccatgtgctactaataaaatacacttaaaataatgcaaagtttattagctgggcatggtggaatatgccttagtcctagctacttgggaagctgaggtgagaggatcacttgaccccaagacttcaaggttacagtgagctatgattatgccactgcactccagcctggatgacagagcgaggccctgtctctgaataataataatgcaaagtttagaagtcctacactgccctgtggatttcataattgaacaatatcagggtgtgaaagtggcattgaaaaacactatgatttcttgcctaagagaccaggataccattaactaaggatgatagctggggatgttccactttggaagtaaaaagaaattaatgatcattgagttcttccta

SEQ ID NO: 70020 - DNA, 1050 bp, Homo sapiens
atttctacagggtgtgctcaggtaagaaaaggaaatgatcccacaggaaatatctgagaagtaaaatggattattaagctaaggtattagtaaacatgtggtcatatttaaatataccttgactatataaaacagtaataagaatgtctaatgtgtgggttaaaaatgatagaactaaaatattgcataaaaatagcgtacaaattgtcaagggaggggtgttagctcacatgctatgcttcttttgagaagttaatggtgtttaactttaggctttaagtaaacaagttgaaatagctaagaaaactgttaaaataatagaaagggtaacttctaaactagtaaaggagaggaaactcacatggaatagaaaccaaacttctaaacaacttatgaatcaaaggaaaaaattataatgaaaattagaaagtacctgggcctgaataataatacatatcaaaactgtaaaggctgaaattttagcctttttttctaatttaataaactaagcatagatgaagactccattcacctctgacctgccagaaatgactattatccctctatgccatgagctaactttatccaaatgtccccctgtgtcacagggaacctctggccacaagatcctgatttctggaaacagagaagaaaagaaagatacccttaaccacagagaaagatatttctgagtgaggccctaagggctgacttgtgttacttggctagttcggtctatattcttcgcataaatgtacacagaataatttttttttttttttttgagatggagtttcgctcttgttgcccaggctggagtgcaatggcgcaaatctcagctcaccgcaacctccgcctgccaggttcaagcaattctcctgcctcagcctccctagtagctgggattacaggcatgtgccaccacgcccagctaattttgtatttttagtagagatggggtttctccatgttggtcaggctggtctcgagctcccaacctcaggtgatgcgcccacctcggcctcccaaagtgctgggattacaggcatg

SEQ ID NO: 70021 - DNA, 1049 bp, Homo sapiens
tggggggccaaggcgggtgaatcatgaggtcaggagttctagaccagcctggccaacatggtgaaaccctgtctctactaaaaatacaaaaattagctgggcatggtggtgggcacctgtaatcccagttactcgggaggcagaggcaggagaattgcttgaacctgggaggtagaggttgcagtgagctgagactgcaccactgcactctagcctgggtgacagagcgaccctctgtcacaaaacaaaaaaaaagaggtactttctctgccaaataaaaatcccccttaagttgaacgtagatacaagtggtaaagaatttgagtgtttgtttaggcatttcagcggcatacctttctcacatttttacttcctctaagctatcctctaaagtagaaataatcccatttctgatcctgttgatgagagtgatggcaaatgcaccccagcactgatagtcatccattggagaattgtttcttttgagaaatacttggtaagaagagaaagatccaagttaagtatttcttacagtctagcagcagtgtaaataacctaaatatccttagaagactctcagaaataaacagaaactacctctcgagaaaggcagctttatctagaacacaagtcaccatgagtaaaagccagcaggaataacagaggcatcagaattggacctgtaaatacttctttattggatttagcagtcaaaaatataaatatttttagctgggcatagtgatgcatacctgtagtctcagctgcttgagaggctaaggcatgagaatcgcttgaaccccggagacagaggttgcagtgagccaagatcgcgccactgcactccagcctgggtgacagaggaagactcggtctcaaaacacaaacaaaagaaagccaacaataatataaaatattttaacatgcttcagaaatttttttttagccaagcatggtggctcacacctgtaatcccaacactttgggagataacgcaggaggatcacttgagccacaggagtttaagacaagcctgggaaacatggtga

SEQ ID NO: 70022 - DNA, 1049 bp, Homo sapiens
cacacctgtcccctccagggctgcaaagactcttccagatgtctgagtcctggggagcttcagagcccattagtttgatgtgaggcttccaggaacattaagaagctatttaaggaattgaacaggggaactttgaggatgtgggtatggttcgattgagtaaggccaacaacagcttcagggagggaaggtcaggactccggagcccagtggaatcctttgaagcctttgctgctggggaggataagcacacagtgggatgacttgcgcggcagtccaattcttctgaaaacatttttgcaaaatgttctgcatcacaggttaatgtataggacacgagttgtaagtggaaagttagcaaagatttttggaaattggctaaagggcaggaaacagagggtggttgtaaaaacctcaaaagatgttaattggggagtgcttcacagaccagggttgtgaccagctttttattattttcatacaaattacatgaagaacggtcttgagaaggattttcatgttggctaattaaactacattagggagccgagcatagaaatgggaacggtagaattagggaaagattacatttattgatggaattgaagagtagcattttataacgtgtgtatgtatcaacccacacccattctgttggccagatttccatttgagtgtggacaagacaacttcagcttgaataacacaacctgtcacatttcttgggtcagcaggaagcactttaaagagggtttggcaccctactcatagggcagactctgaaattaaatggatgttatctgcagacctgaaccctctcttttagaagaagctgcaaggcaaatggaatctcctgtttaactgcaagcataagattgagacatccacatctcaccacctcttatgactcaatattgtctatcataaagagttcaaattatcccaaaaatttattgtaggtataacccaataagaagctaggaatcggccaggcgcggtggctcatgcctgtaatcccagtactttgggaggccgaggtgggtggatca

SEQ ID NO: 70023 - DNA, 1004 bp, Homo sapiens
ggtgtctggcatgtagaagatgctcagtaaatcatagctgctgtgattactattagctattattaatttatacagactctaatcaagttgccagttttaactcttgagtactatattttatactttattactcaaggctttgtaactatggatggaagtccacttaactttatatgatgatctgtgcttaggattcagaaagatggagggggagaaggtgttgtacttttcctcctcattggtgctattcccccttgtcgttagttgctgggggagagggagtgctcatagttgattgaaaaccaacactggcggggcagaataaaccttccttttccaccattgtttctatttctaatgttttgttgttcctgaagataagcagaagctaacatataatattaaaatttgcatttggtttggtcctgtgggtaacaactctaagtgtgtgtctttcagagttgtgggacatggacttcgtgctcctgcaacactctgccatgtgagaattcaatgacccggcttgtgatagagcagttttcttactacttctctaagcctgttaagagtgctcttcgcctgtctctattaagctctaggtaatacccagtcattggttctagagctgcagccttctgcctctatttaattctagccttctagctctatttaattcctgtgaatgtctagtcatagacccaactcttctacaccagatccaggctcctcctgtgcctggatctcaaggcccagcccctttctacatctggtctccactgctgcatcctctctgtgcgggcctgtctcctcactctccacatggggtcttcaatccctgttcacgctcatctcagggcctttctcaggccattttcctcctctcccttgagccatgtagtctgttgtcttaagggtcaagctgataaggggctaattgctgaatcattttgaatggtagttaattgatgcttgatgtatagtagtggatctcaaccttggctgca

SEQ ID NO: 70024 - DNA, 1218 bp, Homo sapiens
ttttggatggaaggatctgagttcaggaagttgtcagtgagttggaacaatggactaaaactaacaagataaaattaataagggcaatggagtcctcccttcagggtaaaatatctattgtgtgtgtcattataaactagaggagaccatgagccaaaaaaaacattctcaggtcttttttcttgtggactagggtttttcatttgttttcattcagagtctccatatgtaaccctaaaaaaaaatacacataatggaaatagctttgttaatttttaaaaaatgcaaggcccaaatcaaaagaagtaataattttttttcttatttggaccacatcttaagtgttttcagttccgggtaccattttttgaggacactggccaaccagaaagaccctagagggccaccaccacagtattcagtgctcagttactgtttgttggatgcatggggactagagtggttaggatcctccaggtcctgtgaagaacagttgaaagaactaaggaaaaggaaactttgagatagttctctttaaacaattgaagagctctcaagcagaaaatagtctggatttatttcatgtttttccagatgggccagcgggtttgggtcagtttaagaaagaatttcccagagctgttctccaatggaatgggctgacattaagtaccgttaaactcctaggacagtgactttctgtggcagtccattcaggagaggccaggaaccaaggttaggtgtattgtagaagggattcctacacttggggtacagctgtcttggtggcatttcagtcttattgctgaactgctccttccaggaagtccaaaccaacagtggcttttttttttacagctttgcacaatcaacattacaaaggaaactattactttaaaaaagtatttaatggaaacttctgagaataatgcctctcagtttgggaaagccaagaatttagcaacccttttaagccttgcattttttttctcatctaaaaaaatgattcagttggcctcataaatactcattaaggaattggcccaaaatattaataagagtttgtctagaaaatctttcctaagcctttcagttttgctatctcgtaacaaataatataatctctggtcagtcatattattgtaaaactagcgagtgatttgtttggggcgctagttcttaaaaatttaattaggatttcaaaaatcttaggatgtg

SEQ ID NO: 70025 - DNA, 1040 bp, Homo sapiens
aagcctgagctcctaatttggaagctacttagagcaggttctgttcttctaccaaactttgagctgtgggtagggacccattcacaggattgtgaaatcagtttagtatatggagagcagcattttaaacaaattgaatagcacaggatagaaagaaaatatcggtgtatatcacatagttagggtaaatattgttttttgccgtgtgtttgtgcatatgttgggttaacaggattgatatatttcttaccaccggtgaaacctctgctgtaacccagtagagtctcccaaagaacattgaccagcaaaatgagagcaatctctgttgcctcttgctattttccataggcctggtgagaagaagaatctttaggccaaaagagagaaatgtttactactctcagaactccaggcagggtctggctcaggcgtgctgatagggagaagtggggaggtaggcattttcctagggactgttggttaaacctaccaatcaggtgatttcctccagggcagctgcattgtcggggaccagagcttgggccccattatggagagttttcatggaggaaaaaaagccagcagcctttcttgtggctaaggagatgagcaggtggtagccaggtatgcacaagctaggctgctaccagccctcttctgtttatcaccaaatattaatcacactcacaattcaaaggtactatttgtgcctgaatctaacttgcactatattagcagaagtctatcaggttgttcacagcttaaggcctataggcttcaactaatttaaagaacactccaaggaccaaagaaagaaaacaaggtagcatttgtttggagagcttccatcccacagggtaactttcccagggatcatatcattcagatacctactgaaaatatcttccaacacataaattcaggaacccaatgagccaaaatatgacccccaaaactagatttatacatacttaaagcctgctatacaatgatgagcctggggcgagatgttgggtccatctccaaacattctaagcccc

SEQ ID NO: 70026 - DNA, 1037 bp, Homo sapiens
gtgttttttctttttctttttgctattaggcattcatgcagcctcacttgctgggaaatgagttcacacatttggagtttccaaggagagtacagagaaaggagcttggaaagaagatgctctacagggactttaatatgacaggctggtaagaacatgccttcctctgcctcggaaccacacagtgtgtgtgaaggaagcatcaccaccataaacagccagttacacagtttggatcaggaagcacagccagagaccagggtttgtggtaaaagacaagggggtacacctgcctctgctatgtttgcttaggaccaaatcacgagccttggtttgcctctctgcttcttcgaggccctccttggggatattggaccccaggaaactgacctgatttctcacttcacatgtagcaaatatttgagggctttaaaaacacatgaagctttatgtgtttaggtcagggttattaaagaggtagaatggccaaaggtttattgagccagactgacttgggtttgaatcctgactctgattcttctaaatgagcaaagttggttaaattgcttaacctctagagcccatttttccatggataaagtgataaaaagatatatcctttgaagattcattatcaaggctaaagttaatgagctattctcattaatatcacattcaaattgaaataagaactcttgtcaggggggttgtcgtattccgaaaacacaactgtgtaagcatcaagaacatttctaggatggagcagtggctaatgttgactaagacctcagctatttcttttatctgactgatagatatgataagtacttatacactatagggttaatgtaaggattaaatgagagcgcagtgcctggcactgtgtgggtgaagatttgctcttgtgccctggggtcctaacgagcgagcctcctgccagtctggagaccatatgagaatgagaccatggaccctttcttccccatatctccaaaagagtcaaagaagtagattaagtagattttcttatctcttcc

SEQ ID NO: 70027 - DNA, 1041 bp, Homo sapiens
tgtttgatgacctgcttttttacacttaacgcaactctgtgtcattgcatattctctgtagtgtcattgtaagtgacaccatagaattcttttgtttgggtttatgctagtttatttaatgagttattcattcaatgatttcttctagttatttaatgttataaataatgtcagagacatttttgtgcccatactgtgtgtggctctgtgtgtgtgagttcttttaacaaggtttactgattcagactttgcttggtctaagtgcaaaggatcacaggcctcttatggcccctttactatcttttgtaaaaatgtgtgtgtaggttaaaggcccaaaatatggttaggatgagggttataaccatgatattaagctcaggctcaagatccacccagtcttgggcgaatgacctcgggctaggtcttaacctctccaggatgtagtgttctcatttgtaaatcaaatcgactcctgctttgtaaaattgttggggagtaagatcaggtgtatgaagtacctggtatggggctggcacatggtaacccctaagcccatgttagtccagcttgggtagtggattgtattcatgctgatacaatctgaaagttctgaaagatcataaagggcttataacagatggtgctgtccgttgaccacttatgcctttgttccttagttttcatgggcggactaaaataaaaagaataaaatagtatgtacccagtaggcatgacgagcttcatgggcctgtgacttgtgcggtcgcggagggtgccgtgcttagtttagtgctctgcttagtttaatgctctgctgtccctgtcttgaaattcttgattttgaacacaggctccctgtttctgtttttcaccgggccccacaaatgatgtagccagtgttgtccagaagattgttaagagggtgaaattagaactctcaaagcactgagtgtagtactcaggatataataggattcaataatcactaggtgactataataattttttgtaagcagaaacaactaagtatattaatagaca

SEQ ID NO: 70028 - DNA, 1082 bp, Homo sapiens
ttacagacatgagccactgcgcccggcctgagttttttaaactattaatgtccttgctttacctccttttctcccattcttgcggttgactcataagaacaccctaaaccttactgttcattgtatcgcaaataacgccccatcgattttactggaattaatgtcatataaatttcagctgtagtctttaaaggaaaggctaaccttaatattggataatatgctgaaaacccatcccctctgtatgggaatggttattgggtgggaggtgattgccaatggattaaatcacctcaaccccggcaactttctcgtttaacctctggaatgttactcagattctggtcatggtggtatccacaagtccaggcctgaggccccagaaggaaggtcagagtgtatacgtagctctcctgcaccctcgcagccacggcatttggtttttgtttttttcttaattttccttaggaaaagcatctcataaaataatgaaatagaagctaggaagtacaggggtcctgtgatgacagactgtagctttaaaggcatttctctactttattgattgtttagtatgaggtttgtcagctttcacatgcatttcgttccgtttgaaacccctttcgtctcattgccctactccagattggagaccagcactctgacaaattgatcccaagatcagagtgatgaaagagagaaagatcaaaaggaagccaaggatcacataggaagaggcatcgtgatgtaggcactgggaaggttggcagtcgaacatgctgtcatctttaatccatggatgcctcttaaaggaagagcttggtagttcaaacggaagtgaaaaaatgttctgtacatagatggatttggatataattatctatttaagaaagtaataaactaggcttgccctggcagtcatattgtaatggaacgcagatacctcattgtgtgtgaatttgaaattaaaaaacaaagtaaacatggtgagctgctaccattgctgccccctccctgccttgcccactaaggagagaggcactgccttgtttccctttgtatttcaaggagcttctcggtgg

SEQ ID NO: 70029 - DNA, 1044 bp, Homo sapiens
ataaggctggggcaatgagaagcactaaacaggcctatctccacctggtgttttgtggtagagatctctaccttagtacaaaacatagaccaattttagcaggaaaattcaaggattttttacacagtttttgctgtagatatatgtcatgtttcttgtagaaaatataaacaggcaaaaaagaaaaattgcctataatctcctcccctccccaaccactgttaccaattaggggtatatctttccagccttttttcatacataatcccatttgccccccagggaaattacactctgcatacaggtttgaaacagcttttccccttcctcctcaaatacagagtaatggaaaataatctaaacatttcttaatgcttccaaataatggatatgaacttctgatcccttattcctccgtaactgtggagtccttaggaccttactttatagtattaatatttattgttggctgtagtcttctttgagattacggctttttatttagtttttttctaaagcctcctgtgttgtggttttgttatctcttgctgctgtcaaggagcctgcatgaaacagaattccttctcctttctggattagtccttatcttttttgacttgaaaatcatgtacaccctggtgtttgcactgtatgtaaactgaaagtaaacaacatctaagttagggacagaaggtcacaagtacttaaggtttttcccggagcagagtatgactggtgtgtggttagaatgtaatctttaacctgggactcagtgcttacccttcagagctagtctaggtcatttggccatttactcaccttttataggaaaagttatttttctttagtcattctgggaattggcctaactattaggatgacatttaagtcgctccaggttaaattgtaggacagagttagatattggaattcctgtatatatttagtggggtctgatgagaaagagcctaaacactggctgatttgggaaaggtctgatagagaaaaaggcacatgtaccctgactatgccttcagctccagc

SEQ ID NO: 70030 - DNA, 1049 bp, Homo sapiens
taataagcttaatgataaaatactacctctaaaacctcataagcttaattatgcttacagtattctagtcccagtatccagatataaatttggggttttgtagttgattatttgggttttctgttcacatatgggtcatacttcaggaaacctgagaacaatgtgagttggtatttttatgtgctatccaaaggatcgtttatgcgacacttactagagtgctatttgcagctcttttacaaacaatagatactgatatcatcttctaggattgttgtctagtttgccatactaataatataggtatttgagcttacagaaatattcagttattcccaagaaaccacagctaagtgagctttgatcatatctgtggaaatgtaggtccattatcactgattgacgagcagtcaggaatcccagggctcagtttaaaacaaatgcttagagccgcagaaggttctggcaacagagccctgattaatgaagggctaagttttctttattgctagatattagctgtcatgtgctttttttttacatcttgacagtttcgagagtaaaaaatatttgttatatgttcactgcccccataattattcacgctcaggaaaagagaagctttgccctggtttgatttggaagctgccaatggtcaggaactaagctgtgtatcatctgatttaccatcagacatctgcacacttaggggttgtattcaggaaatgttgcctgatgctgtttgtggctttatgggtttttgagtcaacgaccatcccattcagaggacataggaccattcatgtaggatggtccacagtgacgcgagtacctgatccatgtggtctggtccgtgccctgatagaacttgcccttctactctgccgagctaaccagccacagaggcacatgcagtaactgcttgatgcatgccagttgctttatttttccccggcagagtcagccaactcaacacctaggggatcataagggaccaggaaagaagcagatggtgggcggattttcacttcaagcaaaaaatgaaccag

SEQ ID NO: 70031 - DNA, 1039 bp, Homo sapiens
ggcagttttatgccagtgtcctctccagaaatgctcatcaggtggtaggaaagcaagcactaaagatttttctagtcccttcttgaagcacattcagagtctggggactgtcaagagaatgaaagtgagaaagcttttgctacacatcctgcacaatccaacactaactctgttttattctccaggacctacagatagaacgagagaggagttcatataatatatctggtggctgcacggccctcattgtgatttgccttttggggaagctgtatgttgcaaatgctggggatagcaggtaagcagatgagctgtctgattcttgctaatttctaatgccttctgatgtttttattttgtctcaaaaattaaatgattagaaataattaaagacaggccttctacatcagaatgaaaatgcatttaaggacaatcaggttgatattacaaggtaaaggcagtctcttacttatgcatatagcatttcatgtacacgtctgtgataaatctaaaccagtagtattcaaacgttttttgacttcagaatctgtttctcagtgaaaacttagcaggagcataatatgtgagagtgatgaggaggaaggaaagggattcgagtgccctgggtgtttggaagggggcctgggatgactccccagttgactccacttttacttagtgactttgcactgttctctcccagaagcttctccttttatgcacattcccttagaagctgcagttgcctcacgtccgggttcaactgaaggaaatttgagccaagagatcattgttaacccttcctttatccagcattgccagggaataagatacatttatgtttttatttcatttattttttaaaaattagacacagggtctcactatgttgcccaagctagacccaaattcctgggctcaaacaatcctcccacctcagcagcctgagtagctgggattacaggttgcaccaccacctggcagttgtgattttcttttaaataactgatgcttcttcacttttggtgtggggaatttt

SEQ ID NO: 70032 - DNA, 1127 bp, Homo sapiens
cccctagagcaaagcagttgctggtaaatgctggggtcttgacttctctcccccttttccatgaggagtctggttgaagcagctgagctctaactctgtgggattctcaggattacaatagtggcctgaccctagatctgccaacaacagcatcaacgtcaccgtttcttcctcttcctgtaatttttagccagccctcattttccttccctctgcaccaaaagtagtagattaccactggaagatttggcattattttagccaggcattcaatgtatcttactaacacagatttttctgaggtaacagaacctttgcttctatcgctaacacagaatttcacaggtatctgtcttgatgatgccagtgttggtctatttttaatatcaattccttggggaggcctcattaggtggcaggtaacaacacaaactttggaagagaagcaggttggaatccagactctagccaggtaaatatgggcaggctaccccacttctctgcaactaaacaatgaggttcatagtgatggtcttgaggacgatatgagagtttgagtataaagtgctcagcacactacgtgacgtagagaaagttctcaatgaatgtttctaattattataaacgttttaccattgtaaattggtggctgtgggaagaggaaaagtcaggtcagagttcagaagccctataagtcatttgaagtcatttaagtcattataagtcatttataatttatttaagtcattttaagtcatttataagtcattgtaagtctttgccctataagtcatggcttgactcctgcctgtgttgaatagaagacatctttctgtaatttatctgtaaaagagactatttatccaagactttggagtttaaaacattgatcatatctgggctgggtatggtggcccagtgctttgggaggctgagacaggattgtttgaggccaagagtttgagaccagcctgggcaacatagtgagaccctgtccccacaaaaaatggaggagttagctgggtgtggtggctgcacagacctgtagtcccagctactcaggaggctaaggcaggaggcttgagcccaggaggtcaaggctgcagtgagctatgatcataccactg

SEQ ID NO: 70033 - DNA, 1063 bp, Homo sapiens
aaattgactagagtatttcacaaatagaagaaaaatgagttttccaagtgtgtgtatcatggtaacacagaatgaatcatttgctccttttaagtagattctgctattgctatgatctcatgcatgttcattcctgagatttaggttataatttcaaggtgtatctgatacacatacaggattttttactttcaagtttgtaaaggtctgtgtttacctacttttacaaagggaaaaatcttaggggttttggttcagttgaaggtaggctggtaggttaaagcagtatataaataaatttaactttgccatgtgtctctcccagggcagatgtgtcttgttcttctaagagttgaataaactgggtataaactttccatattgaggagacagtagctgtgcttcactttcaacctctaacatttttcctacttgaatttaaacctaacttcaaaattacccatgtgtttaattatgatgactaaaacacccctccccaacacacacacacacaatcttaataagtcatagaatttaatccatgaagtacagctaaggaactgagatttgcaaaagttaagtaacttgaccaaactactctgccagtcactagctgtgacttcgtttaaaaagggagtaacagtggcagctaccttatagagttgacaagaggatgaaatgagttaattactttctacaaaatattaacagcagtctctggctcatacatagttctcaacaaatgtgagatactgttatccacacctaggaagtagcagagttgatttctgtcagattcattcattcagtaaacatttgttgagcacctgctatgtgctgtattctagggagatagtttttgttaagaaccaccatgacttattacctccagtttaatttccagaaaaatactttccctctttgtaaactggaaaataatgtgaccaaaggtatgatgattcgtggtccaccagcatttctttaaagccttcaaaataagcatcatgcgtaagtattgtttaggccaagaatgtagatagcatagtcgtttttcctgttgacc

SEQ ID NO: 70034 - DNA, 1053 bp, Homo sapiens
ttatgtctcatggttagatttattgctttgccagtttttatcaagagcctcgataatggaaaaagcattgggaatgaaattaggatacctgaattctgctgacaaattgggcagtggtcttagtcatatttagtgactgtgtttcctgtgtctgtcaaatgagaaaatatccctgaacccttttccagctttaaaattaaacccacttttttcctgaaattcagttctcccttttcattcaccttgatggtacggtgtaagacaatagcaaccctatagtgcctatagtaagagtcagattaactcttacttaacaagcaaatttaaaaatttccaaacttaggcttatggagaatgacagtattgcctctacacatttgctttcttttggggaacactaattgttatattaccttatgtgtgaaagtgagtccattgaaaattcacttgtgggaaatggaatataggtgatcaacaatttagccatagtattagacacccttttgcattttgaatgagtatctctgaataggaatatgtggcctataaagtccacatttgtgaataatggggtgtggttaaagttataatcatttttacttaaacagctctgggccaggcacagtcgctcatgcctgtaatcccaacactttgggaggtgagagcagggggattgcttgagcccaggagtttgagaccagtcttggcaacatggtgagacccccatctctacaaaaaaaaaaagtcagaaaaattagccaggtgtagtggcacgcacctgcggtcccagctatgctggaggctgaggtggaaggatcacttgggcccaggaggtggaggttgcagtgaattgagatcacgccactgcactccagcctgggtgatggagtgagcctctgtctaaaaacaaaaacaaacaaaaacagctctgtaagtggaagcaatgctgtataatataatttctgtgaatttaaaactttgagtgattcttagggttatttgatattattctaccttggagagcaaaaatctccatttaaaaatgtattgaat

SEQ ID NO: 70035 - DNA, 1009 bp, Homo sapiens
taccaatgttcatttcttcctttctatctaaagaaaattttctttaaagaagctgaatggaagtttccttaaccccaagcaccagaaatactccatccttgatttgctatatagaaaaatattcatggtattttaacgagcccattcctaaagcctaattttgttgtctgaatgatttctgtaatcctcagttcattcttgtctttgggtttctgagtgaatgtacctttcctcgccatcctctttcttacattcaccctgtaagggtgaatcgaagtatttccttcaatttgccttcctaaggtttagtgtgaccttttaagatcagagcaagctcactggtttccatagcaacactcacttttcttctgattaggatttttggggggaattgcctagtaagaacttctaagcttcgtgaacactcttgttttagaatttcatgtcccagaaccatgtccctgttgcctgagaacttccaacctaagctttaccactcactggttgtgtgacccaagatggtttcctctaagcaaggaacaataagacttctcccaggcttgaatccatgtataaatataaaagagggtcctactaatgcttacgtactgaatggccatctgctgccctggaggcagtgcctgttggaactcagctttggccaagagaacccttgccctttggcagaagacaggcatcagaatagttgcaatttggtggtgagttttgcgactctctcctatgtgtcccttccactccttggttctcatgttatagaaacccaagggtgagtgttcagtgttacacaatttggtattgagactgaaaatggcgagacagtttgtttttcattcttacattaacataaagcacggaagctatataaacgtgtctgggctgttcttaagacaatgccatctgaatttcctttgaaagaaaaagacatttgaaatcatgcctatatggatgagaatgtttatcactttgggtcttggactttcctaagcag

SEQ ID NO: 70036 - DNA, 1067 bp, Homo sapiens
ttggtggggtcaaacaaacaaaccctatgcaaaccgtagcagtagggcagtagaatttgctttctaatgagtcccaggtgctgctgctgctgttggtctaagcactacacattgagaaccactaccctgtgcccctggccttcaaacataggcacttataggtttgggcagtgattgtcattgaacttgtccatttagggtcatctttccaaaatgaaccaataccaccattgagttgcatgtaaaaatcacattaaaggggatatctccttaattctttctgagactattggcttgccctctcttctatgttcagtaaatattcagtatctcttttataccaagcccagtgctaagtcccgctggtgataaagaggacacatagtggaactgctctggggatgccccgctaaatagacgggggtgttgctgaaacacaaaaaaagaatggagttatgaagttcctcctatcttcattttccttcttcagatcctgtgctgaccttcctttctgaagatggagatgaataactagaataaacaactgatgctggtaactttaacagtaactatataaaaacaattatgcagatatacttaagttttacaaagttgccatgcagcccccaacaataaaaattgtattttaatatattgcaatcgtattatttggtagggcttaatacctttcaaaccatttttgtgtgttttattgaatctgaactcctgggctcaattgagccttcctctttggcctcccaacatgtggagattaaaggcgtgagccacggcgcctagcaaatttgaacttatgaataagcctttcaaataggataggcattacatcttttggaaagactgaaacacagacaaggtggtatgcctaccatttgtccagtgctatgctaaggactgcatacttttatgtctaatatttttaaatctgggaggtaggttgtattgtccctgttttatagatgaggacacggaacagctaagagtataagtatcttaccaaagctaatttgaggcagaacctggatgtttcctgggatttgttttggggc

SEQ ID NO: 70037 - DNA, 1009 bp, Homo sapiens
gggtcagtttctttgtccagtccttcctgctggtgataggctgtttctttctgcatctctgcactattccccacttgtgatggactggcttttccccactccattacaccttctgttccccacatcacttcagtttggcagtagcccatcatggcttctcatggtgctccccgagaattcactgctctcttggtttagttcccatagttagttggcaagaccctcctgtatttcttggtttagagtcttgaaagagatcttctgcttgacccagctgaaatctttcagccaagccacaaagtcataggtagattgccatgccaaggctgggtgtccttcattgggatcccacaccattccagctattggggctgtcacacacaaggtgtacccatacatgcttcatcagaggctgaagtgtggacaaggttcttacagggtatggacacctgcttgataggtcattgtagacattgtattgtcttaatcaaaggctccaataactgtctatttcagactgttcaccaaaatcattaagtggtgtgtcttaaagatttggtgttgaattttcctttattcttccacgaaaataaaatttaaatgagtcccacagatactgcttgcctgaggctgttattagtgtatgtggcgtgaattgcaaagggctgtggttttattttatttgatttttataatgggggagggcacaagggagtagggaaaaaacactggcaatttttttttattatactttaagttctagggtacatgtgcacaatgtgcaggtttgtcacatatgtatacatgtgccatgtttgtgtgctgcacccattaactcgtcatttacattaggtatttttcctaatgttatccctcccccctccccccaccccgcaacaggccccggtgtgtgatgttccccaccctgtgtccaagtgttctcattgttcaattcccacctgcgagtgagaatatgtgatacttggttttctgtccttgtgatagtttg

SEQ ID NO: 70038 - DNA, 1069 bp, Homo sapiens
ctggaatgatacagccttctgtgtaacaagtacttactggataaacaaaggagacttagactagaacatttttatgttgcttttttgggaactgagtttcagagttgaggtttttgacttggcaattcatttgagaaagaaccgctgacaggtagtcccagtaaaaagagtggggcagagaacccaaaggcagcatgggacagtggaagagcctgcagggtttggtggcaaacctgaacacaggtctgaacactcaaactgcactgatgtccttgtgcaatttgctcatttctgcagaactccattttctccattactaaaagtagggtaataatatccagctcccaagactcgtgatgatgaaatgtaatgatcatgggaatctccctctgcagtgcctggcacatgctggtgctcagtgagtgccatttgctttgttgcctttctcccatgagtgagcatttagattgcatgtcttagatggagggtgggaagaacagggagaaagaattgtagaaataataatatcagcctttcaaaaagaaaaacattaaatttgccaggagagtagttgtcaggtataaacccaaagatttggaggtgatcgatcttgtttgatttaatccctgtaggggaaatgggtcagtggaatcttgagagtatttctcagctccattttcacccctctccacatctgaaacttcaccattgtatttcattgttctagacacatttatattcttcatcatttcagattcattttatttcaaagctataacagaaggaacgtgttgttacgctatacatgtctgattggatttatacaacaaactgaagccaggttctattgtagttcatttcccattatccccctgtcctacttttaatacggaagaactcttatcaactgtgtagcatttttatctcatatcttcttctattgttgcctctaccttttgtttcccttggggtcatggtgatggaagaagtggataactgtgcttctgaatagtcttttatgtggagaaatacagtttactcctctggacatcatgttggtgacccactt

SEQ ID NO: 70039 - DNA, 2148 bp, Homo sapiens
gtagcccgcaagttttatcagtacttagaaaagtaaagttaatggttgtttggggaatgaaggtggttctagattttactgtcctaggcagtaagttgggactgtgaagaaataattttttctgctaaatgaatgttgttagcttcataagtagtttttcactatgttatctgaatttctaattagagtcctttcatataatcaccacttttttgcgttgtaggctcaagagtattgtgaaatggatgccatctttttcttttttaattgaaagggggaaacaggtgagttcctcaaagatttaataaggaatatcagcaaatgttgccaactgttgtgaagactctgggatttaacaagaaccaagacaagacctgaggctttgagaattaaatctagcaaaggagataagcaacctaaggatcaggcgataaggggtgtcattggagtacacatgtgtgagggacaggatgagagggctaaccaaccagtgttctggtttgggggaagttttcttggggagatgacagtggttcatttcttcaaacaaaatttgttagacatctgtcctactttgtgacaggtgatggagtagatgatgggcatgcagtagagggaaagcgtggtgcctgcccttgcagagtgcacaggcaaagctaggacctgaaggatgagtgattagcaggaatcagccaacccattctctgaaagtagaaactgatgtgcaaagactcagaaataagtaaatgctggggttgaaagatgaggctcaagaggagctggggactggaggatgggtgccctcacacactgtaagatctccaaacggacttgtcaggtaatgctgactcgtacatttaggtaattaaggtcagtaaatgaattgtacaagataacaaacatatttcttggaaatctgatatgcaagaaaaactaacagttttgagctctacctttaatttaaaaatgtgttaaagtaaaaattgccttttgggacattaaggagaacttttacatcgtagggtttaaaaatttgacaaactcgtataatttcagatcttgtcatattgttgggggaaatatctttctgatgatcacagtgccactctgctcaatttttgctagccccactcagactttggagtgccgtgtagggaccacatatctgatacagatatcattagaccccctgaagaataccagtaatttacattacttctagcttttcaggtttttagctgatttgctttctaggccttgggaagtaggtagtggtggtgagatttcatggccactggagattttctgtcccacattctcttgtttttgttcccagtttgcggagcctgccacattgtaggtgctcaaatatttacataatttttttagtttttatcatggatctttatttaaaccttccattattatttaacagttcacctgtgagtactttgtattctgaactagagtaagcttccttgcgggcagctgctttgtatacctcagatttgctggctggtgctccaatggcttggtctgattcttcagataaaatgagtattgctagagggagataacagttgttaatgcatgggacaggcaggaggtggtgaccgtttttcttatcaagagatatcgctaagcaactgctaagcccttccttcgtcagctaattctctcagtcatggtgtgttagcctggataaagtgccataagtcaaaaggatatagacataaaaggaattttctctaaaaattgtcatcacaggcatcagatttctgaatccaatgtgctaaattatttttatacaattgacttaaatatattgcttcattaaaaaaaaagaaatagagaaaatgtccaaagaattagtatctttctctctttgaatgccctcctgccaatacctgcccctggttatgttactgaaaagttcttttgagggactgataatctttaggttattcaaacttttcctgaactacaaaagaatatgaataggcacatcttaaactgattaatataaatagacataagcatcccaatgtattcacttaatcacaatttgataatgtggcccacagcacctcgtatggtcttgtctctttctgattcccttccatcctcccctctctcctgtgctccatc

SEQ ID NO: 70040 - DNA, 1032 bp, Homo sapiens
tgaggctctgtcccaccaaaaaagaaccccccaaaaaaccagtatattgaatgcttactttgtcaaaaacttgtctgggtgccaagtacacaaagacaagacaaacctcttttcctgaagttgtctagcaggagtcccatccagccgaacaagccactgtaggaaggcttccccaggacatgagtcaggagctgaaccataaagcagccagccagacagtggagagctggaaaggaaagcgagtgtgggtgcatggaagggcagagtaggatgcgcctgggaaactgtggggtgctctccatgcattgcttccacttcagtgctacttaggaaaacgctcacctgtagtgaccttctaggtgcagatggtcactttgaaaatgtgcgcatcttccacatcctcaccgcaacagtaattgtcgctgctcactctctagtccacgaagtcttttatcctgtaacttctggggactccttcaggttctttttctagttttctcaccacattcccttttcttctcaaatctcccttaaatactgatgttccccaagctttctagaacatttcctccctttcttccccatcttcattaacaattttatccatatcactttctttggaacttgaagaatttacctatagccttgcttctcccttaagctctccatggggtcccttctgctgtgatctttccttcactctgcctgcccataccatatgctttgcatgagcctgcatttatatttgttcaaaatgtgagtataaattatagtagccgtaaaggacatggtggatactccgtgcctgtggaatcatctacaaactaatggtttttgacagtgccaggtggaagcagttggataatgctgaggcttcactgtgtcaatacctaggaacagctggggaacaaatctgcttttagtttctagagctacgtcagtctgttaataaaattctcttgtaggtactctgggagtatggatatgttcccttgtccaattacattgtggtggattctttttttggttaat

SEQ ID NO: 70041 - DNA, 1103 bp, Homo sapiens
tgcttcagcatccatttctatagtagagttcttctgatttaagtacaattcatttaaaacagtatgctcaagtaatttttttgtcaccaaaaaaaaaaatactcttggtgtttgcacttaagtacatatcttttcctgagatatatttatttttactatatctcaaagcagtgatttacctcatcagtaaagccagttttgcagctctgttaggaatctaaatagtttattctattcagtaaatatcattggttaggtacttatagacttaaagatgaaccatctctacctaacattcacacttttcagactatattatgagacagataccaaaacagaagatgtttagattgtgttatgttattaaatggtttgatagttaagattgtttattaaagaagatgatgtatgatcaacaatgcccatatttagcaagccatattagttacaagtaaaacttaagactatttcagctcggttgacagaaaaccattcagttaactcagttttcagtcagctaacatttattaaacctcctcatggagtgtaaggaaggctctgaaggttaaaaaatatattttctattttcaaggggctcacaagttagcaggggagacattgtgtgtataactataatataataagctactgtgatgaaggcattgatcacatgtgctgggaacccagcaaatgggcacaggctggttaattctaagtttggagaaaatgggaaggggtgagcaaagctgactgactgttcgaaccctggaagaacaggttttgtgtagaggaggcacatgagggagacagcagcatgaggaaggtcatgacggtttgaaagcggctatttctgggaattagaaaaatcttttgtgactatttgtaggcctgtcagaatccccacgtggagcctgaaccacctgacactagacatacaatggttcttccttcttacagaaagagtgggtgctggtaacatttgactgctctttaggtctgccaggcatgtcctctggaacctctctgtaggattggtgattcccttcaatcatgtctgaatgatgcctctgtatttaggactcttgctgggctgctcttgggta

SEQ ID NO: 70042 - DNA, 1033 bp, Homo sapiens
tgtataagtataggaaggaaaaaaatcttgtgataaattgattttttttaaaatgaaaatatgaacgggcgtggtggctcatgcctgtaatcctaggactttgggaggccgaggcgggcgggtggatcacctgagatcaggagtttgagaccagcctggccaacatggcaaaaccccatctctactaaaaatacaaaaactagctgggtgtggtagcaggtgcctgtaatcccagctacttgggaggctgaggcaggagaattgcttgaacccgggaagtggaggttgcagtgaatcaggatcactctactccactccagcctgggcgacagagtgagactctgtctcaatacataaataaataaataaattaattaattacataaaaatgctatagattattgagtttctatatttaagtggtctgctatggtgtactaatagtcattatatgcctttttgaaaaggtgaatgttgacaaattatgttacacgcagtcagtaaaaataaaagatggagtgtaaatgttcagtaggaagcaaattgtaaggtacagtgactatgaatagcctataagagggtgccagtgaaagcaggaatgggaaaccaaactgacattaataaagaagggactattaagaattttttctttcttttttttttttttgatgccgggtgccatggctcatgcctataatcccagcactttgggaggccaatgcaggtggatcacttgagattaggagttcaagaccagcctgagcaacatagcaagacccagtctccacaaaaaaaaaaaaaaaaacctcattcaggtgcacctgtggtaccagctacttgggaggctgaggtgggaggatcacctgaactaggcaggtcaaggctgcagtgagctgtgatcacactaccacactccagcttgggtgacagagtgagaccctgtctcaacaacaaaaaaaagcaattttaaaaagaggattttttgtaacataaaagaggaaatagctataatattttgttgtaaataagtaac

SEQ ID NO: 70043 - DNA, 1050 bp, Homo sapiens
tgctatgctcccatttaattaaattaggaaatctgcctaaaacttgaatcactcctcttttcagctggtggccaggcaggaatgctccctgaagagtactctttcaatagacttcagaatgtgttacctgaaaagtgctcatgatgaatcaagacatcactgtgttttccatacttctgaagtagagattgtccactaacagcttagggaaagcagagtacccgctcagctgctctttttctggtgtggtcagaccagctgggtcctctgaaacatgaatccatagtgcttcctttgttatactatttctgactcagttttctctaaacggctgtaaaatttaactgcctagctgtattttctttctgtggactttatgctctcatatttaggagaaagaataagagaacaccaacttacatctctgtagctctggatgattattaaggccctggtctaatgcttaaaggtaagcatctgttatctatattcaataaaagaggaaaatgaaccccagagagaaatcaagttactttagaatcgcaggctgtcccatgaccctggtgaccatcactgaattattaaacctgaccattcattgtgtgaaattattaaaaaaaaaaagacatcctatccccataaacaaaatgccacataagggaattaaatgcattttattaactcaaaggaaactaattttcaagaggctttacatggaataaaggcatgttggcacatcaagttttgtataaaaggatacatttaacagtactttaaaatagttctattgagtatagtagtctcttaaaattatacttccttactatatgtgcgttcctaagtataacagtccaaaccttgtcaaaattactatatttttggactacaactgctattttaaaatattttaatgtttttggaaagcctgtatgtcttaaaaaccaatctgtacattttatgtagtgatgtttcttttttctaaagttaataaatacagcatgtgttttaacatcagtagctacttagaagtaaggaaatgtacttaggaat

SEQ ID NO: 70044 - DNA, 1038 bp, Homo sapiens
acccatttagagatctttttacggttttcctgtttatattcatttttctgttgagataatgtttcatatttataagagctctttatattttaaggctgttcacccttggcctattatgttgtgatattttttctaacatgttcattttttaacttcattttttttctttgcaatgcaaaatttaatatttgggtggtcatacctaatctcctctatggcttctatttcatatcaggcttagaacatgtaaagtactagaataaccatcctactccttttagctacttactgcccttggttgcaactcatagaaatgcctttgagctaactttggggtggtggggggaaggaaatggtgattagataccaactgtcttatagaacccaagtataggaataacttggattttacaagggactggaaccctgaactagaaagctattcagcaacaaagtggccattctttcagtctttcaccagggcacgggtgacttctccatgccaccaacaagcaaccagaccacatcaactgtggcttcaattccaattttgaatttttgggagagagactccaataggttcagtttgtctcagatgtccaccttctccacaggtgattatggctgccaggacccacccctgaaaatgggcagttctttaaaaaggaggtggtggtagttagggctgggcagatagtttcgaagattctactactatagataactcagtcaacaaatatttgagtaccttatttgtttcaggcacatattagaagacagatgaaatgaccaaatagacaaatgtgtcaacaggcaaatagtgtttgtgtctgaatgtgcctgctgccctgccttgcagaccttggggagctgtctaggctaggaattcaaaactgccccaaaaatgccatagaagggataaagactcaggccagctttggaactaaatatggctatatggcttgaaggtttgtaccaataaatgagtattacatgttaatataagatgatgtagctcttcagccacaggggtataaa

SEQ ID NO: 70045 - DNA, 1950 bp, Homo sapiens
ctaattgcttattaccaataaatggcattagttggctgggtggtggtgaagacacaaaaaccgctatttctttcttgccccaaagctcggaaatcccctggcctttctttttcccttctaacttttcctggcatacctgcccctcttactgactgatacctctttgcagaactcctgcttggaaacttcctgtttgacttttgcaactgaagaaacttgaggttctctactcttatgtaaggataaaaaggagtgggtgagggtatctgcagatgagttacaagtccagagtagcctgagctatttcagctacctttctggtgacttgcaaaaggtattaatttcctattttaaagcagacagctaagcgttccttcatatttcagatatagcattataaagaaatcatcccccttaggtggagctcctggggatgtctcttttcttaggaaaatgcatcagcttctttcaaggactggtgatgcttcaggcaaagggtttaaccatgcaggggggtgtttactatatgtttcagtcccagtttaggtagacatccgcatctctgctatgaccccactatacagtgctttcaattaaggttacagcagtactagttgaaaatgtaaaactgcatactggaattgttgtctaaaaatacattaatgttcaagagttatttttaattctcaatgtttggtagaaataaactctggtgcctttatagttctgtgatttgcctaatttaaagggaggattagttagcttgtccccttgaatttttgctatcatttttcaggaaataatcattcatctgcttccattatttctctcaattgatgaaatcattgcactcctactatgtgtccagcattggtcccatgctggattcataatataataagacatagtcattatcctcaagaaaattttatagcataatctttccccttttgtactttctttgaaattaaattaaaatgaaatagactattaaggttcaaagggaccagcaccaggagttttgttttgattttaatgtcttaatgcttctgggtaattttaaatctcagtatttggagcctttaagtcacattagggaagcaaacttgttttttccaaccagcttatgattagctttgtacctgaaggcccaagaccttccctgctgttagagaaaaaaaattattctgacacttgttacaatgctggggaagactttactcaagtctgttgcaatataggaaaacaacccagctcaataccacgttgacagctggtacttgtaggcaaagagtagagtgtgaggggtcagtggaatggaaagttactcagcggggacattaaaccaaactcaactgacctagcaggattcttgctgaaagcagaccaaagacttgtaacatcaaaggtggggaatgaggaacttgagcaggtatcaagtttgggggattcttgctaacctgacttaacaggattcttgcttaaggaacaggattggcgccaacgttgtgacttagtagagaagagaggcctgactcaagtttggtggaggagagaatctttgtcatccttgcagatgggggagaagggggagagagtaggtgggactgcagttatttaactgtgattttcattctgacttatctgcattacttctgtgaccctccataattgactgtgtttcctactgaccatgtaaggagagcagatgcccttaattatggtgcaaaagatgcaggattgaacctaattatacaacataatgttatggcaaagagttgaggagcctttcccaagttgtttttttagataagtggttttcactagctttccagtttggtactacagtagatactttgcaaattattagcttaagaacggtatagcatttgatttgtttggcccatctcccatataccatatagtgataggattatccctatttatact

SEQ ID NO: 70046 - DNA, 1681 bp, Homo sapiens
ccaggcctcggcggggagctctttacttacactggccatttccctcttctccccactccctcttcccccagcccaaggacgcggcgtctccagccccggtatgggtggtggaggggtgggtggcagcgctggagcgtgggaaagctaaggtgagacaggtctgtgaatccggggtctctgtcacttggggaaaaaaaacgggcagaaaagctctgaagtttgaaacacataaggaaaatctgctatctgtacccccaccctcccaaaatatagttgacgcccccgcgtgatgaagagtttatgggggtggaggcttggaggagatgtcactgcgcctgggagcttgtgtccgattccgggaggtggccgtgtccgagtgcgtggttgtacatttccgaaggtctcagtttctctcactttcagcccgcgagttcctccgcttctcctttagcaggtagtaaaatgctgcgctttcggtaaatgccagtactatttccctcagcccttggggagggggaaacttattccaactgtctaatataacattttggtaatccgctttggtgattaagcttgcgtttgactgatcagctatttcaggaaccgactgagttaggttgacgacccagagtggaatcgggaaaggagaggtggaggattttattgcccttcccccagctccatggccacttttccactgactattaataaccatcttatgaatggtaagataagtaacgttttcccttctatctactacctcagctgtacgaaacgggaaaactaggagacatttagaatagaattcaaggttattaatgaaccagggagtgcaaaagtgcacgcaaaacctggtggctggcacacctgcgccttttcctttaaccccatcccctcggtagttttggccctcccctatccgtgcacggcctcgctggttgattggttcgtccgggaaccaatcagctcttccaatgcctgggcgccttgatgctgaccctgttctggtggcccggataccccggggcaggcttggttcccgaccctaagggttccggtgggagagactgcttggaatctgctctgcttattatctctaattctcctttccttctcccatcatcctataaagcgtttctccatgggctgaaatggaaaacgtgtataaatggggctagacgattggagtgtgaaagtgaggaggcagaaatgcgctttgatgggagctcagacagtaaaaattaacacatcataaaagatgagcacggaagagaacgttgtgggtggcgaaggtacaaaatagcattgtaacttccaagagaaagccaaagcaaaaataaacacctgtgtaaggaaagacctaaaggagaaaaaagagcctgccaaacataccaaacactatttcttgactgaaataaaaacgttatttaaaagcccatttaggccgggcgcggtggttcacgcctgtaatcgcagcactttgggaggccgaggcgggcggatcacgtgaggtcaggagttcgagaccagcctgaataacatggagaaaccctgtctctactaaaaatacaaaaattagccgggcgtggtggcgcatgcctgtaatcccagctactcgggaggctgaggcgggagaatcgcttgaacccgggaggcagagatggcagtgagccaagatcgc

SEQ ID NO: 70047 - DNA, 1403 bp, Homo sapiens
tagaaatctgtcatgcaagaggagttcaggtgtaaattttgttactataaatcacttgctcatctaacaggaattgtttacatgtagctgatggtctaatttttaaatgttcagagtcctaaaattatgaacagattatatgtcaaaaattaatttgtaatatacaaggtatattatggttgaactagtttttgtggtcttaggctggaaattaaacacctagtatatagaagcaataatatttcaagtatacatattcatttatagcattatttctatgggaaaatgcacccagaattctaactaggatcttcaagaacaactctccccaggtcagtgcatggagcagaaagagaagggaaagggatagaatgtcttcatgactttaatcctagtatttgaaaaaaaaaaatcaaaccttgcacctacaaatttctgtcttgatccagaaagtcattagcataaaaaagataatagtggccttctcacctaacgccaccaacatggtgttcaggcgcttcgtggaggttggccgggtggcctatgtctcctttggacctcatgccggaaaattggtcgcgattgtagatgttattgatcagaacagggctttggtcgatggaccttgcactcaagtgaggagacaggccatgcctttcaagtgcatgcagctcactgatttcatcctcaagtttccgcacagtgcccgccaaaagtatgtccaacaagcctggcagaaggcagacatcaatacaaaatgggcagccacacgatgggccaagaagattgaagccagagaaaggaaagccaagatgacagattttgatcgttttaaagttatgaaggcaaagaaaacgaggaacagaataatcaagaatgaagttaagaagcttcaaaaggcagctctcctgaaagcttctcccaaaaaagcacctggtactaagggtactgctgctgctgctgctgctgctgctgctgctaaagttccagcaaaaaagatgacggccgcgagtaaaaaggcttcagcccagaaggttcctgcccagaaagccacaggccagaaagcagcacctgctccaaaagctcagaagggtcaaaaagctccagcccagaaagcacctgctccaaaggcatctggcaagaaagcataagtggcaatcataaaaagtaataaaggttctttttgacctgttggcaaatgtaaaaaaaaaaaaaaagataatagtgagtattttattatttcaggaaggtaaaacagatcttttaaaatggctcgttgtatcattatgttctcatttagttattttcagtatttactttttctttgtaaaataaacgtgaaagtggcttgttaaattttttttagagaaatctgagtaatcttcccagaggctcctgaagaa

SEQ ID NO: 70048 - DNA, 1520 bp, Homo sapiens
aagaaatttagaactcatatctaacaccaccatgaactaccaaatacttcctcatgaaattagacttttccttaagaaaatatcagttttgtcacatagttaatttagtcaccaaacatggacatcactcacacagtgtggcattttagcaatagaacttgtagaattgaatacattatatgaaaatcagatgagaaaaaagttaaatcttcttcaggagcctctgggaagattactcagatttctctaaaaaaaatttaacaagccactttcacgtttattttacaaagaaaaagtaaatactgaaaataactaaatgagaacataatgatacaacgagccattttaaaagatctgttttaccttcctgaaataataaaatactcactattatctttttttttttttttacatttgccaacaggtcaaaaagaacctttattactttttatgattgccacttatgctttcttgccagatgcctttggagcaggtgctttctgggctggagctttttgacccttctgagcttttggagcaggtgctgctttctggcctgtggctttctgggcaggaaccttctgggctgaagcctttttactcgcggccgtcatcttttttgctggaactttagcagcagcagcagcagcagcagcagcagcagtacccttagtaccaggtgcttttttgggagaagctttcaggagagctgccttttgaagcttcttaacttcattcttgattattctgttcctcgttttctttgccttcataactttaaaacgatcaaaatctgtcatcttggctttcctttctctggcttcaatcttcttggcccatcgtgtggctgcccattttgtattgatgtctgccttctgccaggcttgttggacatacttttggcgggcactgtgcggaaacttgaggatgaaatcagtgagctgcatgcacttgaaaggcatggcctgtctcctcacttgagtgcaaggtccatcgaccaaagccctgttctgatcaataacatctacaatcgcgaccaattttccggcatgaggtccaaaggagacataggccacccggccaacctccacgaagcgcctgaacaccatgttggtggcgttaggtgagaaggccactattatcttttttatgctaatgactttctggatcaagacagaaatttgtaggtgcaaggtttgatttttttttttcaaatactaggattaaagtcatgaagacattctatccctttcccttctctttctgctccatgcactgacctggggagagttgttcttgaagatcctagttagaattctgggtgcattttcccatagaaataatgctataaatgaatatgtatacttgaaatattattgcttctatatactaggtgtttaatttccagcctaagaccacaaaaactagttcaaccataatataccttgtatattacaaattaatttttgacatataatctgttcataattttaggactctgaacatttaaaaattagacc

SEQ ID NO: 70049 - DNA, 1111 bp, Homo sapiens
ggtgcaggagctagatgcgtggacgccggtgcgtggactggaggtttccaggtaccgcgcttagcgtgcctgttgaagtcaaatgcatggttaaggaggctagcgaggaaggctagtgagggaagcttgtggaaacggctacgagcccagaaaaggcatgactcgtccagttgtccaagtttttggaagggaaaagcgggaaagcgccacgatcccacctactgtgaggaggaatctgcgagtctcccagctccaccccctccacagtgatgcagaggacaaacaccgacgtagggagaggaaaaaataaaactccagggagcggggagtaggcaaccagcagtcttccggcaatagggcgggagggagcgcgtcccaaggaaacaagcaccgcataaatacttgagttgggaacccagtgcttccggaagctcggagctcaccttcccgacctcgccgaagttgaaaaaaggcagagcagggagaggggccagctcaccctgctgagagctgctcagtgggcaggcgggacgctgctccgggagacgcccactggagggatcgcagagcccggcaagctgcgagcgcgccaaagaccctgcgcttcggacgaggagcccaagtcctccgagacggggagggagcggcccgcgagggctggagctccgaagagggccgagtaggagctgcatggacagcatgcgtctctccgccggtcccgacgcggggccctcgggcaactccagcccatggtggcctctggccaccggcgctggcaacacaagccgggaggccgaagccctcggggagggcaacggcccaccgagggacgtgcgcaacgaggagctggccaaactggagatcgccgtgctggcggtgactttcgcggtggccgtgctgggcaacagcagcgtactgctggctctgcaccggacgccgcgcaagacgtcccgcatgcacctcttcatccgacacctcagcctggccgacctggccgtggcattcttccaggtgctgccgcaaatgtgctgggacatcacctaccgcttccgcggccccgactggctgtgccgcgtggtgaagcacctgcaggtgttcggcatgtttgcgt

SEQ ID NO: 70050 - DNA, 1290 bp, Homo sapiens
tcaaacacgtgttaaaatccaagacgtcgtctcaaatgccagagatttgcgggaatgctcctggaaggcctcaaaatcgccgcaaggtttaagacatccgtttccatgttgaaacaaagccctctctaatcctgcagtgaccataaggcagactttacctccaaattctggtcccctgtcctgtgttttaacttgtgttaagatcagactcggctttctctttccctttattcagaattttgcacgatagtatctaagactggtgaacactacactctgaagtcagttttttgtgcataggttacctgtatacaatggataaaaataattgcaaaagttaagcttgtaacttgatacatattatcctgttatttttaaaggttttgtgttggggaagagaattttcctgtctcaaggtagcattttatttctaagacttttcagagtaaaaaaagttcagtaaaaaaattgctgattttcttttttgttttcattgtgtattaccagtttaaattcagttgctgtacctctcagaaattaaagttaggatgaaattagaactaacacttaatttaaatgatttgaatttacctacaactgcaataataccttactggtaaacacttactctttttaaaacagaacagtccactttggaaagtgaagaatggaatccttgggaaggagatgaaaaaaatgagcaacaacacagatttaaaactagccttcaaatattagataaatccacgaaaggaaaaacagatctcagtgtacaaatctggggcaaagctgccattggtaagttaatacgtagaaggaagacatgtaaaaagcattataaaatgtattttattgatatgaaattcattttaatataatttatttcataatttgttaattaaggcatcatgatatattttttcgctttttgtcaataattcctttctccttccaattagacaacatctgtttgtaaatgtacacacatacatattccactgttggtctttagcagagcacagcttcatttattgatacattgagtaggctgtatagtgtcattagattgcaatgcatatgtcaactgaattttcatgaatctgtgtattttttggacacttgatacacaagtataagatgtggcccctgcccttgatggccaaacacatttgggaaacactgaagagtacaaagttaaacaaggttcttcattgcaggcctttctcaagagcctttaatatgacaatgttcattgtatcagcgaaggaatatattatagtatgtagttga

SEQ ID NO: 70051 - DNA, 1579 bp, Homo sapiens
cactctgacactcctgcctcccttgtgtgaggactcttgagattacatagggcccacctagataatctataataatctcttcacctcagcatccttaacttaatcatatttttaaagtgtcttttgccatgtaaggtaacatattcatagattctaaagattagaatatggacatctttgctggtggggcagagggacattattcaacccatcacatttggaaagcgttatctaattggccacattttaaacgtggtggcttgcgtttcctttagtaccagggtacaatgagaatggaacaaaaacctctttgagtgtaaccaaaacagggtgcccagaggtggtgtatggtctccatagtgcctcattgagtaacactgctctcctctactctcagagctttcattcaggtgaaatcatgataaaacatcaggggctgccataaggagaaaagatgcaatgacatttgtctgtgaggggatcatgcattcagggatatgtgttcaagtgaggaggaggtaatatccccttgacatattgaatgtattaatatatgtacatacatgagctcctctggctccatttggcacaaaatggcaactcccccaatctgttataaaagcagttctaaccacatagtatagtttactttgtaatataatacatttcatttcagaataagacaggtggtaaagatccatataaattaggggtttctcaaatctagagtaggagaggtctttaatattaactcacattttgccacattttacacactaacagcttctgagctctgtctctcattagctgccatgttgatgatttggagctgttgcttgatagcactgcctgccaacggcccaaaggagaggcattctggttttatagtcaaatgagtaaaagaacagaacgtaaacttgtctcatgcactaaagtagatgagacagtaaattgttttgattttgtttttgttgttaattaccaggcttgtatctctgggagcatatttttgaaggcttacttgatcccagcgatgtgactgctcaatggagagaaggaaagtcaatcgtaggaagaacacagtacaggtattggttgtattagttgtgcaacattaacctttgatgttttgctctgcaatattttctgtaaatactaaaagaaaaataataggaaaatatatttataaaaatacttctatttcaacttgtaaagaatagagaagtaaatctcatgaatatgtattcataattaagcttacttggaccttatgaaattgtatattacagaatactcctttttggcatcatatgtctgttttatttttacctaattatatagaaaagttcatactccacatcttacagcgtttgaatggtgacagccattgaaaacattctgtatcttggaggaataatatgtaaacctaaaagtattttcatttttctctttcatgtaatagtcatgttcactttttaaaatatttaggtgatatcaaagctcttgctgtcactttgtagatttttgtttattaaaacaaatttgatgagttctatcaggatttattttttattttaga

SEQ ID NO: 70052 - DNA, 2431 bp, Homo sapiens
gactaattttaagatgaattaaatggtacttgttctatttaatacatactagtgaaaatatttcaatggtactggttgttctaggcagcacttaatatgaaaaaaatgagttatgatacatgtctattcctttaatgaaaactttttaaaaatacagttaaaaagagagtaggctgagcacagtggctcatacctgtaatcccagcacgttggaaggccaaggcaggtgaatcacttgaggtcaggagttcaagaccagcctggccaacatggcaaaaaccctgtctctactaaaaatacaaaaattagttgggcatggtggcacgcacctgcagtcccagctactcaggagctgaggcacaagaattgcttgaacccaggaggcagaggctgctgtgagctgagatcatgccacagcactccagcctgagcaacagactgagactctgtctcaaaaaaaaaaaaaatggtaatacaacacattcccatttactcaccattcaaaactaacaaatttcagctctctgtcatatttgcttcagatatttaattttcctgttaaaaaaattaaatactttcaataagggtaaagctccctttgtactgttttctagtccctttcatcttccttcctcctcagatacaattgctatcataaatttgatgtggatcctcccattcaaatttttatatttatactgatcctaaatatatatgtgtaaataatttttatgactgtactttcaagtttatgtatattttgtgagtgtcctaatccttgctttttttaacattatatttttgagatataacattcatggaatgtttataatgccattcttcgtttcttaatttgtcagcactttctcatccattgagtcagatgaagagtgtaatagcagctcacaccataaaagggttgagaactactgactttaaatgcctttctggtttgaactaaaccattattttacagagttccatgctattcaattatatttctttgcttaagagtttaaattctagccagcatttattttcagtgtggttaaaacaacaacagaaaaaaaggtcaggcatggtggttcatgcctgtaatcccagtactttgggagactgaggtaggtggattgcttcagccaaggagttcaagaccagcatgggcaacatggtgaaaccccatctctacaaaaaaatacgaaaaattacctgtgtgtagtggtgcacacccgtagtcccagctactcgggaggctgaggtgggaggatcacctgagccagggaagttgaggctgcagtgagccaagattgcaccactgcactccagcctgggccacaagagttgagaccctgcctcaaaaaaaaaacaaaaaaacacaaaactatcacattttgtattatcatatgcaaattgatctgcctacagccaaagcttaccattaatctacagctatgccccatcattcaaacttgttcaaaagattgtattatagaaattttacttctagatagaatgtggattaaatctcattgtagattttgtataaaatgatgaatttctgataccacatacctttgttcaggctttgtttgtctcttgtttttgttgtgttgtttttaacagcttcatcactggtccagctgtaataccagggtacttctccgttgatgtgaataatgtggtactcattttaaatggaagagaaaaagcaaagatcttttatgccacccagtggttactttatgcacaaaatttagtgcaaattcaaaaactccagcatcttgctgttgttttgctcggaaatgaacattgtgataatgagtggataaacccattcctcaaaagaaatggaggcttcgtggagctgcttttcataatatatgacagcccctggattaatgacgtggatgtttttcagtggcctttaggagtagcaacgtaagtacaaaatatgattaaacatttttaggccctaacacctgaatttctgaaccaggaagacttattcaaaattgtaataaatttagttcttctgggattattgaggccaggtacagtctttctcagagataaaaacagggtgtggtcgcatccttcaataacaattatgatgtttttaagagtattttattctttaatgaggagatgagttactttttttcttttaaaaccccaaggcatagaatggatttttcaagcttattaggagtgccataaaaatatatttagcagagaaatggcagatagatttttttaaaaacaatgatagtatctatatatagtaaaaaaaggcaatattattatatcaggaatataccgtaccattgtgtttgagactggctgaatttatacaaatctcttctataaaaggagggattaattaaatgatagctaaggtttctcaagatacagtcttttaggccaggcgcag

SEQ ID NO: 70053 - DNA, 2184 bp, Homo sapiens
aagaccctcttaaaaatctattttttgagcagagcctgcatttgtaaaatgttttcatatagtataagatggaacctcttggtaatcatgatgttgttgcactaggccagtatatttcttatataggtctgtggttctcaaccaggggcaattttgcccaccgggaggcatttggcagtgtctggagacttttttttttttttttttttgagacgaagtcttgctctgtcaccccagctggagttcagtggcacgatcttggctctctgcaacctctgcctcccaggttctagccattctcctgcctcagcctcccaagtagctgggattacaggtgggcatcaccactcctggctaattttgtattttttatagagagggggtttcgccatgttggccaggctggtctcaaattcctgacctcaagtgatctgcctgccttggactcccacagtgctgagattataggcatgagccactgtgcctggcctggagacgtttttgattgtcacaactggaggaaagaggttgtcacaactggtatctagcagatagagcccagggatacagctgaacaccccacaatgtataggacagcctccacaagaaaaaattaacccaaaatgtcagtaatgctgaggctaagaaaccctgttatatacaaactgttaggtaaaattttgttctcgtgtgaaagttacatttcaggtacacagtttaatccctggtatttccaaatgctcataaaaataggtaacttttcctgtatggcataccatggttttatctgtcagtttgttttaatctacttgaaaagcccttgggattaatttttcagagccctttgcaatagcaaaatatataatctttccttttttttaattgacaaatagtaatggtatatgataatggggtacaaatgatgttttgaaatatatttacaacgtagaatgcttaaatcagactaacaaatccgtaaccttatatacttaacaatttttgtggtaaaaacataacatctgctgttttagcaattttgaaatatacagtgcattattatttattatagtcaccctattctgtgtgatagatcactaaagcttattcctcctgtccaactgaaacttcatacccttcgatcaacatcttccttttccccatccatctccctcccctggagtattctgtaatcttttcatcacctggttaaaatgttgcttaaatcgtgatcattatgaatagagaagagtctttatactttgaaggttttgaatgtaacatgcctaacagctgcagatgagtaatgcaagttaaagaatgtcaaaaacaaataactttaggcacaacatctctgtaacacttttgtaagagatgtcagtgtgaaattcaatttttttaagtcagtagattcagggagttttccaaagtattcatggaaaattacaatttgagatttagaaatcacattttaaacctcttctgtatacttcttgctacctaagagattgggttatggggaatttttgccaattctatatcatatgttaattcatgtgtatttatttttatagatacaggaattttcctgtggtggaggcaagttggtcaatgctgcatgatgagaggccatatttatgtaatttcttaggaacgatttatgaaaattcatccagacaggcactaatgaacattttgaaaaaagatgggaacgataagctttgttgggtttcagcaagagaacagtaagttctatgcttatttaattcattcattttgttctccagtctgagagttgctttatgtagaaacacaggtttccaaagaggcattgttaactctatttgtaccaatctttccccagaagatacattagtaattaaaactgtgaaaagactgggttgtacacatttagaatagagagaaccgcctatgactgtagtccatcttgaagaggaacactggtaactgtcatttgcaaatttcagttgttagggtttcctcaataatatttgttagtcacacaggagattatagatgctaatgagatacttaggttcatcactgagatgttgtgcagtggaccaattcagtgttccaagaccggtgtgcaggtctcacaaattcaggaattcaggaacctgacaccatcttcaggacatggaccttgtattcttctgtgaatcc

SEQ ID NO: 70054 - DNA, 1040 bp, Homo sapiens
tcctttgctcttttctcacagtattctaccccatctaaataatttactgacttcacttggtcactatccatctccaccactagaactagaatatatgctccatgagggcaaggtagggaagagaggacctagcactcccaaagtatcggttgaattattattatccattcagaagtgttacggtgactcctagattttataaatgtacaactgtaaaatgttccaattcttcaacatttttaagaaatctgtttgggccaggattttggatatctcttatgcctatcatctctataaagtttcaccatttcctgaaactgattttattaaaagataaggtatttttgttcacaaactatatacttagtaaagtgaaaactacagttgtttttctgattttctagctggcagcctcaggaaacaaatgaaagtcttaagaattaccaagatgccttgcttcagagtgatctcacattgtgcccggtcggagtaaacacagaatgctatcgaatctatgaggcttgctcctatggctccattcctgtggtggaagacgtgatgacagctggcaactgtgggaatacatctgtgcaccacggtgctcctctgcagttactcaagtccatgggtgctccctttatctttatcaagaactggaaggaactccctgctgttttagaaaaagagaaaactataattttacaagaaaaaattgaaagaagaaaaatgttacttcagtggtatcagcacttcaagacagagcttaaaatgaaatttactaatattttagaaagctcatttttaatgaataataaaagttaattatctttttgagctaacatgtgatttttaaaatcattttgactactgggtgtataaatgtgtttgtgtgtgtatgtatttatagatgttctttaaggtacccttgaaaactctacattatgtatgccacataatgacatttcagtcagtggtagactacatatatgatagtggtcccataagattataatggagctgaaaaatttctatcgcctagt

SEQ ID NO: 70055 - DNA, 2248 bp, Homo sapiens
ttaaaaaaaaatctaaaaaaatattttaaaaactttcccacaatttacaaaaaatccgcctctcccctgccatagacttttatttttttcttcttcttcttttataaagtaaccccgtgaagcagccgaggccgactcgcccgcccgcagcagctccaaaaaggaaccaagagaccgaggccttcccgctgtccggactgacacctccaccttcgcccgcagccagcggcagcggatcaacaccattctggggcggtgaagtagttttcgattccgggtgatttttgtccctctgcgcttgcgcttgcgcttgcccccgctcaccttcccccagctccggcccctagccccagcattcgctctcctcctctcacggaaaggtcgcggcctgtggccctgcgagcagcagtgccgagatgaaccccagtgcccccagctacgtcctcgctgtacgtgggggacctccatcccgacgtgaccgaggcgatgctctacaagaagttcagcgcggccgggctcatcctctccatccgggtctgcagggacatgatcacccacggctccttgggctacgcgtatgtgaacttccagtagcccgcggacgcggagcatgctgtgaacactatgaattttgatgttataaagggcaagccagtacgcatcgtgtagtctcagcgtgatccatcacttcgcaaaagtggagtgggctacatattcattaaaaatctggacaaatccattgataataaagcactgtatgatacatttttctgcttttggtaacatcctttcatgtaaggtgggctgtgatgaaaatgattccaagggctatggatctgtacactttgagacacaggaagcagctgaaagagctatggaaaaaatgaatggaatgctcctaaatgatcgcaaagtatttgttggacgatttatgtctcataaagaacgagaagctgaacttggagctacgtgaaagagttcaccaatgtttacatcaagaatttcggagaagacatggatgatgagcgccttaagaatctctttggcaagtttgggcctgccttaaatgtgaaagtaatgactggtgaaagtggaaaatctaaaggatttggatttgtaagctttgaaaggcttgaagatgcacagaaagctgtggatgaaatgaaaggagctcaatggaaaacaaatttatgtaggtagagctcagaaaaaagtggaacggcagacagaacttaagcgcaaatttgaacaggtgaggcaagataggatcaccagataccaccgtgttaatctttatgtgaaaaatcttgatgatggcattaataattaacgtctccggaaagagttttctccatttggtacaatcaccagtgcaaaggttatgatggagggtggtcgctgcaaagggtttggttttgtatgtttctcctcaccagaagaagccactaaagcagttacagaaatgaatggtagaattgtggccacaaagccattgtatgttgctttagctcagcgcaaagaagagtgccaggctcacctcactaaccagtatatgcaaagaatggcaagtgtacgagctgtgcccaatcttgaaatcaacccctaccagccagcacctccttcaggttacttcatggcagctatcccacagactcagaacggtgctgcatactatcctcctagccaaattgctcaactaagaccaagtcctcgctggactgctgagggtgccagaccccatccattccaaaataggcccagtgctatccgcccggctgctcctagaccaccatttagtactatgagaccagcttcttcacaggttccatgagttatgtcaacacagcgtgttgctaacacatcgacacagacaatgggtccacgtcctgcagctgctgctgctgccactccacattataactatgctgcgggagttcgcagtcctcagaaacatcttaatgcacagccacaagttacaatgcaacagcctgctgctcatgtacaaggtcaggaacctttgactgcttccatgttggtatctgcccatgctcaagagcaaaagcaaatgttgggtgaacggctgtttcctcttattcaagccatgcaccttactcttgctggtaaaatcactggcatgttgttggagattggtaattcagaacttcttcatatgctggagtctccagagtcactccgttctaaggttaatgaaactgtagctgtactacaagcccaccaagctgaagtg

SEQ ID NO: 70056 - DNA, 1049 bp, Homo sapiens
gagtctataaaacattaattggttttcatattttactatttttgtgtttttttaaaatttttaaatcaataagtaatctaggactagcattatgtttgctagacctggcattttctcggtacataaggttcaaagtttcttttcctttttaaatttattttatattttgcaatgtttattaaaaaaataatatttacatttttcgatgtttagatatttttcttctgtgaagcacaagtttcttttcatggtacctgatcaattttaaacagttggaacaccggtggcacggttaactgctttctgggcagccacttcagcttggtgggcttgtagtacagctacagtttcattaaccttagaacggagtgactctggagactccagcatatgaagaagttctgaattaccaatctccaacaacatgccagtgattttaccagcaagagtaaggtgcatggcttgaataagaggaaacagccgttcacccaacatttgcttttgctcttgagcatgggcagataccaacatggaagcagtcaaaggttcctgaccttgtacatgagcagcaggctgttgcattgtaacttgtggctgtgcattaagatgtttctgaggactgcgaactcccgcagcatagttataatgtggagtggcagcagcagcagctgcaggacgtggacccattgtctgtgtcgatgtgttagcaacacgctgtgttgacataactcatggaacctgtgaagaagctggtctcatagtactaaatggtggtctaggagcagccgggcggatagcactgggcctattttggaatggatggggtctggcaccctcagcagtccagcgaggacttggtcttagttgagcaatttggctaggaggatagtatgcagcaccgttctgagtctgtgggatagctgccatgaagtaacctgaaggaggtgctggctggtaggggttgatttcaagattgggcacagctcgtacacttgccattctttgcatatactggttagtgaggtgagcctggcactcttctttgcgct

SEQ ID NO: 70057 - DNA, 1033 bp, Homo sapiens
agggagggttgtggcgcccgagctgggcgcgttcccagcgcctgccctccgccgctggccctgtcccgggcgcccggtgcgggtctcgaacaatggtgcggagcgccggcgcgagccccgcgcccgcccagcggccgtagaggaagtggccgggctcccggcgaggtgggcagggagacgtcccccgccactcgctggctggagtttgcctgcgcgtccggcctctcccccggggatcccctgggattaccgacggagctcaatttcgagagtatggtgccagcgcccgggctaatctagtcctctctactcgctctttttcccctcctcctcctacttctcctctccctcctcccttccctcgggtcggcgctgcctctggattgcctgcgtgtgggagtacaactctgcctctccaaggagaacgggttgtgaccactgaacaaaacttgcccattgaaagcaaacccggaacagctggataatgtccaccccgagccgattcaagaaggacaaagagatcatagccgagtatgaaagtcaagtcaaaggtaaggatgggagcggctgccttgctccttttgtgtgccttcttgtcattgtgctcgtggagttgcgtatctaacttggtgtctgcgtgggaggaaggtggtgaggggacagctcgagccctgtctgagccacctgggcttcctacaagccagttagttcccagttgcaatcccagtcccgtcaaacccacggggagctggaaactgggtgacttcccccgccagctgccagcccgcatctctaatggggagagaactggctttaacttaaccaccttcagctgggcaacttatgtgggaagcaggcagcagtggaggatcctgtccagctattattatcaccatcattattctttttaaatggtaggattgtcactacgtaatttttttacggaatgatttttgtaaagtctgtgaaccccaagcggtctacagcctcattgagtgcaggctatttcagatatttacaccactcacctatt

SEQ ID NO: 70058 - DNA, 1045 bp, Homo sapiens
tgtgcagtttttccacatggctctttgtggcaggtcttcaaggggtggcggtctggtttttctgccgcctagagcactaattggcaaatgcacttccaaatgttgatttctttatgtttgctgtaaggtcacttgccagtgatcaagtccttatttgaaaatcagcgaaatgggatgtgttgcaatgtgtctatcaaattcaaacggaagaaaaatcatgaacatggtgaaaatcacatttggagctaagtctgtcccacagagaatgaccttctccctatttccttcaacacttcttccttccacacacccacgagtccctaggctgctttaggagtcttcactgcacctgccctgccctgagtccaggctttacctcctcctgcagtacctacacatccagtatctaacctagatcactacatccatacacaaacatgggaataagggaatatcatggagtcagatcatatacgcattaaatggcacaaattcacctggtacttctaggcaaatcaagaagagagtgggagacaaataacagataaatagtacatgaggccagctgtccaatgcagggagagtaggccccttagtaaggacagcatgggagacaagactggtttttctgtaccctcgcagagtgctagtctgttatttacaggtatgtgttttgggatcaggtgcagtggtgcatgcctgtaatctccgcatttcaggaggctgaggcaggcggatcacttggggttaggggttcaagaccagcctggccaacattttggtagagaaaccacatctttaccaaaaaatacaaaaattagctaggtgtggtggcacacacctgtggtcccagtgtgcctgtggttccacttgaacccaggaggcagaggttacagtgagccgaaatcacatcactgcactccagtctgggtgacagagtgagactctgtctaataaataaataaataaataaaggtatatgtatttggaacaaactactttttaaattacagtcagcaactttatctgatgataaaaaaaaatt

SEQ ID NO: 70059 - DNA, 1050 bp, Homo sapiens
ttcctggtgataattcgtaattttatgtataagatcatagatgtatctagttgtgtgtatcattttgggcaagtcacttagcctttctctgggtttcggttttcttatctataagataaggagttggaattctcttcatcttaagtgtcttttttttttctttttgagacagagtctcactctgtcacccaagctggagtgcagtgacacgatctctgctctctgaagcctctgccttccggtttcaagtgattctcatgcctcagcctcctgagtagctggaaatacaagcgtgcaccaccatgcctgactaatttttgtaatcctaagtgtctttgaatctaattgaagatgtcatatcagttcatattaattgcctcataaaattttcaagcttttaaagttttcagttggctgctctgttttgtggagaatcatttttgctttcacttttttttcataagttcatggacagtgtataaattgagtttttggagaattaaaatagaatacaataaagaatacagaaaaaacagtaatcaaaaccacatgcagagaaatgtagcacagaattgtaagacagaagaatcaggaatgatacaagtggttaaacagtggataggtttaaatgggggacaaaaggggaccccaggcaacagttttaaagaatgaattgaacatttcatgcctcttggtcaaattctcaaagacttagaattaagagaaataaatctcttgtttgaataggccattagaaagcaagcatgtctggaaaagtgtatgaaacccaaaccagttgactatgctatttgttagcatctctggcaaatagcgtagcagtggaagggattgaataattggctagcagaaggttttgaattatctgtggactttagtgatctatgtaattcttgtattctgcagcaaaaatattgtggagctacacatatgggaacaataaagactcataaagacatgttttatgaagtggaacttatagatgagaggctgtgtttgtttttaataatgcatgttgctagttgctaagaa

SEQ ID NO: 70060 - DNA, 1050 bp, Homo sapiens
gttgcctaggctagagtgcagtggcataatctcagctcactgcagtcttgactttctgggctcaggtgatcctcccacctcagcctccgaagtagctgagcgcaccagcaaacctggctaattttttgtagagatggacggggttttgctatgttgcccaggctggccttgaactcctgggctcaagcgatatgccagccttggcctccagaagtgctaggagtacagccatgagccactgcgcctggcctgaattctattttctatgtgcaatgggggagtcctattttaatagggggagagataatatttttataaggagaccactctcatcataagatctgcaagtgtctccttaacttttaagtgctatcaatagttctaaaaggtcagaccacttccttattctcttgatatctggtattggcttctctgttgagaagatctagttttagtttaattttcagaaaagtgaattgctatgattttgttgttggtggtggcattgttgctatagatgtagattgctctaccattaacctgcactagttgttcactagttgtgtcaaaaataaataatgtgccagacaaattaaaaaactaataagttattccatctggctctcaaaggcataatcctctcatttgcttccagataggatatatatgtatcgtgttaagacactaaggtctgttttgtgctgctataacagagtaccacagactaggtaatttataatgaaaatatatttgttggctcacagttctggttgctgggaagtccaagatggaaggtctggcatctgatgagggccttcttgctacatcatcccatggcagaaaggcaaagaaagggcaagagagggccaaatgtatcttttataaggagcccactccagagataacaataatggcattaattcattcaggaaggcaaacccctcatggtctgatcacctcttgaaagtcccacctcccgacactactgcactggggattaagtttccagcacatgctttttgggggacacattgaaaccacggcatatgg

SEQ ID NO: 70061 - DNA, 1731 bp, Homo sapiens
catctgccactgcacctagctaactttttagttttgtagagatggggtctcactgccttgcccaggctgatcttgaactcctgagctcaaagtgatcctcttcctccacctcccaaagtgttggatattacagtcatgagcagtccttaaagaccatatccgtcaaatacaagctggctctaatacctggcacataataagtgctcagttattgtttggtgtgtgtgtgtgtgtgtatatttgtttgtaccctcaaagatcaggtttctaaatattttctcctattttatttctgctttttagcaggaaggtcgccaataatcaagctgtaaaaatattagctgctcccaatttagaatttttgtgttcttatgaatgctgaaatgtatgtaaacaaaattgcacagtgttaaatggtatgttgttgaaccagaaatatgtttattgtcttattttataaacaaaatggcactgagatttctttaaaaattttttaaagatatagtttttgaaatttacaacacaactcagtaaataagattatgaaaaagctatcttagatatcctttttgattggttctaagattataactttaagcaagcatagggacacttttaacaacttggaaggtattttggtgggacagtaagagtgtatttgtttatatgaaaatccgtaattctttgtaagaacgtaatttgaatctgtagttgattgcaagtttagagaggtctctgcaatatacaaagtttcttagttgcagtcacttgccaagacgggctgatcactaagaaataaggaaactcagctagaattaccagctgctgtttataaaaccaaatgataaaattcacttaatgaaagtaatgtgctgacagcagtgtttattacttaaaacataacaatcatgtttattgtatctctctgtgacagctttgctgaatataacttaaatgtagcagaggaaatccagagtaatgcattttttaaaaaaagtgtgtttatttacatgaaaccaacataaaaagtttgaagacttttttgtcagagatcttagttttctagagttaaactgaaaagattgaagaaatggtaagtagctaccatttttggaaacaagaaattaagaagtacaaactcagaaaacacgcttggagaaaattttaatatcatgaaacctagaactcttgaacttcaaaagaccttacaatccgcttgatggtgatatttggaatctcagatatagtattgaaatatcataggatagaaaggaataatcagggagcttaatgcaatcagaaccttgtagcctgttatgggaagtatcatttggttaagcctgctaagctactgtaaatgaatgttaatcgcattttatcagctgcttatactatctttattatgtaatttgaatatttatgacaatggaaatatgtttaactgtgaaattacagtgtttatggaactcaaattccaaaaagcatacaaccctctgatggagaataactatatttaaatactacaaaattcaagatgtttctaccatttaacattagtctatatcttgtgggagaagcattgtttgtggctaaaatactgtgacaaacagaatgatgtacgctcatgttgacttctaagataagcatgtgatttagataatttattgtttgcacaaaaatcagtcaccaactagatcattttaactttttaggatcatgtagtatttaact

SEQ ID NO: 70062 - DNA, 1537 bp, Homo sapiens
aattcagaaacaacttcagaagaaagaataagcaaagaccccctccagaggatttaaggatttttgtttttgtttttgagatggagtctcgctctgtctcccaggctagagtgcaatggcgtgatcttggctcactgcaacctcctcctcctgggttcaagcaattcttctgcttcagtctaccaagtagctgggattacaggcatccgccaccatgcctggcttatttttgtatttttagtagagatagggtttcaccatgttggccaggctggtcttgaactcctgatctcaggtgatccacctgcttcagcctcccaaagtgctgggattacaggcgtgagccaccgtgcctggccagatttaatgattttaaccagtggggtcatgtggaggctcagtgaccccagaaggcaactcacttccgttttctacatggggttgtccagggaaaatctagctcataaggaaggataagcacaggagccccttgatgggaagccacctcatggcaggggagtgggggattggtgttgggggacagcggttattcacactttccgaaggagaggggtttccatgctatctgagccctctggccataaattccccatttggatccactggaaacactgggtttggcaatggaggaagaaggaaaaagctttgcagccgagaagcaagtctgaggggaagggtgggagaccctcctgtctttgaagatgtgaaccatttcccaggggccatttgctccctgacacctgtgccacttggaacatcaggtggatcatcacttctagaaactcgagttgaatggctgtttgaattgtcttaggtctgcagcctccacccttgagatgaaaaggttttgtctagcctcccacactctcccccgggaatcatgtgctgttagttcaaggaacagaatctaagatgataagaagaaattgttccttccaccctttcttcaaggtctttgaattactttcgaaggtcttcagctcttcatcctcatggcttatcttgtcttttgcttcagaactttcctcttcttgttccaagtcatgatctgccttgacaggtaatatcctgagaagctccatttctttctgacaacgttcattcatttcctttcctctgtcctgaagattttgaactgtactttcagttgaggttccctcaatccaaagcttgttaagatgatctgtcaggtcagtttttgtgtcctcttttttagaaatgttggcatagagtttatttttctctttcttctgggtgttgagatgcacacaacccggcagcatctgtcggtttcctcctggcttctcttgctgctcatccacatggtctctgtctcctgtgtcccagttaccaactgtgttctcttctccaaggggagctgctaggtctttaacctttcacacagcttcctccggtcttcatctgaccttctgtagagactctagagctctgtatgaaaaccctgagttttttttccttttgcccttaatagtattaagcttattgtattttttcc

SEQ ID NO: 70063 - DNA, 1012 bp, Homo sapiens
tgtttggttttttgttcttgcgatagtttgctgagaatgatggtttccagcttcatccatgtccctacaaaggacatgaactcatccttttttatggctgcatagtattccgtggtgtatatgtgccacattttcttaatccagtctatcattgatggacatttgggttggttccaagtctttgctattgtgaatagtgctgcaataaacacacatgtgcatgtgcctttatagcagcagcagcatgatttataatcctttgggtctatacccagtgatgggatggctgggtcaaatggtatttctagttctagatccttgaggaatcgccacactgtcttccacaatggtcgaactagtttacagtcccatcaacaatgtaaaagtgttcctatttctgcacatcctctccagcacctgttgtttcctgacttttttatgatcgccatatttttcaagatatggcttggtagcttaatataaaatttagtgttcaactgaagactagagccttctttggctccttctgatcaatagcttatctcatatgggagttatcaagcattcaaagtatatttcttggtacacatgcaggaagtgtggttgaaaaggtttatgggatgtttagccctctgccgtccaatacagtagtaactagccacatttgaccacttaaattagaattaacattatttaaaaataattaaaaatttagttctctggccacacaaccaaatttggaaatgtactggacagagcagatatataacattgccatcatcatagaaatgtctattagacaacacagttctatccctatttatgccaaagtcacttataatgagtctagatctagaagtgagatacctgaatttgaactccacattcacgacttgccttgttctataagctgtaaggtctcaggcagagcctttaacctagtaacctcccatttcctttgggtaaaatgaggttacatctcctacaatgtccgtaaaatgcttccagttat

SEQ ID NO: 70064 - DNA, 1424 bp, Homo sapiens
ttgcctctttgcttcatggggaattcaaggaatagtgtctcaaattcttttgctctgtgggagcattctgcaccctgcaatcagctgtgcctttattctttagtgtatcatgcaacaaaacattgccttctgccaaacttcctgctcaggtttgctcttcactcagtcagattttcttataagactcaatgtgctgttatggttatgactgtgggctctggagacaatcaccttgctctgccagctctgccacatactcatagtgtgaccttggcaagtctaaccttattttatcatccataaatgggagggagggggatttatataaaaggacatatgccatagagttttgtgggggttaaatgatctattatccatgtacttggcctagtggctagaacttagtaagttccttataaattattcttgttaataataatacgatggtgatgtattaataatttagtgaattacctgttaggagtataaagtccagacacagatcttgatcaccaaaagatagaatgtgtgacagccaaagttttgaggtttactagagggacactttcttacctatagttgaacaactcagggaagctggtatgtggttctttctccatgttaccctatcctctgcacagggtctcaaaggcaaataaatgcctaggagaggcaggcaggtaatacacaggcataaggcagactgtgggtaagagattgcagagaatagaaaggatttaagtagactggagaatgtgtaccctgtctaagtggtctaaatccattgccaagcatcatttagccagttacaatcatgtgggaatggagtattagtaaatgatgtttatatgaaatctccaaatgtcaagtattggcttagtttttatttaaaactcttgtgtataccagacagaatatgtttgtgggctgacgctggcccatgagccatcactttaccgtcttttctttaaggcaacatttcccagtgtcttcccaagaatgctaacgctgtgggttgttaatttggaattacttggaaagaaggtcctatagccagataaatttgggaaacctagttctgtgacgaaattacatttagaaaatactttaccctgggtttcgttcccaaaatttatttgatcagagaaccttgctcccaaagaagactagtgaatctctccatggggctacacgagggagatgagtgtcagtattttggagaatgacaacaacaggggcagatctcaaggacctctttttatataatagacataaattgaatcttagttgacatttaggaagaagtcattaagttactcacattttgtgatgcaaatggaaccattgaatgtccattttgttagattttctgtttttaaataaaagatcttatcatctgacacctattgccagaacatatgtgc

SEQ ID NO: 70065 - DNA, 1012 bp, Homo sapiens
tccccttgctaagtcttctgtgtgaagtggcaccacgttgctaattctgtagttcccagttgttgtcaaatgctcagtgaactcttgacaaccatctcagactttaaaatatttaagcatcaccccgattacattgctaagaggtgctgaatgttttaaataaagcttacctaaacagtcttgtctcattccggtttcccctcacagaggaagtgtctttcaataacccaaaactactggcttctaattttagggataactaaggtgggactaggacagaaaataagctcttctccattgattttccttagtcattttactccagaggcctataattagctctattttctccacctgtggtacatctttaggttaaaatgatgttggagaaatagtggaggatgtgcagagttagaaattagggagtgtacttggtctcacttttgcatacttagatgaatggcactggggaagaagagaagggggacattatacaccaatctgtgtccatttccttttatttttaatgatactaataactcagggacacttattgatcatctactgtttgccaggcactgttctgagtgttttacttgtattaactcatttaatcctcacagtacaaaagccctgtgaggtaggtactgacactatccctatttcagagttgaggaaactgaaagggtaatttattcaatgtcacggagcatgtaaaagtcagcactaggctgggcaccgtggctcagacctgtaatcccagcactttgagcagccaaggcgagagaatcacttgaggctaggagttccagataagcctgggcagcaaagcgagacccccatctctaaaaatattaaaaataaaaaattacccaggcgtggtggcatgagcctgtaaccccagctacttgggaggctgaggtgggaggatggcttgagcccagaagtttgaggctgcagtgagctatgattaagccactgcactccagcctgggtgatggaacaagactcc

SEQ ID NO: 70066 - DNA, 1109 bp, Homo sapiens
ggtgtaagccactgtgcctggccaatattttaattgttttaacttaacattacatatatatatatatatatatatacacatacacacacacacaactatgtttgaaaattataaaggataacagtgtcatatgtatgacttaccacctaatctacaaacaaaagccctgccaattctgtcgcacttatctgtgctctgccccatcccatatacctgcctatcttttgaagcaactacttcctaatttttttctttctcttgcctttttttaaaaaatgttatttatcccttaaaaatatgctcataagtactatacagctaattttgcttgtttgttttgatttgtaaaaatagtataactgtttgacattgttgcatgtagctgtagttcattcattttaaaagctgaattatgtgttgttgggtgagtatgcagaatcaattgattcattgccctgttggtggatatttggattgtttccagctttctgctatttgaacaatgttgctgaacattttcatgtgttcctattaacacacatatacaggagtttctccatggcctattgctgggagtggaattgcatggttattgggtatgtcagtgttcaagttcacatgatacgactgcattgttttccgaaggagcatcaccagtttacattcccactcataagtgattaagagctccagcagacccactttttatcagcacgtggtattataaaacatcttaatttttgccagtctggtgggtataacattgcattgtggtcttcattgacatttcctgataactattgagatatagcctctgaagaggtgacttgagcagaaacctgaatgaagtgaacgaccaaaccatgaatgactgatgggtggaatgttccaaggcaacaaaacacaggctgaaattatcctgagatgtccatggagtagcaagagagtccttgtgaataaagagaagtgagctggagatacaaggttgggaaggagtggagaggctagttctcctagaacctgggatgccatggtaaatactgtactttagacttgatatgagagtatgagaagacatgacaaggcgattagaagggaggaatgtgatt

SEQ ID NO: 70067 - DNA, 1558 bp, Homo sapiens
atttgtttcctggatcctgatttagtagcagagcctccttatgaagaagtggcctgccttctcttgcctgaatttaaagtagtactgcttcaggtgcaaatcataccagcattcatattcaaggtgaatctactgctgacattattataaactatttactttcagcatcaatgacttagtctctcatcagggcagacaaatgctaagcttttacactttctgatcattgggaaaaataaatgagatgtataatgtcttaattttgatgaggggtttaagttaaatttgaggaaaattgttaatagttgtgtatattaaaaagcttcattattaaaattatgccgattagtaggatgtacctgcagtgcagaagtcaaaattatcatgcacattcagtgttttagaattaaaattttgggggaagtattacagcgaagaaaaattgagggaagtgttaacatttattgagaatttgcatatgttacttaattttcacagtcacagataccacgtgttaatatctaaagtagaaaaaggaataaagcaaaggaggacaaaaagaaaaggagtaagaataatttttctatgaaattattgattgctgcgcttatactgtagcccttatactgtggcctgtccttgtactgatcaggccagcccgtccacagatagagatggcatccttatgtttataccgggaagctgtaggtttcctatgtctgaccccactttcccctaacccagccacagtggcccagtctgttagggcagaatttgtattatgcctttcacacttcccattttgttctttaattcacactgtaacctaagcctagaatgaaaaccttcatgcataaataagatggtcccttattgcaggtgaaaaatcactttggactgaggaggaccacaacttgcccagtttcaagaggatttccttttatccttctctctcaaatccgcaatttaatttcatgttctaaaaatgattggataatatatatttatagtagtttgatattataccactggtttaagcactctgattctttcttcctcacaccatcaattacatagactttttggatgttccaaaattacccttctaatttaatatcttaacagcaagcaaatgtggattttttgttataaataatagttaagagttgctgagcctatgctgtgtgttgggtgctgtgctattctattcagacaatctttataatactctcatgggggatataaatatagttatcattccagtttcataggagaggaaagtgaaggctcagagaggtgaagttctttggccatggtcacccaagttgcaagtggtccagctgaatttagaccaacttgttcacctcctaagtctgtgctctgcctgccttctgggtagggctcaagtcttctttttgtttgttgttttttaggatttttattattaatattatttttgtttgacaaatcataattgtatacattcatggggtacaatgtgatgttttgatatatgtatacaatgtggaatgattaaataaagttaattaacatatca

SEQ ID NO: 70068 - DNA, 1075 bp, Homo sapiens
aagataactaatttccttattgtgtaaagccagtttgaattgggcccaaagttctctcactgatatatcaattctacaatttgctaacttgttcatatccaagattgactttgatctgaacaacaattctgcaaagttggtaatatataaataattattccctatactgatgatgaaactgaagttaaaaggataccacttgcctaaggacccaaatccaaatttaccaattccaaatctttctgttttccctctgctttttcaaatgagagagcgccatatcagtggagagatgtggtacttaattcatcagttctggagtgaatgcctgttctatgcccaggtaacattctaggagctagggatccaaagcagaggagagggaagaaaagaaaagcagcagagagtgaaagtgtgctcagcatttggcacatgaatctcatgttgggatcagtggatgttgcacattggttggtcatgataactgcatcaaaaaattaagttgggattagattgtagaaacctaagaattccaggctagagttaatttctcatttagtaggaaaaactgggatgttgctgacaatggcccataatcatacagcacaaaaagagaggcaggtctttaaaagtcctttcatcttggtgacaagttgtatatctatatgtgtaccattttatatataatctactatagaacttgaaataagggaaaaccagaaaccccaagaacatttctctttagatgtggataatttagcattatccatactgcaaatgaaatgtagtagtattctatgaattacttagttcaaatgtgacttgtctatgacatctgggccccatatggtagattaattaaagcagggatgctgaatttggatagcttgatatcctcttcaaagactgatctcccttaggactaagacaggaaaatcctgacgttttgatttctctgtgtacagggacctttagcgtgagaacaataaacggccttttgtagcttcttaatgagacatgtagcatgttatattaacacctaggagctcgccttaaactgctgtccctcactaat

SEQ ID NO: 70069 - DNA, 1032 bp, Homo sapiens
taattgtaattttttacccattaaccaacctctctgtatcacccatcctccctacccttcccagtctctgatgaccactattttctttacttctgggagagcaactttttaagctccctcatgagtaacattttagaagtaaaaaaaaatgtttaaatacaagaagataatagtattcagtatttcagagatttgtgagctctttgaaatttttcttaattaaatcacccagtatacccaaatagaactttgctgaaatacacaaaatcattttttaaatcaacaggttgtcagagtaaggttgttttatttgttttataaagaaaattatgtaattgggaacagcagaagttgctgagagaacagaatgtattttggtttgattttttttcccctggggaagtgagaaaagaggaggaagtaaagaattctaggaacccgccttcagcacccagcttcagctaccagccgggtggctgtgggcaaattcttagtctctttttgcctcagtcctcatctgtaaaactgagatgataataataatacttatctaataggattggtatagaatttaaatgagttaattcctacaaaatagaattgtgtctgacataatatccactctctcacatttagctatagcaatatatgattataattgttattactattattagatatcttatatttgaatgagaaatttaagtttttgaagccttttgtcattcatcctttcatccttcatgcaacagtgttgggagtccacaagggtgagtatttattatacctgttttaaggatgaagtcacttgagccctaaagaggattagtaacttgcccagggtcacttaagtagtggcagagctgggaatctcatctagtattctcaattgaccctttccagtagcctgagaagtaggacttaataaaccccagagaaagcattacgcttgaggcctatataactccctagttacactgtgggttttcttctttgaattacatcccaagaacagctcactagtggttactt

SEQ ID NO: 70070 - DNA, 1032 bp, Homo sapiens
tgtgctgtgctgttggcattcaggagagccctagtctaggagactgggcctgaagtgccctgcagactgctcgcttgcctctgctcatggttacttggcacctgtgcttggggaagcatccaatggagtggcagaggctcaatgccatccattcagacagctttctgaatgccggcagccaagagaacatcagctgtgcctgtgagtagtgtgggtccccgccagaaacatctaaacttcaaagggaaaaaaatcgtactgtgggtcggtgtggaaagcttttggtcttcttgaattttactcgttttcacagagaaggaagatggtgtgaagcattctgatggactccacctgtttttaggtgccaagataattaagctagagtagttgcatttaaaacctaaccatgaaaataaaatgaatacaaagaatttctgtttggtgtcagagctaccttagaattagggaactgtgaaagaagatcttggatgaatctgatggcagatttcattaaagttgaagttacatattcatgactgattttgattgcaccatttctaaggtcttaaagcggtgggggtggggaggtcttataaccgaataacctactctttcgttctaaaagaaaaagaaatcgtgcttttgttttgacttgaaattttattctcatgctggcccaagagtaaagtctgatacctggaatgtactggcagcaaaatgtactgtttaaaaatctgaaacatcggccaggcacagtggctcacacctgtaatcccagcactttgggaggccaaggcaggcggatcacgaggtcaggagattgagaccatcctggctaacacagtgaaaccccgtctctattaaaaatacaaaaaaattagccgggcgtggtggtgggcacctgtagtcccagctactcgggaggctgagttaggagaatggcgtgaacccgggaggcagagcttgcagtgaaccgagattgtgccactgcactccagcctgggtgacagagcgagactctgtctcaaaaag

SEQ ID NO: 70071 - DNA, 1041 bp, Homo sapiens
gctatctttcaatgtatataacagctgtgatgtatttcacatatcacatgatttatcatttcaaaaatgcaattcagtggcttttggcatatgccaggttttgcgaccagagccacaatcaatttttcatcatttttattaccctataaagaaacttcgcaccccttagcagccatttttccccaaccctcccaactctaggcaacccctaatctactttctgtctctatagattagtctattctggacctttcataggaatgaaattatagactgtggttttttgtgagtggtttcactcactaaagttatgttttcaaggttcatccatgttgtaaataagtacttcattcctttttatggctaaacagtattgtgttgtgtggctatatcacattttatctctttattagttgatacacatttgagctgttttcacctttcagctattatgagcaatgctgctattgcacacattcacgtgcaagtttttgtatggaaatagattttcatttctctggaatgtatacctaggagcagaatggctgagtcatatggtaactctaagtgtaatcttttgaagaactgccagactgttttccaaaaggactgcatcattttacatttccaccagcaatgtgtgagttccagtttctccacattgtcttccaacactttttttaaatctttttgattatagccattctagtgagtgtgaagtggcaccccattgtgcttttgatttgcatctccctgaaagctaatgatattgagcaacttttcatatgctactggccatttgccatttgtatatcatcttgggagaaatgtctgttgagaccctttgaccttttttttttttttttttttttttgagatggagtctctatcaccaggctggagtgcagtggcacgatcttggcttactgcaacctctgcctgccaggttcaagcaattctcctccctcagcctcccgagtagctgggactacaggtgcacaccaccacgcccagctaatttttgtatttttagtagagatg

SEQ ID NO: 70072 - DNA, 1009 bp, Homo sapiens
gtaaacataaattgctttcttcaatggagcgtttaaagctgagggcctgcctaagcactgtgtatattagggtcccatggtccttgtcaggaatatggatttcaccagtgttcatggtccaagtttttccttccaaacctggacaattgctggctctatgccatccacaggctggaagcctgttctgctggctgataagtgtcctggtctgagaaatgctcagagcaggatgcacagcacagtatccatctgttgtggttctttagtttgccttggtgacttcactcatctgattggggcaactttgaaatgggtggtaattctgtgtttcttcacttcttaggaaagaccagaacctgttgtctccagtgaactgctggtatttgctcctgaaccaagtaaggagagaaagcaaagaccatgcaaccttgagtgacatctatctgaacaatgtgattatgcggttcatgcagataagtgaggattctaccaggatgtttaaaaaggtacactccataaatcctgccatagtgtgctttccaataactgccttgtctataaccaggactgagaacggtatctgaaaaattaggtgaatgaatgaatcctttagagacacagaataaacagttaaaaattagatgaatggatgttttaaagacacggaataaagagttaaaaattaggccgggcgtggtagctcatgcctgtaatcccagcactttgggaggctgaggcgggtggatcacgaggccaagagatcgagaccatcctggccaacatagtgaaaccctgtctctactaaaaacacagaaattagctgggcgtggtggcgcttgcctgtagtcccagctacttgggaggctgaggcaggagaatcacttgaacccaggaggcggaggttgcagtgagccaagatcgtgccactgcactccagcctgggcgacagagtgagactccgactcaaacaaacaaaaaaaagagttaaaaattagatgaattaatcttt

SEQ ID NO: 70073 - DNA, 1047 bp, Homo sapiens
agctggctggtgttaggagtgtagcctatggcgtgatgaaggataaacagtgagtaacagctgtctgaggtctggagaggcaggctgtggagggcacaagaatttgaatctcagtttgaggaattggtatgttgttatctaagcaattaaggatgctaagagagttttaaagcagatatatgacttaatcagctttgtgaagcatttgaaagcattggaatgggaagaaacttgtcttggggaacctgatgaggaagctgttgcattagtaatctgggtgataatttttatcctatcatgtgagttgtggccagagcataactctatacttacaatgacattgccttcaaaaagttcttattattgtcaaccaccagtgtgtcctgggggggaaaaaagaattatcattggtgcagattaataacgagttgaatggatttttgctgttgacttttaaaagccctgttagtaatttaaatccagaatatttttattcagtccatcctattcagattttcttaaggcttctacttctttagctgatggatctttagcttactgggaaaagaaaaagaatctaatcctgattcatagattcttgggcttataatctatgcagacatggatttggactgactccaccaaacagggcaatcacaagtgattacaagttactgagtggcctgtgttgcttcctaatcctcccaagatcttagcttcaaccccttgaaatataaaaacttgtacttaatatcactagctggaaaataatgaaccgttatctgtgaggcaaggagaatttgctctgatttctgtaaactgtgtcatataaggcagtggtccccaacctttttggcaccaaggactggtttcatggaaggcaatttttctaagggcaaggggatagtttcgagatgaaactgttctacctcagatcatcaggcattagattctcataaggagcacataacctaaatgccttgcatgcacagttcacagtagggtttgtgctcctatgagaatctaatgctgcggctgatcggacag

SEQ ID NO: 70074 - DNA, 1032 bp, Homo sapiens
gatttgaaagtttatatgaatagactgttgcattcaaatttagaaaaacaaagtgtcttcacaagataaagataagatgctgagctaataatagcatcataatgacaataagagataatacttatggaatgcttagtatgtgccagacactctgttaagcacataaccatgggcatgtcatttaatccttttaacaacgctatggagtatatactgtgatctttccctattttacagcggaaacagctcagagaagttaaatatatttaaacagatatttaaatagcttggcccttcttgaaggttttgggggttttcccccttaaagtgcctgtcatcccatgtgcaattgcccattagccacaaggatttttaaaatttctctgattgtattcagcaacccaagtgtctttgtcaaaaagatacttactccataagaatgtttttctttttctatttgttttggtacctttacttacatccattgtcagattggtgaccagttaactggctgtagttctgaggtggtgctattcagccaaatgtcaatctttaaaggaagtttctgatttcgtttaaatttttaaagatcaattactttatttaaaaagtatgggtatagttccagagtgatataaatatagagattttgcttggcttaaagtgtttttgaagatgcgtaaatcagactggattgaaattgttttgattacctctctgtttctctcctagactgtaaggccacttttctttcctaaacacataggagacacttagtaaaaattagtagaattaatgggttaatgcgtgactgagtatgtgaatgaatgaacttcaatatctcaaagaatctctgccttttgcttgctaatccaatggatgacttataaatgagcaaatttcctgcttgttgatttgcttagtccctaggtttttcttaccacagtactattaagagtaagcttatgggtttcctacacaatgtggtctaatttgcttcattacataatatacttataatcccagccacct

SEQ ID NO: 70075 - DNA, 1050 bp, Homo sapiens
aagagtcaggttctaccaaaggccaccagggttggagtgaccctatcacagtcatttaagctctcagaattggttgaggaattaagggatagggcagacaagtaatgaggttttaattatgtcatctgtagatcactttgagctcctggggaaaaaatttactttaatcagagagcatgctcagcaaggccagaggtcatattctgtggggagagaacttcatatcactcatgcacacacacacacaccctctccctttttattctaaaaggagatgctattttgtctttcttgcattttatcttcagatacacaaactctgtcttgttcaaatcaaatctatccattatattaatacttactcagtttatattaggaaagaggcaagatgaggcatatttgaacagtggaacaatatttggaggaatgtagtttaggttccccattcaaccactcactggcattttggtcatgaacaaataaccaagttgcatcgtgcatagaattttgtacaactgatgatgtaatagtgattgttgaagtaacaggcataaaatacatagcctcagggaattgaggatgctttttaattgtcttttctggcaaatattcactcctcacttgctctcaaaccttgacactccttgggagttgaaagtgagcagttgagaagtatactaacttccatatgccagtggagtacttaattttaaattacagtcaacctttgtggtgggtgacagccttatgtttggacttccttaccccagaatattgctcccacagcaattgttgattatttcaaacattttatcagaaggctgtgtctcaaataaaatatatatgctcaggaaggagaatagagagagacgccctatggtccatttatacgttagagtgaacctagttttaccaggccagattgtgcagatgatggggtagatatgatatcatatgatgatatgatagatatataatacaatagagcacaggttgtgtggatatggcacgaagccctggacttaaagcaaagacaggatggtggcatta

SEQ ID NO: 70076 - DNA, 1099 bp, Homo sapiens
agagagtgaattctctcttactcagcctttttgttcaatgcaggtcatcagtaggttggataagacccacctatattggagagggcaatctgttttacccagcctactgattcctatgttaatctcatccagaagcactctcacacacatccagaatcatgtttgaccaaatatctgggcaccccacggcctagtcaagttgacacataaaattaattattacggcatctgacaaggcacaaggatataatggggaagggtcaatgcttaaatcacagctctgtccctttctggtgtgcacaactctgcacctcagttttctcatctgtaaaatggagatcaaaataatacctcttagagttgttgaatgaatgttctgaagacaaatggaagcattttgcatgcttgctgagctatgcactatgagatgtactgggaatatagctgtgaataaaaacagaccaagtccttcctctcaaggcatttacattccagtgaagagagagagaggggccataaataaatgtataatatgggaggtgtaagaggtaagaggaaaagtacagctgagttgatacaggtaaagcattcagaacagtgcctgtcacacggtaaatgtttaaaaaacattagtagttaatgttagcctcctcatcatcatcgccctctttatcagtgaaatggggatggccccagcttcatgtcagcctcacaaagtaaatgcagatatcaggaatgattttaacagtaattacagatggttttttacatatatatgaatttttttatgatgaatatatgttacttttgtaccaaaaaaaaaaaaaaaaaaaaaaaggaaggtaacttccctaagaaactacgttgatagtaaatgttaacagggctgtgatcgaagaagtggaaaagtgaaaggcaaaaacagagaaaaatggtgacacaaaggttagagggaacattcaaaacaaaatgtgccttcatcggcccagtaaagaggtcatatgaaacgggtttaaagtgttaagcccgtcccactaccaaaatctcaaaaggttatgtagtattttaatagaaaaaccatgatttgccctttattact

SEQ ID NO: 70077 - DNA, 1039 bp, Homo sapiens
tctttagcctgtctgtgaattttctgctgcattatttgacccatctaaatgtatgagtatcagtgcttttactttttagcaatgtacatattttcatataatattaatgttatttttgcatcaaacattttatctacattaccttttttagtcattttttatcattatacaaagtatgtgtagagggaaacatcacactgtaccccataaatgtgtacaatttttttgtgtcaattacaaataaaaatattttttaaatccccaaaaaagaaaaaaaatgccgctctgtatgataactcctgaaacaaaagtattaacactacagtgaacagaagctgattatttctgtgatgtttcttagctttatttcctccctttgcatatgtgttctccatttttccctttgttttacttagtccctgcatctcgtttgccctgtcatttggttacttggcagtccctagccagcagggtgcagagtcccagacagtgtcttttgttcaaagcatttgtttggattataaatataatttgatgataaattcaaactgttatgctgatttcatttcagtggagtcacaacgtatctcaaatttcctttgataaacttgccctaaagaccgtatctcatgctatttaattgttcaccttggtctatttgctcattctaaagagttttgtggccaggtgtggtggctcatgcctgtaatcccagcactttgggaggctgtggtgggggcggatcacctgaggtcaggagttaagaccagcctggtcaacatggtgaaaccccatctctactaaaaacacaaaaattagcccagcatggtggcgaatgcctgttatcccagctactctgggggctgaggcaggagaatcgtttgaacccgggaggcggaggttgcagtgagccgagctcatgacattacacttcagcttgggttacagagcgagactccatctaaatgaaataaataaataaataagactgggtgcgatggctcacgcctataatcccaacactttgggaggccaaggc

SEQ ID NO: 70078 - DNA, 1065 bp, Homo sapiens
gagttaggaaatattgtcactaacatactgtttttcatctcccttccctgccaaaccaccacatcatttcttttctgagaggccataaattccaacactaaccatatttcacaaatgacttagaactatttgtcatcccattagtccaatcccaggtatttattgctggtgctattttggaagccgaggatagaaaagaacaatgccagatgcattgtagatgtttaataaatatttgttaagtgaataaatggatggacaagcttactataaaatgggttcttatccttcatttgattctcacctattttactcatactgtatatgagacagttttaagaatctgaaggtacataaacatgactggtaccctggctcttcttacaggacagtccacaatctgggtggtacacagagatctgtgacatatagctaaagtgctatgtgctgaagactctgaatgaagagctgtcttgaaagacaatacttgtcttggcaatcagaagaataagatccctctggctgagaagccagggaacacttagccataggtgagatttaagcttgccatggagaatgggtcaaatgtcaaaaggaggaggtgctgggggacagcagctcagggacttgcttgggagaagctgcagaggcaggaacatataaattctggggagggagccgtgagtgactgactcagagtggtacacaaattgctgcttggatgggtgttgggaccagtctgatagcattgaactccatggtagagggaatcatgtcaagtttaagaaaaggtcaaagagaatggtaacagggaaaaggccttataactgtcatcgtggattctttttcttattgtccattccctcttcctccgtactaaatgaagtcaccccaagccatcctgcatatctccaccatgttattactaagacactgctttgaccatactgtctgcaacactgtggattcaccaacacctatagaatacattatgcccttcttagtgggggtttcaagactctttggcccatgccaacttatctaatcttatccttcagcttgtta

SEQ ID NO: 70079 - DNA, 1032 bp, Homo sapiens
acatttatattttttgtttcaagcaagctttaactcactgaagggagggccttgatccaaaagaataccaagagaaatgaagagaatttctaggatgggtataaaaatgagtcctgggatagagcaccccaaagaaaatggcagagctcaggatggctctcagtggagaaaccactcgttttctctgatgcactgagcattttggcatccatgatttgaaaggataacttcagcgtccactgttcattcagtgaactttttctgataatttgctgtgtttcaggcaccatgctagtccctggagctataaagattattaagttatcactgacttcaagttgcttccaccgtaggtggaaatataaacctctaaacagtgaggcatgtgcttgtgagaaattgatttgagatcatgctccttagaccacactcagtgtcaggtccaccctcatgggtcattaaatcagagtcaggggtgggccgcaggaaaacaggttttctgagacacagctgaaggcagagactttgttctgagagtcctgagcaacaatgatgttttcttccttggattaagttatatcattgctgaaaatgaattttgttcaaaaacaagagagcctagcatttgtaaacattaccttaaatgcaggtacataaattattagtgtgaattcttctggaatggtgatgtgacattccctaccctcacccccccccaaaaaaaaaagtcgtggggcagcaaacattgtttttttcaaatctggtaatgcctacccaacacagacaggggatagggttattagcattgcacccatgttagggtacaaggagcaagagaaggccatggcaggatgctctgcctgtgctctcgccttctgtggcctgtgctagctgtgagtttctgtacccttggctaattaattacggagttgacccaatctctctctgtgtgtgtgtgtgtgtgtgtgtgtgtgtgtgtgtgtgtgggcggcgggggggggctctttctgctaatttttagtacatctgaaa

SEQ ID NO: 70080 - DNA, 1049 bp, Homo sapiens
tatgaattgtatatttgtgctttaagaagcagaggacactctgtgtttagatttggttttgtttgtatatgtcatgattaagttctcctggcacgattttcttctaaagcatggtgctaaccttgaggaagcgtagtgaaatctagggagggctggaaagtcaataccgagctcctagggagggatcttcagagtgtggtgctcctgatcgtagaaaagtctggaaacactgcccctcccctacctgctgaccccccagtctcttcttccttcccttctcagacttctgcacccttccaaccccacccctgtttgttttaatgggcgagtatttgttgttccatctgttgcctgtttagactctggaaaccagttaaaccagtttgggtgatttttttctttcagcaggcattggctgtagttgagaaacaatcttaaagtataagtagattgctatgtctaataatagtaacaaaacaacagcaacagctaacacttgaaaggctttctctgtgccaggctttgttctgagttgtatattttactgtgcactaataatttctccgtttttacaaatgaggaaactgaggggaggcatgagaatacaggcaaaggggactgtataaatgttaatgtttctctttgtctttatgaaatttaaaaggaaaaaaataaatacaagccaagttcctgtcttaagtgcttcatagtctgtaactttatcttttattcacactagaccctgccagaagttagaaaaagtaaaagagaatgtggaagggagtgggaaatgagaggactgagttgtgtgagtaactcaggtcaaaaaagagattgcgcctcttagacctaaattcttgcctcccacaattctggaaccttccttaaccataaagtttctatcaccttatctcctggtttccaccaaagaactcatcatcctcagggaatgaccacatggagaaaggttatcatgacctaagaaccatgtctgacacagttaggatgaaaaggccaattacacctagaaggaaaaaaaaaaaacaacg

SEQ ID NO: 70081 - DNA, 1088 bp, Homo sapiens
tcccattaactatatgtaggagataaaatgcatttaggtgtgaaaaataattcacttcataattctcgagtgaaatttaagagtagctgaaaaaaaatgtttgaaccaagaacaagttaagcctgggttatttttttccttcaaaatggcttatatgttggggggtgtggcgaggggaaggagtggtccgttgtttttaataattaagtagctttccaaagaaaatgattgaaatctaatcctcagactgctggaagctttcacatttctctgggaagaagagtcttctaagcttgtgtgttattgatctattaatgatgatactgattaaaaaataaaacctcattcatcagttgagacacactcaggactattagctgaaaaaacgatggatgtggtagtgtggttatactgtgaatcatagttcttgcaaagcacgctcttggttcattattcaaaatgtatcttttataggtttttaattttttatctcatactattaactatggatggatggagcaaaataattttaagcattttacatatcattttctaaatctagggaataatttgttaggatattgttacaaaaatagcagaatttcaaagttataacacatttcatttctaaggaattctcattggcatcattattgaatcacttgaaagtgattacctatgttattaaatttacatttatagatattaatttaataatgtacatatttatagaatttattaaatttatttaaatattcagtattttgtatttggctttaggcatatgaggcagacagaattgtaagccataatacctacctttcttctaggatctttcaaagtatttgccaggaaaaaagacttacgtttttaaaggtggtacattatagtgcttgggagctagtacattatagttcctgggatctcaggactgggattaaaacaaacttggacctgagtgccacacccaccccatactaatagcgtgaccttgggcaagtcacttttctatatgctcagtcttttctgtaaaataaggataacaatagaagctacctcataaagtcgttgtgaaaattgtgagttaa

SEQ ID NO: 70082 - DNA, 1387 bp, Homo sapiens
accacatacactctgctgattcctttcagtttacttactttaaatttttttcctgcaggtcatagagctgaatatatgactacaaggtaggaaaatattttatcataacttatagcgtattttactttctctttaacaagaagcaaccatttcaatgctgaaagaattaacattttgttaatgaatacgggagatagttttggcttgacaaagcatagcaacatgaaatgtttgggcttcttacaagactaggtatgttctagcttatttttgtttccctctggaattgtaaagctctttaataggcagagacagtaacaaaaacctaagttaaaccggcttggtttatctaatccagaatactttaactgtttctaaatagcgtgacaggacttttgatttgatagtttaattaaaaaaaaaatacgacgtgtacatctactgcataagtaagtagaaagtacaattattttctgttcctattttcctttagtcatataaacattagagctggccgggtgcagtggctcagcctgtaatcccagcactttgggagactgaggcgggtggatcacctgaggtcaggagctcacgaccagcctggccaatgtggtgaaaccctgtctctactaaaaataccaaaaaattagccgggcgtggtggtgtgcgcctgtaatcccagctactcaggaggctggggcaggaaaatcacttgaacccggcaggcggaggttgcagtgagccaagattgcgccaccacactccagcctgggcaagagcgagactccatctcaaaaaataaaaataaaaaataaaaataaaaatttgagctatattgaatatctttaggattttagctgtctatatattctccattttgattcactttaaacatttaacttttaacacatactcccatattgtactttcttcattcaggggaggattgtgaagctactacaagaaaggaaagccatttgggcagcagattctgatttgggttcgggaaagtttgtggcaacttttatttttctatgtcaccatttgtgcaacagacagaaattatctaattagcatagcaagatgttgcatttttgaaattgagttctctttgaaataagacgcatttagaacactggtatatctgctgcagtaattggcaagttgactttcaaggatctataatgttattgctgggcagcttattcataaggaagcccctcgtacttcatggtaaaccaactagaaagatacagctcctgacttttccaaacctaacaaaagaaaaaaacactgaggtttttcttcactgtgtcagtgaaaaagaagactattacctcgacctggtaatatgcagcttatagagatgtttttcacctatagcatc

SEQ ID NO: 70083 - DNA, 2011 bp, Homo sapiens
atgctttggtatattggggactttctgaccccagaagtactgcccctcccgggattagccaattcctagcagtagtagtaagaactggcttgccaagtgtgccttttgtatgcaagccaggtgatccagacgacctacctccaaccacctccttcatggttctgacactcacggccactattccccttccctaatcaccccaaggccaggtataggacaacttagggatagtccctatgccccaaagcccactggaatcattccaactagcctattctaaacctgcttgcccagcttctcccattccctccagtgggaaccacaataaagactcctgcccacattttcctttgtgccttctgcctcctgacccaccccggtgcttccttctgtggcctccctggtggtggggcacatccccaactctttaacaaactatcttttcagtggtagttgtctcctgaacgttggcctccccgtacctgaataaaaatgaaatccacactttaaaacacttttaaaatagtgaaaggagtggatgaaatcaagtatgtagggttaaatgctttggtggttggttgttttgttctttttactcctatcagattatttcctccatgaatggccagaactcagtgtataaaagagatctcagaaatttcatccgtggcaggagatgacatgttgcctggtagaagtttccatattctctcctagacacttgcaaaggcttcttttaacctcgccagcactgtagaacttcaggtgctgcttgctgtgcaccttgttcatcatatgagcccatctgctgggagggtcttagaatttagctgtggaaggctgtaccagtaggtttgtttccatacatgatagtgtctaaggaagctagtcaggcttccacgtaacttcttgggatctggtatatgaaccagactttctgaacttaagctaaatgaactaaaaaagataaattttcctagagtctgaagcttaatgaagggctttacacaatttcctggtgtggtgtgtatcctcctataagtcttgcagttaaaaaggagttttacattaaaacatccagagacaggtctcagggctctccttccatgtatttcattcagcacagtagtagaagttgagtcaggtaattctggccttctttccactaaagggagagagcagaagaggttccctctctgcagtcacagggcaagatgtcacagtttctaaatatactacatgctgcactagatgtgcatatgtcagagagaatggtttattcaccagagcaaatgggcagactggagaggaagagagtctgcagtggcataaacaagtacatcctcagatatttaggtggtggaatagtttgttctaaagaaataataactcatgcgagcctgtatgtcccccaaattagaaaaagcagtgaacccaaattatttttctcacttgtgacctattaatagttacttttgcatgaaataaaattccattactgctggaggggtatcgaacagatgtgatgttacttgcattggtttgctgggctgagtgaggtggctcacgcctataattccagcactttgggaggccaaggtggaaggatcttttgagcccaggagttcaagaccagcctggaaaacacagggggactccgtctctataaaaaatttaaaaattagctgggcatgatggcatgcgcctgtagtcctagctacttgggctgaggtgggaggatcccttgagcccagaagaaggtggaggctgcagtgagccatgatcattccactacactccagcctgggtaacagagcaagactctgacttaaaaaaaaaaattatgtgtacctaaaaatgttatatttaattcctcatttggggatctaccggagccctaatctttatgaccggttgtatcttactgtgtgacttgtaaaccaaataacaagaatgctggtttgtaacatttggccaaatagctaacgagtctacttggtagtgcttattt

SEQ ID NO: 70084 - DNA, 1350 bp, Homo sapiens
tcaaggtactggcaccagccatctgggtggctgatctccatgcttcttactataatggtctcagcctcttgtaagaggaggaaggtcattatgtccaagtctgtcctggggctctttgctttcccagaaaatcaatataatatttcctgaagtcagagaggaaagaatatttgggtcgagtgccttcagaagagagaataaatgtgagtattattatgtgggcataaaagaaagccctctttctttatttttttaaaaagagccataatttgtacagaaagttaaaaagcaacctgataaaaatgttgtatttttactcatgcaaatgagatggcacaaaatattctttaaagtctgcttgttaggatagctctgaaacacagcaggagttttgatttcccatgacttgaggaattcattatattgaatgaattgtaagactatgatctataccttgtacctctgctgtgtttactcttcgtcttctttttcatcctgtatttctgataatgcttctagccgaggacgaagaaactcgcacacaagacatcaggtatagtgctagagggacgtgagggtgctctttcactgttggtatcattttcaagtcgtgctcatgcttggctttaattagattgttaaggtttttaaaagaaaaatgtttgcatttggaaatcagacaagtttataaataggttttacttagaaactgtagcaatcaaacactagaggaaaaatgggcacattaaactattagtttttacattatgtgtttggcaaatgtatcaagtttgatcaagggctttattagggaaagtcaatgttaaataccaaatacacatttaatactggattatggaccctagtgtgaattttacaaaaaagaaaagggcttgctttctcctttgtagttcacattttatggcatgggctgcggtgtttctgcaaactaagtttatctgagaaaccatgtcattaataacctcccttaatgatatattacagacgtcttactttcttaggtctgtttattgaatatgtgtactaataattaaataaatgtgcatgtggcatgtataaggacatacatacatatatacatacatacatacatacatacatacatacatatgtacatagattaaaaacctctggcagccttaaaaatcagccctactctggaattaagtggaaagccactgaagaacctaaatagcagttacagatctactgccttaagccttaaatccagaagaaccttattggctctaatttaatataaaattattgtcaaatttgattacctattttcccagcccctggcttataagcagggacaaattatatgga

SEQ ID NO: 70085 - DNA, 1041 bp, Homo sapiens
ttcacttataggagctcttcacagcccagatggcacattgaagaatctttggtaatagaaacaatacagagggctcctttccacttctaaaaagggcttgatcacttgcaatctccacaatgtcactgtgaagacagcaagagcaaaaccattttttctcttttttctcttgggaaaaccgacaccaagggattagtttgaatgatagatggaatgcacccccattgttcttataaaatattttcttatgttttctacccatgcatctgaaatctgtaaaattaaattaaattaaatcacatatactcattactttttgactacaaaattaattatatctgaatgaaatactgatcatagcttttttaaaaagcaattagtaaatgtaaacacaaaaacattttttaaaaatatgaaaaccgaagacattttttattgagaactttcttagtgcaaacattttccttttcataaccttgtattctttgcttttctttttaatactaaattcagcagagatgtaaactaatgatctctttttatcacttacatttaaaaatatgttgctttcagattagtgttccatgaattgttcgtatagtttacttcccctaaaacacttatatcttaaagaaaaatcctttcacatattcagtaagttatgatgtaattacattgctgttcctgagccaactagtccacactaaaatgcgtttttattcttaagactcttctttaagaaattaataaaatttgtgctcctaaaacaaattaactaattagaaaaacttaatacagtctccagaagtaattgagccattaactggtttatacactgattagattgtgttaaaacctaaaataagacaattccttaagaagtataatacccattccaggaatagtaaagcgtttaaattgctgaactgcattattcttaatccttcccccactgcttaattggaaaggttaatggattctgaattgttctaatatattaagacaaccaactttttcttgcatttcaaaataaaattcctc

SEQ ID NO: 70086 - DNA, 1011 bp, Homo sapiens
accaattattttaattttagtaccatataatctttcataaagcataattaaaagatacatgtatatatagcaacgtgtatgttcatagaaatatatttttgttcagagaaaaagaagcactgttaatgtaatgagttttttttttttttttaggtgaaaatcctttggctgatgaccagagtaaccatgatattaactcagttgctggcgttctgaagctctatttccgtgggctggaaaaccccctctttcctaaggaaagatttaacgatctgatttcttgtatcagtaagtggacatttttttcatcttttcccacaagaattatttcactagctaacttcctggaaaaggcagtggcccccctccatacacccccacccccattaccccattaccaccatatttctgggaccatttgttttctttctggatccagtgcgagtcatcctcccagctgtggcctcaccctcggctgagtgggctttcctcctgaacatcctctggctccagaaagccaggagcttcccactcatggctggaattgagcagaaagccaggtgccagctgcctaagggaaaggaggaagttgtaagctgggaaatgtgaccttttcttggcttttgattcttggtttttctcaaccaattttaggagtggggtaatttatccatctttcaatgttatttcaagaaatggataaaatgaaatcaaagatccttattacagtgcaggaacaccaggtggtaattatctgtcagtgggcaacccaagctaataggcagagttgctctgggattgtgtatgacatattatgaaaccgataatcattggcaaagtaaagcattgctgtttacttcagtgggggctttttgacactatacaaaggaaggtgaaaataatgataccatgaattaattattagccacaatcaagatccatgcatctaaaaatacagtgtcccttttaagtccgagttcccagcaagagtctagagctgacttcaatcac

SEQ ID NO: 70087 - DNA, 1036 bp, Homo sapiens
acagtgctcaagtgcaagtgaagaagctacaatgacattccctcctgtattaaaacaatggattaatcaaaatcaatggattcataatccttggattttaataggattgttaatgttttcattagtgcagtagttacaaagtttcataaatgttgagtagtctgccccaatcctatttttccccataagtcttgttacttttagtgcaaagttttacagaatggcaggtgtttcaaaaacatacatattgacactaacaacctctttatagaacaaccccttttcctccaacatgtaacctcttaagaaagagaggattcttggatgttattatctctaagcaagcatttttttcttaccaatgtgaccataatgcatttttcctggattttcctgcatttttcctggattttcaataaatcctttgagtagcataatacatcttttatcattgtatccccttatcaatattgcagacttttgacgatttgaaccaagttgattaatagtctacaatgtataaaactgtctagggattcagagacttgattcttgcatttaagaggcttaaaatgtagtaggaaaggtaagatatttacaaataaatgcaggctaagttaatatatgatagaaacaaagattttgaaattttagaggaaagagagatctgagtgatagattgtttttacccctgtcatcttgtagcattgctgtaattgggtttgattttccccattaaagtaatttcacatgacagttattttgtatagaaaaacttcccttttcatcttttctaagagtttgcataaggcactgtagcacccactacttttcgcttccgtatttttggattgtttggggaaaggggtgtgtgtgtgtgtgtgtgtgtgtgtgtgtgtgtgtgtgtgtgatgagtagttatccagccatgtttatgctttatgaccctgagtgaccacgttctttggaagcttacaaatatatgtagtcaaaggaaatttatcttagcattctttttttaaaaatatgcactatt

SEQ ID NO: 70088 - DNA, 1390 bp, Homo sapiens
ctgggctcaagcaattctcttaccttagcctcgaccttaactttaaaatgaggatttgctgggagaatgaggaaacttcacttttgaaacacccaagattctcaataaacagcgggagaagttttattgttgtcttaagaataaatcataatatgtataatttcgcttttgaagagttttttctttttcatttttagagatagactttctagatacaggtatgctaaatcatctttgtcttctttaaagcagcaacaacattacactttttataaaatcagctattttaggtaataagcattcaaccagttaatttctgatatgagataataatgcagctgtgttgaaatagtatttaaagatacagaattcccattaaattctcaatgacttgcaaattacttcatgtttaggcatttcatcttccctctctgtacaatgtggttttgcacatatcacatgaagttgtcatggagataaacagcttactctgggacatgtcttgatcctaccaggaccaaactgggtggaaatgttgataacttaattattgagttattgtggcctgagagaatttatacacctgttgaataacttcttttttaagcatcttattccctcttttcagggaaaaataaatcaagaccattgcctgggaagtatgttaacaaagtgcttgtatgcaatagacgtaaccctaatctgccttgttcatagcgttatattttctccattttgaaatattttacaaataaaaaaggcaaaatgtagtatattcaattcagtattactaagatcacactattataaattatagatttatattgaaagaataaaaatgaaagaatgagaatgttaattgcatgataatgttttacttacattctggttcaagagtttctgaaattgcatttgctaaaagatgacagagctacggttccaactttggcatacttaaaggtgggaatggaagtggttttttctcaggaatcctgataaattattgcttgttttgtcagctcattcttggttaatcaagaatattcctaatagatttttcgtaccttttcagctatgcaaaagggaaaatagaatgcccagtttgataataagtggaaaacagctggggtcagcactcaagattccagggaaataagcttagcaagagtaattaagacagtggttctcaaccctggctgcataaaagaatctcaggcatcagcatttttaatctccccaagtgaatccaagtcaaggttgagaaccactgatacaagaggaatcggaaagggaaactgagttaggagagtattttgatagtctaagttagaaataatcaagacttcagttagaaaattagcagtgagatatctagaagtagaaactacag

SEQ ID NO: 70089 - DNA, 1093 bp, Homo sapiens
catgcatcatatgaaggcaggaattgtattgctaatgtattcttagtgcttgaaacctggtgggctctcctaatattgatggtataatgtaatacaaggtgaaaagtcatataagtaaaatgcagtggtaattttgagaaaggagagattctaaacctggcacattgcctggatcataattatagacaaatatatgatgaattaatgcataacagttcggggagaggtgccatgccccagaaagctactttggttagcatgcagcaagaagttgaaatcatatcagatgcaaaatttagaattagcagcaaaggaaaaaatggtttttaaatctagaagactctaaattactcaaagccaagtccatgaaaatcggagaaaacggtaagggtcagaggagatgccctctggaatggtggtatacccaagccgatcatttattcgctgttttggttacaattggatctcacacaagagcagggtgttgcttatattcagatgtgtaccggtaatacatgtactgcagtgttctgttttaaatgtggcaagtgaaaggactctgaccatgtcatcttctgtctgtaggaatagataatctctatgagagggcgcttcacatccgcaaactcctcctgactttgcccaggtcggtccttatagtgatgaggtacctctttgccttcctcaatcagtaagtacctgaatgctctgacaaaaggcccatctgaattctgtctttgttcttcgatcctgtaaaatgtacgttgggttccatttatcagcagagtcaaagagaaaaatgattgaatatacattgaaaaatgtactgaaggtacatttttcctcagcagatcaacatcattgatagatgaaagccctaccccagatgtaaaaactgtggccacaaatgcaaagatatttaaatattactaaaaaaaaaccacaacttttcagtgagaagtgttattcagtgtttttcagactttcatccaaaactgtcatgaatgtttttgtcaaaatgatgtaaactggctgttcattgcggaaaatttctgcgactttttaatattgtagttgaggatggaagaaaatc

SEQ ID NO: 70090 - DNA, 2061 bp, Homo sapiens
aaaatgttgctctttttttatttttattttttttctttttctttagagacagggccttcctgtgttgcccagggttgtttcaaactcctggcctcaagcagtcctcctgcctcagcctcccaaaatgctgggattgcaggcgtgagccaccatgcccagcctgtgatgttgcttttgaaagtctctgagtcctgcctctgccaccatcctttcttttgggtttctttgtttctcacatggtttatttctttttcactgctgccttctcttaggtgtttccctgctttccccagtagccagaaaagccaggacaaagcccagccatctctcttcccaaacatgaatctcaccatcatgccatctgccttttacctcttgactataagagagctttgctgagtgctctgtgttttagataacattttgaccatgttcacctgattttttggaaagaaaaacattgcttacaaaggacagatattctcacccgcagccaacctccaaaatcctataactaaattaactagagtatcaattatcctttgattgccgaggtattgtattttttctctgtcatggatcactagagagagtagcttttgtttctgaaagacaggctatcacagaacaaaaccattctctgcaaggacagtgggtaacagatctaggaggaaaaatgtcagcaacagcaaggttccaaagagaaagtgtgatcacattttatataacattacaagaaatggaaatataagatttgacagcaccaggcagtcagggaatcagctgtgttgaattgtcttcccttttgcacaaaattatattacccatgcaggaaaactaagtgatcatgttgcactctcactattattgttattgatagcagcagtagcagcattctatgaagtctctgcaggaccttgaagtactgtgaggctttctatatgaaagaggcacagtgtaccatgccctgagattgatttgctctgcaatgaccagactaagatgtgtgtaaatagcttattgattgacacttgactgtgaaatggctctcacaggagtagaaagagtaaaaataatgaaattgctgagaattactagttgatgtactaggattgccaataaaatgttctgctgatttatctggtcatcctgtcataacctgaccacatttgaataaataagcagagtctgataatcctgttgcttgtttcaaaaaaataataaggccaggcccagtggcttacacgtgtaatctcagcactttgggaggccgaggtggacggatcacaaggtcaagagatcgagaccatcctggccaacatggtgaaaccccattgctactaaaaatacaaaaattattggggcatggtggcacgtgcctgcagtcccggctactcgagaggctgaggcatgagaatcgcttgaacccgggaggcagaggttgtggtgagccaagatcacgccactgcactccagcctgggaacagaacaagagtctgtctcaaaataaaataaaataataataagaggagatgatcatagaggtcgtgattgtgcaattataataaaatatgtatatatctgttgaatagttttaactatgttgaatggccagcattgacagtgtgtgattgaatgtcattaaagaatattaatggttctgtctttatttctgtaacataagtatatgtagactgtatactgtatcatgtgttggtatcttttaatttttgtaagtaaagccaaatacaaatatgtgggtgtgttcacacaggaatttgcaaattacatgtcctgaagttcttgtaaataaattagcatgccacgtctgtagtcctagctacttaggaagttaaggtgggaggatcacttgagcccaggagtttggggttacagtgagcaatgattgtgctactatatccggcatgggtgacaaaatgagaccctgtctcaaaaaaacaaaaactagcatgtcttcattcttccatggggtgtttatttctttttcataggaataactggggtacatatttgggtatctgtcatctcaagtcaaccagg

SEQ ID NO: 70091 - DNA, 1026 bp, Homo sapiens
ctcactgtgttgttcagactggtctccaactcctgggccacacagtgatcctcctgccttggcctcccaaagtgctgggattacaggcgagagccactgcacccagccactaaaagatttaaactgttgttttaaacattatccttacaactactttgttgggaagcctactgtgcagattatagtgttgtggttctgcaatacaaaatattattcgcctcaaacattatccactagagaccaggcacctataatcccagcactttgggaggccatggctggaggattgctatgttgcccagcagtttgagaccagccttggcaatgtagcaagaccctgtcactgtttaaaagaaaaaaaaaattatccaaagcaaaaagaaggggcatttttctttgtctttatttaaaatgtttggctgaaatttggccagggcctttatataataaggtgaagcctaagctttttaatatgtttgttggtttttatgctttcgccttctatgtcccagagaattttgaatatatcaaatgagaaagaagcccagctgtctgtccaagaatttctcatgcaatgattataagtacaatggctattgcagtaaacttttggaagaataaactcttttaaatgggaaggtttgctaccaaatagaagacaacttcccggggaatttttgagataggcaggttttaatctcttctgtgtacacgtattctagagtatttggaaatgaatgcatgcccagtttttagcaaatgatgtattgttcattgcataggcatattcctgtaagtatatgccccttgccttggcccctttttgtcctgtttattattgaagagaagtttactcacctttgttgattacaaggctaaggatgaggtatttgtgggagaggggagcaaagatcataaggcctcaaattgaggagcttcttgcagtaagataaatcacaaagaaacacctctttggttgctgagtctgtcctcctgtttgccttcaatatttgtggtcagaattag

SEQ ID NO: 70092 - DNA, 1023 bp, Homo sapiens
tataaaggtgtttttggttttattttttgctgatttcctttggaatcccttggttacagcagcagttatttataattggttcctggtcttaataattcacaatgtggtgcttattatttataacatatagtgtcaaccttgtcaagagtgctaagattttctttattctcctgggatcccagtagtctgttttcttgcatagagggaatatatgtgtatgtattcaattttctggtatgatctaaaagattagattcaaaggaaaatacaactctaaagcagaaacaaaaaatcatgacacagcaggaataaaaatagtgtttcataatttgtgtgctcttttgctttgaatacatctatgtgaaaggtaggctttttagttccagttggtgttatttgctaggttaattatgctctgaagtaaatctgaatcctcattgaattggggtgggtgagaattggtacatgggtaagcaaattgtacacaggtccattgctacagtaatgaattctatcaggtattcatttagcttattccttagggaaattatgaatcaaagtatttatgattatcataaagtatttatgataatcataaagtatttatgattatcataaagtatttatatctcaatcatagacagagaatatggtagatgaaaacttactgagctcaatgggtttggattctttgcttttgcatgttggtaggtgtttggtacttacggtttctccttcttacttgtcatgtgcttatgttgtttgcctaccagggggccagtctttcttcagcaggaaggattccatccgcaccatctatacttcattgcataatgagctgaagaaggtggtgactggccgtggtgccctgggtgggactgctcctcacgtggaagaactcctttcccacctgtcagagcagctctgcttctttgttcaggctcggatggagatggcagacttctatgagaagatgtacaccctcagcacacagaagttcatcaatgctgaagagctcgttgg

SEQ ID NO: 70093 - DNA, 1079 bp, Homo sapiens
aattctagtgacaaaagtattcctggaagaatgagcagaacacaggcatagctgtatagaatgtcacttcctcttttatcatagagaaagaagcttggacttcaacaaaattaagtgcatggtgccactctgtttcaggcatctgtgggctaatttgtgtagtcccatagagtctctatgaaagataaattgtctacgagcagttatggctctcccacaaccatttaaaaacttgtctttactatattttatgccataaactaatttaattccacaaatacttaactttggcatcaccgtgaggtgttgaatttggacttctaagaacataggaactggactctccattcaacttattatgacttgagggaggatcagagaaaaatctacttccaaagaaagagttcctaagccagattcgcctgtgttgggcagtggagataattactaggacattttattccaggttctgacagagccaaatgaccagctatttgacttcaagcaagtcaggccccctttccaggccacatctgtttcttcctgggcttcctctgctaggtggaagggtgggactagatgttctccaagttctcttccagctcttacattctctgcctgtgacaagacatttaacactctgaaatggagtagtgtgtttctctgctatctcggctcagtggatgattttgcactaacttcaagtaatcctcctttctttttacccaaagtttccctttcagctgtcaccagccatcaccccataaagtgtccaagtcttttccttcattacccaatgaggagtccacattttctaccctcaattttgggggcagagagagaggagcaaaatggtgtttttgagtgtcctggctgttagatgggggattattttcaagagacggtcaatcaaaggaatatgaaaagattcttggaacataggcaagtattacctcaaaccggacaaagaatgtactgatgaacccgcaggatgacaacgagaggatcaactcagctctgccttagcttctccgcagtgccctggatctgggctagtagtcatgcaggctctagtgagg

SEQ ID NO: 70094 - DNA, 1052 bp, Homo sapiens
aataaagaaatggctcttttgcccaatggcataaagatctttgcacacttataataaatcaaatttattttttaaaattttaaacttctcatagagaggtattgatggaacattcaattaaaatctttgtttataggactcagagatagccagatattaaacaaataaaaaaatgtttctcgtgaatatcaagttgactcttgattaacattttatactcttattaacattgcgtacattgtttgtttctattcaaccaatttcagaacttcatgaaaaagttgaatggtaggttgagtgatggggtaacacaatgggagccttttctgcaaggctggcatgtgaataaagtacctgcaaatcataaaaagaaacaaaatagagagttttaaaaacaagaattttcacattggtcacttgagtacattcacactcactggctagggttgttgggtgtgggaatctaagctacaagacttggtcagcattttcagatctccaatctcccccatttgtgacctagaaaatctctgacatgtggactgtccctccaatctcccccatttgtgacctagaaaatctctgacatgtggactgtcctcaccacagtatgagcagaggctcctgcttcttggtttatcaggcaatgcgcagtgaggtgttgaaatgaaagggtcaagctgtggtgactactagggccaagtcaagagggaagagtagaactcatcccccacggcctcagtaaaagcctaggaaaggccagaggaagaggcaaaaatgagaaagacttcaaccatccccttggatgacttaaaagaatggttctcaaccctgatgcacattggaatcacctggagagctttatctttaaaatctcacagccctggtaccacgccagacaaatggaaacagaatttctacgtgtgacacctggttatcagtatttttttaataggttgagtatctcttatccaaaatgattgcaatcagatgtgtttcggatttcagattttttcagattttggagtatctgcattatacttaatggttga

SEQ ID NO: 70095 - DNA, 1051 bp, Homo sapiens
tcttctgcctcagcctcctgggtagctgggattacaggcgcaggccaccatgcccagctaatttttgtatttttagtagagacggcgtttcaccgtgttggtcaggctggtctcgaactcctgacctcgtgatccgcccacctcggcctcccaaaatgctgggattacaggcgtgagccaccgtgcccagccagcaattttttttagatggagtttcgctctcgttgaccaggctggagtgcggtggcgccatctcagctcactgcaacctccgcctcccgggttcaagcgattctcctgcctcagcctcccgaatagctgggattgcaggcatgtgccaccacacccggctaatttttgtatttttagtagagacggggtttctccatgttggtcaggctggtctcgaactcccgacctcagttgatctgcgcccccctcccctcggccttccttagtgctgggattataggcgtgagccaccctgcctggccagcatttttttaaaaagccatagcaaattcaaggaagcttttattggacttctcaatcagggattcttagaaactccgaaatcgttttttctctctgtgggcatttttcaggggaatggacatcagattttcttaacatttagggggcgaagggaaccagtgcctttctttgtgtttttctgtcttttaaaaatgctgatctggtataagaatgccccaagtcgtttccattccacatgttcctacctctgactataaacaacgtattgagggctcactatgtgccagccatgctctgcataccttatctctttgaagcctttacaactttatgaggcatatggtctttttcccatgtcatagaaagggttctctcaggttttgtaagttgtccaagtggccccaattaaaaaatgacaagatggggatacaaacccaggtctttgaaatccaaaacctatgctctactatgtcctagggacatagtgatggatagtcaagacagtccttgccctttaagattgtgagaaatggccgggtggctcacacctgtaatc

SEQ ID NO: 70096 - DNA, 1051 bp, Homo sapiens
cactccaccctgggcaacagagtgagactgtctcaaaaaaaaaaaaaaaagattaatgagagaaaactagtaagctggcagtgacagcatagcagtgcttaggatggggcatgtaatccaatttgggagagttggacaatagaggtcaaagaagtgttcttgaaagagatggcttctaagttgaatttcaaaggacagcaggggttaacctactaacaagaagaaagagcagtgtgcaaagatgaaaggtagaataccactggagaactgccatatggttcactagcactggccttgctgacctggtgtgcagaatagtgaggagttattcaaaagtgtttggatcgtaatctgagggcagtagggagttacactgccttgaagtctgcaagtacgttatgaaccataagagaaagggctgagctgtcttcaaagctctcagtccatatcctgagttatttgattcaggcaggctcagaggaaaacagaaaagcctattgtaggtatcctgtaacctggacctgagcctggttttgctattcccaaaaggcctttctcccctacccctgctattcccaaaaggcttttctcccctacccccaatccaattagttttttggcgtctttggttaacggtaattgaaacaaaaagccccacagcctttttttgttttttttgagacagagtctcgttctgtcacccaggctggagtgcagtggcgtgatcccagctcactgcaacctccacctcctgggttcaagcgattctcctgcctcagcctcccaagtagctgggattacaggtgtgtgccaccatgctccactaatttttttgtatttttagtaggggattttaccatgttggccaggctggtcttgaactcctgacctcaagtgatccacctgcctcggcctcccaaagtgctgggattacaggcatgagccagcacgcctggccccccacagcgtttaatggaagtagtaagacttggtctccctaccttataggtcttgagagaataatatcatttttcacatcatttagagtttg

SEQ ID NO: 70097 - DNA, 1048 bp, Homo sapiens
cgggcggatcacgaggtcaggagatcaagaccatcctggctaacacggtgaaaccctgactctactaaaaatacaaaaaattagcccagcgcggtggcgggcgcctgtagtcccagctactcgggagggtgaggcaggagaatggcgtgaacctgggacacggagcttgcagtgagctgatacggtgccactgcactccagcctgggcaacagagtgagactccgtctcaaaaaaaaaaatcagatttttaggaattacacattagtggagtagttagcagagcccatttttctgagaattaggctctaacttttagttgtaatttagataagttccaaaataagtttttaaacatttaagcttctttgcatgattttatccatttacgttattcaggataagcatctatttgtttatcaagtaatgttttctttcaactttgttttttgtggcagatgtttataaattcttctgtgggatcagagggcacgcctattacaaccagaaaactacaagtataacagcgaggatggatgaacaggctctattagggctaaatccaaatgctgattcagactttagacaaagggtaagttactctgctgaatcattttttaatcatgtcaccacagattggcattagaggacttgaataaaaatgcacctggcaaaagtttactttgggtagaaatgaacagaaacaaaaaaatttgaggtatttgaatatattttgaatatagaaacagtgagtgttgtgatttattttctgtttacttggccaaacaaaagtattaaaatctcatatgattcaaggcagatctttatgcaacatcagtcattatttctaattatttaaaaattgtaatgcaaaggattcgtttaagagactttccatagcagcagacatgtgtattttattttctctttccttggcttgatctatacaagctgttttaacacttaccttaatgattttttttttattttaatttttttctagagatagggtttcaccatcttgcccaggctggtctcgaactcctgagc

SEQ ID NO: 70098 - DNA, 1321 bp, Homo sapiens
acaagattttttccttctgcagtgtggctttctatgaaatctttctaaagcattcaactaactttttacggaaataggaactctcttatactcacttcattggcagattgttggtctctagaagatctttgtcagtgtttatagctggctaactgcaactctgccactcccctagaaagacagttggaagtgggtaattggtgtgttgacttttgcccccatcttgtataagcaagggtaccatatttgtaatttagtgtcctgtacgaaactttgaagttggactgacagtccatgtggccctgcttgttttggatttggctacaatagaactactggggttgaattttaagcaggacttggacgaccatctttactttcactcagactctgtctgttctgccatttgtaattttacacctaacctgttattgtaaaatgaagggactgttccaggaatcttaatatctggaatttagagggatggtttgctgcttacaaagcattgtattcaaggtgcatcttaatatcttggttagtttgcttgtcagatttaatggaaattttaaatattgtgtaatatttagagttctcatagctttttaagtaaatggattttaatgtcataaaatgagaccagtaagtatgaaacaagccaaaggtctagtttgagaaacttttctgctgtattactcattactattttgcctttgatttgttttcctcagttcatattctgcttatctcattttctttttttctttttcagtgatgatcatgtgaagtttttctgctttcaagtactggaacatcaagttaaatacaagtaaggcttttcttactgttttgactcagatttgcggggagaggtcatttttttaatttaatgtttttcttccataaggaaaccataatacaggttgtaaattcacagtgtatatgttatatccaggttatagatacgttttgatgtaccccaaagtgttttaaaagtgctgagttggccaggtgaggtggctctcgcctgtaatccgagcactttgggaggctgaggccggtagatcacttgaagtcaggagtttgagactaaccagcctggccaacatggtgaaaccccgtctctacaaaaaatacagaaactagtcagatgtggtggcatgcacctgtaatcccagctactcaggagactgaggcacgagaattgcttgaacctgggaggcggaggttgcagtgagccgggatcacaccactgcactccagactgggtgacagcgagactccgtctcaaaaataaaaaaagtgctgagtttgttggttacac

SEQ ID NO: 70099 - DNA, 2557 bp, Homo sapiens
actgcaacctccgcctcctgggttcaagcgattctcccacctcagcctccctagtagctgggattataggcacatgccaccacgcctggctaatttttgtattttttgtagagattgggtttcgccaggctgtgctcaaactcctgacttcaggtgatccgcccgccttgccctcccaaagtgtggggattacaggcatgagccactgcgcccagcctaaattttttttaactaggcaaatactgtagtgacatacacgagttgattttcttttatgaatctgttgagaaaggtagtctcaatttaatactgctatatagtccctgagcaaggaagaagcattgcttaggagttgtccgtgttgctacttctgtattcttcatcacatagtgtaagtactatgttactatattgagaaataacttaaaatatgcttaagatttctaagcagtgctttttatagtttgtatttactaagaaattaactctgacactgaggagtagaacagaaagaggaaatacaaagaatcacaggatatgatcttagagctggtaaataggaaatactggtagggaatgtgttaacaagtctgaaagtttactctctgcaagtatattcagatatcaaacatgattttgtaaggtaatctactttgcatttggcgttttgtattttaggaggctcgtaggaatactctcataaaagataccatgagggaacagtgcattccaaatctggtggaatcatggtaccaaatattacaaaattatcagtttactaattctgaagtgacgtgtcagtgccttgaagtagttggggcttatgtctcttggatagacttatcccttatagccaatgataggtaagtatgcctattatttttatagtataaacttgtaaaatacagtatctaaaactcatgactttgaaaatgttacaattttattgtcccattaccaggtttataaatatgctgctaggtcatatgtcaatagaagttctacgggaagaagcatgtgactgtttatttgaagttgtaaataaaggaatggaccctgttgataaaatgaaactagtggaatctttgtgtcaagtattacagtctgctgggtttttcagcattgaccaggttggtaaatttatataaaacattgtatgtaaagttgttagaacaaactgggataggtactaagttaaatataataatagctttttttcttctaaatgttataaactccccttgagattataatataaaccactgcatctagccaaaatgttctcagtagcattctccttggagaatgggttataccagttcttaaacctgaaagcctgtaattgcacatttctcacaaactcttaggagatgctgacacaacttgttcatagtggaattgagattttttgttttgttttgttttttgagatggagtctcactctgttgcccaggctggagtgcagtggcacagtctcggctcactgcaacctccgtctcccgggttcaagtgattctcctgtctcagccttccgagtagctgagattacaggcgcatgccactacacccggcaaattttttacctttttggtagagacggggtttcaccatgttggccaggcttgtctcgaactcttgacctcaggtaatccacccacttcggccttccagagtgctgggattacaggcataagccaccgtgcccagcctggaattgttaaatatatgacgtcattttaaaattgaatcctgtaattagcacttgattcatattaaagttcagtttttcctcttagcttgggcaggcagttttaaacagagatgtgtcttgattgcttataggaagaagatgttgacttcctggccagattttctaagttggtaaatggaatgggacagtcattgatagttagttggagtaaattaattaagaatggggatattaagaatgctcaagaggcactacaagctattgaaacaaaagtggcactgatgttgcagctactaattcatgaggatgatgatatttcttctaatattattggattttgttacgattatcttcatattttgaaacaggtaagtttttgttttattctttttgctcaatacataatacaaaggagccatggagaagtggaaaatatggaaaaattaaaaatgagaaaatacccataattctactacctaaagatatttactgttaaatactaatgtatttccatcttaaaaaaaaaagaattggccagaaaatagtttcaggttctaaattcagtagactaaccagcttcagaggtagttataggtttaggtttttttttttattttgaacctgtctttatttgtgaatacagttgaaattttcataagcatggtttgttattttaatttacatatacatcattcatttctcataaacaatttttttttcttttttgagacggagttttgctgttgttgcccaggctggagtgcaatggcgtgatgtcagctcaccacaacctccacctcccaggttcaagcgattttcctgcctcaacctcccaagtacctggg

SEQ ID NO: 70100 - DNA, 1049 bp, Homo sapiens
gtctcactctcttgcccaggctgtagtgcagtggtgtcatcacgactcattgcaacctccacctcctgggctatcctcccatctctacctcctgagtagccaggaccattggcagttgccacaatgctgggcttattttttgtagagatgggatctcaccacgttgcccaggctggttaaactcctgggctcaagcaatcttcctcggccttacaaagggctggaattacagacaggagccaccgcgcccagctgatttttcagtgtttaatgtttaaactttaggtgcccagttaataaaaatcaagggattttggcaattctgtaaatgcttttttcccccttcatttttcccattccacctgtaaatgatttttgacttgttaatgtatatgaaaagagaacttcaggttgctttcctagttaattttggaaattgcttaaactaaaggtttttctcctcaggtgcagagaatgtagaaagagtgttggttactgttatccaaggagcagttgaatatccagatccaattgcacagaaaacatgttttatcatcctctcaaagttggtagaactctggggtaagataattttatttcttaaccttcatttcccaaactctttcataaaactcttagacataatggaacatagccctaacagagagagaaactgggagttggttttccctggtgatgaattaattgacttacttttatatataagatgaaaatttgaattctcttgacaggaggtaaagatggaccagtgggatttgctgattttgtttataagcacattgtccccgcatgtttcctagcacctttaaaacaaacctttgacctggcagatgcacaaacagtattggtaagcacctaggaatctttgtttaccttgtgtagctcatatattcccaatttcttctttaatgccaggttgattatattatgtttcattgattttttttttaacttagtgatttcagatcagggttctttttttaaagatttatgataccttctggagtttttatgaattcttattgaat

SEQ ID NO: 70101 - DNA, 1053 bp, Homo sapiens
caacttgatcctccttgtatgatagtttccccaaatctaattttcacaatacttaatgtcaatttccgctttctcactttcccacaacctggtaaaagctagatttcataattgtaatttactacgttaaaacaacagtttgtatttttctgttttttttctttttttacttcaacccacttagtccatctgcctgttacctttccttcctctatcccttctctggagttaaatatttctctggaaatatttatttgaatttccctggcagtggccagggtagtaaagagaagagctggatcactaaacaagaattgaatatatagaaattcttaaacttgtttttcacaggctttatctgagtgtgcagtgacactgaaaacaattcatctcaaacgggtaagccttttagtccatgccccttcattttcatctcacatgtggtattattatcttgttcttgaaagatgtatcttgtgtaaaatttaacttttgttttgactttttggatgtggggaaaggggatgaatgaaagtagcagtatccatttattgtccttcatgttttgggtaacatgttttggtttgactaaggatgtgaaaaatcttagccagaatttcaagattcagttttcatgatcttgtaggcttcttcactaccagattttttattttatttttatttttatttatttttttgagactgagtttcacttttgttgcccaggctggagtgcagtggcatgatctcggctcacggcgacccctgcctcccagattcaagcaattctcctgcctcagcctcctgagtagctggaattacaggcacccgccaccatgcccggctgatttttatattgttagtagaaacagggtttcaccatgttggccagggtggtctcgaactcctaacctcaagtgatccgcctgccttgcttggcctcccaaagtgctgggattacaggcgtgagccactgcgcctggcctattttttatttatttacagggtctcactctgtcactcaggttggaatgcagtggtgcaatctggggt

SEQ ID NO: 70102 - DNA, 1052 bp, Homo sapiens
acagtgacttatgcctgtaattccagcttcttgggaggctgaggtgggagtgtcccttgagcctaggagttggaggctacagtgagctatgatcacaccactgtactccagcctagatgacagagcaagaccatctcttaaaaaaaaaaaaaaaattaaaaaaaaaaaactggatacgaattacaatggatttaatacaaatacatttgttctttttctccctcttttccccaccccccaggagttttgtcaagcgcttcagcagcctgatgctaaagtttttaaaaattacttaaaggtaggtatttgtgaagctcacgtatcttcatacaattaggtaatgtttgagagccaagagagaatacatacctgcaattatagatgtttatgtgaagtcccttttaactaagctcttgaaaaagagtataagttaggtaagcacactgaatgtgtacacctttgagtatattggtgagaaaatgccagttttcttttacagtttcatgatgtaattaaatagaaactagagggattaggagaataagaaatgttcaagaacagttgtccaaattaagttgaaaagaaggggctaaaaatataaaaacagaaggatgagatatttgcttatatcctattttgaaacatttgaactgtaaaacagacaaaaaggagaatcctcagatttgggccatcaagcctccttttacatttacgaaattactgatttttttttttaactctgtaaatcaacaaaaagtgtcacgtgtttatttggtattcatagttataattgagttcatgagatgaaactgtcttggtcttacctaggtagtcattcatttcatacataatgactgctttttatgtaccaagtactacagtaatggctgcaaatacaactatgagtaattttccctccccataaggagctcatgatctagaaataaagttacagtgtgacaaggtgaattattttttattatcttcactcaaataatttgaagacaaagcactgtattaaattcagtagcaggtaacttagtgtatcacct

SEQ ID NO: 70103 - DNA, 1028 bp, Homo sapiens
caggcgccgtgcccgtcctcaatatttaatttaccagtgttaatttggaaatagtaccaatcagtaaaaaggtgtcaagagcttgttttcttctgaccacttgatttctatagcatagagataacaccatattttcactacttccccagttgggtgatgtcagcataagttatatctacacttaccaaactctccagaacagaaagttcttagcttggattacatacggatatataaggcatgcgaaatgttctaatgttacagaagaacattgctagcactcagatacttggagccattcttcaggtgaaagtgatatcttctgacattagtattgattgcattaatactttatttacaggtgttcttccagagagcaaagccctgaggactggatttccctgtgcctacttcatgatcatgaattccagttaatttataaagaggcgatttttgtgtgccattcacactggtctttttcacattgttttgagcttattgcagtatatgttttgggatttttctgtaaaatgggtgtaattttcctaatacaggtatgtaacaacaaaagaagttgcctgcatgccggtccaaattgttctgtataaagatgctcttaaaagacacaagagttatcctagaaccttaattcttttttatttgaaattttaagtcaagtcctttataaagaccatagcagtggaaaacagtgtactttttaaaaaattgctgaatataaaatctttgaaaattttctttatgtgtgaagacacaaagtatgggggaagacagcaatcaaaactaactttttgtagatagccatttcatttctttaaactgtttcaacgccaatatgtattctacaaaagagaatggttttaggctccagtgttatacttttttttatatatatatataaaaataaactttacgtagtgaaatcttccaagtcttttctggaattattataaatactttagttttattttctcatcttaatctctccataatttcccatttaaaggttt

SEQ ID NO: 70104 - DNA, 2244 bp, Homo sapiens
tatgtgtttattatgtttgtaaatggtaactgacatttaattattagaagtacttacccctgccttcctccatttttattcatggctacttgagaaagcaaaaggaaaaaataatagttatcagtagtgtcactggaaagaagagaggagggacaaaactgagcagcagaattcgtatagacatttacgtttaaattctaaaagcccaattgagatgttcagggagggtttgttttgccctttggcctcatgaatgggtttcatgaatgggcttcagtggcttataaactctgtaaaattctattctaaattttgtacatttattttgttccggttaattccagaagacatttcaaacatttttcttacaccatataataaaaatacttaactaaattgacagttataaaaataaatcagtgaaatgtaccttatactttaataaaaaatgttttcagaaatagataagtgaaagctgagtgtttctttgataggttcccctgtactataggagtgataattgcagctattgcaatagtagtaattgttaaatggatactaatgaatagcatagcatagtgggtaagagtttatatagcacaggctctagaatcagattaagtaggttcaaataccagttctgccagtaactggttttagaaccttgggcaagttaaagaatgtctcccagcctcagtttccctatttgtaaaatggaaataatggtagctacctcaaacctcattacgaattcaatgagttaaacttgaaaagacttattacagtagctggcacataaagacttgatagtagtttatatggatgctatctcatattagcatatatggaattaatagtgtatcactatactttttttttcttttttttttttgaatagagatcagtctatcacccaggctggagtgcagtggtgacatcatagctcactgtaacttctcccatactctaccaatcctcctgcctcagcatccagactagctgtgattacaggtgtgcaccaccacacccagctacatttttttttggtagagacagggtctcactatgttacccagtctggtctcaaactcccggcctcaagcaatcctcccactggcctcacaatgttgggattacaggtataagccactgcacacggccttactatgctatcaattccatatatggaaaggtgttttccctttcagagctctttaaagctctgcagaagatttacatgtgtttatagagctaagagaaatcagggcatggaaattgagtgtgtaataaaaattaaactcttcatgttatataatcatgcataacttctatcttcattctctgaagttgcctagagcaccatcacagctaggaagcttccatcatgaattaccttatttccaaaagcaagtactcaaataattgtctcaagagaggaaggacaaaactgttacaagctgaaatatttggggatttgtttgacttgactagggaaccacaagttttcatataatgcctgatttagccctgtgcctaacagtttaaatcttaatgctaatgttaattgcttcccagttggttgaccttataagaaaacactgtgtggtattttaatgtggtaaacatgtgaatgaaggcctgtggctcagttaatcactcccacaactttgagctgtgagttttactggtggaaggaactttaacaggtcttcgctcttgtcattagatatcaaagaactgaaattagttggaattgtaagcagtgaatagatgtgttgttagaatgattccatcacttatacattgtttaaaatgctaataaagtaacttgctttgtaagaattcattagagtggacttttgttatctccattgtgcatttgataaaactgaggcttagagaggtaagagattagcttttaagtcagtaattggcagccgagacagcaaccctaggtctgttacattcaaaagcctctgagccactccgcatgacttcccattcattcgtgtttgctgctgctactctgggaaacaccatcttcctcttcccctccactcagaaatttagccctagattagcagcggtctctgctccctcatgttgagaaaggcctgttgtgctgtccgtgggcagaagggaccccttcagaaagctattccttattgggaatagcggcttgagattttgactgcacgaatattgcaggacctaattttagtatttaagttttagttcttaaat

SEQ ID NO: 70105 - DNA, 1052 bp, Homo sapiens
cttgagactaccagtcagttctgtcagtgacgatgagataagcgtacatgggggaggggctgtttcctctggggagagaatattgactataaacaccctttatggctcatagagaatgaatcagaagtaccatacagacaacttttagctttcctccccctgtatctagaattatccacaagctctggattcttattcagattacttgcgatcaatcctgggtactccgtcctagaaattgcttttgttttatgccaaggagaaaatgactagtgcctcagaatttagcattgagaacacgtctgatcatcttatcttcctgtagtccaaattaacaaacttttaataatcacttggtatgtgtcaggcactatggcagacctagtgaatattactatagctaatgtgcggttagctatactgcacattaactggacacagtttcgagtttagtagcaagattgattagaaaggaagtaaagtggaagctgatgggatgagagatagtcaatagtgatagagactggatgagacatattgaaagggcctggcactagaagatacgtcacatatcctgctcctctttccttacttagatactcagtgttcttcatgtaagtgactacacatagtatgcactctgtaaatgtttgctgaatgaaagaataagtgaatgaatgaggactgattagactaccccaagacaacctaaagttctccaaaggaaacaaatatgtactttacccattatagtgtggaaatctaaaatgagaatttcagaagtataagaattaattaaaagattgtgaagtcgagcatggtggctcacgcctgtaatcccagcactttcggaggccaaggcaggtaggttgcttgtgcccaggagttttgagaccagcctgggcaacatggcaaaaccctgtctctactaaacacacacacacacacacacacacacacacacacatacacacacgaaaaagattgccaaggcccagtctagtatttagtccccaacagttttcctagggatgtgctttgagaaaccatat

SEQ ID NO: 70106 - DNA, 1117 bp, Homo sapiens
cagtggctcatgcctgtaatcccagtactttgaaaggccaaggctcttaaggtcctcaaggatcacttgagatcaggagttcaagaccagcctggccaacatggtgaaaccctgtctctactaaaaatacaaaaattagctaggcatcatggcaagcacttgtagtcccagctactcaggaggctgatgcaggagaatcactcgaacccgggaagcagaggttgcagtgagccgagatcaagccactgcactccaccccatctcaaaaaaaagagaaaaaaataaaacggacacagattcaggtaggttgtatttggtaaagggcataagggagtgctggtctgattccttccatttccacattaaattatgaagcagggtcatcaaaactgaggatcaaaggaggtggtggaggtttgaggagggaggggaagatgtgaaatagtcttttcagattgggaaagtgaagttattaggaaaacaaaatagaatttctaagcattattgagtatccatttgtttgtataatgaaatgggtcacaggttcatgatttttttcttttttttttaatcttagcaccctgatatgtatgagagagcagtgctaagaaaagatcatcagaagaaatatggagcaacagttgatctttggagcattggggtaacattttaccatgcagctactggatcactgccatttagaccctttgaagggcctcgtaggaataaagaagtgatgtaagtggtttcccgatctaaaatcagagaagcatttaaaaaatgatttctgtcttggttcatcttattgttagtggtttatgctaataaaaattgatttaacaatcatttctgatattttaagctacctggtttttaaaaagaatgcagccttataaaagtttgcataattttatgtttaagatatttatgtttaaatatcttatatacacagtataaatggtattcagtctttggcccatcattaaaaatgtactgctttctagactttatttcagcacactgtttatttcactctgcatacttgtcagcactttcctcccatacaactgaaaaaaaatacatagttctgtggagtattagaatcattaccagatct

SEQ ID NO: 70107 - DNA, 1482 bp, Homo sapiens
acaaattcagatggtacaatgactttttctataacttgggtatttaagtgttttccagcaaggacagtgtacatatttatgggaagaagacacctatttaactgtactgatgattttggcatagcatcctattgagcctgctttatgtcattgcccttttaatgaaatctcttcattaataaaaactgataatttgtgtttttctcattacacataaattgtgcctaacagttaatcatacttttttcatcatagatagtatcagcctttaaagcaatgtcagcatttcttgctgccctaaaaatggtttaaataaaagtgtgtgctgctcactaataaaggaaacatgtgactcataagcagctaggaatacctgatgattttatctgacacccttgtgggcagatataccattagaagaattttattttattagcacagaaactcaactttttatgaacattgatgctaaagaatgttcagaggtgattgaagtactcagtaataataattgttttactttactaatgaaagatatattcatccaacattatagtagtgctgattcctcagcatctcatttgcatgttatgaatgtacttatatgtggatcttatcaaaattaaacttttttaaaacttgtaagcattcccctaagacttttgccatttattctattcacttctcttttgcattaatcccacacatgtgcacttacttcttagatagttgtcacatgaacacaccttatttttcacgttaatttcctctttgaaaaatctcttaaggcagaaatcctggctgccactgctgaggaagcagcaaatggtctaaatcagttgtggtggtttgttctattttttaaaaaaataattaatttgctcaaagcacatttactttaatgttaaacaaatgtgctttttccaaaatgtgcaaatgtgtgttttccagtgtgcaaagaatctgatactgtgctctatatagtataatcttttttgttttaaagaatactattcattctgcagaaactttagttgtgcctttggataatatgggtaagagggattatatgctttttttcatggtctagagacattctgtgacacaacttattttgtgtttgctcagttttttcagatggaaaaattaatatatttgttgtgaacatcaagatgctgttataaagcactgtgagatctcaaatgaaaattaattatggcatatataaataaccgtacaaccactattgtacttcagtcagtcagattcaaagtattttgattgttttatggatcctgtgagcatcaatcacaaagtttcatctagtagataattgtaggtgcaattgaggaaatacttttgcaaagcccattaataagtcatgcaaaaatgaactgcttattttattctgcttttgttcctcccaaggtataaaataattacaggaaagccttctggtgcaatatctggagtacagaaagc

SEQ ID NO: 70108 - DNA, 1072 bp, Homo sapiens
cttcaggttctacttacccctgttcttgcaaacatccttgaagcagatcaggaaaagtgttggggttttgaccagttttttgcagaaactagtgatatacttcaccgaatggtaattcatgttttttcgctacaacaaatgacagctcataagatttatattcatagctataatacgtaagtatctctattttcttcttgtatcaacatgttctgttatataatattttcctaagttaggaaaagaaatagaaaagatgcctcagcttcaccaaaagtacccatttcccacatggaaaattatatttaagtgcttagtaaattccttttcacttatttttggagtaaaaggattgataattctaaaatttatagttaaattagcttgtttcttaaactgtaagttttacaaaagtactttcattgctgtgccttctttcaagttacataatcacataaccacaaatggcatctaccaataaaccagccaggttttgctaagtgtactatcctgccatgttaaaatatcaaagcctaagtcttcattgttagcatggttatttgcctatgataaccctatgcagataatatggttactattaaccataataatggttaaagcacctggctccggaaaaataatcagtgtttgttttatgtaaacaaaaacacattacacccatgtgattaaaaaaaactacccatgtgataaaactgcatataaagttttggtcaatgatggaccatatatacaacactggttccgtaagattataatatcatatttttactgtaccttttctatgtttagacatgttcagatatacaaatactgtttctaattatgttacagctgcctgcagtattaagtacagtagcatgctgtacaggttcgtagcctaggagcagtaggctagctaccctatatagcctaggtgtgtagaaggctataccatgtagttttctgtaaatatactctgtgatgttcacacaatgatgcagtttttagaactattcccatcattaagcaatgcatgactgtacacatacatatacttgcatgtaaaactggg

SEQ ID NO: 70109 - DNA, 1867 bp, Homo sapiens
cagctgggtgtggtggtgcatgtttgtaatcccagctactcaggaggctgaggcacgagaatcgcttgaatccaggaggcggaggctgcagtgagtcaagatcgtgccactgcactccatcctgggcaacagagcgaaactctgtctcacatacacacacacacacacacacacacacacacacacacacagaggaaagaaaatattaagaatcctgtatattacacaggtatccaaacataaaaatactttagaattgcttactgtatggacaggttatatggaatggagtttgtagtatccacattaacaaagcaagtttatatggactggttatgatattagggatatgaattagaaatggatgttgttgcactcatttaaaatattttgcctctcactttatccccagttatagtgtccttttgaatttttctcacacagtgctactatatttcatgaactggtatataaacaaaccaaaattatttcttcaaatcaagaacttatctacgaagggcgacgcttagtcttagaacctggaaggctggcacaacatttccctaaaactactgaggaaaaccctatatttgtagtaagccgggaacctctgaataccataggattaatatatgaaaaaagtaagttgggatttttcttgtcgttcttactagccattagaaaaatacagccagcctgggcaacatagtgagaccttgtctctacaaaaaaataaaacaaaaattagtggggcatggtggcttgcacctgtagtcccagctgcatgggaggctgaggtaggaggatcacttgagcccaagaggcagaggttgcagtaagccgagattgcaccactgcactccagcctgggagacagtgtgggaccctgtctcaaaaacaaaaaaatccacaaagtctgtcattgtagaaatgattgtcatccttataaagctgatgataatattagtgtagagctttcataaatattaaaattttataaattactatagttgaaagagagtaattgtaaaattgaaaaagccttgtagacatgatttgacttcaaatattttgtttcctaaaacgataaaatcgtttgtcatacgtttcactgtaactctctttaaaaagtgttttgctaacactcaaaattaccttttatatcataaatttcagcaaatattttttgtgtgcagtatgtatagaacattgtgccaagctttagagtctaagaaaaattagatctgcatttttagaatcttttaaattactcattctactggtagaaaaaaaaatggatcacccagaattttacagttctatttgaaggttgggatttgatgtagatttaaagagaagcattggactcattgtgttggtgtatatttaaggaaaaaatgaaactccttagaaatatttgaggtaatttgttagagaatgagcattattgtttgaagtggtgtttttttaatcacgaaaactacattacagattttgccactaatgtttaatttagacattgtgtttgctctataaaggataaagtgattttttcaaaaagttttctttctcattttattttacttcatatttcagtttccctccctaaagtacatccacgttatgatttagacggggatgctagcatggctaaggttagtatttaatttaattactatgtaaacatctgaatttaatgtatcctatcaatagtggaagcaataacatgtattgtgtcttcatgtatgtctatatgacttaggaaattattcacttaaattgataccctttccaagtgattttgtggtctttcttttttactttttatcctttcttgaattcattatataagaaaattctctccatt

SEQ ID NO: 70110 - DNA, 1043 bp, Homo sapiens
tcaggaaggcatcaggtttttttgtttttttggtttttttttttttgagagagagtctcactctgtcatctaggctggagtgcagtgatgcaatcactgctcactgcaacctccgcctcccaggttcaagcgattctcctgcctcagcctcccaagtaactgggactacaggtgcatgccaccacgcccggcttattttttttttttttgtatttttagtagagatggggttttaccatgttagccaggatggtctccatctcctaacttcgtgatcttcccaccttgacctcccaaggtgctggaattacaggcgtgagccactgcacctggccggcatcaggttttttttttaacaatctgctggcttatagactttgaatcaattttttatttttaaatggttatgatgaaagctgaaattattatttataaaacatctttttaaaactatgtattgattatactcatttaattttctcttttgacttttcatacagatatgaaaagttgatgaagatcaacctggaagcggcagagttaggtgaaatttcagacatacacaccaaattgttgagagtaagtgtttacaaaattacgaaatttgtaagctcataacctattcctttgctggcactattagatttaaactttcttaggagctaggcatggtagtacacacctagagtcgcaactactcaggaggccgaggcaggaggatcacttgagctgaggcattaaaagctgcaacgagttatgatggtgccactgcaccctagcctgggcaactgcacgaaatcttgtctgtaaaataaataatttaaataaataaactttcttatagagatgatatttctcactgcagagaaagaatttttcccatctttagaaacttctttacaatattaaataatcttactgccttgaaattttttgtaacatattcaaatgactactgtaatttaaacctctctcgctgcctctctctctctcggtgtttaaatccataatgctcttgtgttcttgctgtggcagttaaagca

SEQ ID NO: 70111 - DNA, 1026 bp, Homo sapiens
atttcttaccctgcccgtcttatgggttgttgtactaattaaatgagataaataaaaatactgtactcttggctgggtgtggtggctcacacctctaatcccagcactttgggaggctgagtcggatggatcacttgagtccaggaattcaagaccagcctgggcaacatgatgaaaccccatctctacaaaaaatacaaaaaaattagccaggcatggtggtgcatgcctgtggtcccagctacttgggaggctgagacaggaggatcacttgaaccgaggaggcgaacgttacagtgagccgagatcgtgccacttgcactccagcctgggtgacagagccgagactgtctcaaataaataaataaataaatatattgtaatcttgcaagcttttagtattcgaagtattctttcataaaatggatgttaaattaaaagtgaaaggaacttgatacgatatccttttcactttccagcttaggctgatgtttgtttcttttcctcagttttagatctcaaacagtggttttcaaaatatgagtaatgaacaactagtaggttatgaagttgggtgccttgtaatcagcaatgtatttttcagtggaacagaatagaaaatgtcagaatgtgtcacatataataaggaaatcattgtttatgaaactttgattcaggtatatacacactttaaatgttactgagttaaaacagtgagtttcttactatgagttgtggtcaggaaagtttgaaaaccatagctatagaataaggtgattaaaagtcagaaagcacaaaatagtcttccccagtatttgtctgcatttaaatataggcagccatattgctgtcagtgttttatattcttctctgttttcaccttagaacatgatttacctgctcataggcctagtggacatttatttccagggccagcatcgtttgagcactttaaatcaaaattaatatattttcttttggggatctcaaaatgtttctcatttttatgacattcctgtgagatta

SEQ ID NO: 70112 - DNA, 1054 bp, Homo sapiens
gctccggccaacaagtgagtggcgcgcggcgggcgctgcagcccgcgccccagagttccggggaacccgccagcccgcgccccctgcctccacgtgtctctgcggggcgctcgggggatgctcgccgggaaggaggagcgggccgagaagtggcttctgccttttcgggtcccgggaacgtgcctggagcttgtgcgtgtaggcgagggaaggcggaggaagggcggggaggctgagggccggcttctgccttccgcgccagatggcctctgcagctccgcctcgggctgccgcctgcggggagcagccccggagccagcaggcgtccccgggccactcccccaggtttccccttcgcgtccccgctgggtcgacggtcgggttcgcgcgcctgtccttcctgttagtcagcttactcatctgtggcccccagagtggcttgggtcaacgtgtaatagctaggggtggccgggtgacctgacctcccctcttcctggcccgggcgacctggtggagtgggggtccaagggcaccgtgggcctcgccaccataggctctcactaaatctccgttgcgggactcagggttgtgcgttttctgtaaagctaggttttttggtgcccagatgttttgcaaacaagctcctatgctaaatactagccagcgacagctaaccttttcgccggtttcttccttttttggaggcagcatgccgtgggaagcacgagttgggaaaagatgggaagggaacttgtgccagtttcgccagctgtagccgtgttttttgggaggccttcccgaaacggggcacgtcggctggactgaggagcccggtgctagagcccgcggcctcctggcactaggagccgcaccaggggagccgggccaacccggccacgctcacatcagattacagaagattgtaatggcacaaatttgttgcttttagaaaacaggcgttcgccaaacatttctattaataccggactgagacctagagactagaagcaagaagaatcgttcaggggccggatgataacttcttttggtggat

SEQ ID NO: 70113 - DNA, 1058 bp, Homo sapiens
cagtttttttctaggtttatatgcatttagcgtttctttttttttttttttttttgagatggagtctcactgtgttacccaggctggagtgcagtcgtgtgatctcactgcaacctcagcttccctggttcaagcgattcccttgcctcagcttcccgagtagctgagattacaggcatgcaccaccacatctggctcatttttgtatttttagtagagatgggatttaaccatgttggccaggctggtctcgaactcctggcctcaggtaatctgcccgccttggcctcccaaagtgcagggattacagatgtgagccaccgcccccggcacatttattgtttctatgttgtatgcaatcatttatgtatcatctagcatatatattatactcagggtagtattatttagcatttagaattagtctaacattaatatgtattttgaaatatcgtgttggaaatcaggacaggaagacatagttcgtggttgaagagcttcatatgtgtatttgaagctttattgcctgcatatttttcccttctaacataacacatgtaaggtgctgagttgtagaagttatttgccaggcagagaaagtgttctaaactacgaattttagtgagcattgtggtttatttaaagaagtgatatgaatgttttaaattcctggtaagattggtgaattagggaagtaaaacatcataaatataaagcaaaacactcttaatgtagaatgttccttttatctaacgttagataagcctttttcttcattttcatgctgatgattataagaataagataagcacttctgacatacatcatagtagtgaaatttatcctttctctagagagatggaaagagaggtattgctagaaggatctattagagatacagtgattttttttttttttggatgctgtaccacctggtggaaaagtgagaaaaatgaggtttctagatttcttgaaaatatccggagaaaacaagatgtttgtggtaaatgcagaatggggagaaaggggtgagggagcgggtggactggaaatttctt

SEQ ID NO: 70114 - DNA, 1075 bp, Homo sapiens
ccctaaaacttaaagtataataataaaaaaaaagaaagaatgtaaaatatgataattaaaaaattgcaattacatgttgaaatgataatattcgataatatttgagttaagtaaatttaatgttacttattttttagcatggctatggaaaacttaaaattatgcatgtggctcgcatgatatttttgttgaacaatgctgtttgctgaagcagggctggcagcccttgccagaggtttgaatctccattgtcttggtggctgcagatggatggatgtgggggtaccagcctggtgtgttgggaagatttttctttgtgaaggggaacttgccctttactgttggggatagtttcttctcagcctatccagggacacacataccagcattttggggttgtgaaacttttgtgtggggaacttcccttttttttttccacatgagccaataagataaaactgacctaatggcattctcggtgcaactctgccttcagtttaaggacagaagagggctcatgtttcatagagtattaaaggagcaagcttaatattttgcattttgtggactgtaattgctaactgctgctacatgattcagtcagctaagaataatttactaattatatattgcctcacttggttctttttccagatgctaaacaaggtgagataattagaggaggaaaaagggtgagtttgggaattggagaccagaaggatggatttagaagatcttggagttaacggacttagaatatagtcagcaaagagttcacttaaaattagtgcaggttgccaggcgtggtggctcacgcctgtaatcccagcacattgggaggccaaggcgggcggatcacgaggtcgggagttcaagactaacctggccaatatagtgaaaccccgtctctactaaaaatacaaaaattaggcaggcatggtggtgcatgcctgtactcccagctactcggtaggctgagacaggagaatcgcttgaacctgggaggtggaggttgtggtgagccgagattgcgccactgcactccagcttgggcaacagagtgagactttatatc

SEQ ID NO: 70115 - DNA, 1327 bp, Homo sapiens
atgattgatagattatgagccctccttaatccccaatttcttaattcaaacaagcttactgtgaaaattttcttttttctttctttttttttttgagatggagtcttgctctgttgcccaggctgtagtacagtggcacgatcttggctcactgcaacctccatctcctgagttcaagtgattcttcagtctcagcctccccagtagctgggaatacaggcgcataccaccatgcccagctaatttttgtatttttagtagagacggggtttcaccatgttggtcaggctggtctcgaacccctgacctcaggtgatccgcctgcctcggcctccctgagtgctgagattataagcatgagccaccgcgcccggccaccgtgaaaattttctacaaatgcttgtttcgaggaatcttttttgatattttgccagcaaagtcataggagcaaaatttttttaaatgaaaatagaaaacaacatagttaaatatatcacgtaggaggaaaagtaccagtaccaaaattaactttagcatttcttagtgttttacagttaacagggcattccaagggaattaaaattcagttgattttattggactttaatttcagaggaactctgagatgagaaatttaactagcacgtttatccgtttaggccttaagcagatgcaggtttcatgacatgccagaggtaaatttaggggtacttgactgtagtgagtaatttcccagctatgggaaaatgtaaatattatgtagatggtataaagaaacaatattacgtttgtccatttaaggtctgtttctgtttgttcagacaggcttgtggattgcttttcttgccagtgttcctttaggtggaaggtacagccctttcagatatttcagaattttattttcttttatttttttgagatggagtctcactctgtcacccaggctggagtgcagtggcacgatctcggctcactgcagcttctgcttcccaggttcaagaaattctcatgcctcagcttcccgagtagctgggattgccagcacccgccaccatgcctggctaatttttatttttatttttttagtagagagagagtttcaccgtgttggccagactggcctcaaacttctggcctcaaccgatctgcccgcctctgcctcccaaagtgttgggattacaggggtgagccaccatgtccggccatatttctgttttagaattgctttcttgcttttcctctgaccagatttggtcacgtgaaactgtcaattagcatgaatgaggtgctgctgccatgcaggggtttgatccttggctgtcatgtt

SEQ ID NO: 70116 - DNA, 1071 bp, Homo sapiens
atttgaagggaactaatagtccagccaaagagcgaaaaatggcaggaaattggaaattaggtctgtctcattggctttattaaccaaaatgaattgggaatctcaatgtaattgatcaggaaggagctccagtcattcctggaggattaatttattattattattattattttttagctgcataccatatcactgtggtgcctttgtttttggaatggagctgttgcctgctgaccacgcctgggggcacctaatcacaagtctttcccaacttctttttcctttaaagcaagccactccagttgaaagagaatgattagacatatgaaagtgtggttttgtttgcccaagagtttatgtataagttaacacattgtacacttttttttttttttaaacttcctctttctctcttatctgcctctgatcacgggatcctggttagttttgctcagggcagctcgcttgacctggtgacaaattccgcttcttcctggggctttcctttttcctccagaaagtcttgtgctcatggtttaggaacttagtcactgtcgtctttctggttttcatgagatcaaatcaaataaggtaatacgtgcaaactgtataacgtgctgcaaaggcagactctgctgctgtccttagagtccagttccctggccgtggctgggttcccagccctctgttctctctccacagagtgactgtctcggctctgagggtttcagcgatactggatgcttccacatttaggaaataggcctgcttatgctccagtgcaggcattaaagctcaatgagtcatgtgatctgcttggccgactcttcagagttcgtttgtactcagtaaaattagtatgagtcttggaacccggtgggaaacctcttcctagtcctacaggccggatgcgccttctgagttttcatattatctctccacccccaacctccccctcctttggttgtatgtttctcacaatgaattggttgttggaaactggctttgtaataattccaaatgccactgtgaagatttttaatagcctttaaaatttttaattggctgagc

SEQ ID NO: 70117 - DNA, 1312 bp, Homo sapiens
aggcatgagccaccatgcctggccgtagttttttcataatattcattttccttgaaatttttgatgacccctcgtatctgtattcctgttttatagtatcacacatttattacgtgcctgtctaatacccattgctgtggttttctctgggaattcaaagaggagtaagctagtagctctgccttctagcacatgggctagtggaaagtcataaagagccatttaatgaccactgtcaatgtctgtgtaagggcagtgaagagcacgctgctgttgataaggatggctcacatttatggtacacttgcaataccttttacccatactgattcatctcattctcacaccaactctgtgatgtggtacagttattagaagaggcacagagaggttaaatagtagctggtaattagattaaccaacgttagaaactgggtggtctggtgtgagagcacaggcttttaaaaagcggtaagaagaggggaagctgcagcctagttagggtgactgttgtgttattgaagatgaggggatgaggactttgtgcatgtgtgtggagcctgggctgtgagggtcaagggacaatgggaagggacattaaaaggttatggttaaagtaagcctagacggactagtttgaagtcaaatagtagaaggtgaggatagagagggggatgggaaccagattatgaaaataggcagtatctcttttttatgtcaagtgttaccctgaaattccgaaactatatttcttatgaacatactgattacattcattgttatttaaaaatatgcatgtacaatatgggtggaaatgataatgattgtaatgagagtggctcacaattccaaagaagttgggggtttctgtgggtttattataacttacggttttttttttttctgatatggagtctcactctgttgcccaggttagagtgcagtggtgcgatctctgcttacttcaacccccgcttgccaggttcaagcaatcctccccgctcagcctcccaaggctcccattgcaagcatgcaccaccacgcctggctaatttttatatttttattagagacagggttttgccatgttgccaggctggtcttggattcccgacctcaggctatctgtccaccttggcctcccaaattgctgggattacaggcatgagccactgcacctggccagtttattataatttaaaaagcagtctgttattagtaggcttcggaaatttgtttcagggagtggtaaggaaggagttctagaaagtggttgtatattgctgcatgcttgttttcctctcagatcaca

SEQ ID NO: 70118 - DNA, 1051 bp, Homo sapiens
cccgtgttgaaatgggactccctggttgtttctggggcatggtgtctgtggaagaaggtggattctggatcttgcctggctgggaatgagggctccagcagcaaggcttagggtttgaaggggaaatagtgtgtgtgttttaaggggctcagggggagatgtctttggatatacatgaagagtgcttagaatagtgctaagcactcaataaattttagctattaacatatataatgtactgtgccttttgttataaaacgcagacctttaaatagaaactagaagggccacgttcttggaaaaaatgttcagtgttagaagcagtaattatgtattaataattatgtaagtgccaaatttggagcatgcacataatgttgatctctctctacccctcaccctttcattcccttaggccattttggaggaatacattttaaggcgggaacctcggatgtgttacgtaacaaaggccttcttgtgttactgtctagtggatcagtaggcaaaaggaagaaacacattctcaaagcatggtcagattccttaaaatgtacttagataagggggaaaagggtaagaaatctagtaaaggtgtggtgcatgctaattgatggggaagacaaaaaaagaatataatgatttccgaaactctgaccatatctaggttagtgacaaaatttgagtttgggaaaaatatacatatcagggatgcaagcttattctatgcagtttacacctgcaattgttattgttatttttttttttttgagatgaagtcttgctctgtcacccaggctggagtgcagtggtgtaatctccgcttcccaggttccagtgatcctcccacctcaacctcccgagtagctgggactacaggcacatgccaccatgcccggctaatttttgtatttttactagagatggggtttcaccatgttagccaggctggccttgaactcctgacctcaggtgatctgcccacctcggcctctcaaagtgctgggattacaggtgtgagccaccacccccggccatcctgcaatttctt

SEQ ID NO: 70119 - DNA, 1021 bp, Homo sapiens
agtggatttggatgtgcgtggctcggagtcctctaataatctttcctttcttacatagctcacctagaatttgaggaaaattaaaccagttgtgaaatatatcacgtttcagaaatgaacggcatcttaattgattccctttgagaacacatcagactgggatttctgagtgtaatctggtatgccttgaggtggggacctcatgctggggcactcagaggagactggtccacctccaagtttgttttctggctccaaacaaatgagtggctgtttgactgttggcacactacccagttttaaaagtacaaccatatagggtatggagggctggtaaccagggggtttaaaaagtgaggtcatggaaggcccagatgaagctcttttaatgtgtatcacaactgcaattaatcttattaacatgctgggcctgttcctgctttcgctgccccaggtgtgtgagagtatttagggggcatgctttgaaggattcttgttctttgatgatgcacatggataacagaagtacatcaaactttgtatctggcattaaaagggcttttgtttgcctctgtagattcattcagttttgagaagagagcaaaaagcttcatgccaattgataagatgtacaaaagagggtggattgcaaatgcagtcttgcagcagtgagctctatgaccagatcagaatcagctgaacaggaatggagccctcttctatatccaacactaaggtagttccagcacagtattctgggagtgaaagatgtaaaaaagcagccaggcacagtggcttatgcctgtaatcccaacactttgggaggccgaggtaggaggatcgcttgagcctgggaggcggaggttgcagtgagccgatgtggccccactgcacctcagcctgggcgacagagtgagaccctgtctcaaacaaacaaaagtgtaaaagcactgttgtgtatttgggaagcaaaagtatgcacaggaaacaacaaggcatagaaggtgttgtggatcctaaa

SEQ ID NO: 70120 - DNA, 1134 bp, Homo sapiens
ctgagtagctaggattacaggtgtgccaccacacccagctaatttttgtattttttgtagagatggggtttcaccatgttggccaggttggtctcgaactcctgacctcgtgatccacccaccttggcctcccaaagtgttgggattacgggcgtgagccaccgctcccagcctgaacagtcactcttaattgcactatgtttatttgggcattttgttatgtttttatgtttttaattttgatataatttcacagttatagaaaaattaaccaaaagagtataaacaattctcagaccctttactgagatttgttgggacatattcttagaaagtctgagttgtgagcctgtgggattgggccgcacttcttgagtagagcctgggtcatgctacccgagaactcctgggtgcctgtgaggttgggtgtgtcccatctgagaaagttcgctactgaaaaacagtgacgtaaccccacccaggaactgaagtgagcctgagagcagctctccagggcttgctggctggaaacaatgagggaagagtctaggatttatgaaatatttttttgtggaagaactcttcctctgagaaactgctggagggtttggggaatacaaaacaaaactgacttatgaaaagatgacttgtaactcaccaagcagacgctctcaggcgtggcatgatgccctcactggctgccaagaacaataactgacacattatccacagacggctgcgccccatgccatttcctctcctgccatcacaatgaaagaccagggttgacacttggtattgtatctattccacgtccgctgcaccattttcttttaacccttctttcttgctctcacccctttacctgttggagctactatgcccctcctgggtttcgttttcttctcttcctttttcctgggcatacagctgcgttcctagaaattgtggttctgattcataatcattgtatgtggaggaaggggcaggattctactctgtgaggggacgggagggtcttttttaaaggggtaaacaattggaaagtttttagagttaagggtctttctctgatgctaaatgaaaccactgtcctctgttccaaggcctgagcttatatcttctttgctatga

SEQ ID NO: 70121 - DNA, 1033 bp, Homo sapiens
agcctgattaaagcggggctccctgcccgtgaggcccggtgcaggaccgatgtacaaaacagcagcaagtgcctctcttctcagagggctgctgtcttgccccactatgctagggtcttcgcctttctatctgtagattttgttccccaaacctggtcacacagcatcctgcaccttagcgtcccatgtaagggactctgcaagcttgttgttcagcaccgcagtgttacctcttggcaagctgtgaacctgtcgcctcatcaggagcattcgagggtgcttggaagcatgaactctgggggtgtttttttttttggttattttaattatgtgatgatgctgttaagcttacagatatgcagttgattttttaaaaagcttaactaggaatctttctgaatacttgtcctattttgaaactacctgtctggttttttgtttggttttgttttctttttttaatgtcagaggaatctatccatgtgaatcgaaaggcacaggaatctaggaactctgaggaatttattgtgaaggattttgttagggggttgacagagaaagcaaagtgtaagtttggaagaaggcatgtgcggtggtggcgagtgctgcgggctatggaaggtgacttggcttttcagttaggggtagtggagaaaggggtagttgcttgtaaacgagttaaaagcattcagtgtggaggtgttaaacccattttaggatcgcttggtttcctggtgggtagaatatgggaacagagccagaggcaggagctaaaccaaaaggagggacccatgaactctgcagctgaccaatcagagaatcaggcaggtgtagcctactgacctgggcagaggtgggcctcacgcagctggatccgaccctttaattctgcccttttggagtggaaggtctgattggtgtagctgctctgcataggcaggacagtgacagttcactaactcttgttaagttacatagtgtatagctttccccccacaggtggttttcaaagttgagacggaatttgggtagg

SEQ ID NO: 70122 - DNA, 1026 bp, Homo sapiens
tcccctgtcaaaatcaaatctattcaggtttcttcactgttgagaacacctaaatgtttttatttttgagaagtggggacagagtctcactatgtcacccaggctggagtgcaatggcatgatctcagctcactgcaaccttcgcctcctgggttcaagcgattctcctgcctccgcctcctgagtagctgggattataggcacgcaccaccacgcccagctaattttttgtatttttagtagagacagagtttcaccatgttggccaggctggtcttgaactcctgaccttgtgatccacccacctcggcctcccagagtgctgggattacaggcatgagccaccacgcttggctaagaacacctaaatttttatgtttcttggctcaaaaaccagttccatttctaatgttgtcctcacaagaaggctaattggtggtgagacagcaggggaggaggaagagctgtggtttgtaacttgttcaactcaggcaataagcgattttagctttatttaaagtcttctgtccagctttaagcactttgtaagacatggctgaaagtagcttttctatcagaattgcagatagtcatgttgggctaacagtcaattggatatattcctttacctcacatgaccccagcaactgtggtggtatctagaggtgaaacaggcaagtgaaatggacacctctgctgtgaatgttttagagaaggaaattcaaaaaatgttgtaactgaaagcactgttgaatatgggtatcggctttctttttcactttgactcttaacattatcagtcaacttccacattaatgaaagttgaccatagttatttccaaataaaaagaaaccaactcttaccaggtcttggactgtgatgtcatattattcagttttatgcttgttcctgagcagaactcataagagtgacatagtcagctgctgacggcacctcagccacgccactcttactcagttcagtgggtgtgcttgcgtggtaggatgtggtgcagccctctctac

SEQ ID NO: 70123 - DNA, 1090 bp, Homo sapiens
ttttgtaccatagactttctcactagagtcccttctggtgatttgtttcttttacaccccttcctgctatcctttccactgaataatattctgagtgagaagctagtgagagctaatgttacatttggtttttcctccccagatacaggtttgacccccgtctcatgttcagcaatcgcggcagtgtcaggactcgaagattttccaaacatcttctgtagcgacctcacacagcctctgcagatggatccctgcacgcctctttctgatgaagtgattgtagtaggtgtctgtagctagtcttcaagaccacacctggaagagtttctgggctggctttaagtcctgtttgaaaaagcaacccagtcagctgacttcctcgtgcaatgtgttaaactgtgaactctgcccatgtgtcaggagtggctgtctctggtctcttcctttagctgacaaggacactcctgaggtctttgttctcactgtattctttttatcctggggccacagttcttgattattcctcttgtggttaaagactgaatttgtaaacccattcagataaatggcagtactttaggacacacacaaacacacagacacaccttttgatatgtaagcttgacctaaagtcaaaggacctgtgtagcatttcagattgagcacttcactatcaaaaatactaacatcacatggcttgaagagtaaccatcagagctgaatcatccaagtaagaacaagtaccattgttgattgataagtagagatacattttttatgatgttcatcacagtgtggtaaggttgcaaattcaaaacatgtcacccaagctctgttcatgtttttgtgaattctaggctggtgctgcactgaaatagagcagtaagcttgtgataaaggccaattccaggtagctcttgaaggtgatagccatctactttccagtggctgccaaccacagggagtgccagttaacactggaaggattaaggcaaggtcccttctcttgagactcccctctgagatctgaaaaatgaagtggcttaggaacatcagcagtgaagaactgccaagagttggtgaaggttgt

SEQ ID NO: 70124 - DNA, 1018 bp, Homo sapiens
aaatacaaaaattagccgggcgtggtggtgcatgcctgtgctactcaggaggctgaggaaggataatcgtgtgaacccgggaggtggaggttgcagtgagctgagatcgcacgactgcactctagcctgcacgacaagagcaaaactccatcgcaaaaaaaaaaaaagaaaggagtcatttgagttgatttcttctccttgccaacccatacattttacaggtgcccattttaagtaattattgtcaggagtttagcagacaaggatggcaacagtctacaaatggaacaacccatataccttgatcaagttagccaaaggaacaaaacctcacatctgtttttgagttactggcttccccatggaaggttttctaattgctgtcaaattgcatgtccggcatgagccaagccgattgcccttctaggcaactaggtatttgttactatggaagaactgtcttcatttaacttttgaaatatccctacagcaatgcttcccagactgtgtatgtgaagatgcttataacaatacctatgcctgtgtgaggacaatgtcagcattgtggaatttgcagtattgcgagtttgatgaccaggaggtaagagggacttctgcctgcacttcccccgctcctttcttgctggtgctttgttggctggacttggtggcataagagcaattccaaggctgctccctagggaagaggttgtgtttcttatctgtgcttcactttaggtttccttcagttgtaaggccatgtctcacttctctaattgtaatctttctgaattgagttctctccactcccaccaccacccaaatatacactttaaatgcacaattcacgttttcagaatgataaatgctttgtctgttagcttccctggtagattggttggagcattttctagaaagcttaccagcacctggtgtattcggaaactcctgttcccaccacagcataatccaatgctgctgtaatagattagagtgggggtcagaggcccaggagtcc

SEQ ID NO: 70125 - DNA, 1023 bp, Homo sapiens
catcaagaggtgctttgaacctgttacagtctttagcacacaagtctgtggaatatttctttattgtccttgtgtctattaggttataagtttcttagtctgagcttaaaacagttcttacatagagcatatgacagtattatttattctagtctggactttcagcaacttgcactgtgactttgattcttgcttagctaccttgtcaggttccattcctgacctgattcacagaagtagccttgggaaggaactattaaattttcaaagcatttcaccatcgtttgtaaaggcccttaactaccaaacatactgctcagtagctttcatatgtacctgttttagtcattccctttagttactgaatgaacagtccaattacttttgactcccaggtcccctttagcagtcaattactttgtgatctttatcatagtctatgtgcatcacagaaattccacttgctcttctttctagagaggtgccagtaacttgacctggcgatcagatgtcctggtggaataccaaggagaaggccgtaacgtcactgacccaacatgcccttccctgagtcctggcgtatctgtgagtaatagcttgaatcaacttagacagctttctcactgacaacatggcaaggtgctggttgccatgtgtcaaatattgaaacctttcatctgagtcctgttcctttgtcactgactgtgagtggttagtagatggacaaaggtaaatccagtgatcttggaaatgatgctgctgacctgtcatcagaatgtgcactgttaatcttccaatttatgtagcaagtgcatgtatccacccgtgttcttatcaattcctcttccctgtttttctacccctcccaataacagtaccatttttttttaattagggataatgttactgaggcatgcagtagagagatgtggttcctgcctgtaaccatgccattatgagtgcctcgcattggcggcagccaggcaggtcacaaagagggaaacagccatgttggcctcactt

SEQ ID NO: 70126 - DNA, 1037 bp, Homo sapiens
atgatttttttgtttgtttgagataggtgctctctcaccaggttggaatgtggtggctcaaacatggctcactgcagccttggcctcctgagctcaagtgatcctcctgccttggcctcccaaagtgctgggattaccagcgagagccactgtgcccagcccttaaatgaatttttaagtttatactagacaaaagcaatactgtgaaactagtgtttctcaaagtcatcacattgatgggtgaatccatccaaattcttggttatataaaaaccagaggtaggtataattctttttaactcttcattcatacttggtatttgctagaagtctcccatctcctgatatagtatgctaattttgagactgtccgcttattcaaataaaattctagaagaggagacattttatccattatatttaggggagtgtgatcattatagatttctagggagaaggagtcctggaatgacttgtgcttacggtacttgtgctgaatcttagtgactttggatttatactggaacttacccctttatctccagagagcaaaatgccattagaaagagcctcggctgggtgcagtggctcacgcctgtaatcccagcactttgggaggccagggcaggcggatcacttgaattcagaagtttgagaccagcccaggcaacatggcattgctacgaaaaataaaaaaatacaaaatttagctgggcatcatggtgtgtacctgtagtcccagttgctctggatgctgaggcaggaggatcagttgagtctgggaggtcaaggccacagtgagctgtgattgtgccactgcactccagctcgggtgacaaaatgagaccctgtctcaaaaaacaacaaaacaaaaaagagcttccccccacctcaccaaaaaaggaacaagcctcccattatacaggtggtggctcttgcaatttttggtgagatgacagtcaccattttatatctctgggtttttttatgtttcctcttttcttttaaaactgccttggacatcatagtagtatctg

SEQ ID NO: 70127 - DNA, 1118 bp, Homo sapiens
taatcctgtcctttcttttgtatttattagctgaaattcctcagagaagaacttccccttatcagttatttggttattttgagatgcagtttattcaggaaacacaggataggtgtttttgttcatttgacagtttttggagtaaacttcattcagttgtgatgaggctgagtagcatgcataattttttatgtatttgtgtttcaatactttcctgtcattatttttgcttattttgttctatcataagccagggagtcccttctagtcatttgtttagagaagatgaatttgttgttttcctgccttgtagtaacaagagacccaggcaaatttcagctttctattaaaacaccagaatcagtagaacaaagttgttttagttttggctgtggattaaatgagtgaaacataacatgagcaaggctcctgtcttggctccatctttacattgtgtgttttgttttcaggacagttttccttgccaatagacaagagacagctgtatgagtttgatatcaaagttccactgttggttcgaggacctgggatcaaaccaaatcagacaagcaaggtaggtgcctgacaagctggtgctgtggacaggtaggcacttgcctgagaaaataaggtgtttcctcctgagataagattggttaggttcctcttcccactagggctgagcagcagaagagtttttaagtggaaacaatgattgcttttttttttccttaacttcccactgctctctgtatctgtattttcaccccacatatacatgtctcattagaatgcatagcttttctttgtcttttgagactagatctttactttgttctggagcagtgactctcaacagaggatgtgcatcaaaattgccctccgaaactgaagaagaaaaatggtacgtgcttgggcaatatccagaaagagtatgattgactcacttggtctggaatagggacccaacatctgccttttttccttttgaagtttgcaggtgattctgagaggcagcctggtttggggcccactgccttgtagagcagagcccctcaggcttttctgtgtgtgaatcccctgggatctggttaaaatgcagattctgcttctccatt

SEQ ID NO: 70128 - DNA, 1088 bp, Homo sapiens
aactttataaaaacagacagtgggcaagctttggcccatgagtcatagcttgccagctcctagttcaaacatcttaagcttttttgtagcacagtcctatctgaattaatctgtaatacacagtactgagaatggacaactcttccttccgattgtctctactctcatcactattgccaataaaaagtaaagctaactggttatttaaaaacgagtttatttctttggaaacaattaactttggaatgaattaattatgttctggaattttctaatctgttttttacaatgggaaggtctagggaatggagattggggatttgagttttgggggagagtgttttgcaattttttttttttaaacgggggttgttttggatttttttttttaaacgggggtgtctttgtttttgtttttggttttttttttttttggcaagatagtgatacctcagccattgcccctgaagtcccatttctaccttctgttcacatccaggtggcaaactctcctctcagttgatgaccttgtggagaaactggtcaagaggctggagttcactggggagctcaacaacacttacatcttctatacctcagacaatggctatcacacaggtcagaggcaggagtaggtactgctgtgatctttgagaatatgtctttcctttttcacccaatgagccctgggagggagttctagtctttttataactgtggacatgccagagggaggatcttgccctcaggacccctccagttggagcaccacatcatacccacgtggagaaaccaggtttcattatttgctgtttcacatgcaagatgacatggtgttctaggagtgggagcagagcatgagcttgatgggttggaggcaggccgtatggaaggcatttgagataggaagaccaaaaggaggttgtcttgggaaaactttcttgccattcatggaatttgttttttgggtgtttttgtttttttcaaaagctgcaggatgagtcagctctgtgtccttgactttcatgctttctgcttggaccttctgttgttaaaagcaaatgttttcttctttccacatatataaa

SEQ ID NO: 70129 - DNA, 1025 bp, Homo sapiens
ggttcacgccattctcctgcctcagcctcccaagtagctgggactacaggcgcccgccactacgccctatttgcccattttctaattgtagtagaccaaaggcataagatcagagttgtaaatgtaatctcgctttagctagtagtttcccagtgacatcctctaaaatctcttaatactgccaacagagaagccaagaccttttatggtttgggaggtgctgggaagctgaagaatgagagattgagttaatctacagaaatttctattttaggaacacaggaagggagagaagttctgaaattgcttaaacaagttccagttagttccttcttgctgaagtatgagtgaaacggttctatttattatctactgtagtaatccagtagtttgtttgactgtggtgacttggtgttaacattttttttcttctaaattttagaacaagcactggttaattaggcaagccaagactccaatgactaattcttcaatacagtttttagataatgcatttaggaaaaggtaagagctgctgctacataacaatctgagtggttttaaagaccctgcaaatcagctcatgaagaggagaccacaccacattgttgtctctgaaacaaaaacagagggaagcaagtcagtgggagagaggcttcgatggggcaccagaagcagagagattcctttacactcaaatgaatgaggtggcatttggaccccagtactaattagactgcccatttttaggacttggcaaaagtcttgcaaacttgaaccatgtggtagaattttttctcctgctttaaagaaaaggtgacttggttgagagagcccattgtcatatgtgacaaatgacccaaaagcttagacaagatcaaaatatctgcctttgccatttggaattttcaagaaattctcttaagtcaatttttaaaaatccattactttctcttaggaagtgtttagtgtagaccagggataagcaaactttttctgtaaaggggcagatagtaaatattaat

SEQ ID NO: 70130 - DNA, 1025 bp, Homo sapiens
ctagtggaatgtatttgaatctaatattattcacttagctacttcagtgcataatttatgacatctactttctacatattttcataaggttaaggtaacttaatctacctttcccactgttttaagttgactgtctttttacattctttaaggcatcacatgtagataccataatctccattagtgtaagttaatagtaaaatatccaagttactgtttccttctttgtgggagacatgatttctaggtcataaaaagtcatcaagatcttaattgccttcttatgttggtatgcttctcagtttttaaagtattgcctaaaaaacaaatatatttgttccaacaatatgcttgcaaatggctatgacataagatcatgtgctaagattgcttaaaagctagtaagaccctgtactgtctgctcaccagaagacatttatctattaaatactcatctgttgggtaaggtaggagatgacaaatctttttatgtgtcaggctaatgtctccttggactttctggactacaagtccaactttgagcccttcttcatgatgatcgccactccagcgcctcattcgccttggacagctgcacctcagtaccagaaggctttccagaatgtctttgcaccaagaaacaagaacttcaacatccatggaacggtagcttcccccaccacttgtattcagccatactaagtatcattaactatatggtatacttgtcaggaagcctttgagccatgtagtgggtttttcttcacaatattttaaaggtaattgcatctgtccctagtacaaccaatagtataaacttgcattgcaagtacagataaagttcctgctacacatccagtgagcagctggagagttgacagggaatggtaaagaatgccatctttcccaatttacaggaatatcactcaggctctcctggtaacctctgtgctgactctcctccctcctggcatagccgggactgcaccagcctcctggtggccctcactagcctttgaggcatg

SEQ ID NO: 70131 - DNA, 1069 bp, Homo sapiens
attagctgggtgtggtggcgtgtgcctgtagtcccagctactcgggaggctgaggtaagaagatcacttgagcccaggaatttgaggctgcagtgagctgtgattgtgccactgcattccagtctgggcaacaaagagagactctgtctctttaaaaaaaaaaaaaaaaaaaaaaaaaaaaaagtctattgacttgtgagtcactcctttctgggatgtttttcctgcattgtacaaggtttagcaaagtagtttgcttttctacctgatctacttctggcttttaaactagaatgcataattgaaactatgcttgtctttaataaaaccctagtcaaaaaatccaattcagtattgacttgagtaattatctttttaatgtcttatcactgctcagagtagagtttagcccagcacggattcagacttccactttgtgcactgacctcataacaaatttgactttcctctttttaataggaaaagaattctaagtattataattacaccctgtctatcaatgggaaggcacggaagcatggtgaaaactatagtgtggactacctgacagatgttttggtgagttgcagaagctttgtagctctgtccttacagggttggctcacatttgattgaagactctgcctagaaaacctataatcttattcgtttgtgttgggtaatataaatgcacagtaacttggtctaactgcccaagagtatttccagctgattacaaactcctcagggtgttttctttgtgtataagccaggctcagatctaatgctcttgaaattccagcaacaaatcccttttccaaaggttaatctcttcgactacagagattactttgtagaggttttactttgtaagtgtacctactcttgaccccggttttactcacaagctacaagatgtcagcttcacaggccccattatgaggatggagagatagggatactggatttatttgggcattgggtatttacatataaaaattactgaaagcaggtgaaattgggactttcctattctgaggcgtttctaatgacagtcttcaatagtatt

SEQ ID NO: 70132 - DNA, 1050 bp, Homo sapiens
tttattcatctcatcagataaatcgagctctaaaagtgggtttcatctgcagggcaactgaaatacagattatcccttatccaaaatgcttgggagcagaagtattttgcgtttcagattttttggattttgaaatatttgcatgatacttactggttgaacagtccaaatctgaaaatctgaagtgctccagtgaacatttcctttgagtgtcgtgttggcactcaaaaagttttggattttcagatttgggatgttcaacttataataagtcaatagcttatagtctgattatttgaactgcttagggtcagttggactattcagtctatggtatcagcagctcagcattcaccccatgaataggctgtgtggggtaggctgtgtggactttttctgtagtgggtcagatagtaaacatttcaggccttgcaggccatatgtctctgttgctactattcagctctgccactgtagcgtgaaagcagccacagacactgcactatgtaaatgaatgtggctgtgttccaataaaactctttatcgctgttaaaatttgaattttatgtaattgtcacatttcacaaaatattcttattttgattaacttttatattttaaaattgttaaattcttagcttgctgttcatacaaaagtcatcaggccagatttggctcactggctgtagtttgccaactcctgctttagaagttcctaggattattagcgtttatttttgactagtgtctatttggggaaattaggtacctactatgtttcaggcactggtctaaaaagattgtaaaatttcctgtttctttctggtctggtcatatctaaggacttgtaattgtccctacttgttttgcttttcagtacggagccccagatgcaggtggactagaacacgttcctctgggttggagttactggtatgccttggtgagtgattattgaagtctgtgacaattttatgcagccctacagatgcagaatatgtttaatttagctctgatattgacataactttatttgcttttacaattagt

SEQ ID NO: 70133 - DNA, 1055 bp, Homo sapiens
aggtatgttgaatgatctgtttctttttttataatggcttttaaaatgtgaatataattcatgttaattttattatttcaattaatgttaaaggatttcttggtatacgttgttttctgtgaatctgcccattaaacaagtacccatatcatgtaaatatgttcatataagtacacatgtacatatttacatgatttgggtaagaacttgtgtatttatatgatatgggcacttgttcttcctttcagtagtcccaggagcatgtatttaaaaattgtcctaagagtgctgctgtctgatgcgtcttccctttttcctcaggaattctgtttgtcatgtggctgtcatggtatctttgtttccattccttgttatcagtatctaactgaagatatttttcgtcttagaatctttcctcagatttcttagaatcttttctgaattataacaacttaatgcttaattcattttctgatgtgaaacatggcaacaaaatgtgcagagattagttacccagagtcagggtcgtgcaggtcattaaagtgtatggccagcagctggtacaccagccttgtagacctggatggagggatacctcgtggtgacctgtcaaggctggattccatgtgcccacattcacacattggccttagcttttacccaaagtccaagcttaaaggaaatagtatgttcgagaatgtttggggttagctcttacagttaaagtgggggttcaagacagagaaaatgtacttatgctctttatctgtagttgctagagatcttaatatctgatctggattttctgttaattctcccctccccccaataattggggaaatctgcaaccttgtgagtttacaggaagatgagtcagtttgaaaaggatcatgagaaataggaactgtggatactggatcatttggttggggctatgggtcataaagagagcttacactactttgcatatttgaaggtcatctgatgtgtatataaaattaagagagatcgttaaagtataaagattttgttttcagggattaaattctgcctta

SEQ ID NO: 70134 - DNA, 1037 bp, Homo sapiens
atcatacaagactctctttggctgttgcttagagctgaccatttgggaataaaagattgagtaagatgtaacaaaacaggaattctgggctgtgtgtctcaatttattggaagaaattgtttaatggataattacttacttttacagacaccgctaaagaaaaccaaagctctcatcggagagatggggatgactttttccagtgctgtaagtttgaaagttaattcaattttgttaatttaactgtgtttgtattctaagaagatactctcttctcgggaatctggtatgatctatgtggttttttccttgttaaatgcctgatctgaaggaaggatttatttaatgtgaattttaattgaaatattacctcttatcaattgaagattaattgcagatatttctaagccagtctcagaactagagaattttattttaaaccttaccatttgaggtttgaaaatggattataaaaaatcaaggaatatgtatgctgtgtaaacttttccttggtaaaaacccaattaaccctaatagccaaaactgacaaatagcaacacacacaccccataaatatagatgcagaaattcaaaataaagtattagcaattcattttcaagaaccatgtacataaccaagtgaatggtagtctaggaatgtaagggtagcctactatcagggaatcccttgaacagtagcatagtgttatgtttaagtgctcagactctggagccagactgcctagtctggaacaccctctctgcctcttttctagcagtgtgaccttggacaaactatttaacctctctggccctcttcctccccatttataaaagggagtaccaaaatcttcttcagagttgttgtgaggttgagttaataggtgtagagcacttctatcagtgcctgacttattttttcttttctttcttctttttttttttttttttttgagtggcgcaatctcgactcactgcaacctcggcctctggggatcaagcagttctcctgcctcagccttctgggtagctgagat

SEQ ID NO: 70135 - DNA, 1038 bp, Homo sapiens
taaagtctaaattcctatgtggccctgcatcactgactcctgcctgcctctctgacctcatcttacctcactctcccttttcctccctaagctgcttccatcaccacactggcttctctgtttcctcccaggtgcctctctccttcctctggcagcccttgtacttgctatatacccagcctgaaacatcttctgaatttttgcatgactgactcctcatcgcatggctctccgtactgaagttacctcctgagaggccttttctgaccacccatctaaagtagttcccctttcttcccaccagctgtaatcacatcatcctggtttattctcttcatagcacttaccaccacctgaaatgactgattgtttacctgttagttgttttaagtccccaagagtgcagagatcatgagggcgaggaccatctatcctctgtccaccactgcctagattaatgcctggcacgtgttgtgtttaataaatgttattacacagtcttactgtaaatcagatattctttcataattttacatatttatcagacagtttgacaattaagtcccatacagtcaactctggtccttttctccacttactctttgaatcctcatttcaccttcaaatgtcctcacagtaactcaggtgttttatcaaaccaatgtctcatgaagcccagtattcttttcctgaggatggtacccagtgatgctttgaggagagtatggctgacgaccttgcttcggaaggctggcgaagatcttctgcttctctagcgtctcttggcagcctcttctggatctactcatgaaattatcagagctttttttggataagttagaatcctcatccttttgagtttatggattccgtaggttttgtatttatataaaacaatggggaaaagtcatttatacattattgaaaatgaggctcctgttaacctacttatgtatttagattagcaatctttaaggaattattgcacaacaaaatatacttaaaactgcattcaatatggtcttaggtttcaaaggt

SEQ ID NO: 70136 - DNA, 1054 bp, Homo sapiens
tctgtttattaaaaagtaattgggctgggcgtggtggctcatacttgtaatcccagcacttttgagaggccaaggcgggcggatcacttgaggtcgggagatcaagactagcctggccaacagaatgaaacccgtctttacttaaaaaaaaaaaaaaaaaaaaaaaaaaaaaaaaaaaaaaggatataaatgcagcattttggcaacacatttataatccaaaagcataagttaaaaatattatcctgtctgttccaaaaacaaaactcaaaaaaaaaaagccagagtagatctgaaataaatgaaaattgccatttaaaagcacttatcctctcaaagccttgtaattcctttgaaaaatgtaattacctctgaatgaagcaccaggttccttgtttagctgcattcttctctttttcaggcaaatgcccacaaccctgtcgaaatggaggtaaatgcattggtaaaagcaaatgtaagtgttccaaaggttaccagggagacctctgttcaaagcgtaagtaccccatacacattgccaatctgggctactaggtcgttaaactagcaggagtctctcactacatacttccgtgcttagtgcatgttgcctgggcatcacagttaacctttcttcactgacatatatgcttccttatgtagaccagaggtgtggtatgaaatctgtgcatgtaaaaaaatggatactcacacatgcaactgaacgttttaactacaaggtggtttctttgttttgttttgttttgttttttgagacggagtctctctctgtcgcccaggctggagtgcagtggcgcgatctaggcccattgaaacctccgccccccaggtgtaagcgattcccctgcctcggcctcccgagtagctgggactataggcacctgccactgcacccggccaatcttcgtattttttttttagtagagatggagtttcaccaccttggccaggctgatctcgaactcctgacctcgtgatccacctgcctcagccccccaaagtgttgggattacaggcatgagccatcatgccc

SEQ ID NO: 70137 - DNA, 1045 bp, Homo sapiens
agaaacagtagaccattctgagcagagattaaggccttgagttgagcaagagccttcttgtaggttagagtggttaagcaccttgagcaaaggggagagagtcagagttaaagcttctgaactttcctaatctataagatgaggcctctattgactagaatgtttgtgaagattaaaagagaaagtaaattaggacaaaatggacttctgaatacataatttctcagtgttaggtccctctctgcattctccctgaaggcttcctactcttttcacccaagatgaattcactgtatttttatttgtatttataaaattggcttattagttttatttcaaaatagagtgaaagatgcagttagccaactcagataaagagtaggagtcaaaataatgtaagcttagatttagatatagccaattccgagacagtcaaataatagatttttactctgttgcttaattacaggggttgaaacaagaatgaaattcagctctcactttagtttattccctgggagcatgagtgtattgtgtcctgccccaaatatttgggagaaaaaaaataagggcacactagaagttaaacaagtaaaagttcacataaattaaatgacattacctatcagcagtagctatctgcatctgtgtctctaacaactataagatctggcctttttcttttctttttttttttttttagacagagtctagctctgtcgctaggctggagtgcagtggcacaatctctggtcactgcaacctccgcctcctgggttcaagtgattctcctgcctcagcctcccaagtagctgggactacatgcgcgtgccgccacacctggctaaattttttttgtatttttagtagagacagggtttcaccatgttagcagatctggccattttctaagagctaattgctttacacctattgtaccatctaatcttcccagcaactcacagaagcaggtggtggtatcctcatttttggatgaggatgatactaagttaagaaatgcactgagtgttgaacagttagtagt

SEQ ID NO: 70138 - DNA, 1765 bp, Homo sapiens
atacatacacgtattccatatcctttgttatattatgatgctttaactgtagagttcattggtcaaatagtatgcttagggaaatacgtttactttgagtaatagttttcaccagaagattgtaggttatatgtgagagtaacttttaggaggcttttattatttaaattacatataacatatagtagattagtcttttaaattgttcttaatcatatagtctttgaaactttttcatcaatgccctatttttttattaattaaattgctataagtctcttcttcctcatctataaaactagggggttggattagatgatccctaagctctttccagctccaagatttaagattttaactttgaactgccataccaaaacaactcaaggatcaacctgcaatcagagtagtcgcttgttccacaggtgattagatcattatagcccaccaaacgaaaatagagaagcagaatagattgactgtcctaggctcgtatgatcattattaatttttttttcaattacaaaagacatgacttctgcagaaagtttgaatagagatgaaggaaacagtgaatggttattgtatgcctctcttcctagcctcatgctgcccccatataaataagttcaagtattagatcctttctgacctttcttagtatttttcatgtaaatacatctctgtgtgtgtgtgtgtatgtgtgtgtgtacagattttcattcaacagcagagtgtctactatgtgcccggtattattttaagcagcagggatatgtggtgaacaatatgttgcatatgtggaagatgaaatctctgttacagagcttacatttctaggaggggaatggacaagtaaataagaatttcacataatggtagttgctaacacaaggtattgctggtaacttttgggggctgaggtgaagagatatgcaatattacataaaggtaggcagacctctctgaggaaggatgtttgaactgagatatgaatgacttgagggaactagcctttgatcaggagaagagcattctggcagaagtatcagcaagtgcagaattcctgaggcaaaaacaggcttgtgtgttgaaggaccaaaaagaatggccagtgttgctgggacataatgaatgaaggggaaaatggcataccatgaagttaaaggtaggtatgggccagatcataaagacctaaacgccttgagggccgttgaaaggagtcagaattttaagtgatattatagcatacatattctgcaacttgttttttgtatcatgggtaacttttccatatactaattttaagtacagaggtataattttaaaatctcattttccactagtccctttctcatcctataaaaatactaaaatctctaccattctaaaaatgttgctcttctgtgctcttttcttctctagttgttactcttctcaaactttctgcctctattttcttccctgccattcactcaaccctgtctagtttagctttctttaccagccattcctctgctacctctcttcttcaagtcaccagttactcaattttcaaatcctcatctctttggtacatttagtgcattgacaactcccttcttcatgaaactttctcctttctaagcttctgtatcactactctctcctagttttcatacttctgtctgcctgttttaaatattggtggtctccacaacttgatctttggctgtctccttttgcacacatttctctaggaagtttcattcactctccttgtcat

SEQ ID NO: 70139 - DNA, 1021 bp, Homo sapiens
ggcatagctatcagagaacctgggcttcaatattggcccttccacttactagctttttttcactaaggcaagttgcttagccattgtaaacctcaatatcctcatatgaaaaataggttaaatgagaatgaagtaatgtgtgtaaagtaaaactcatacatggcacatagtaataataataactaacccttacgtagcattaactgtgttccaggcactgagctaaacaattattatttaatccttatgaggtaggtacttatcccattttataagtaaatggagacactgagaagtaactcgcccagggtcatgtagctagtaagtgaagcggcagtatttgaactcagacagtggctcttaactgttcttctagattgccttttaatatgtataaataaggacttgatatatgttctctactattattgtctttattttcagaaaactgtgacaagtatagattcataaaatcctagaagtggcaggaataatctatgaaacctaacaactttaggaaaagttgtattcattcaacaattatgaatcacatggaactatttatccttaaggttttagattaattaagggggagggggcatctgctatgaagcaaactataatatataatacatagaacaataatacaatattaaaactatttctaatttttaaaatatttgcagtctcaaaactggtagggaaagtgatcttttgatttgtattaccaattacaacttgttctttctgttgttcatttttaggatataaagaacttttcatacatttgatctcccttttttgctccttttgaataaacttcatattttccctttatactcatatatgttttaatggaaatgatgcatttgataatttcagggacactaaaataatcatgaaaaattattttcatgattcctaagagttgggaagttcttaaagcttgcttctccttgctcattgattattcaatattaactttccctatctgaaaaatatgttatataaatggaaattt

SEQ ID NO: 70140 - DNA, 1182 bp, Homo sapiens
ttcatggtgtatctcaattcagactagccatatttcaagtgctcagtagccacatttggctagttgactaccctgttgggtagtgcaagtctggaccgctctgagttatggagttatattattggtttaatgagacctaatgacagtcaagcattacaatgcctgtaatgtgccatgtatagtgttctctataatattttcagaagatctttgtaataactctatgatgtcagttttgttatcattttagacatagacagtgaggtatggagatattaatttgtctaagattaaacaggtagtctgtagaggagcaggatttaaagctaaatctgaccctaaaaccgctgtcctgttttttgtttctgttgcactgttttaaagcactgccactagcgtttgggcaggtaggtgggtgaggtgtagttttggcactgctcagccagtgacttgtgatttaatttttccttatttttaggcacaaaggacttcttagcttagagtggaagtggtatcttctaagtccttgctcatattcctgattgggaatgttcctttatacttgttcctcatttcccattcattaaactgctttctacaattctttaaacatgtagaatggagagatggctctttgagtctgttacaggaccgtggcggcagataagggaaagctcagctcctattggcaaaagtgaaaactaatgtctagtaaaacttttgtctggatgaagaagttttctaagggtttcagtacttcattctgagaaagaattgagaagttcttattcatcatgctctttgaattgtaaatattttttcagttattttacaggattttatattgtggattaatacttagcagcatgttctatttaatttgaataatttctttgaattacatttggattcctagagaatattttctcacaaactttttcatttcaaaaggaaaaacaggcagtccctaatttttgaatacgttgtcttccagattgtgtgtaaaacagttgtttgaacttggagcatgttttactacactggttttaagttcctgggctagcccacagaagcctatttaaaaccacatcctattttagcactaatatactgttggtttaagtttagggaatcagagcattggatcgtgttctgtgggagttggaggagaaagtaagttta

SEQ ID NO: 70141 - DNA, 1063 bp, Homo sapiens
attcataatttgttaagtatacatcaagggaactgttcctgtcatctagaatgaccatctatttaataaagccatgaaacaattagagaactttcagaaaacaaatgggcataatgctatgttgcaaaaacatgtcctgccttgttcaccctgtccatttttagattggtctggatgatagtgaaatgcagaagtgtttgccacacaggtgcagtgttttgcagctgttggaaacattccccctcacccacaacccctttgctttcttcacataaaattatgctgtgcttagaccattaatactagaagatgggatttgagaatttgaatgtctgtttacataaagatgtaatacagagaaataactgctcattcaggcatctgaatgtaactgcctagatgaatttattaaaactgtccttaaggtcacactagccttaaggtcatggagttttagatacaagagactgcctttaaaactcctgtctgtagaattgctgccctccaggactgaactgtctttgaggacagggcttatatatatttatttttaaatctcttgtaactaacataacacctggacaagtaggcactttatatgtttgcgaatattttatgttggaagatgaagccaaatgaaaatatcttttagtatggtactaaatcagaaattataatttttttaaactgatgccatgtggtacactctatagtagtcatgaacagagtgccatggcctgagagagaaggggagagtgaataatcatgtccatggaaatcacgggatactttatatttttatgtatcacggaaaatacttccctagactacaattggagaatttgttttgaagagaatttttttcctcatctaagagaaaataatgtattttccaacagcagtgttttccctccatatccccatttttgtcatttttgatgcattatataataaccaaattaatgattcaaaattggaaagttttagagcatgctttctttatataaaaccaatattttattttctgtagttatttctatgatgagagttatgtatgctttgg

SEQ ID NO: 70142 - DNA, 1020 bp, Homo sapiens
tttatttctgtgtaagagaatggaaaacagtttacatttgagaaaagatcagtaaaactagtaacatttttggaattggtgggggtagaggaagggagggatttggaggagaagcattgtgtgtcttataagaaattatcacaagataatttgttccttgcaacaaggtgtgattaggaaccattggaaaattttgaggattctaatgaaacatttaaggaatttgatttttacagttagtagaatagtttaaagggaaaagaagtcaaaatattaaggacctttacaaagaaaagcttggtatatttgaggcttgaaataatctgaactaaagtattgaagaagaaatgtccaaaaaagcaatagtgagaggctgttgggagtgtagggttaaaggaggacaacagatcaaaaatggctgcaaggctctgcctttaggggatggaagagtaaattttgaagtaccgtcttggtattatcattgctctaggataagggataagagctgtaattcactctcaggtccctccctagttttctagtgactgaataaagaatgaagtggcaaatttttgctgtgggatgcttttgaaacaaggtttcttctcttcggttacctaattgggagagggtgttatatattttcactaggggtaacagtatatgttgtttccattaaagactaggtaatttggatgtgatagaagatattggtgtgtttttagaaatactgaaatgatttggggaaagaaaaaatgtataaagatactttgaaaactttgagggcttttaatttgttagagttgctgtttttggttggtgttttcttgtaaaaacttaaccccaaggatatgttttacttctgctgttgttaataggtctctgttcatttaataggtggcaattatcatgagcatttggggaaaaaaattttaacgaagttttgttgggcagaaagtatactcttggcttttttaggtatgttatactccaggtattttagactacaaggcaagaggc

SEQ ID NO: 70143 - DNA, 1468 bp, Homo sapiens
taattttgtgtataatcaaaaaagcaatactagcatagctttttttcatagacattaaaacttgtttttggaactgcacacttatatttttaagaattgttcttataaagagcaaataaaacaccttttacactttgtattgtttggctaatttattgtcatttgtttggccaaatgacaaggcatttttttggtagtacgttgagctaaatatagctgttcaatgtttatattgaaaaattaatattattaaaaagggtatctttttagtccatgtgttctgatccttaacattttatttaatcttgaagctatattatttcttctccctattccccttttgagtacttttgattttctgtaatatctttcaaaacattttctttcccaacattaaaacccttttgatgtatagagaaatgtcgtttaaaaatccattagcaaaatcccttatgatgataacaggatacatttttttttccttgctcttttattgtaccttgttaagctggtctcacatgaactttcttagaatcaggcagttcctggttcctatgggacttcctgttttctcaaataaaaatagaaaagcatctcagaaaggaaacctggtcagtgtgaactactttgtaagatcagttagtcttagttagtcttagttgtggcctggattatatagatatatagtctatataaaatataaaagtttacaggtatctgaaagctttgaatattttcgtatgtaatatcaaaataaacaaaatgataaggagaagactctgaataaaaaccctgagaggtgctacatattcagccgtaaacatttttgtatcttaatttagaggtgaatgaaggaggggcataggggttggatggaaagtggtaaatcctttccttattatgtaatattttattgtaaatttggaattgcttaatactgagacttaattcttagttactttgatctgtatttttttttcttgccactttttcagatgttggcaaggattaggaaggtggatttttaaaaaatcattagaagtcagaattctaaatgaattattcagttttaaagcatcttgtagatttctttcagtagttaactgcttcttagtctatattatgaagagaaatcaaattaaggtagaaacaaatgatatagtcattagcagtaataataatggatagtgtgtattgagtacatattaagtgcttgacactgtgtcaaacattttatcttgtttatctcatttaatcctgacaacaactgtataaggtaggtatcattgttatccatactcctttaaagaagaaactacaatttagagtagctaattagatgttagttcaaagagacattactaataagtggtagaggtggagctgggacttgaactcagcttctgtgataccagagcacctgatctcaatgattgtgaggaaaaccactaattcaaagtgagaatga

SEQ ID NO: 70144 - DNA, 1078 bp, Homo sapiens
ttctctatctggactcttttcatacaattatttctgcttccgagccagcctatacattgtacattctggcccgggtagtattcctgatgcacaagtctgttttactctcctgctaaattttcagaatgaagtcaaactctctgtcttgctatccaaggctgtctggtagttaatactaaacaacttttctagtagtttgcagaatcaaacaagggctactggttatgtaagaaatataaccaatgctttcatgccttcatgcccttgctcagggtctttcccattgcctaggatgctgatctgttagtttttccttttaaatcaaactcaaatattctgttccataaattctgttccctccttccctccttctatatttacagaagaaggagggaagagaatcttctgtattactctgcagttgtataacatttaatatgttttttgcccttgagtacaggaaccatcttgttcactgggtctctcgctttgctgagagaacagttcttaactcctagtagatgtttatttaatgtttgtttcattttaacagttcataagtttatacaggggcaccttgggagcctaggagaggactgagtatcagtcaacgtgccagtactcattcccttagttttatgtggttgagttagattaaaacaagacatgaagggcagccttgatgaagaaaacagtctcatatgaacagtttacataagaatacactgtgcagagggggattgggaacattgctttggtgattgatggagtttattgtctgtgagaccttttttttagcactaaccttatgccaatttttaaatcgttctccagaaagtgaaatatttagagtaataatttagagtcttagattaaggtttcttaaaaatatggtgcccattacttaaatgtgaatttgtctttcagattatgtggcttctgtgattttaaatttactgtttttttttttttgattaagaattatttggtgttttttttcttgtaattgggtatttcataataacttctcttaattttaggaaagtgaaaaaactcttatgatgaacacattatataa

SEQ ID NO: 70145 - DNA, 1067 bp, Homo sapiens
ttcagacatgacagaaaccagttgccccgaaaagtcagatcattagatgtatgttctagtcttctgttttccttctgaggaggaagccacgagttgggagtttcctctctattgcactgccctgtggggtgatgagagtgtctgggaagtgagtgatatgaattttcctaacagctttgatacaggtggttttgtgcttgcctaggtgcaggaaccttttaactaatttctggatttttcacaaatggaattggtccatgtatttttgttgaatcggtgtctcattgagggaaggagggtctggggcttcctattctgctgatgtcactcctccactttttaaaaattaagaatgtagtatatgttttaaggctttcagcaaagttttggtaatagtctcctgtgattatgcttgtcaacaaagagaaatattgactgagtttttaacttaatgcatgacttatatgtaggtaccaaaaagatcctaagacagtataataaggagattatatctggagtcaaattctggtactgccagtagaagctattacattttggtaaagtctctaacttttctgaacatgtttctctgtgaatgtgggactgccgttaatacctgtcaaagttgttgggagacttgagtatataaaatgcctagctcagtgcctgatgattatagtagcttcccaataaattcaatttctgtgttttctaattaaatcagtgccactctagcgagtaatctctaataacatgccacagaaattttgtttaaggttgtttattgtctttattttcaattttgacctagatgagaacattaatgacagtaaaatttatggatagtgtaatagctaatagactggacagttaaaggatcagaattcaaaaagatcttgactaaggaggagttatgattatagggctcagtgttatgggatggacgaatgtcagggtgcaggcaaaaaaagggattggattgaggctaaaggagacatagaataaaatattccatgaagaaaggcatagtgagaatccaaagcaagcaaactattccttataaaata

SEQ ID NO: 70146 - DNA, 1063 bp, Homo sapiens
attatattggagtagtgggaaaatgctaactttttttttcttttttctcattctttttaaaattttctgtaatgaatattttatgttatgtagttaaaataaaaatgttatatagagtgtgttataaaggatactttacagagagtcgaatgtagattaagaatagttatttttctctatttttcttgttaggatttaggtcctgaatatgaaggtatatttaacacttcattgcagtggatcttagaaaatggaaaagatgttggaataaggtaaaggatctgatttccactttgaccattctgtactgggagaaatggtttttgactttaaattctaccttacttatttttaaataggtgtgttggttttggccctgaggaagaattgacaaatataactgatgtgcagtttttacagtccacaagaccactgatgtctttttggtgtcgttttcgacgtgcttttgttactgtaactcacagattattgttgttatgcttaggtaagttgtaaagataagaaatgagataaattgcagcctgaatttttgtgtgtatttcactaaatgccagagttgagaattcatttttgtgatggttgccacataagtcacagctagatgtcttcactaaatataataaaaataatgtcagaatcattctaaaggcttagaaagcagtaatataaggagaggtagaaataaaactttgttataagactgtcacagaaaaacaagtgtggtcagtatatacatagaaatctactttagaaagtagaattgaaaaatacaaaaattgagcttatttttaaataataaagtgttataaagtttattaaaatttagtttttaaaatgtaatttacctacatttaaaatttttatcattttttaattgataatagggatttaggtgagagttgttttttcattctttctttcttctttaaaaataattcattttggccagctttagtggctcacacctgtaatcccagcactttgggaggcaggaggattgcttgcactcaggagtttaagaccagcctgggaagcatagacc

SEQ ID NO: 70147 - DNA, 1611 bp, Homo sapiens
tcccagctacttgggaagctgaggtaggaggatttcttgagcccaggagttggaggctgcagttagccatgattgcactactgccctccagcctggatgacagagtaagaccctatctcaaaaacaacaacaacaaaagaaaaattcattttacttaaagtaagatttagtatgtttaatctcatgaggttcacttttctagtcgttttatgcttcaaaggaaaaaagtttgtgaaacatagttatatatatatatttttaaatagtagttagaatttaaatgttcacttatcagtgtaatggaagaaatgcttttttctagaaagtgaatctttggaaaatgttcagtattaaatttttttatgtagttttaattatatagctaattcagccatctgtcttgaaggttcattccgttgtggcagttaaaataatcactgaaatattattgaatgatattgaccacaatttttaaaatacaaagtatattaatattacaggtgtagtgatggtttgtgtcgttctgcgttacatgaaatatcgatggacaaaagaagaggaggaaacaaggcagatgtatgatatggtggtaaagattataggtatgatatttgtaagaatctcaactatttctagaagagtcattgcatgattaaactacattatgtcaagtgattgattcatttgtaaattttatttatttttagatgttttacgaagtcataatgaagcctgccaggaaaacaaagatttacaaccttacatgcctattccacatgtacgcgattccttaatacagcctcatgacaggtgtgttcaaagcattatgagttcaagtaaatcagaaaatttaagtgctttctgcagtattgaaaattatattgagagctgtgacccttctcaactagacttgcttactgcacaggttttttttggttttgctttgtttttgtactttatactctctttctaaattctcttccattctcctgattttgagtgacacctggatttctaagtcattctcattcctaggcattcttgattctttgttgttagtctccatcttatttcctttaatttcatcttgataaagaaatagatgacagccagtggctggtgttttactaatgttttttaagtactaactttattattaatgaagcttttaaagtaaaaactaaaatgcaactttttgaaaataaaagataattccatatcctgaagcagcatcttgaccctagcaacacataaagccagtggagcttttggggaaaaaaaatacagatgtttgtgctctagctctggaaattgaaactcagaaaatctgagatgagatataggcatctaaatcttctttgaacaaactccatgagtagtggtaagaacagctagagttaactattacctcagatactaatatttcaaaaagatgacaagccaagatgatagtaaatttgccattttgttcacatgataggaaaaaaatgaagaaagtctgggatagagctgttgacttccttgctgctaatgagtctagagttcgcacggaaacacgaagaataggtggtgcagattttctggtttggcggtggatccagccttctgcat

SEQ ID NO: 70148 - DNA, 1840 bp, Homo sapiens
tttaccatattgggataactcccaaattttttattttgaatgaagtctggttttcagatttttgtacccaactatatatttctgtactaggaggtgggcaccacagattcaacatgtacaccagcctgatcctcttcagtgttcctagtctagttaatgatacctttcctgagttgattctgccataaacttagggataattcttaatctctcctttatccctctttgtccaacctttcaacaggtcatgtcatatctactccataatatgtcctgattctatccgcttgtcacttgcactgttggcctgtcttacccacatcattatcctctccttcttagacaactataatataataataaccttctaactggtcatcttgcattcacttctgcttttacctgagtctccacataacaatgtatttttaaaatatgtagttttaaaagacagatctcatcctattctactccttaaaacagttgagtggctattactcttaccataatgcccaaatacttttttgtagcctacatcatcttaaataatctgacatcttctgtaggtttatctctattctttctactccagccacatttgctccttcgtgccccaggagctgtgtacaagcaatcacctctgcttgaaatcttcctttacacacctctcttcaccctgctaatttttattcttcagttcccacataaatttcactttttcagggaagttttattttctcatatgaggttaagttacttttaaaaagctttttgtacttttttttttaaggacttaatcacagttgtactttcttacatgacactctttatcatctgtctctcccattaaactgtaaactctttgatagcaatgactgtcttactcaccttaacatctaaccaggggtctggctcctagtaaaagcatgcagtgaatattttttgaatgaactgaatgattgaatacctttcaacaaactagaacaatgtcaaatagtaaaactaacttgttttttgtagcatttcatttagatagaagaaattcaccaccaaatagtttgacaccgtgtctaaagattcggaatatgtttgatcccgttatgtaagtattatgatcaggggtacatgtaactcttattctgaatatttggctggaaaatgcatgatattcttataatggtgtgtctgtaattgaaaatgtttttcttctgaatctctaccacagaaatgttatgtttttctctttcattaaattccaagcaaagatttggccaaaggacactaatgtataaagatttgtaaaacttttataaatctttgtattccttatgaatcgtcatagcagatagataaatgcttgaggcaaattaatgactcacaatgacaaagagtaccctttattaaatgtgtaagtcattatacatgactgtcaatatttttgcctcagtagaaaatatagatacaatcactgctgcttacaaatttcaaatctcaaattgtaaaaagtttcctacaaagatgtatatacctgcttctctacaaagtcctgtctccacttgtcaatataatatttgaagaacttttcagactttataattccaacaacatatgcttccagagaatagcacagtcaaaagtgactgccttagaattcacagtatttcatatataagctgtaatagttcttagaattagcttcctgagggcactgcttatctatccagtgatagtacagatcaaattctgtttgttttaaaagtcccaacagtggcaattacaatatgtatacaatacccccaaagtctcatctaatcactcattgatgaaattccaaataagt

SEQ ID NO: 70149 - DNA, 2516 bp, Homo sapiens
tggcgtgatctcggctcactgcaagctctgcctcccaggttcacgccattctcctgcctcagcctcccgagtagctgggactacagacacctgccaccacgcctggctaatttttttttttttttgtatttttagtagagacggggtttcaccgtgttagtcaggatggtctcgatctcctgacctcatgatccgcctgcctcggcctctcaaagtgctgggattacaggcatgagccaccgcgcctggccagcgctctgcactcttttactggaaagtgggaggagggctgagacttctgaattgtaatttttaaatctacctcctgttagtcaacaagcatttacttaataccaattaaaatcgtatgtggttttaaaactataccaattctagtaatatatatatgttgtaagagacagtgaagaatttttaccgagtaggaatatggttgttgatttttgttttcattaacttttagggaaataggggatcagtggcatttggcaattcaagaagcaattttagaaaaatgcagtgataatgatggcattgttcacattgcagtagacaaaaattcacgtgaggtaaagtaacttttggtattgaatttcatgttttggatttgttgctattaaactaagactattttctttcttttttaatatcacagggttgtgtatatgttaaatgtctgtctccagaatatgctggaaaggcttttaaagcattgcatggctcttggtttgatggtaagaaatttgagtactacaaacattttgaaaagatagttatagtttaattttaaactataccagatttcaaataaaagaatttaggttagcatttttttgagtaataattttagatgactttatttatgttttgtgctcatatgtcttttaccacagttaattttctgcaaatattaaacagttttactgatctaaaatattatttttatcttacaacagggaaattggttacagtaaaatatttacgactagatagataccaccatcgctttccccaggctctcacttccaacactccattgaagccatcaaataaacatatgaactccatgtctcatcttcgtcttcggactggcctaaccaattctcaaggaagttcctgaaaagattttcttccatttctaagactgttatttacaataggaaaattcctgtttggctttttgtcttcctttttaaatgctttttgtatgtaatatttttattgatgaatacatctctgaacgttccagaagtcttaaggttccaaagggatttagcagtgaggcagcaatgctgagtaggtaggataattatttcattcagtttttggagctcagttaagccaatacatttaaagttttgcatgaggaacactgactttattaagcattttcagatgtggtggttgtatttttgccccaagaagtgtttggataaccacacaaaagcatgatgaaaaggcttcttgtagtcccataatttcttgtgaactaatgttgtgaatttttgtatacagtcacctgcatagttcctacaggctaatgtggtaaaactgttgatttcccaatttaaccttaggtttctgttgcttataagcgattcatttgctacggctggaatatgggaaaattaatttgggcttagtggttacaaatatgtgtaagtggatgtatatgtacttaaactggctttgtatatatgtataaatgctggtggtggtgaaagtagtcttgttttatgaggatgtctgcattaaagcagtaaaataagctttccattttattcataatctaatgtgtgtgtatatatgtatgtgtgtatgtgtgtgtatatatagatgtatatatatacacacacagagatatatacatatggctgtacttttgcatagatcaaacagccaaacacctggaagtattagatacaagtttaaaatatcttttataggttttatataaaaatgtctgagtatgattttgtgtgaaagttctgataccagttgtaatagagtcaaatttatgtgagcaataaagaagaaattggcagatattggaaaaatattttgtgaaaagctgtatttattataaatactagggccatgacatagtaccattggggttaagtcattttcccaatctatttataatttaatgatatgttagtgcctctgttatatgtcaagtttaaagcagggcacattgttgcagcaaaatgtgtatttgacaaattatacttgcaattttgggtcatgaaagtttgcaatatagtaaatgcacgattgactgttgctttgtgcctcagtatttaatttgtttcagtaaacttactttattactgtttatgatttcagataaaaatagttgctgagtaaattttacttgtaatctacaattggctttttaaaaataacctgttgatatataattgtcagtccaaatgaatatgtgaaacagctggaattgtacaaattttggttgtatttaaagctcagtttccttt

SEQ ID NO: 70150 - DNA, 1038 bp, Homo sapiens
cacacttgtccccatctacttgggaggctgaggtgggaggattgcttgagcccacaagttcaatgctgcagtaagctatgatcatgccactgagctccagcttgagtgacagaatgagactccatatctaaataaaaaatcagttggccaacatggcgaaaccccgtctctactaaaaatacaaaaaaaattagccaggcatggtggcatgcacctgtagccccagctactcaggaggttcaggcatgagaattgcttgaatgtgggaggtggaggttgcagtgggccaagattgcactacttcactccagccttggtgagcaagactctgtctcgaaacaaaaaaacaacaaaccataagcagtttcttatgactgaataaggacatcaatagataagaaaggtaggcaatggtcacatctttgtaggtcacatgaagattggatgttggctattaaagggagtttaggtgagaaatggatgataaggatttgttggcatgaaaaatagagaaaagatttgaagaataagataaaatgggaaagatttgattaattattgacagagaaactgatatctaattatttagcatgggaaatctaaaatcccaacatttggggaatagatggtaaggaacagattggataggaaaaatgataaattggggttttggctatgttaagtttgacatgcctacaaaacatttaggtggatgtttctagcaagtgaagggggatctacatttctgagatattttgagaactgtctgagggaggtacaatttgggagttagaaccatgactgtgggttagatgacccagagagtccaaatggttaatcccatttctgccttacttacctgtgtggcccttagatggggattgaggatggggtgaagtagaaaggaaaatttgaactaaattaagaaggtagaatttgagaaggtctttgaatgaagtgaagttaaagtgtaatctaatatgactatcacatttctggtttgggtagctggttggctggtgatgacattccccaaat

SEQ ID NO: 70151 - DNA, 1044 bp, Homo sapiens
aggtgaaaaattgtatgtttaaaataatttgagtgtattctctacacacaattggaaggaaatgctcaaaaatttagcaatggagaccagtctgttggattacatacctattttacaaaattcaccatgaatatttattacacatatttaaatgtttaccttaattgagattctcataattgtcttcattctgtttataaaatttaatctcctgtgctaatatatttcgaattactgccaacctttggcaataaatctcagacaatgagaatttttataacttcagcactttggaaaagggctatgtttattttgcctggcatgagttgttattgttagcaggtataggaaaggacttctgaaacacacccaatccttccattgagagacagggtggcaggcggggaagggaaaatagggataagtggttacgagcattgtctctggaatcagaaccatgcttagatttcagctttgacacatactgatggtagtgtggacttaggcaagttatttaaatagcttgtttcttcatttttaaaacagtaataattgtgttatcaagagaactcaatgaaataatgtaaaatgactgccatgtaatatcactgttactatttcttaactggtctgtgagagcaacaacttgataatatgacttatttttaacatctctttgctgttcttcattgtgatcccccttaatgatgctcacacataagacttgtgaaaatgtattatctcttcagtgcttccttttgaaatgacatattccctattccagcaaatagaaaaaaggagtgcactcctgactagcataatcttgatgcaaatacaagacaaaaagggaaaattcacaggccaatctcactgaatagagaaaatagcaaaaatcccaaacaaaccaaattggtcagcaaaccaaattcagcaacatagagtgagaattacacatcatggccaagttggatttattccaggaatgcagtttgacattagaaaatcaggctgggcgcagtggctcacacttgtaatcctagcact

SEQ ID NO: 70152 - DNA, 1076 bp, Homo sapiens
tcctcaaagttctgatgtagcaagattatagtggattctagaattttctttttaaaactctcccataattcttatgcttggttcccatgagtccaggcgaaggttaaggaagccctgccttagggtgatgtcagtagtcatgcaacaaacactacaaacaataggcatggagagctgaaaagatttatcaattgtctgaatgcgagattggtgaaaagctattcctaaagattaatttgatgtttaaaacctagtttggaaaggaagatgatgaattcagttttggaagcctgatagatttgagattttaacataaaatttcaggtatatcagtcttccccaaagtgtgttccactgaatatttgtttcatcagaccattacatctacataatgctagtcccaggacatgttgatattgtgttctgtgaaaaaaatgagtgtcattggactaggaaaataaaagatggctcattgggaaacaccgaattaaaataagtcaaatggttgctttatcataaaactcatggagcctacaacacactaatgttcattgtagagctccaggagtaatacatatgtagcactttcagaattttttcaccacagaaaatttttataattgacgaaatgttgtgaagctaatgttcctgataacacacgtaggaaatgctaaagtagataaggaagatcttttttttattattattatgctttaagttttagggtacgtatgcacaacgtgcaggtttgttacatatgtatacatgtgccatgttggtgtgctgcacccagtaactcatcatttaacattaggtatatctcctaatgctatccctccccactcaccccaccccacaacacgccacggtgtgtgatgttccccttcctgtgtccatgtgttctcattgttcaattcccacctatgagtgagaacatgtggtgtttggtttttttgtccttgtgatagtttgctgagaatgatggtttccagcttcatccacgtccctacaaaggacgtgaaatcatcattttttatggctgcatggtattccatggtgtatatatgtgccacatc

SEQ ID NO: 70153 - DNA, 1073 bp, Homo sapiens
gctgggattataggcatgtgcccccacacccgactaatttttgtatttttgtagagatggggtttcgccatgttggccaggctggtctcgaactcctgaactcaggtgatccacccgcctcggcctcccaaagtgttgggattacaggcgtgagccactgcccccggctgaattattttaaatgtagagatatgctgctcgataacaatcagctttattatttactatacatggctgtatattttgagggaaatgtttaaagacagattatattcttaaatgtgattaaatgtaatccctattttgtaaccagttttaaagaaataatattttatgcattttcaaagtactttaatttattttgtagaaattcaaaggacattatatcttttataaaaagattgataggaactgccttttctattttattcttcttactggtagatttaataattttcctcttttggcatgattttttcgaaagatatttcccaattcatatgaattttgatatctattatgtgtcaccatacaagtaatgagtctatgtaacaaaaagatgaaagcttctatatttatctgttatctacatttgttactaagagtcaacaggatggctttatataggatgatcagaaacaggaaagctgtggtttagaaaatgttttaatctgtttcaaataacttagcagggcaatctggtaaaaatgacatgattaatgactgaagaagattaaaatattttcacattctgtttttaatgacctctatcttaagtttctaccctaaaatttacaactagtaaaatattataggaaaaatatatcattcataatcctcttgaagtcgtgttttaccttatcaaattgtgccttctttttagccaaaaatagcataaatgtaaaacaaattttaactgaaatatagcttttgtgatattcttaaatacattcattaaagtgttaatatttactaggtttaacataaaagatctaagattatgttttcaattagggtaacacttcagtcagtgtgtaattttttaaaatttattcttacagctaggcagatct

SEQ ID NO: 70154 - DNA, 1057 bp, Homo sapiens
taactcttctgtttataaatggcagtagctgagtatgcacagaagagactgaagtctaagtctggatgtgctatttggctacattcaaacagcatgggacaaacacaaaatgtaaggctagtagaatattgacactaacaaattattcggaagttggttattaggaaatctttcactggacttcagtatctttggtttctttaagaacaaatctaaaattttaccccaaaagctaggtagttatatattatttgtattatggctccttcaacacataacttttttaaacttttaaatcaataaaagaagggattctgtctataaaacacaaaggaatacaccaagttaatgttttagttgattagtatattattttgagagtagaaaaaaatcaatgcaaaattacttgctattcacatatatgcagaaaatgtaagtccttggaatgtagcacacattatcattacataatctatatccatatgctgtttataacaagctgaaatgttatacccttgagaaaagaaccagattctggcacaggactgttttgtggcaaggaaagatgaatggattccaaaattttaaaaggggggaaaagcttgatggttccacaaaaaataagagttgaaatggggatttagagatatatatgttaacacaagctgacaattaaagcaattaatttccttctttatctatatcccctcctagctcttctaatcctgactaaggtaaatggattgactcacctttttagcagatgaagataggaacaaagatatctggcattacagcctgtctccccatcccccgccatccccatttgtagcttttttttttacagatgtttttttccattagttagaatagttagttcttaaagcagttagagacagatctgtaccagtcagagaagcagtggttcaagcctgttggcttaattgctttgagtatgttgctaatgatgctggggccacatgttagatagccaatgtgagcgtttttatgcagtggaaaaggtctttctccagacaaatattgtacctctaatcct

SEQ ID NO: 70155 - DNA, 1064 bp, Homo sapiens
ctccatccttaagcaattttctcctttttcagactctgtcctgattcccttgtcctcttcctatttctggaaatgctcttttcttttcctctactgactcttattcttttgcttaacatttaaatacctgcctggttctcctctccgtttatattcatccctcctacatatccttatccaggaccttactgtcttttatgttgtgatgactttccaatctgcatcttgagcttggctctcatttctgagcccacatattcctttgtctcctagatccacaagaaactgattttgttattttctctgtaaaaatgtatctctagcatgattcagctagtcacacaagctggaaacctagtaataatgtgatcctgcccttcttcactgccctgcatgtactgcaatcaccaaaatcagtaaactttgctctcttgattgctctataaactctcccctgcttcccagtcccattaaagcttcattatttctgttccagtacagtctctcatctgatatatacgtttccatgttccctcttatcccgaatccctccagtctgctttcagaaccatttttctaaaatacaaatttgatcatgttactaggctgcttaaaagccttcaggtggcccccaatcatcattttatctagaatgcccctggcagcagtgccaccaccatttacaactactgggttcctggacagctagatgagaaagcaggataactggtaaccaaaataaagttaatttttgaatagtatattgtatttaaattttatttgcatttttatctgcatgaatttttagagtctataggtttatgctaatttcatgtatattgtaaattccctacttttcaagacacatatatataattttttttttttttgagacagagtctcactctgtcgcccaggctggaatgcagtgacacaatcttggctcactgcaactgccacctccaaggttcaagcgattctcccacctcagcctccagggtagctgggactagaggcatgcaccaccatgcccggctaatttctgtatttttagtaaagatggg

SEQ ID NO: 70156 - DNA, 4414 bp, Homo sapiens
tcatagaagacacaaaaaatattttacaaatactgacaagcaaaatggtacaattatgtagttcgattcctttcaaatactcgttgatgtcagtataaccagacatggcccacttccacgtattcagccttagctgcctttagagactattcaaaatttaactaatgcactggattcatagtttgctatatttgagcgtcagcatactaagaattaacaaaacagaaatgtctgtttttcacatacctattgcactccaagatttgttacaagtccacatctgctatccgggtcctacctcatatactttatttatgagaaaaaaaacatatataatgctgaatttttaaatccttgaaatgcagagttggaagagcctttaaagatgttctagtcctgccatccaagtccaaattcctcctcattcaagtctagacacagagattcatagctgaactgcagcatccatacatctttggtctgcctaaagcaagggttggcaagctgtttctgtaaagggtcagaaagtaaatattttagactgtgtagaccatacagtcttagttgcaactacttctgtctgcctttgtagtataaaaacaaccacaaacaacatgtaaacaagtgagcgtgcctgtgttccattaaaattctatttacaaagacagtgggcaaaattcagccaacctctggtctaaagaatttgctgtcaagcatggagcatcaagatgggtggaaaaaatagcctaaataatgcaaataaaatactcatgatgaatatcagcaaaagctgtccctggcttttcagtccaaaggactcagattttttaaataaattgagcttcttactaaatacttttgttgggccttattaagtaaagttcaccttcctctactccacccctctagccaacccaaagataaaagagagaagctgccaggcatgttggctcatgcctgtcattcctgcactttgggaggccaaggcgggtggatcacttgaggtcaggagctcgagaccagcctggccaacatggtgaaaccccatatctactaaaaatacaaaaattagctgagcatggtggtgcatgctactcaggaggctgaggcatgagaatcattgaaaccgggaggcacaggtttcagtgagccgagatcgcgccactgcactccagcctgggtgagagtgagactctgtctcaagacaaaaaaaaaaaaaaaaaagagagagagagagagaagctaacacatccaagcaatcatttacatgcattctggatattcttaagcgtgatgttattttaaaacaaaattaaatacactgtggttgataagaaaagaatgttataactttgtcctaagtggatggcacccaatcatatgcagataatagaggtgatctatgaacactggatctggaagtaaaggcagtgctcagctccacatggaagatcacatggggaagctgatgttgaaatgagggacagcacggcctattacaaagcccatgagctgtggcatcagaaccatctggatttggattgtttctgcaatttagtgattctgaaacactggatatgtttcttaattttcttgagcctagagtacctcatatataaaatggagataataatatttatttctcaggattgttaggagggccacatcaggtaagtcctgcaaagtacctagcacagtgcctggcacacaagaaacactgacattctatacagaaagaataatgactgctctgttataaaacttagccaactcatcaccatttggaaaaatctgcaacctgggacaaaacaaacaaacaaacaaacaaacaaacaaaaaaacacctaacttttaaggaaatgacttgcttctatatttcctgaggaaaatgtcaatgctttcaccttgctaagtaatagttacaatcaagagcttagagaaaggcattgaacttagcacagaagttacctgtttctctcacttttacctttcctacaactctttggctattcaatgaggtttggaattagccagagttagccatttaagtttcctttcaggtgagaactcatgactcagtaaatagagattccagaatgttgtatgctaacgaggtcttcaagtgatcagcaatgagaggaaagtcttacttgttttcctttgaaggcagccctaagaccacccaggagcttgtgacgctcaagaaagtaacagcatgtttatgtaggaatgtgagctgcatagaacatggaacacctgtactctgtggccttcacagacccaattagcttctggaaagaattcagggtagaaatccttaatgggatgccccagaaagtgcctcaattctgaacaccgaaataatttctccagctctgcctgctgtgtataaaacatattcactaaaaactacttagttacccaaggaataccacataagaatctttgacattcagaaaagagacttgacttatttattatgagaacttacagtgttgttacaggaaacctattcggggcttaattggagactttcaaaatccagagccattcaaatagagaattggctgtcctgttaggtagcaaattctccatgatggaagtgatgatctatcagagatattgtggaaagtatcccagtaatggaaggaagaaagatttggctaaattgttttattcttgtgtatttatttaacaagcatttttgagcatctaatatgatctggtacttttgaagttctggcacattgataagggttaagaatataaaggaaaacataatgacattttttcccttaaaggacttaaatatgagatgggaagatagacaggatagccaatgaagactgtagagcagaggtgctaccctaaagaaatgcaaaggtagagtacctcacctagcagataatgatcagggaagggttcctggaacagctgacactgaacctcaaggggttaagtaatgtaagttggtcagatggaagaaggaagcaagaagccattccaggagaaagaaacgacataaacaaaggcacaagaaggtcacagagatgaaataatgcttcagccagtttagaggatgtcattagtggtggatcccggggctctgtcatcaacctgtcccattcatttttgtaaaaaaacttgtgtgtacagggtccctaatgaaaactgtgaatatgagtctgagataatacaaaacgcatttaaatagcaaaatcaagaccccaaataggacacagtaggaatttaagaaataatgctgaatccataactcttggcagggtgattagatgggtgcagaaatacagtatacgggagaaccgggcaaagaaaagcacatgtaaagaaagatttagtaatccgaggtaaataaggcaaagctgttaacatgttaatcttggtgatgagttcgtggatgtctgctatatcattttctgcacgtttaaatagttcataacttttaaaagcacttgggattttggtaactataatacaacaataggatttagttgccaaaattcaaatgcaatttttggctggcgtaagggaagtcagaattcagaaggaaagacgtgtccatctcctctattccatgctgacctgatcccatgtgcacagtctgaacagtccaggactttatacttaggggcacatgttcagctctgttctgaggagaaatacaagtgagtaggggctcgaaactatgttctatgagaaacatttgaaggaatgatggtgcttcgtgtggagctgtctcaagaattctaatcactgtcttcaaaacgctttcctggagacgacacgagacttgctgtatgtagctttagaggacaggcctacagtggtatatgtcataagtgtgtttaatggacacgcattcaattagatgagctctgcaaaaataatcttatttttagagaaaaatacaagtaagtagtgtgggtggctccttcagccattctgcttaatgagtgtatatgtgccccagaatgagcaggaagcaggaagtatgaactctcccatctcaggtccattttgcctctcttagcataagtatctccccagtatgagtgtaattctagctttgtaaaattcatatttttttaaatgcctccatcaccattatgcaaaccaactacattttctgcttttcaaccaaagaaacagtaatcagttccaacatgggcaggaatgctggctaacaactcataggctaataatggttgggttgctttcctgaggaactttcaagaccatgtttggccatattcagttgctgcctcatgtggctttagaaccaaacctcttgcaaaagatacaacttcacaataaaaccaaatgttaaaattgcagggagaatggttttagcttaacccaaggaagaatcctttaacacctaacttctttgaga

SEQ ID NO: 70157 - DNA, 1064 bp, Homo sapiens
aaagaagaaaggcatggagttcaatctagtgaaaacaagaggaggaaaaagaaaaataaaatggaaagacaaagactcataccaagcagaatttccaaggacctcaagtttagtttctttgtgttgggaaaacaggttggagagaaatctgggctctgcactgatacttgaaataagaacactaagaactgttctttaaataagaacagtttcttatttgaagaatagaaagaccaatttaaaactctgggcacattgcacaagttgcaaagagaaacttggtagaataatactagagtttttttctacaaagactaattttttttttccgtggatgccagtgtcctgataacagaaaagaatatagatcagtattttggcagtgacccctagtacctttcattattcacacagtcaattctagtaccctcttgccattaatctctggctgtcaccactgaaaacacaagtggagaggagtttgtccaatgccattagaatgtcagacccaataccctgctttccagtccttgaatccccattccaattgctaagacatagggatagggtgatatcaacagagcaagcctggaaattgcttatatctattagccactatatgatgccgaatattttgaaaaggttgaatattttgggagagtggaccttctatctttaagatgcacatacacttaaccttctttgtctcataccaggatacaaacccatgtacaaaagcacctaccagcctccaatagccctatgccattttgtgtcttcagacatctttcttctatttcttacagcctatggtattttcactcatttttctacacttactcttcttctctctccctttcttttatacacagccaagttctttcttttacattctaggccatacctctgttaggagttatggctaagccattttagtggttaaaatgaaatcttgtttttaatgttatcacattgaaatgttcaataactaattctccaaaaagacatcttaaaagattgttttcctttacatggaataaaacaatttatcattataaagctat

SEQ ID NO: 70158 - DNA, 1023 bp, Homo sapiens
gctcaccgcaacctctgcctcccgggttcaacgattctcctgcctcagcctcccaggtagctggtattacaggtgtccaccaacacacccagctaattgttgtatttttggtagagacggggtttcaccctgttggccaggctggtctcaaacttctgacctcaagttgtctgcccaccatggcctcccaaagtgctgggagtacaggtgtgagccactgcatctggcctggttaccctttttcagatctcaaaggtactcttagtcgataacaaattacagactatctctataatctttagaaaatactaattctttttgtttgtttgtttgtttgctctttcttggtgatgtgctatttttttttttttttttttgctttgcttttagagtaagttcatacgtgcagccttgtaaatggtaacttgtccaaggtaacagtcgctgccaggagagtcaaagggaatgttgattgtatttattttactatctgtgtacttcctgaaagaagggcagtttgataaaatacagtgaagctgctctgtttggggcacttatttgcaagtctgcattagctaattccctccagacttttggattcatgtcatctggacccactgttttgtgtatgttcagatttttcaagtattcctttacctgcattgacagagcatgtatttgacagaataatattaaaaaatataagatggcaagcagatggtcagtcttgactggaaagagatcttgttgaaaatggtttgtgaatgcagaccatgtttttgtttacaggaatgtccttttaaatatttagtttgatcagcaatggaggtcttgaaagaaagagctcaatgcctgcaagaatatgttagttgatatcctctacctgaaataatggcttccttaaaaaaagtaaaaaagtaaagaagttttttatacttcttgctgccagatgtctgtattgctaccaaaatcatggaggtgaaaaaaccttttcctgatctccatgcctgatgcagctctgtt

SEQ ID NO: 70159 - DNA, 1009 bp, Homo sapiens
aagacaaggctgacctgaagactagaaaatgagaatataaaacttaagaagtgaaacttttctaccattaggttggatatgggagatagaaaccaatatttcttgattatctcctgtgttttgggcattgtcccaggaatacttataaaagatgttctgcatggtagccatgatatgaatacactccattctcaaagataccaaatcttaagttaaaccaagtgtactagatgtgagagcaagaagatagcagaaccagattgggaactaaagtatgtttcgtgccaaagcctgtgcccttttcctgaagctgaaagtagactttctctttctaacactatagaaaaagactactttcttctccataattctagaagtcagagctgagtggggggactctatatgtcttttcacatgttccctgtcaagagagtatttctctagagtaagagcttcagactgagacccaagtgatacaaagggcatacaggtaattgggacagatagaagagattaaacctttgtctatggaagagtagaaaggagagctggagcatctgccaccctgcactggggtggcttcatgcagggagcgggagctggacatgtgggggttgttgtctgggggtgaagcaaggggagggcaggcaagctttggcctggatggggtggggaaggcaaggagtgaactaagcaggggcctcagccaggaaaaagaatgacttggtctgactgatgggtttggaaagaaactgggcatgcattgaccagcccttcctcttcattttatttttgggagctgctgatttatgagaagacagcatattgccttactttttcatgttacaagttttgcagggacagacctcttctccggggagaatttacggttgccaaatgcagcctctgactgggttggtcagtctgtctcattctgcaagccaacttgctgataggggaaacattggccaacatcagcatcatcagtacaaatatattttgtattcct

SEQ ID NO: 70160 - DNA, 1718 bp, Homo sapiens
agagggagaaggtggctgttttttaaaacctgaaacatcttgcagagcacagataagcattattctgtgtggctccaaggggtaaatccagcactatggaaaaaacattctaggaagataaatgtgggcaaaatataggatgaatatcacttttgatacctttttgatactcttatcagtatcacttttaattgaggccagtttctgatctggacactgtaattggctctattcccagatatgactggttattttcataaaacatcccttggattgtaagctcagtgtggggagggacagcatctccctcacttaccatagtgcccaacccttagccagtgctagataaagatttgttatgtgggataaaggacaaagcataactggaaggcggagtggcaagagaagagatctttgaggacagtccttctcatagcagcaagcagaatttcattgctatttaaattcagctctttttcttgtttggtaaagtcaaagcaaaatctacataaataaatgaatccaagaacgagtggccattttcgtataacaagtatgggatggaaatgattctagggaagaaaaagagaagttcatttgctttccccaatatatgtgtacatatgtggaaatacctaaagagaaacacaccaggaaatatggtataagaacttcaccagcattgctttcaggtatgtagacatttcagccacatttcaaactatgccatcttggtcccattcagaaaatttgaactttgcaactaaaactatatcagatgttttgctcccaatcaattttctttgccttccttttatctcaaaagctaattcaggtgtgccctgctttaagagagccaaatacagtatactacaacccaaaattgacaacctataaattaggagaatttacattacgaaaagattctgaatggtaacttctcaggagataggcaaacattgaaactaaagtcattttattagaataaaatcaaaatatctccgaaattatgatgtaaaccaatgagaaaacactatttatttatttatttgagagaagatctcattctgtcacccaggctggagtgcagtggcacgatcacagttcactgcagcctcaatctccctgggctcaagtgatcctcccacctcagcctcccaactagctgagaggaaaacattattttaaggacacccatccacttgagacatccttaatagaccaatcagtgccaatagaagtgactagatgtctttggagtctggcaagaaagaaaaatctatgacatgcatggctattgtctaaagggaatcctccctgtgttatattggaggaaattattattttacataaaattgacttatagaaaacaatcatggtaacaacacttttccatggtgcttttatataaagagtcttttgaatcaattatttggcctttggtcattcattcattcattggtaaacattacttaaagcccagtgtccctgagcctaggttgggtgctgggcattcaaagaataagttatggagatacttttgaaaagtccattcacaaacaagtaatcatactagcttgggatgagtgtcatagagtacaaacagtcctatgatgagtgctcgagactacagatggttgcagatggtttgaagtatgatttttctactttatgatggtacccatgcaaccattctgtttttcactttcagtacaata

SEQ ID NO: 70161 - DNA, 1019 bp, Homo sapiens
catgtataggtgatttagctgcaaagaataatgaacatgttggattttaaaatatgttcataggctgcagttggaactcaatagtaataagacaaaattgagttctttgcttgggtgcaaatattaatagctaactgtatgaaccaagagatagagacacgagttagcaataatatgcagtagacagaaattgtgttgcttacagatttttactttcccttctaccttgatgataaaatctggattttatttggagcagcaatgtgttagaactgtatttgccagcatcccatgaagaaaggtttggccatgagatttaaatggaattttttgcacgtaagtttaaagatagctatttaaagggtatttactcatctagaaggtgtgtctcttttgctcttgcccctcccgttcttcctgcctggaacacagatgtaatggctggagctctagcagccacattgtgtcattgatgatggacatgaataagggtggcagaggaggaaggcaagggagcagtgagtccctgatgacattctgaagcttctgttccaactctggactggactaccacaggaatttctttatatgaaaaaataagctcttaactagttatgcctctagttgaatatctgttactagcagaggagctcaattcctgatactgatcagcaatataacatgattatgaaaatgatccacctgatttgagactgcattaataaatgaattataccagggttagagtaaacaaaacaagacaaaaacatgaaacagcaaccacaaaaactgacggatgccaggatctccttctaccacagtactccaaaaaaaggcaaaaattattttctttacatcttctgaggggaaatgatgttgggctgatccagaattggagaaatcaaagaatatgcttggagggtaaagacagaaaaggctggtcctgggaagtgggagattctgcaaacctgagaagggaatggagggatctttgctttatagcaccctggggaagtcac

SEQ ID NO: 70162 - DNA, 1873 bp, Homo sapiens
tggagacccggctgcctggtcctttttgggctctttaaatatgcggcggccgccggagggagcccggggcaggggctacggggagcctggttccccgcaggacggggttaactcgcccagctaagggcgcgttgaaaggagtgtccaagagagtgcagggtagccagggtcgcttccttgtcaggggcccggtcccccttttgcccctggatctcgcgcctcagagctgcagccattaaatgctcttctccaaggccagtggccgggggttgagtaggggacgatcgaggggcgcccgggaccctgcggagtggagggttttgtctgcggatgcaaccaattaagcgtgcagccggcgcttgcagagctgcgctcagcgcgcagggctgggggttttgttcgctgtaatttccaagccgcggcgggcagagttggagcgggatatgtctattgagaacatttaaactccactttctcgggctttaaaacttgctctctgcttagtcttaaatcgcttccttcatggcaaacacgccgattagaaaataatcctagagtcccaaagttgtccgagagcaaggtggggaaactgaacaatgtttgcttgccagtgcattttagaaaaattgagagttgtacctttttgaaatcatcaaaggaaacaagccgatctagaggcccctgagttttcccgctctgcccaagcgacactttacaccgcatttgaatcctgttttacacctcccaggaagtctctgccctcccccacttgtttcccacccgccacccagttctaactcactaattgccccccctccaaaaaaaaaaaaaaaatccaaaagaaattacaatggggtctggaggtgattggatactttacctttgagttaaggcagagttcacaaagaaagaaaaatttgtctccgatgtgtttgctctcgatgtgcccactggtgctagtggtcccacagaagcttgcagggaaccttcccgaattctctaaatgggatgcgaattttcattgaggacgttcatgggttttaagttaattagtctcacttaatcaccgaatctgaatgaaatgtgaatagatgattcactggataaatatttgggatctggaatattaatcatcgcattctcttaaccacttgagtatttactacttggcataggagccatttaaagttttgctaaaccaagtgattgcttccatttctcattcccagacactccattcctcctcgcttttacctccttttagttttctccactccacccccataagagttttctcaaaagaaagttttgaagaaaatatgtttatttttatcaaaagatatttaaatttagactggaggccatgcctgcatctccaaaaggaagtggagaattgaagcaattaactagatgattcaagcaaaacctcccaccatagatttactataattatttggaaattttagggggaatggagttattttgaactgaagaacttgaataattgctccagtatttcactcaaaatgtgtcagttgaatcataatccacctagaaggcaggtatacaaagatgattaaaggccaccttttcaatatggaagattgttgaaatatctgtgatggtagcttcgtatttctgttgtttgaaatgctagtataatgcagagtggtgttcgtttaaaatgcctattattcctatgagttgccaaatgcatagccctgtaaactttacaccttaaaagtatatgactttctttctagaacatgcctcttcagtctttgttaccattttaggtttgaagtagaatctagttttcatatacaaaatagagtttcctctttgaacccttgcattaaaagtatagttattt

SEQ ID NO: 70163 - DNA, 2730 bp, Homo sapiens
gttgcggggggggcgggatgaaaatgacacaattaatatttgcaccagttgtaaatagttaaaaacaaatcaaaactatagattttgcctggtggtaaagtttttgcaatttcctctgaaaaatgataaagattgatttactttgtgcttattacatggctactgcaaaccaaatccccctattaaagtactttgccaaatagacgataattagaagtaaatctagttgtgggatagtggaaaaattccatgaattttgcagctttaattgtgataataaagtatactgtttgttttacaataaacctgcagtatagtatatcataatctcaaaatgccttttcatcaagtgacatagaaatgtctgaattggacaatgagactttttaaaacaagtatttggctcatttaatatctctttttgggcagaatggaacccagttaagtgtaatattcagtgtttatcttaataagtttaaacttgcagtttaagataacttcaggttggctgtgtttaagctagcaaagaggaactatgtcagggttaatgcatgtatagagaagtaccagtcacttttttgactttataaataaattggaaaaaaaagtttctgcgttgtatttgtaggtttgtgtagtaattgagaacaaagtttcaaaaatcagaactaaatttggatataccttttcaccggttttgggtactccatgtacagtatttgttagaaaggactatatgctcatcgtttggggattaatgttttgtgtgattttctttgtgactgtgggtactaactgtaatgtatgtaaactgccatagcaactaatggtacatataaagttatttaggaagttactctgagttcttgtctgttttaacagttttgaacagagttgaggagcatatttttaatatatttaaatttaattgcttcttagagtttagatttaattgtttcttatttaatcaataaactttaaaatagctctaagtaaccttgttatttaaaaatggcaatatataatctggtatttttaatatgaatactttacatttgtttcattttatctcatttataaattaactaaaatggactgattttaccaaggagtttttctatgttgtgtaagtgtggagtttacctaatttacttttattctaaggagatgcacaaatgaatatcttgttagatagctgacacgcatttaagctgtggtataattcctctgaaaaacacatcatgataatatctcctaggaagaaatctttaaatttcaccataaataagtaatttgaaatttaatactaaaaaggaaaatgaattgtctcccatattttactatatttcatgttttttggatgaatagatagaaacgctcccatcgcctccgcttcattttaaaaagcttaccactgactaacaaaatttgtattgagaaaagggaagctgaagctagtgcctagtttaccacctaaagcaaaatttttaaagttgatctattcctaagtaagggttgatttatttttagtgactctagtgacaggcatttgtaaatgacccccctacgccgctcatctttctgaaaattcttcatgtgtatgcatacattattccaatttccaaaacagaagtaggctttcttttttctaaagattccttctccagaatctttcattctttcagacacaattatttcctacaatggtgttataaaaatccctcttgtaataaaaatgaataaatacatttgcccataacatgacttatttttcttcagttttataaattacgcttcatctggagaagagaataccttgcaaaataatgaatgacattgatgaatcgttcatggcatgtgtaaacttaaggtattttcactttcaaatcagaatttgttgagtatgttactattctatataaatatgattttcaaacatttgtttattaagcatatattgtgttctaacaaaacatatatgttcgtcaggattttgcaatgcaaatctttttagaaaaagttatattgttcataacatgtaagataaacataccctgtgagactgaccagaatagatatgagaagtcttctatgagtaacaaagtgagtgttttcctgtaaactgagacccatcacaatgcaaaatacattgcaaagactggtaagtatatgagaagaaagaagcctaaaattagaggagctgcaatgcacactgaaatcctgatggttatatacttaaaatttcttgctgcttggagtttcttgacttacaaagtttatatttggattcagtaattggccttgggacatttgaaaacaaagctgttgatttgaaaattaacagtgtgaaactggacaatgcatgcagaatgttgcaagaccaagtgaatgactactaaattagccatcacttcaatttcaaaccatattcagtagaaaattgatttatataatatgtaaaacaaagacatttataagaacacaatttcctatgcttggaacttttggaagagaagataattattcttcaatctacttaatattccattaaaactaattactatgcatgaccattgtgtaatgattctagtcattcctcagaactccaatctgagtgctcaaaatttgtccctgaatcagtttcatatagttacctgaataaaagaaatcagaagttaaagttttcctgaataattcatttgtccatgtgtgtatacgtctgtgtgagca

SEQ ID NO: 70164 - DNA, 7484 bp, Homo sapiens
gccttctgcgactgatacccacaagacttctggttcccaaataatatcatggggctatgtctttgggaattgtaacacatccagaagttttcttctttgctaaatgagagggctaggtgaaattatctctagttttactgaactctagaattctgatgataagagggaaataagacacacatataaacacttttccttcctttcctcttgccctccctccctcccttcttcctccttcctttttttccttccttccttctttccttccctccctcactccctcccttcctcccttcctccctccctccctccgttcctccctgcctctctctttgcctccctccttcccttccttcaacaagtatatagtgaacacctcctgtacacgaggcactagtgctaagcactgttttcaagctcaagagatgtatttgctagtgaatttctttcctaattagtttttaaaatatgcagtacattgaagagcctggagtacagaacttcttagagaaagaaataattatatttcccatttaacatttctcctaatcttcatggacttgcttctaaatatatcataaaattaagtgtacagttttgaatctgaagtttaaaacataaaaatattaatgagggcaaacaagggagaaatgacacttttaatgagatatgattgttgtaaatattcgcataatagtgctggtaacagtctgaaatttcagttcttaccaatgagaattccgaccatatctcccttttctctcttgatgtgagcaataaatagtgagaattagttatgcctctgttatacatgggtttgtagtataaagccaaattctattctggcaaaggaaaaccaaatatacacttctacagtattgcatatgttaaaacaaaacaagcctcctgaatgttttgtttgtcttttttgaaaaataatatcctgaagagcattaaacacaggaaaacaatattaaagctgatgttttccaatatgtaaaaatcctggatctaagctggtttacaaactaaaaccctaacttgttttgcagcctttgtggagtttgattagaatgattaaataatgtgggttttaaagaacaatgaaaacctcccagattgacgccacacagcacagctaatgtgtttcttctagatgtagtctcagaagagggtttcagtttacatgtaacactggcctgaacgaccaaggagcaagtttgcttttaacaagtccgagtgataatcgtgatattttgccctttagttaatggtgcaaattttatttctcaataggctttttgtaaatgagatgctcatttaaaagtcatcttatttgcagggctttttctgtttttgagagatttgctttctctgattttgaaatacagtgaaactctttcagaaaaaaaacctctctcttcaatagattttagatacacccagatcacatcatggcccctgaaacataacaaccgtgcagaaaaagcctggtgtagcactgttaacttctaaggtcaataggctccttctcccaccctgacttcacacccccttttcaataaaaaggatttctattttccatgtttgtgtaatttactactgggttaactgtgcaatcttacagttgcttccaaagattaagtcagatgctgcttctgtgctagagaactccacactcatgtataactcactatgcaatagccaaagggatccttaaaagcctcattctaaaggtgacagatgggtgtgaaggaatacttgcattgaccaaggcttctgtgagaggaaactaacttgaagaaaaactccctttctgggaggcagaggcgggcggattacgaggtcaggagatcgagaccatcctggctaacatggtgaaaccccgtctctactaaaaatacaaaaaattagccgggtgtggtggcaggcgcctgtagtcccagctacttgagaggctgaggcaggagaatggagtgaacccgggaggcgcagcttgcagtgagcagagaccgcgtcactgcactccagcctgggcgacagagcgagactccgtctcaaaaagaaaaaaaaaaaaaaagaaaaactccctttaagggttccatctagttaggagtgaaagaacacttatggagcacctcatgggaggcaggaacttctaagtacttctaggaatgatgtctcacaggaggagtcatctccattgcacggatgaaaccaaattgaggtcttcaaggacctgcccaaagtcataaagctaaaatggaagagcaggaattggaatctaagcgttccaaggtagagtctgtgatcttctcagggcacctccctctccatgaggcaatgctctgaagagggtattatttacttgacactctgggctttcgctaaattcatgcccttgggactgaaggtaagacaatgccactaacctctgacaacaaatgattcctttgtggagccattcaaaagtgataataaacaatgattcagagtgtccaaatcagatggttagatagaacccctaaaggctaccaggttttcttttgtcctgggaaattaactgaatcagtgacaattttagtttcctaaagtatttttttatggtagcaaatgcttgtatactaccgggtagtagcattgttaagaggctaggagcacagtctttacagttagacaaaactgggttcaaatcccaggtctgccacttacctgctttgtttgtgaccttgagccagttgtatacctaacctatctaagacttagttgttcatctacaaaataagaggaataataatacccactttataaggctgctgtaaggattaacgtaacacatgtgactgacaatcgagtgcctgggatattttaaatgctcaatatttgtgagttaacattacagtcatatagagtttgcgttaattcatgggacctgttggatagtaatgccagatcagggagatactatttggtgagaaatgttgtggcttattttatctctcatctacctgtctgtctatctgcctatccatctatctgtttgtcaactatcatgtaaagctatttgtttttaccaggcagattgaagagaaaaagaggaaagtttcatttggcagtgtagacagtcaatatcactgtaccaagtacccccaccggctgctaactcagataacaaaagtaaaatgtggaacaaggtatcctggttcaagttacctgtatttgtgtgttaatatagccatggatgattcttatacatgaaacaatatgtactaagttttctttatcctaaaaagcaggaacacgtttttatagatgtatgtgatatgtgtgtgtattggtgtgttgttgtgtatgaagattggactagggctgacaaaaacggaaaaactaattgctttataaataatgttaacaactgtgatatcagaaaaatcttctgtgaagtaaagcaatgaaataaactctcaagatagaaatgtattcatgttaagtgtgggattatggttaataaagtacatttttaattaatcattatttctaggcacatatagttttaatcactgggacaaactgatgatttctgcctgcttttttttcctctgctttaggtgaactgattgacaggtgattgtttcaggcaaggaacattaaattaaacatgtagaagtgtgcaaatatttgttattttgaattagaatgcttgtgtattctttttcacatttatacttgcttttgactaccaatataggtagaagagctttgtaaattgtaaagtaatatgtcaatattaatttttgcaactttagttgtgacatggaaagaatcttgatcatcttaagaaatattaattttctaaaatactaacttatgtagttacagaatgtggggataatgtttttaatatggacagaaataaaagcaaaatagcttttgaaaaagcattttcatgtatttcagaagagatcactacagggggtgtcttttagggcgaggggttgcatagatacctctttacatcatgcaatgaagaagaatctactcagaaatgtggaaaaagattaaccttagaggagacgaagtttgttaaaaaaaacaaaaaaaaaaaaaccgatacgtcatctgcaaagcagaacattcttacttcaaatgtgtcccttggtgcagtacttataaacaatgtcaggtagaaaactataatgacttcctttttcatttgcagaaagcagaagccactggagaaaaacggccaagaggcagacctaggaaatgggtgagtaataagatataatttttcttcttttttttaaagaaaaatttctgttgtattaaatgagaaaagttttatttcgtcgattacatgaatttccaacttctggtttgatgaatctttgaaagggttaagtcaagagacaaattatcatcacttcctaccactaggctccaggtgtttacgtagaacacttttctttcctgaaggtggactcatttttctatctcttatcaacatcaaaagaggctccactcttccttcaaatagggtaacaatgagatgatttgttcagtagattgagtaactaaagttaaagggtattatgaagccttggaagttgattacaaatggtgttaaaattcatacacaatgtgtatgtgataactttttaacgtttttcttttttctttttctttctttttctttttcttttttttttttggttttctccatggcttttgtttggacacatctcattttctagatggtttgtgttttctttttcacatggctttgttaggaagcaagggtttattttgagtttttcttgcttcccttagtagtcattctccacatgcaaacattagagatagctgtatccatacaagtgcacctgatcctataggcacacagatcctgtatcttttgaggccagaaattcagtggtcactgaagagctttgctaattttactgcttgaactttgttcccttgtttgctgtgttacccatgttcttctggtctgtctttcccactgacggagaaaagaagtcctaaaaatgaatgaaatcgtttctcaagaaggatgagggcatcctttatacccagtgttgcatatgatgggttctttggctttgctttttcctcttcctcaattctttcttcatgcttcaaattttaaaaagattttttttttctgttatgctggattatatgttcctgtttgccattcctttctcctctagagttctgcatcactttctatttatactttggtattgcctttcttttaatttattcatcttatatttttcctctgctcaacatgtgttgggattagatttcttagcataaggaaatgggatgatctttagatgaaaaacatctcagtgttaaaatgtgaccttaaagtaaggatatttcattcaaccttctgttcattaaattagttctctccaaacctacttatcaagtggtgatcatctagcgtgcttgattacctttaaagttagggaacttgctacctctcaaggctgcctctttcttctaggaaagctctgcacattagaaaattgttccatctgactacctgtaacttccgtccactgtctctaggtcatccttctgggaatatatagagtaattgttttcactttcactcatgatagccctgcaaacggttgagggcaattaacacatactgtttgtatgtatctgtgtttgtatgtaacacatactccagttttctcattttttccccataaaggaacattcttgttattcttttctgaacatgtttgttcgttaatcttttgaaagatgtcacctagaactaaatatcatatttcaagtgtgggttccataaacagtgggtttatcaccttccttgttgtacatatggttccagttatcgattgctgcatagttaaccactctaaaacttaatagtgtaaaaaaactattttattatgcatatggattctttgggtcaaggataggcagggtagagcagaaagtcttgtctctgctccatgatgtctggggcctccactgggaagactcaagcatcaggggatgactttaatacttgggatccagaatctggagctgtttcacttacaaatctggtgctttatcaagattggctggaaatctgggcggatctgggagtgcgtgcactggatcacccatacatggcctccccaggataatcaggcttcttacatgcactcaggactacctctgggaattttctggtaactgaggaggaagctgcaaggccttttttgccttagactcggaagtcaaaaactgctgcttccattatactctaatgagcacattgttgactaagttgatactggcatacatatcaaatagagatctgctgttttctaagcatcagaactctgaaaggacatcccataccattgaactaattaataagaaagacgtgtataatctttctaataggcaacataatagaaaatagatgagttctttgaagccatgggattaatgtggctaaaatgaaattaaattgcaagcgaatacagtggcagttaaccagcaaactaacctccatcatatggggcctcttaactctctcagcctttcatctcctctgcccttgggctgtcctataatggtcaccaattcacctccataggttagagtcctgtcttctccgaaccttcctatggctccacatctggccagctagttaattacagcctgccctagtacttcgaagtcattcagtttacatctacctttctttacagttttctttctcaccacacatccttaaacagttgatgattcagccaagcaggagtaaactatagagcaattaaaggatatatatgttttttttcttaacggattcttgctaatttaggggggatctggatttcaggcatcagatcttcctgctgggtaagaagcacatgtgaggcccccaccacagaaatccttgcctttctgagaatagctgggccattttctttgactctcctggtttctaatttttactggctgtgagaatggaaaatattatgtggtgaattgttacaagtccctgatttggtccccaaagaagagttgttctactgagaagaggaaataaaaggaaattgtatattttttctagacagtgtgtttcctctttgcttgtatatcttctgttgggtagagtatgcagccagtcacagcaaggcattccgttcaatggcattctttgctggaaagcttgtgctgaagaaataaatcattgcgttttccataggaaatgggcttatactttatagcaagttcaattctttccaacagtgtcattcaccgatttccttgagttagagatatatttttgaaccgactggattcattaggtatatgggttagaagccaaattgttccccttttattcttgtgggatattttgctttgttttaaagttcttgtgcttctaaaacttgttccagtagatattatag

SEQ ID NO: 70165 - DNA, 1016 bp, Homo sapiens
agagctcaggctctggattcagatggcttgggttcaaattctggtccgtcacttagctaactggagtcttaagaaaatcacatgacctttaaaggtccagtttcctcatctgcaaaaggtatatttctcatagagttgtaaggattaaatgagataatgcatgcaaagggcttaataaagagcatggcacataggtagtgctcagtaaatgttggaaattatgattaatttcactgtacactttcattttgacattagctgtaggctaaaccttaattacttacagccaccagtagttacacatagaatgaagtaacagagttatatgtcagactaaccaagtacccttgacagtatcattatgtcctcaatatatttatgctgaatattaatcaagtttaagaactgcttataaataatactaaagaacattttaattctctttgctattaaggaggagttttacattgcagcttagaagcctttcttccaatagcagagatttggtgtcatgtggtgttcatcagtttgaaaagaagtatttctgctgtttgcctcaagatgtacatacagagatgtgctgattctcagaacttctatagaattccattagccagtcctgccaattgaaatttggcatttaattatttgcatttttctattcttgcctaggaaaggagctcgtcacatacctagtttagtgatggaaagtatttggagaaagttttagagagtggggctcaggctcaagaatacaatgaagtaataaagttgttaacctcatgtataaaatcctccatccagatgttgcttagtgatgcagctagtgcttctggaggaaaagaagcaagaaccaaataatgaagactacatcaatgggaacaagtgatacttttaggtgttttgttctcagaatattttaaaagaaaggaaattaacaacagaagaaaaatatttccctatatgaattaatggtttttataagaaaaatatctttctggagatactaagattga

SEQ ID NO: 70166 - DNA, 1364 bp, Homo sapiens
tatgcttatcaaataatttttaaatcaccaggtcttatagcaacttaattatatactttaatatttctgaatagtgcagccctttgtgttttaaaatgagctctttgagggttgggtgcatatctcctatttatctttttaacctcagcacctaggacataggagggaattcagcaaagtgattaagagctcagactgcctgggttcaggtatcagcttaatcaaggcaagttgttgatcatcccagccccagtttccctgtgtgtaaaacaaagggtaatcatagtttttgtctggtaggattgtttcataagaattaaatgagaagccatcaaaaaaactttattcagcatgtgtcaagctctcaataggtcataattgttgatgttagtacagtctcaggcccataatggtgcttactaaatgttcggtgagtaggatgacagtttttctttagtgtgtataaaggatggcctttgaatttttgttttccagtaatgaatgtggatttgaattacattctttgacttaaaaaaatccaaactaatgatttgtatttccaaagaggctacagcaggttttttttaaaaagcacaacctataggcatcaaagcagtatttgtaataattttgaattccatcttatgcctctccactaaagaagtaagctgctagccactatcacccaggcccaatagaaacttcgaatgtcttgccctatgttaatgtttccattccctcactcctggaaatagcattctgctttccaaaatagactcttatgctgtaccttagaaggatttttgtcacaattttggatcatcagaaaaacagaagacagctttattggccaaacctcatgaactaattttctaaggtagtttctctttctctctctctttttacaaaaacttattttaatggcctatttgtgtcccattttctttctgttaatttttagtactaacatgagaataaagaaaagtaaaaagtcaattactctatttgtttctttcaagggcatttgaaagcacttaaagtgatacattaaggcagtagggtgtacaactaaagatttactggggacaacaacctgaaatcctaggcttatgtcaacatgggagtaagtacttcagttagaataatagctagcaatgttacataacttaaaagtttaaggccgggtgcggtggctcacgcctgtaatcccagcactttgggaggccgaggcgggtggatcatgaggtcaggagatcgagaccatcctggctaacaaggtgaaaccccgtctctactaaaaatacaaaaaattagccgggcgcggtggcgggcgcctgtagtcccagctactcgggaggctgagg

SEQ ID NO: 70167 - DNA, 5882 bp, Homo sapiens
tatgaggcatttactctttttccatttccatctgctcttatggttgaaaggctaaaactgacaactttcagatgtatcacagagacatatcaaaagaattccaacatgaaaggtattgggttcatgtgcagaagtagtgaataaataagcagggttgggtgaggttaagagagtgccacatgatctatgtggtaataaataggtgaagtgcccaggagagagagatgagcagaagagacctctccagtagtagacattgaagaggaggattttagaattcgtctcttaagacattcactgccaagttccaacagaacatcatggacaaaacatatctaaatgagaaggaaactttgggacattgaggatggcttggagtggaaatgacctggaaggttgcagtgatcccaggcaggagaggacaatggccgtgtctgcagtggtacagtctgagggggaaggttgccgactgacgtgtggggaactgggagtgtggcactggagaagaccagttggaaaattgattgtcctggctgtgacagctgaaccatgaggactgtctaagagcactgaaactggggagaaaagaaagtagcctggacatggtaatgcttaaatgaatacttacatgtgataccgtaattatcaacagatttaaaatctgttgaatatactgttcaagtttaaatctgttgaatatactgttcaagtttatagaagcaagaaacttccccccatatttgtactgtattaatcttttggtttccttgcctcaattcagttttgtttcatatttaattatggggctgaaagtacataagtttgagtagtctagagtggaatgtggttaaatatccctgcagattactttatgtgtttcagtattctaataaaatcagccgcagtgatccatatgggatttgtagatgctgttttcccgaggcccttttctctatggctgtctgtgaccttagccattgactcgcttaatcgtttttggcctcctaagtcagtgattctgagcgggcagagtggtaatgtgatgtcatgtctggggcatgagcctgcatcctcgccgcacaggggtcccacccttcctggtctaggcagctcaatgcacagtgcttggcgcatcgtgagtgctcaataaattcagttgcttttcccgtctctctctggatctcaaatagaaatatccaaatttgagaatgccaccaaagcattaagttccctaattaaagtccatagtaaaagctgaggcagatgtgtgggaatgcagttccagacactgtagttaatctaggagagatgatcgcactgtatttacaacaaggcttcccatgctcatgaatcataagaactcttacaggattaatgagttttaacttaatgcagaatttttaaactatgtgtaatgctgggacatttcaaagtgtttgtcatgaaaaatggctgatgaaggtacacatttcgagatatcctgtgttccacctacgttgtttgttatcttgttgacatcttctgttccttttacaaaaaggtcagaaggaagtccctccacattttctgtagattgctagataagagaaacatcaatatagaaaggaacattttgatagccttacacatttatgtttttcaaaataaaaaaattctttaaataaaactttctttcgtgccctttctctggtagagagaaaaattagcccccttttctttcagagacgtgccttgtgggctttgaccagttttcccctaatgctggcattttgtaaaactgtagaacaagatctcaattaggatgttgacattcacacaatccattcatcgcgattagatttccccagtttcgcatgtacttatttgtgtgtgtgtatgtgtgagcatcaagttatatacaactttatcacatgtaggttcatgtattcactaccaaaggtattattattttttaagttccagggtgcatgtgcaggatgtgcaggtttgttacataggtaaatgtgtgccatggtggtttgctgcatctatcaacccatcagctaggtattaagcccaacatgcattagctattcttcctgatgctctccctccccactccggtattcttttaagactgtcagttgctcaggagtttgtggcacatcccatgatgacatacactaaatttgtcttctctaagtacacaagaactttgcatgactgtaggaatgtggggagaggaattctggcccatggttcctgtctttggctgtgcagttactctttcacattccctcattataaaggtctggctggccctggcaaaatcataggtgggctttgcacacagctaactgcttgcctgaagtaacttacacttttgtactgcattcagagttctgccaacttcagaggccaggaaagaaagaaaggattggcctgggagtgtaacacacctgcttttcctgaaggcacatacaacaggcgtatttgagtacctgcttgccctttgggatatattgaaacacatgcctgtttcgtcctgaagttgtggatgaataccttcatcccctggaaattccttgtttcacatagattttaaatgtccttgcgggcagatattcactgagaaaactgtcctgttaattgtactttggctatctggcccagtctctagaacaattatagtagaaccatgtcatcttgacacatttaggaagatccacatttgagaatgccactgtaatgtttaggttccccaaataaaaatttcatattacaactatgtctctctctttcctttctctctccctctctttctctttctctctctctctctctctcacacacacacacacacacacacacacacacagagcaaagctgtgctaagatgcaaacactaggcagatggccaagttgcccctccaggctaaatgtctcaggcctgcactctagtctgagaaaaaatggatttgcaaacagttcaaactgtgaatattaacatttaagaatggccaaggtctattgcattccactagtcactcttagaatctgagtgtttgtttaggtaaccagaacacagatgatgatgatgatgatgatgatgatgatgatgatgataatgattgatcataataactgaagagtaaaacactatcaatgtgatcattatgggattcttttggagaatacatttagtatatttggaccaaaagccctgttggatcctaaatcccagctatgctgtggcatacaaagagctgttttttctttttttttttttggactaatgctttttgactattggcacttcaaatatctacgaattacaagtgatattctttatttttggtggtaactattatcttatttaaacaaaaatcatgcttttgaatcagctgtagacatttttgacaatcttggaagtgcagaaaaagttatatttgaaagaaaataattatagaatatcagcatatgctgctgttgcttccatagcaaactcctttgggccttactcaaccaaaataaatgtggccacattgctgcagtaagcatggcttgaggcaaatggaagactgcagttctgtttcctgtgtcctgctttctgtccctgaggtccaagcaatgccagaacagtgaatttgaaagtattaaaatgttggtctgtgtggtccttggtcttcccatctataaagctagacttggtgtagagattatatagttaaatcctcttatattctacaggtgacaaaatgaaaacccagagcaattgtgtccagttcaaggccacacaaccttgttagctctgacaagagccaggtttcctgacttctagtccattgcttttccctgtagcgagccgcttcctcttgcctcacccgatcttccttggatttccattgggaatgttgaccacagttctgataaatctcttccttcaggtcctgtgttagtttcttcagggctgccataacaaagtgccacaaacttgggtgctttaccacaacagaaatttgctctttcacagtctggaaactggaagtctgacatcatggtgttggcagggccgtgctctccctgaaggctctagggaagaatctgttccatctctttcccttcacttctggtgctgttggtgatccttgatgctccttggcttttagatgcattgctccattctctgccttggttgccacatggtggtaacagcagttcctgtgtgtctgtgtctcttttcctcttataaggacaccagccatatttgattagggcccaccccactgacttcatcctaccttgattatatctgccaagaccttatttccaaataaagtcacattcatagagacaaggtgggttagggcttcactatatctttttaggggacacaattcaacccataacagttctttataactttaaacctgttagaaccaggctggtatttgtaatgcataatgagaaactgcagtgaatttcattaagtgtaaagcatcatatccaacatttgtagtttgttacaataacacattcaaaagatttatagactgcttttggtgtgatttttggattaattccctcttttgaagacatttgttgggcttagtttattttaaggaaggaatgaatagacctgaaaacacctaatttttattttcaatttagcctggaagctagcaaaagcttttgcagagaactgaaactgtgtcacagagcaccagcactgtatttgttatcattttggccttcagttttattaatgcttgtttgatgtgttaagcccctagctaagacaaaaagacagaactttagggtttttgtttgttttagcagtaataaagtctagaataaaatgtttgctctataatatttaatggtgtgtattcaatttttaaaccaaaatttaaaagaaagaaatcccattctcattcagcactgtcaaatgtattcattcccccagacttcactggttgaatataataatttgtgtgtataaacagtcttcctgactgcattctctttaatattcatttatcaatttgggaggaaatttccaaataacctttatttgcaccttaaaaaaatagttttaaacgaagtcatgggaatggattgctctgtcttttactgacttttatatatgtgattccaaacctccctttaaattaatgtcttttagcttcaaatatacctcttcccataaggctagtccccatttcctataatcttacagacctaggagaacaatattttcccttctgtcgttttgataattacatcctctgtgctcagtggtggcctattaactcacatgaataccatgggcttgcaaaatggcctcaaatttccatatattggaactgtgagaactttctataatggtgctttagcaataatgatggaggtgcaggcatttcctgaggattaatgaccagctgggaggaaccagtggcccttggctctgcctcccagccagccattaattctaaggaaatgtcttttgctgaggtcgttactgctattataagcttaaaatggaaaaacataataggcatatgagttatttttatgggttgatgcagtttccaatggtgtgtactaatttgagaaaatgaatgtgtatacatacaagagtaagtcagattgttagactcatccctcagtattccatatgttttgtgactgattttacagttctctctacctttctcatttacaaaaaaaaaaaagaaaagaaaatttgattcagcaattcctaaaagtattgtattcagtgacatctttggaaacaccagtttctgttatcaacttcaaataatagtcaagttttatgtatgatctaaagggaaaacaagtttgtttttcaatcctgtgataatttttcttttagaatgaag

SEQ ID NO: 70168 - DNA, 1050 bp, Homo sapiens
taagctacagaactaattactgtgaaaagacataaaggaatgagaagaccaaaaccgtatcctcatgatactgacaaatcagttggactgagcacacatgaatcaactgaagaacacttctgccaagttcaagttgtgtaaaagtggaggatatgagtcttgtggggacacagagttgaggcatgagctattagtcagagccgtaaggctgcctgcaggagaagaactttggatggagttttgaaggaagtgaggaaaagatctgaattaacgtattaacacataaagcttgtcatctgaacaggactataagcatctcgagggtaagaacgtgccttttctttcttacacattcccagaagacccacattcctcattgggctctctgtaacagtatttactaagcacttgaataactggacatgggcaccatgttgctaagttgattaaaggttggtcttccactctgccactggccacagcacaaagtgaaaacagatgtcacaagcaccttgtagatctgtcccttttttcttctgatgttcaccctccttttgagctctttctttctccaacattgcttacaaaataatctttatgcatctgagagggagcaaatattcagtaactttctgcagctgtcctcactaaagaggagaatctgttgaatgccactggaaatgtaaggatctcttgtgacagtaacatctcaaggggaaactagtggttaaattgttaattctttgagtctgaaacttttttcatttgcagtgcagataagtgcctgatcttgcagtatcacgtttctgacttctttgttctggcttcattttttttttcccaaaatgccattttcatttgttcttagagttcagaacatgtcaaagagcttctttaagcagtaggtggttttacagagcccacagagaaggaaaactaaatatcatcccggatgcagtccactacgatcgtggaggagtcagattactctccgggctttgctgtgtctgcttgtgaaacaggaaagggagaactgaggcaatgagtcac

SEQ ID NO: 70169 - DNA, 1102 bp, Homo sapiens
ctcactagaatctataggaactgttagcatcaattttaataagttgtcaactaagtgattagtggtatttattggttatttttgacaaaataatggaatcatcaaattttgaagttgagaagtaaagtaaaaatttgtgccaaaccccaaatgtagacaaggtcatattataaacattaatgctgtcccaaactgccaatgcattgcgtagaactgaggttagcaggttaccattgatttcctctacttatgctttaagaggttggcattggtaagccgctacactttcttggtcaatgaggcagaaacccctttgcaaaactctcaactgatgaaaagattagctagaatgactctaggaactgttttctaaggatctgactcattgattcctttttttggtagggttctctgggccaagttagttcgagtatttatcatttaaattaggaaattaccatcaccatcatcatgtacattcataaatcaaagcaagattagagaaggaatatggtggatcacagagcaactcagaaagacgacagcaacaactaggaaatgaaacaccatggttgtatttcaggaaccctacccagcagataggaattaccatagctcctaaaattccatctgggtggttgatggagcctcaattaatctgacaccatagcccatgctcccctcttgctacctgctgaagttagcagggaaaagtcaaagagggtgctgtcagtggggtcaattcttagggatcatagtgaaccaccctccattgcactgactctttcccacaaaatgggctagagatagcagctctccttatgtatttaagaaagaatggtcaaaaaatacaattcacattttattctggtatataccattttgacagtgtttcacaatgtaggtaatatgaatgggagtatttaaacacaatcctgtttaatattcttagccagtacttattaaatgcctaccaagcctggcattgttctagagacctcaaaatacacctttaaaaacatattttattgacagttgtataaatgaagaaaacaagtctcagaaaattaaagtgacttgcacagatacacaagctagaaag

SEQ ID NO: 70170 - DNA, 2157 bp, Homo sapiens
ttttctgctccatgtggccaacccagttagaaaggttataaaaaatcttaacagtttttcagcccttctcacacttagctttaggattaaaagtattggtcatgatttgcaaaaaaaaaaaaagtagtgcacaatattccagctatattcaataaacatttgttgaatacaacgtatgtatatacaggtcattgttacaggtctgtgtataagtaaacacaatatggtccttagctttaagacctttcagtctaggggtagatatgcatgtgcatacaacttctgtttatttttgaatttcaactatgtgtcaggtgttaggctgagcacattatgaacattgtcttgatttattatttaaccttgtacgagccttgtaaggtagtggttttcgaaatatttttgccaaaatgtaaatagtaaaaaacaatatgtgaagcctttattccaactaggtaaaataaggaaggctttacaaaggagatgaatgacacttcagctgagccctaaagaatgaataggattctaatagaacagctgggggcaggcgtggtggctcacacctgtaatcccagcactttgggaggccgaggcaggcagatcaccttaggtcaggagttcgagaccagcctggccaccatgcaaaagcccgtctctactaaaaatacaaaaattagccaggcgtggtggcacatgcctgtaatcccagctacttggaggctgaggcaggagaatcacttgaacccacgaggttgaggtttcagtgagccgagatcgtgccactgcactctagcctgggcagggggagactccatctaaaaacaaaacaaaacaaaacagctggaagatgacatccctgggacagggacttccatgtcatgtgaaaagtaggagtaaatcaatggaggcagggaaatgtagggtgtatttaggtaagagcagctagtttggattggatagtgtacattagagacataccatgggtgagggggtggatgtggacagtgaacctaaacgctttgtggtagcaggtcacaggggccgtgcatacatgcttaaggagattggatgttacaggaaatgggaagctattaaagatttctaagcaagagaatgacaggtcaaatccgacatgatttagaaaaaacgtaggctcagtcagaagccatagtctaatgaccaatgcatcataattacttgctacactaattttcttctttagaagtcagcttttaagatatgtgtttataatacagatttatacagttttacatggttgaaacaaagaataataatatttattatgtaagattcaaatttcagtatcaacaaataaagtattcctgggcccagccgcacctattggttcacgtattgtctatacctgctttcctactacagtggcagagctgagtacctgccacagagaccgtctgcccaacaaagcctgaattatttactctccaacccttaagagaagaaggttgctgactcctgctctattgtgtctttctggccctcttaatccatttatataggtttcttccttttgtgtgtgaatggaaaatgaatttaagttcattagtagaagcaagacacctttagcttggcctccaggtattatttgttttccttctcatgagaattttgaatgttctatatctagattctcgaggctaaagaataatgaagcagaaaatgttttctccattactatatccccttcctatggggattctgaaggtgcggttttccctctaggtgagagaactacattcctttcctaggcagattccattttagttcacactcaggctgtcagatgcacagaacaatgtcacatgggcttcttaagacctcttaaaaatcacttccagtttgacttctgcccatactttactctgttagttttcctcagaaaggcttggcaatagcagaataatctttgattaccaacaatatatttaattttcctatttgataggctgatgccgcagaaaataaccaattgccttctgtgctttgtagctttgtgctccactgcatcatcactttcttgggtttaggggtctgtgggcatagcaaaaggtgtgacagcctgtccttgttagactgaagccagtctgaagtggcagggaggcaacaggatgccagcca

SEQ ID NO: 70171 - DNA, 1119 bp, Homo sapiens
gcttctgcccccttcatccttcctagggtccccctacacaaaatcctctaaataaggttgccagtaacctcttaactgccaaatccaggggacacttctcagtccccgtcctgatgtctcttctgaaatatctgacacatcagccgtgcctccttatttcacacttgccttccttggatgcctgaaggtaaacctgtcctgtgtttcttctcttgtcaagaagttccttgcacccgggaggctcttctttctctacctgccctctgcacgtcgctcgtctccagggttatatctgaggtcctctatttttcattccatgtgttcattctgagttagctctgtggtatctgtgtttcagtcactgcctgcattgactgactgtattcgtagcttatctgagtgccatcatacacccggtcatccttgacttgtcagtctccattttcaacatttgcaaagttctgccatttattactcctaaaggtgcctggagctatatgttttgagttttcttttcctacattcccactgccacattctttgtacaagtctttatcatctctcacttaaactatttgcaccagcctcctactagttttcctgccgcctctacttttctttgtccagcttacctccattatcactgcaagtgttttcttcagaacagacactttatcactctcctgccaaacattttcaatgactaccattcacccaaggaagtctgaacttcttatgttgattatagcattgggcctagtttctaatcttgcctcctactacccaccagttgaaatcttcacttccttaggacagaaagacccgtttttctgaaacttccattaggtctttcacatctgtgctctggttggtatagtctttacctttacttccatttggaccaatctcaacacatctcccaagacccagttcaaatacggtgcccccgccaacctctcttgaaattatttccttcctgtttgcctcatgggaatttgcacacacctgaggtaaaggacttttacccgtctactataattatttgtttacatgtttttcatgcatgaaactatgtctcatctatctttgtattttcaatacagagcatagtgtgtgtct

SEQ ID NO: 70172 - DNA, 1710 bp, Homo sapiens
gaaaagaggagagatgtccagtgtcactattagtgaaccacatatattatactttaatttcccttataaatatgaaaagagcttggtagaaagtaagatatataaagcatgtctacatgtgttttatgatgtgtatacatatatgtatgtagatacatacatatatttaaatgtgaccattatcacattactctgttatattttattatattcatcctcacaaaattcattgttaaagacagggaactgaggatttgttttcaagtcttgcttgtggtatttgcccgtgcttgcacaagagtaacaataatggcagaatcatttattagatgactgaaaagagcaggcacacatggaggtttaacatatggtcgctgtccttatggaattcaaaaatcagacaccaaaaaaggtaggtaacaatatagggcagtttgaggtatgccaattaatggcccacagttagtgagattttgttttttatctctctatagcctactattgcactttgcacacactggataaacatctgctgaatgagtggacaataaaacagaagcaaatttgtactaatttttcaattatgttttcttccttgtatgcattattgttgacaccagcttgttgggaataagagtaagaatttatcctttacagtttcatagatctcatttatcacctacaagaaaagaaaacttatttttgttttataaacttaaaatgtaaattaataaatatataatataaataataaagctatataaataatagatatatgtaatacacagaatttaaagctatataaagtctactacttagttgaagactttgtcagtcttgctgagacacattgagtgaaaatatatataaaaacctttaatgatgtgaggtgaatactcaagaaattttaatcatcttcttttcagtggtaacgaattacgctcatacaacaaagcctaggtttccagcaggagggaaaccatttgaagatgtggtgccctttagaaattgtttagaatcttttcagaaggaggtgtagtgtgactccaggtgcctctctagggttgttgaagtgagtgcaggtgacctctatgtacttgttcttcaagctgctttataataagcagcttgctaccctgatttacccgcagaaccaccttaagacttggcaagatatcttttttaaaaaaataaagtaatggataatcatagttcaaactcatttgtttttctgtatgtatacatacaggtaaacattttcacaagtacgcttaaaaatagtagaagagtttaaagatttgccccaatgggctcatctctcccttttccagtttggtgctccatctcagaaaaagagagtcacattttgagacagatgtagctctttctacagatttttccagagcaagaaaattgggatctcacacatctgcagtacttattttatcttctcatctccctttattcaaccagaaaggttccccgcccccccagtaatacccttttagaattatcatgtagcttgatgctatggccataatgggttttgtcttgttttgtttaatcacagatgtaaaaataaaaagaaatgcttatatttattagagttaatacaagtaattgtcccaaagtagtcccaaattaatttttactcccctattctcatatgagaaaatatactgacagtggctcagtacctgcttgctttgc

SEQ ID NO: 70173 - DNA, 1989 bp, Homo sapiens
ctatttacatacactagagcttgcagtttatgacaactgttagtttattatttcaaagactatactgtgttgcaaagaaatattttattcagattttcatatattcagttttgtctgtttgtttgtttgttttgagacaaagtctttctctgttgcccaggctggagtgcagtggtgtgatctcagctcactgcaacctccacctcacgggttcaagccattctcctgcctcagcctcccaagtagttgggattgcgggcatatgccaccgtgcccggctatttttttttttttttttttttttttttttttttttttttttagtaaagacaaggtttcaccaagttggccaggctggccttgaactccttacttcaggtgatccgcctgactcggccttccaaggggctgggattataggcgtaagccactgtgcccggccttgtctggttttttaatagtaggcctacgtatgccattagtcaactttctgtgagtttgaactaccaacttggtggatgtttttctttttttatttgctttttttctttgaattatttttactatcattagagaatgtgcaaggttacttagtagagaatgagctcatctctgcttcttcagctatttttagaatctgattttttttaaaagtggttggaggaaagaaatgaaactgcattcaactagactgaacttggtcaccattatcatggggattggtgaggttttctctttgttgatgtcttcagttttcaacaaaattgcttctttggaagtttttgctttttctcctaaactggttatataggaatgtagtaggtacaggtcattccattatataaatctgtgtttataaatgatttacttagctgttccagcctgttagttaaatatgtatttaaggcctgttttttcaaaaaaaaaatgtatatatagaaaaaaaaatagaagctcacagaatggatactgagttgctgaaaattagtcatttgaatttaaatcttttcaggagtttttgcattaggaatttacaccatatactcactctgaaaccatggcataaaaagtataattagtcacatctattaaaacagtgaaagaaaatatttggtaattttctattagccaataagttactttgcataaggcaattgtgaatactctttctcttcctaatcttaatatgtacacaactatacattcaatatttctttcaagaaaaccaaatcctacaaccccagaaagagattctaatttggttgttctccatttctctttatatcatttataaagcacgcaaaacaatttctggcctctgatttttgaaaaccataaaatcatttcaccacttaagcccaaactttctaaatcaaatttttactctaagaacaaatactttcaccatttataaacctttcaaattaaggttttgagtagagctttccagacagcctccggaaaccataccccatagcaacacatgtccctaaagcacattatattatgtggtgctctaccatagatgcccagtatttgccacagaaggaacagaacttgtcttaccccatgagtaggccaattggtcagtggaggagtgacaggtgagcagtcagtgaggtgctggaggagggtggatgtggggggtgtgaaggtttaggagtagaaaaaactcacactcggggctctgggttgctgggtgctttctttgcagccctggtttgtgaagtgatttatgggccatacatcaccttcctggttggctttgttgacaccttgtcacattcttgcttgggcttgaggaattcattgttcttgtttgaactgataagaacaaaaacaaaaatgaagaaagaaaaaagaaaggttttctcactgagaccttgggaaaagctaagggggtggaatgttgacgtggagcggcaggctgcactttcccaagcaatgcagccctgcgtctgctggctgctgcagcagcagggaagcttt

SEQ ID NO: 70174 - DNA, 3051 bp, Homo sapiens
gttgcccaggctggtctcgaattcctgggctcaagcaatccacccaccttggcccccgcaaagtgctgggattacaggtgtgagccaccatgcctggcaataaagcacttttaactaaaatatatcaaatttgaaacaaactatatataaagtttttttcttctaaacttcatatttagtaagtgcatggccagaaaaaagagaacaagagtatgtaccaagtaagcaaaagtgtgttatgacatttttttcctgaaacttttctaggtaggaataaacattaatttacatcttcatttgcatgaacacaaaactctactataatctagatgctatacttctcaaatttaaaacaaaagtacaaaaacaaaaacagtaaacactttaggtgaatgttgtgttaaatgtctatattgagcgtatatgtacacatatatttatgcatatgtggatgtgtgtttatacatatattctatgtatatatccttgggtgggaacagggtgcaaagatctaagcataacatatctccacagggatttatgttcttttcagtctggtatcttttaacttaaaaacaactcgatgaatagaaatcataaaagccatccttacaacagcattaaagtgctattctattctgcagcattccaagtgaattattgctgtgctgtcaaagaaaacaaaaacatttgagaaggactgtttattttacagtggttgaccaaaagtatgcaagtggttataaaaaaatgtagacagctaacgatgggaggtgccacttgcacattctgaaatccattcacaaacctttgacactaactcttgatcactggagataatattagaagcaaagcatttttcacggggaaaatcctagcactttgaaagcatttcaggtcaaagcaaataaataaaacctctatccctcatcctgtatcactggcatctcctcactcacagaacctaatggcatgattgttttttcccaagaagagcaagaaaactttgcaaaaatatttctctcagaggttatggcaatgaaggatttttgtgccatgaaacacgtgttgccctttgtatttaaagattaaaataaaaactgctgttgacaatgttaatagattctttcattaaacaaatatttcattttagagctatatgggaaattagagacctcaaacacagtccctgtatattaaagataacaaaatgtatacttagggaagataaatgacttgcttaaggtcacacagcaggtagcatggaaggatgagttagaagtactagttcagtgtttgtatttgtatgttttgcctcagaatcagacaatgtacagttaagacctcatcgatatctcccggtaaatgcttatttaatgtttaagaattttcactggtaaagagattcttattccaggagtctaggtcttggggtttaggtttcttttacttaaaaaaaaaattcctctgataagtgaggattcatttaactttctggtggatcattaggtacctttcaagaaatgagaataatcataactggctctatttatcttagcatgggttgaaagatatgaaaagttccttgatatgactggcacgattctatcccataaaaccactcgtaaatatcagttgaaataatgcctgtagggaaaattttcaaatgtcctttctgtcaatgcagaaatgccagtgcagcttgttttctgggtggcatgtaagttgtagacaggcaccacattttagacatattatggtggtgcggtgaattgacaggcagtttaccaccatttccatgtattagattatgtgtacctctggctatcctgacactttgcccccaaagtggagatagtgaaagagaaggagagagggagaagaactcctcgcatctgtgcccctacctcagcagctcctcctccttgtctctgagggtctccagagtttgagagtttggtgtcatgttggcccaagagactgttgtccttttgacagctcggctgtttgtatctccagaatgaaacataatcagatttttttcagatgtagcatctgccttccctccaacatccttgggttaatcacgtgcttgctggccaggatatgtaaataagacttggctaaaaaaaacccttaaaggattatgaagcaatcttgcttaatagtagcagaacaaaacaaaacaaaaaaccactccaacaaatcctcctgtgtgctaccaagtaatggaaagatccagttatgactggaactgtcctggcctgagtattgtcctggacccagagggagcgaaggagggagggagggagggagggagaaagagagagagagaggggagaaatatgagaggaggagagaaattgctgaaggagagcttcactcactgactccgcacacattccctcccagtggttgctaatgaagagcccgtgctggtgaaggaagcctgctgatcccggaactggccttgcgcgcaagtggtgggatgacagacacattcccttccttgaactgcactcttttcccttgcactcagaggtggcccgagagagccccggtaggtcccggagtatgtttccatgctgcagaaggcatggagagattccaattgcgggggttcctccgtagcctttgcagctgaacgtctccatctcctgtccctgggcggtcagtcgctggcatggctctgtggagttttacctcccagttgtctatcaccaaagctgtccaccttgtccggaggggaatgagcgtggaaacccctggcggctgtactgacaaaagcaaccttagtcaatgacagagctgggcaggcggcgaggtcttgcgggctggcctttctgctgctggtaggaggatcatgtgctgctatttcggaggctcctgccagttggcccctgcccaccttttctgttcatactgaagcagccaggaactgagagaaagaggaagcctcggctgtgctccgggctgcgctgccagggttgcgtctgtagcaggtccagcagcaaaaacaaaacagggcagagcccagggaggccccagcca

SEQ ID NO: 70175 - DNA, 4532 bp, Homo sapiens
ggattacaggtgtgagccacggcgcccggccccgtggtgtgctaactcttatgacaatgatgacatagggacccagggaccaccctcccgttagagatgcaccatgctcagcccgtctaacttcgagcctgctctttccaccaataatcagctgccttctgtgtccacactaggaggaaggatatatgcttgatatcttgttttattatactgttgaatttcatcatcaccctactcttacccacaaaaaatacccaaagtcttaaatgtttcttaaaagaaatattagttgtgcccattttaatctcctgaactttatgacccttgtccaatgttcaactagacatttaagatttctttcatttggcttttggtaagactcatttttggaattaatacaggatcactgtttgttctcctcaagtcccagaaaagaaaaagggactttttcctacaaatcaaacttcagcataccacgagctgccagtgttatttgctatttgttccttgtcttttccaacaaagtgaccttagcactgaatcaggaatgcttagatgtagatgtgcacagaggaccctttgtagtaaatatattgtaaatacatatctaataggtaaatatacgtgtatatgtatatatacccacagatttttaaaaagtgaatattctagagagtttccattccaagaatgctcattgaaaacacagtacacaaaaggccaacaaggaataggatagaatattccagctttgcagaatggtgagtgaattgggctttgactttaaagaggtatgtaggtgaggagttgctgacaaacctgtttgaaagtggtttatgtcatgggaaagtacgtatcagggctgttgcgaggattatcttctttctttctcacagcaactcagtgcggtagactctgttatcatcctcatttcactgatgaacaaaccaaggcacaatgaggtaaaggcatctgctgtaggactcaatagctgatgaatgaaagagccaggcagggcagactggcttcagaattgtactgttttgcttcctatttctccctacatcctagccccactcacatggaaatcactctgaaaaattcttctgtcttattccctaaagacagtccagccatcttcctcctaattcttacccacttgtatttcttctataattgctacaaaatggtcctatacaacaacaacatcgtcaactcacagagtagaaaaaaagcaaagaaccttacaaattcctctgggctaattttatcagcaaaacactcagcaaaatgagagttgcccaagtcctgaaaatcattatgccacaaagttagtggttaccaagttcagcccactatttaagtatagtcatttaaataggccactatttaaaacattgtgttatcctcatatactcaactcaatagtacagagaccatgttttatgtctctttgcacgtccagcccttagcacagcacctgaggcatattcctcaacaatttatgcttgttggatgaatgatggactgaataaattaataggtgttagcttttagttttttcaaaatcatgcttacttattcattaatatattcttgtgatttgatcaatgcaaagaagagcaagatcatcatctagcattatcctgaatactatttaatatatttctataacgttgcctaaggtatatatcttttgttttgttgttttggaagctatactacacaattgactcaagcaagctacatataccatgaaaatcagcattgttctccctcacaacccccatgcacacgtactcagctttcagatagacctgaactccatgaaagggaagtccttcttggattaagctgagattgagaggactattttaccgcttcttcagtatattctttttttttttttttgagatggagtctcactctgtcacccaggctgaagtgcaggggcgcgatcttggctcactgcaacctctgcctcccagtacaagcgattctcctgcctcagcctcctgagtagctgggatccctggtgtgcatcaccgtgcccggctttttttgcattttttgtagagacggggtttcactgtgtcaccatgttggccaggctgatctcgaactcctgacctcaagtgatctgcctgcctcggcctcccaaagtgctgggattataggcatgagccatagcgcccagccgacttcttcaatatattcgtatatgtgaattgagccttccatttcttcctttacctcctctttcatccattggaaccagttgactttttaatgtaaagtatagaaactcagccgctctgaccctgttttgattccaaacccttgtacctaccagaccatttaggaagactgggataaataagcattataactccagggagctttctgatttcatgatccatttctgtttcttaggggccagacagtgctaggcttacaggagactcaaaatctgtagttaaccacagcaataaatgaacacaaaggaaatgcagatgtaagtaggggataaactttgagtggttccatcagtagtgattcatgatgttgaactacaataatattttcctccacacactctcccagttcccattgtgacactggagcagcatttagggaagacagttaggcttgggggtgcgttctgtggtcatggctgtggaagattggtcctacggctgttaatctggctgacaaatgtttcatcaacatgcattgttgaaagtgacatgatgcacagtgctggttaagagtcgcgtaaataataaaatgcccaagatgggagaagagcagttttcctggcttctccaagtttgagctgcagaatcagaagcagtagaatagagagagaagagacaggacactagcttgggttccagccccaactctgctgccctgtgctgcgtggctgcagcaagtgacttatctaataactgtgggtctcagtttcctcactcatagtattaatgatcatttctcaggagtattaaataagagcatgagtttaaagagcccagtcccgtgcccagcacaacggaggctaccctccaaaggtcagtccctttttctgtgtgtttcatcctctcttggcagcctgtttgctgcatctctcagctgacttttgtcccttcctgctcacttagtcaattcagagattacagtttgtacaataatgcgctgccttgtcttctcgctggtgaatctggaccggagtgctctgcctctgcgccgacactcactctgatggtcttggctggaggacagaggctgctggcaaaaacctaagagggaacataccgtggtagcagcatgaaagaatttggcaaggaggtgctcgtcacatgattgtgattcatactgtactctcaaaatgtggcaggagggctaggagagacttttaatgccagcacacagagcagagacactcattttcaaacatcacattctttttatagtacaggcatgcctcacagggaaaatattgaacttggcctgccagcaccacgagagtcgtcccaactgtgattttattgcttgagtcactccctgaatcagatactggctgcacggaggaagtcttctattagggatgctttgaaattgtgtttttaattaattaacaccaactctggacaggtttttcatttactcctagctgactcttttttgtcttttctttttttgcctgaaacttgttagacatttttgtaaggtctcagttggatcgcttttaagtatcctggtgaaagagtcatctgtgttgggtgaccaaagcgaggggacccttcaaagtagagtttgtcatctccgagagaatctgatccatgggaatggggtcgtcaggaaaacggtccctaaaagtctggcatagcactttttgatgccttcagccgtcctcaatccattcatcctgttgttaaaacttaaaactagagctggccagctgttgagaaaagtcctcagttttatttcaaccaaatgatgctgcctcctggggctggaagggggctgacttcaagcacaattataaatgtgtagctctttcaagcggcggaaacctacaaaatggccttgattcacagggcccctctggctcaaagactctctgcttcccgtgtgtcataaatctgtatctgcatcaaaaagtgtaaagacggcagtgtatggaagtccctcttcctctgcgagtgtgtctatgacagatttatactgatggctacactgcaccccggtcacaggctcctattatagtcatgccccactgactcagcccccatttcctgtggaaggggagacaaggtcctgcatgaaggagggtgaaattacagctcaactctcgaattgctgttagtacaggaggacctttaagggctgcagcaagacccattttgttcatagcaacatctactgtctcctcaccccagtgtggtcacagctaaaacctaaggcatttagtttcatgacaagatatgccatgacagggtactccagaattcaacaaggccaaatggata

SEQ ID NO: 70176 - DNA, 1277 bp, Homo sapiens
tgtagactttagtactataaagaaatgatacatagaggggagtaaaaacttgtctagctaacaattggtattataatggttttgaatgcacagttctgattaaattttatacatttcttccgttggccaacttatcgtgagcctggttgtatgcctctggtgtttgtatgatattcactgcatttttttctaacgtgttaaggattctattttaaatagaaaatcagattgcagtttgaaaaacttagttttaaaactctaccatctgctagatttgtggaagaggatctggtaaatgaaaattgtgtgtgtatgtgtgtggtttattttataggcactgcatatttctttgatgatctattttccaagctcattcttatcttttagaagatgtttcaaggatttatgcatctggcaagatttcagagaactctatagtggtggagatgtacactccatttatagggaatcctgaatcagggtcattgagagcatttattttgttttgcgcttaaatttatttctgctctggacatttctttcaaatggatcatttttacatggtcaaatctaagcattttattcataagaactctaataataaagctttttcagtccagacataggtggaaatttgcaaaatgcatcaggaaagtatggcaattgcttttcaagccatcttgtatttgagaaagtattgcattcattagtgtttgcaaaactacctttaatggtgcaaaagtaaagctgacctctcccttttggtgcacagatgtataaactttatggaagtacaccccaaggtagagacttattggagtaactcttagaaagggcaaagttggccataaacagtgatgcaataaccccacaattatgtatgctcaattatttggaagggaagtctgggagaagtgttttatatgattacatgggcaaataagaagtgagtgtggagaagcacggtccaaaggtttgcatttgttgtgtatatcccaaatagcaccctaatacagctttataatgtaaatccaccggtaccagtaaaacagcatttaaaacaaattgtaaaatgaacaacatttgcaaagcaataaagaaaccacctttgcaatcactttactacagttttgaaaaatgttagtgaatagctctccaaagatgcaagtaaataatattttattagatttcagcctaggagaaaggggaggaaaaccttcaactagaattacatgattattgctttgctcctccctcaacccagcaaacattaaaat

SEQ ID NO: 70177 - DNA, 1051 bp, Homo sapiens
actttttcctaccagacaaaactgaaagattttgtttctctaggaaacatacttaaagaagtatagtagacctggcattccttttgcatgctctggtagaccccggctcttgtataataaaaacaatataggcatgttatatttgccatatgttagttagggggtttcagcaaacaaatacctccttgtgcacagaagtagatgaaagcaaagcttactgatgtctactatgccttaacttaccttctttgtcctacatagtctgcctagcagacttctttctggttggttgtatgcatatttggataatggtgatagctcagcatattctttatgctttgttccgctctgaggacagctagtacactcgattcagtattatatgctttcctatttccttgcctgatgcttctgtgttatgctaaatctcagtttattctgtcagtaaagttgaggagagtgagtgaggagtgcgtttgcatgtgtgtgttttcttatctgtaaagttttaactttggcttactgtttaaccaggaaactcagcaggacaaaggagatctaaataaaactatattcctgttgagaatctccaaggttatgcaatactataaaatggtggtttgagtagaagttctgtagttcatccttatcagactaatggttttggggtttttgaaaaggaatgtttcaaggaggtctttgaaaaccattttcttcaaatgttcattgcatctgagatcccatttttgtccctttatttgctccagaataccgcccaactgccaacaaagaagggcttgtgctcccaggaattttctgcattcctctctggagtaggcatttttctcagctacaaaggccctttggcgaattccctctaatcattggatttgccctgggctctgataggtgccattcatggacttggtctgctgtttgatggggctgaggcattaatgggatcttttcatgataaacaaaactgggtaacattaccagagggatcacaaagctgctgttgtagggggagtgtggtgctttctctctcttt

SEQ ID NO: 70178 - DNA, 1984 bp, Homo sapiens
ctacttgagaggctgaggcaggagaaatcacttgaacccgggatgtggaggttgcggtgagctgagatcgcgccattgcactccagcctggatgacaagagcaaaactccatctcaaaaaaaaaaaaaaaagttaaatgattcatccatcggaagggatagcacagtgccctcgtgtttccaccagccactgatgctaattcttcattttaattttgccttgacttcctggctaagtgtatgtattttaatatgagtttcagcctccaactaaataacaaacaggacaccaggcttctgtctagccaaggtgtcgtgatgctgtttaacagcccccaaatccctacctcaatacattttaaaatatccaggtgctgtaagtcggatgggaaaaagtttgaggagagaaagtcattaccttcggtagagcagcactttattcattttttttttcaggttttgctttttgattaatgctttttgttatcatctgttcagtataacatattgtaaatcataaactcagggttcagatctttcagagacttttgcaacttgaaaggtggagcttcccagcctcaaggaaatctgcagtggctagtgtttcccacagggccccattacccagtcctggaaaggtgctaacgaggcatctttttttttcccagtgaagaaaacatcatgcattttaaaatatcggtgttatctgatattcacatgtttcaaacatatggttatagtacatattcaacagcccttaagggcttaaatatcctttgtatgtactataatcctggtggtagccactatacaatgagcacctactatgtccagcgcatgattcacattatccttaatcctcctagcctccctgccaaatcatgttacgattattcccattttaaagatgaggaggccgggcgcagtggctcacgcctttaatcccagcactttgggaggccgaggcaggcaggtcacaaggtcaggagatcgagaccatcctggataacacagtgaaactccgtctctactaaaaatacaaaaaattagccgggcgtggtggcgggcgcctgtaatcccagctactcgagaggctgaggcaggagaatggcatgaacccgggaggctgagcttgcagtaagcggagatcgtgccacggcactccagcctgggcaacagagcgagactccgtctcaaaaaaaaaaaaaaaaaaaaaaaaaaaaagatgaggaaactggggcttagggaggttctggtgttaaaagacaatggagtcaatttccaacgatgcctagcaagtggcactgactgtgttcatcctattttgccttctggtcagtttataactcgtgcttccgaacagatgaaaacttaaaagtttagttgaatatccaaatgtttccaaatatccttatatttcatagcttgtagtttatgacacatttgggagcaagtcctttccaatgtttatttattctctatagtacctacatttaacttttttctcccataatgacttccgatcctacttctccctgattcagtattcactccattacttcactggctctcttccttattatctgtcacaggacacacgcactttggaaaaatctgccttgtgatatgataattgcaggatgttttctgaattgcagaaggctggagtagagggggatgagggtttgaatcaagtttatctctggatgagaggaattttggcctgggaaaggaactggaaacgttctgaccagctttccgaatgctggttaaggaaaagcctaactcactctagactgtgctctgcattctagacattttatcatggtctgcacccttcaggatcttatattctgaggaagaaagtgattatttcccaggttgtgttatttttatgaagataattgaagctcttttatctctggatagttttcattttaatttatagatatcccactgcatcttaggaaagctgatatttttag

SEQ ID NO: 70179 - DNA, 4096 bp, Homo sapiens
gtgggagaggtgaggggactgtcaggggtcacttggggggtcagtgcctccgatgatagcatcttatgggcatacagatttgttgccattttatgtgagctcttgaaggttgatttctacagaaatgggtccacagtagcccagcaacattcattaataagtgtgtaggtacatctttgtgtttattcatgggctctgtagctttagaaggaaaaagctaagcacaagtgtcttgctagtatgttgtttcacttcccatacttcagcaagaaggtgactctctagtcttccctatcatcagcatttagaatccgggtggtgagttagttcaactcatagaatactcttggggatatttttgtttgatgctgattagggctggtggtacccactagaagggtagagggggaaagaaacagggcattagagaagaagatcataaagaaaaaggttaaaaataacaaattatgctaaacattaagttctgtagagtaaggattttaagtttttttattattctttgtttagattgtacgttctttgagggcagaaaccatgcttataagatattacaagtctagaagctgatgttattgtctaatagttattctggaggttcaacgtcaaatatagtgtcctaattgctacaaacattaaagatcaagaccctgtggaaatgggtttcttttccaattactgatcacctccagtgtgccaggacctgtgcaaggctagcatttgactccaaaggtgtatgggcattccctgtacctgaaaacgagtgggagccaagcatgtgaactgttaacttcaattaaaaggggttgctgggtgcggtggctcacacctgtaatcccagcactttgggaggccgaggcaggcggatcacgaggtcaggagttcgagaccagcctggccaacatggtgaaaacccatctctactaaaaacaaacaaacaaaaaatacaaaaatgagccaggtgtggtgatgcatgcctgtaatcccagctactcaggaagctgaggcaggagaatagcttgaaccagggaggcagaggttgcagcgaaccaagatcatgccactacactccagcctggacaacagagtgagagattccgtctcaaaaaaaaaaaaaaaaaaaaggtggggggtaaagtgctctgatagtcatatgctgagagttctgggcctctcagcgtttgtgcaaagttaggggatcactcaacaatcaattaactagcataaaagagcaattcagagaggagtctatgcccctctttggagggacctaggaggcctattctttggggagttcttcatcaatgacagcgatttgagaatagggaaccgaaagatagggtggccacttacaaggcacacaagccaacgtttagggaaattggtgattaacaggaaattattggacaagtgcttaatttttcaagtaaggatgtttctaggtaacaatcctgttgtggccgcatggttctgggaagtggtagacatgggattaagcagctgcactggatagtaatgatgtaattgggtttccaacataatttccagtccttctactgcttctgggtggtttcaacgactgtgtgacctaagtttcattttggcagtccatttcagctgtaccattgcttttcaaccattacaaaggtagcttgactctctttttacacttaattactcaaatctttgtcctttaaataaaattgagatatccgtagagtctgccaattaagcatttagaggaaaccacacactctttgtggagaaaagaaggccaaattagacaatcaagtgtaccaagaatttgcctaaatttggtataattttgttgaagattaatttattttcatggtgagttatggtattgcatgaaaagcacactttactttacttgtacctgactgtcaaacagccattacatgcgaagggcagcctgtatacaggctgggtttccccttcctgcttgggaacaggtacggggaactgttggcatgagttgttctccttagctcggcatatctcacacacatattgtagttctattctccagtctgtctgttctactcagtgtgatttcttactcatacattccaacatctctagatttttcctaatctcttcaaagtctcattcagttgtcttccagatatttcccttcacatcctttcttttttttcctttgcctttctctttgttattaccctttctacattttcaaaatgagtttcatatgtctccagttgttgctgggaagtagaattagatggtcctctcttcgttcatccacagccattttagtgcacagtgttaaaattatttgtttatgcatctatttcttccttgaaggaactttcatccttaatgtcttccttggcatctaatggggacttaatagatgcctatgtttttaaccattgtaattttagtaagaacgtttattctgctttcctgatagtcaattcacaaacagacttttgcaacccaactcccatatagactgaggagtttctgcaatgtggtcaactacagcaaaaggctttttttgttacaaaactctaatcttcatctactttggcccgacctgaattccactataattacctttacaacatatatcctaccatcatcttaaaaaggcttacttctgaacacatccgctggcagaagatttgttttgctttcttttctaggaaattgtagcttagcaaactatgagactgtctgactttaatttttcttactttctaactgttgatctaatttttttaaagtaaatagattacctttaatttgcttattatgctcaataatcacacattagcaatgtaataattttaataacagaaagtacatctaaatctctactgtttgtatgtaagtcccatacctgggagccacaatactttcaaaagtgcacatcaaagtaattgttttgtctggcgccagcacaaatttctgctgggaactgccccatttaatataaattatattacctgtggaatttaaaaggatataaggtgtagtgtgccctgcaggcaggaaatttaaactatggattgccttcttttttttttaatctctgatttattcctgtaatgtggaatatttagcatccctaatttccatttaatctttttacaggcatattttgaatttttcagtcatagggaagacaaagttagaaatgctattattctctcaggctaacttgagaatgaaaaatatctaaagctaagggtgaagtgggaaagagatgtcattatctgaaggagtctatttagaaaccaaccaaccaacaaagaaaaaaaagggatgatgaagaaaaacagggaactttgacctaatttaaccaaaaaccatcaagcctcaaacctgatgtctttgcctcttttttgcctatatagatgtgaatgtaggagtagcacatccacgggcatgaatatggagatataacctcatctctgtaaatccattgaacatagttttataccctgcttagaggaccaagatgttacattttaagcctgtaggagtaaacacatgcaaacccagctgttcaggtggagacctctggcttccacattcacaccctcggtgacctatttggctcacgtagtcctctcttaggagatggctgcatgcacatcgtcttggatgttgaatgtacagaatactttcactaggaccagtaaaaagggcaaataaagctaacagcacaaaagaggatatattgaaaagaggtagagaggaaggaaggagagagagcatacactagagaagaaaactagaggagctaaagaccaaagcaatgaagacgaggctcctgtccacctcccctctttgtgttccaggtggttcttacactcatttttactcagccacagctgaaaacatgctcctttctctgcccttagtcaggggaagaggcctctgctcagtctcttaattcagtcattgcctaaccattctcatgaaacaggtccccatcaccaagagcagataccttctccaggtctttttcttttttgttcaataatccaagtattctctcaaagactaatattgcagtcatgaacaa

SEQ ID NO: 70180 - DNA, 1315 bp, Homo sapiens
cagccttctaaaaaccttaatatgctttcagtcttccctggaaacaggtgatagggtaattagcatccacatcctctactcaacagagcagcttctctgctggcacattgcttggcaggactccagggaaagctgtgtgatgacagcaagattaagatccaggaagcaaagccgggtcatatgctctaagttgtccattccttctattctcttagcatgttcgattccacaaacacggcttattccaaaagccaatcctcctaatgagcattcggtcattagaattttcatcaataccaaacggaattacatttggggccccttttggtctttcttgtcatacctgagatgatgagatcctttattctctaagtgccccttatgcacacacagaaccagagcatccgtgtagaaataagaacttaccatggtaaatgatcagtattgttgaatctccaagatgtggggttcaccacatttaactgtatgtttattaacaattccattctaaaaattatgttacaagcatggccaaacagaaatgaaactatgatagtggcatctctatactaaaagtctactctctatggatctggccatatctacacttatagataatacgttgtatggaagttctagtgtcagagcttcaggctggtgatccctgatttagatactgtattaactatatctttccactagtctttctgtttatgttctctttacaatccccaaacacccaatagtttgcaacccttaccatacttcacagaatgattcttcaggtaaatgataaatattaaatttttaaatttatgcatattattttggtaagctaatcaaattttttatgttaaagtgaacttgatatatttttatattctgtcatttatttctccattaagtgcacagctttaaaaattttcagtgctgcaaaaataggccaaaaagtgtgacctcatctattttaaatttaaataaatgaatgaatatgcaaatgaaagaaagaatgtcccctgggagcactcttcatggtgggcctcagcaaaataaagaacaaaagcttctagaccttgcttcctgctcctgctctgtctagaacccttctgaaaatcatttcctccaatctgtagagtgtcaggggagtcttagatacttgggtcctttgcattgtcctgttcatgctgaattatcagttttatttagcagttataagtgattcacattgaagttaaaggaacaacctgaggaggtattgttcacagacagccaacactcagaatgtgattgaaagcataggttttgattctggaaa

SEQ ID NO: 70181 - DNA, 1048 bp, Homo sapiens
cacactgacttccacaatggttgaactagtttatagtcccaccaacagtgtaaaagtgttcctgtttctccacatcctctccaaaacattttttaaaaagcatgttgcagggggatgaataaagacaattatttcaaattctcaacattgtgttcaaccctaggctccataagtgccaggaaatagtgaactgatgtagaggagagtataacgaaagggaagagcaagggtaaccaacacttcttagagcactggtgacacatcaggaacactacacacatcagctgtgatggggaccctgagagacaggtcccatgaaccccacctgacagatgagggaacttacgttcagagaagtcatgagctctgagtggggtcaaacagctagtgagtaacacggcccagattcaaacctaggtctaactacacagtccatattctttcaattacaccctgctgcttattaaaaggctgaataatacaccttatgagaaaaggataaaggaagttctataactcatgcttgataaaaatgactgaaaagtgatataatgtttttgaagtactgtctaggaaggactaacctaaaggatggtaaccagctgttttgaaatgggctctgaagaaataagattagaaaatgggcttcaactgcaacaagaaggcaagtttccttaccagaaggattgcacttattggactcagtggctgaggaagactgggggatcttcttcctgtgcagaagtcaagatgactgaccccggagaaaagcggagaagtgaagtttgtttaaaatggggaagaccactgaaggagttgaccagagaaaaggaaggagaggcaaactgccgcagaatggtacaaaatggcagaaggaaaaaatagcacaaaatggtggaaggaatggaggaacagaagaactgttgtgtggagaactacacagaaaacaagagactcatgattataagtaattaattaaaacctttttgttttaataacgtctagtgtaactgtgcttgtgaagcaaattcctaccacatctcctctg

SEQ ID NO: 70182 - DNA, 1034 bp, Homo sapiens
ataaaacaggcagaagggagaaaaggaattgagaaaaagaaggacaaggaagagacagaagggggaaggaaagagcagtaagaactgaaaaaggctggagtttcctggagtgtgcagttgtggagccctagatctgtgggtttggcccttactttgctcgtatctctagttgtttctttgacattcatcttgtgtctgtgatgaaactttaagtttcttagtaaagacaagaactactattgtgtatctctttagtacctaatacaattctacaagcatttactttattcttgataacaggtggagagaaagaaagcaggttttcagtaatttataaaagtgaagaattatctagaaatgtagtcagtgaaaacatccagttttgataagtcaaactaaaacatccattcttcactcagagtaggcttttaaacttggattttctaagtaatttactcaaagccctctctctcaaagaccctcttgtgaaatgcccttgtgaagtgcttgtgaaatggccttttgagttagctccacaaaatgtccttcctaatcttagcaaaatgaagaaatgggtcaaaatgatttgaaatatgcttctctgtctcttccttcacctctttttggtttcattttcgtaagagtacctgtcagcatttgcagaagaattaaaggcagtgtcgttctggagggaaatcacatgttcctttaattttgtgatggaaggacttataaagagaagtggagcttggttagaaaggggagatgtgcacataggaaatgtaagcagggctggtgagaaaacttggtggtggcgtttaattaattttgaaactgggaaatagttctacagttaatctgtaagtttttttatgttgaatgcttggaaaatttcaacttttttattttcagacactttgtatgcagtgatgacataaataagaaaaatggccttgaaaacatcaaaaatgtaattttcaccttcttatgctttaaaaacacctgaatgcacttttctcaaacttttaagaaaa

SEQ ID NO: 70183 - DNA, 1043 bp, Homo sapiens
aacaaagcacataaaaaatcctgttctggttgccatacatattcctgtgcagctgaaactagaattccaaacgccacagaaacggccaggcttaagtgactaacttgcaaatcagagagtgcaggttttacattgataatacagagagacctgtaatcattcatcacagtggtactacatttattgatactgagcactgcaaatcataaacaataaggattacatgaccactgctgctacggtgactactactgccatcaccgccaccctccctagtgctattgaataatgcttattaagttctttcagccagcaactgtgctatgtactttagtgtcattcatcatatttaatcaccccagcaacccaatgaggaatccactttatagaattaaggaaattgaagtttaaattgctaccaggtcacacagcttacgcatacctggtctcatacttgatctcagaggtctttctggccccaaagccctgttcttcccccactatcttgaacttcctttccctgtatgtgaagggaatggaactcaccaggtaccaagatgtcacctcctaacccttacaaagcccagtgagttatttggaggagaatttttcccaaggccaaaaagctgcccgtgtaatactccaaagtaacttccatatcctggaaagagcaactacaatcaaagatagcaccttacaaacatccttcttttatttaaaaaaattaatttttttttaaaagctaccaccaccaacagttcttcccaagatcagagatacctgcacatctggcaataagcccagacataccaaactgtgtattatctagagccagggacttgaataccactgcatctgcagagagacaagcatctcatttcaatagacaacttgttcctagagtgggatactcccctgctgaactgacagggagccggaagagcggcattgaacaaagagaatagttatgactgggcagcagacggccccaagcacaaccccaggttctgctcttcttcaacttaaccaagcagaactgcagt

SEQ ID NO: 70184 - DNA, 1133 bp, Homo sapiens
caacataatgaactcaaaatctcagtgcattgaagggtttgcatgccaagttgaccaagtgcctaaactgtataaactccctatgtgcacacttagaattggatcatcagatttgtctaaacaacttgaaaggctttgctatctgttcactgaacagtcattatgatgtacacacctttaagagggactcagcccctccacaactgataatgaaggaagaatctccaagtgaggtgaggcagctggactttgcaggtctgactcttgtcccctgcgattcacttttcatcagcaacctggaggaatcagaactaggccctgctgaacaatctggagatgaaaatcaaagccgggaagtacagcttctcctggattggatctcgatttgacttttttcttttttctttttttcaaggaacagactgggtttcttcagagcattatatcagggattaagagaatcagtagactcgggttgttttggttttagaaaaagatctcagacgattatttaaattccctatgccttggtttccctgtgagaaaatgaaaacagtaaggcctggaccctcccagtaacaaaggggcagatgttaaaaatataaaggattctagctttcatataggaaatgcatgtgcaaaatattactcatttattaaggtgcatgaaaatttactgttaacaacacagaagactaatatgtatcattgatgttattcaggtcttataaaactctagtggccagtcgtgtttttaatgccaagaaccccgaggagcaactggtttctaagaatcaacacttagttctgagccgagagatgccccaaggaagataagagacttacagtttgtttggcgtccaaaaagctttccagacagcagtttgtttcctttccctttttatgaatggtggtagtattatgcttcagtctgcgttttctaccaaagccattcataaaaataaaaacaaaacaaaataacaacaacaaaaactttctcggcacagtctggagccattgggtgccagaggctgggaaaacatcctggcagccataaccccaaccaacattgaaagtattcaagggtctgtttgtttggtggtctgaaaagtatgaagtgctgtgtctgaggg

SEQ ID NO: 70185 - DNA, 1049 bp, Homo sapiens
aggtcctgacacttcaatgaggggaaagacaatgtctgaatctctgccagccctggctcccggcctagtccgtgtcacggaacttctaccagctaccctcagacacagcacttcatacttttcagaccaccaaacaaacagacccttgaatactttcaatgttggttggggttatggctgccaggatgttttcccagcctctggcacccaatggctccagactgtgccgagaaagtttttgttgttgttattttgttttgtttttatttttatgaatggctttggtagaaaacgcagactgaagcataatactaccaccattcataaaaagggaaaggaaacaaactgctgtctggaaagctttttggacgccaaacaaactgtaagtctcttatcttccttggggcatctctcggctcagaactaagtgttgattcttagaaaccagttgctcctcggggttcttggcattaaaaacacgactggccactagagttttataagacctgaataacatcaatgatacatattagtcttctgtgttgttaacagtaaattttcatgcaccttaataaatgagtaatattttgcacatgcatttcctatatgaaagctagaatcctttatatttttaacatctgcccctttgttactgggagggtccaggccttactgttttcattttctcacagggaaaccaaggcatagggaatttaaataatcgtctgagatctttttctaaaaccaaaacaacccgagtctactgattctcttaatccctgatataatgctctgaagaaacccagtctgttccttgaaaaaaagaaaaaagaaaaaagtcaaatcgagatccaatccaggagaagctgtacttcccggctttgattttcatctccagattgttcagcagggcctagttctgattcctccaggttgctgatgaaaagtgaatcgcaggggacaagagtcagacctgcaaagtccagctgcctcacctcacttggagattcttccttcattatcagttgtggaggggctgagtccctctt

SEQ ID NO: 70186 - DNA, 1053 bp, Homo sapiens
atgtaaaacaaatatttaatcttatcctatattttaccaattcttaaacatcaaattttgtccttccaactgactgtctatattctgttgacaccagacttatatttaatgattcatgactggaaacatatttcttcattgaacaatttcataatatttgatgatcccaaaacactccaaagaatgctagaatacttggaaattaagttatactaacgtgcagactgatgcattcttagatcttatttaaataactgaatcacagtctctgaagtttttggcaacatcaaattggaaaatagctctacgtctcttgccccatattcctggagcaccttgtcctcactataatctgtacatagaaacattaaaaaaacatatttattgaggaagcatatcttgaagaaaacaaaactgaagtataaattaaccaggattgctaataatgtgagccagtattaaagtataagaacgtcctgctgttctcttcccttctgtatgtaaatagtcattggagatccaggtggtatcatgctgaacctgctaaaataagtagtaagcagtgtcatgagctatcaaattaagtagaactctttcatgtaattttaagtatccatgaaatttttttccctagaagtctttacaaatctaccttgcatcctgttttcttaggtcaatgttgccttgcctgggaaggaccacccgggcaatcttatatatctactgttctctaaaaatgccacttagaagagaattgaaacttccaaacacatgaaaggatccaaggaaagtgtcttcaaacaattacatatgagctttaagtggaataaaaacagagttaccatgaaaaaaatcattttcattgctgctcccatacctaaaagctaagagtgggagaggggtgctaaaaaaaacccagtgtttgtgcgtctttaagcaatatttaaaaatatatacatataaacaaaaacttgacattttcattaggagaacccaaatatatttagcctctcatcctttaactgtacaaaaatcaagagaaagtaaattgat

SEQ ID NO: 70187 - DNA, 1255 bp, Homo sapiens
tccacttgtggcttctttgagattctgaattctcttgggaaaaacaactgtgatttcacttatattatttcttgatgtattaatgtccaacttgcaatcagttctagccatattaataatctccacctatgatgtatttgttcttgcctctctacctttctatatgccattcatctcatctgtaatttctttcccttaatttatgtttcagttttcccttctgcaactcaacaacaacaaaatcaaacaaaacaagaaaattccagtcttatcatccccttgataacctgaggcattccactcattcatctgtatcccccgtgtgtcccatacacattgacattctgtggtcatttgctcaacaaatgttcagacatcttctcatgtgttttcatggagtgtcttcatctctagttgcatattaaactcacttagggagttcataaaaaatatgatggatctccagaccaaataaacagaatcgctgaagggtggggccatgctggggaggtaaatgtttaactacttgctcctcaggaaaaaaaaaagtcctgatttgtagtatttgtcactttccatggtgtaaatactcccaccatagtggatttcaagctacctacttgacatcactgaacacagaattcagaagagatgttcactatttgctcacaagggctggttccagcataccactggataggacacaggcatatacatataaatacatttctcagatgcagtgactgtttttctttgtttgactcatcttccctatgacactaagcacaagggctgaatcaatattaacaaaccacataaagtgattaatctatagttcacagcctgtgatgcaaatgtgaactctgcctcatcctttgactcaaatgcacagaattatcaatttactttctcttgatttttgtacagttaaaggatgagaggctaaatatatttgggttctcctaatgaaaatgtcaagtttttgtttatatgtatatatttttaaatattgcttaaagacgcacaaacactgggttttttttagcacccctctcccactcttagcttttaggtatgggagcagcaatgaaaatgatttttttcatggtaactctgtttttattccacttaaagctcatatgtaattgtttgaagacactttccttggatcctttcatgtgtttggaagtttcaattctcttctaagtggcatttttagagaacagtagatatataagattgcccgggtggtcct

SEQ ID NO: 70188 - DNA, 1645 bp, Homo sapiens
cagcatggccccacccttcagcgattctgtttatttggtctggagatccatcatattttttatgaactccctaagtgagtttaatatgcaactagagatgaagacactccatgaaaacacatgagaagatgtctgaacatttgttgagcaaatgaccacagaatgtcaatgtgtatgggacacacgggggatacagatgaatgagtggaatgcctcaggttatcaaggggatgataagactggaattttcttgttttgtttgattttgttgttgttgagttgcagaagggaaaactgaaacataaattaagggaaagaaattacagatgagatgaatggcatatagaaaggtagagaggcaagaacaaatacatcataggtggagattattaatatggctagaactgattgcaagttggacattaatacatcaagaaataatataagtgaaatcacagttgtttttcccaagagaattcagaatctcaaagaagccacaagtggattgagttgatcttcaaggatcaatctggctatcttacagaccctgttccagatttgccctttataggagagttcagactcagaattataaaaaagaacatgagctcattgggctacctaatttatattgtgtaatgacacagtgatgaattatataaacatgaaaactacgtgaaagttcgtggaggataatgtaaattttacactacattcaaaagaatctcttccttttccatctgtttctttcaaaataccctcccagatggctttcccatgaggcaatctggattaactcagcctcatatccttccttcaacagcactttgaggggttacattcagaatcgcttttgaggtggtaaaaattttagcacaactaaatattttacatctaaagaaaagggctcagcagtgtgtaaacagacctacgtttttctttctggccccatcactgggctaattaatttctctttgctctatttatccatctaggaaatgggataataataatgccttttcccttactcccaagaacattacaagagatgcataattatataaattccaggtagcattattacattctgacttatttttgactgttaagtttttcatttccagagatttatagtctcaaaaattctagaatcctgatttattccaaagtacttcctctttgacgtcaagtgttttcattgaatgttttttaaggcaggaattttttagctggaggaaattttctagtaattgctccatcctactgttagggctaaagcattcagaatcatcttcctagcatttatgtcacacgtatacagaattacaaaggctctgtggtgaagtatcctcatactgcccaatgctgaagtctcctcagaacttcaagaatggcccttgttgaacctggggtacaaagcagcagagtttattctgaggagacaaattcagaattatgataaatctcagcacctgcatacgcacttgtgtttgtgtatacaagtacatgcatctagagagaaatgaaaagtgaaggaccaccctgttgcaggggtttgtgtttgcgaaatccaccaggtgtcatcagctgcaaacatcaagtgtgtcccataatcctaatgggagagttaatagtctcttaaaaa

SEQ ID NO: 70189 - DNA, 1170 bp, Homo sapiens
gtcttgccggtcacttagctacagatggaacttgaaaaactggttcctggtcattgctgctgaagagagccctttatttctgttgtgacaggactgactcaagatactcatgaacgtggaaaactcctaaatgtgtcattctgagttcctgagaagttgaacatacacagatgacaaaaaagaatgccatttagccataactaccctttctagattaccaagtatttgtaggtttattggcaagatagcttaaattacgtatgtatttctggcctgcaacatcatgtaatagaagagttgcagaattctttgcagttaagaaaaaaaaaaaaagataaggacttattaaagctgacatggactgtgatttttgcactccgtaccacacacaaaggagggcatcgtggtgacaccacccctgtgtttgtatttcttggttccatttagaattcactggcctcttctactgcagacctgctgtttagtctgcatctggaaattaaacccagagcttcagctcttagcattaaatattgaactttcttccagcacacaccctcatccatgcctgtatagtaagtctgattaaactcaagacattttaaaattccatcagccttaggagttaagtttggatattgggctgtcttcctcctcctttttaatctattagaagaagtgtacccaaaggtatatataccacatgcatcatgttgaaccaaattaaaagaacagtgatatgtgcaaactatatttctgggttttagtggagtttttttccaaacttagctaaaacaatgagttacatttatcaaattccttttttcatgaacaaaagaaaaactaaggcaaagtaagtgcacttttccagtagttataataaaaatatagttttccaactctgcccacccctgttccccactcatcagttttctgccaagaaacctcacatgtttcggcccggtacctcacttgtctttgtaaagtagctgcatgatggctgggagcttttcggtgtttagaggccttagtggctggtgctcataaaaatgtcaccgtgcacttgcactttgaaaagtcctttcatctgaacattcctgaagccccattccaacaggtaagccttcttgaccaaagagtggctgtttagccttcccaccctgccactag

SEQ ID NO: 70190 - DNA, 3900 bp, Homo sapiens
atattaacagaaggtgcctaagcatctggtaagcactctaaaaataccagctattattaccagtatctggagggtgggttcatttataccttaagaaaggatccccctaactctatttttcttgtgtgccggtttttaaaactgatgaatggcatgctgtcgggaaaaatttatccattcctactttttttctaattggtgagtaagcgtgcattgccctgacattctctggacagcaaacaattgaatttgctgaccagccgccatgatgtcaagccttaagtcaacagtggctaatgaccgctctgggaaaaaacaacaccttgattcctcaattacggtttaagaagccctgggaatgagggctcgccagtcatcgtcatcctcttttgaggcaagcataatgtgctgtggaaacaggttacctctgcactgttggcaagagcagcccacacagtataacgattgagcgtcatggctgtgccctttgtgtgttccaggaggaaactgaagagacatcctcacaagagtctgccgaagaggactagggggcgccaacgttcgatttctacctcagcagcagttggatcttttgaagggagaagacactgcagtgaccacttattctgtattgccatggtctttccactttcatctggggtggggtggggtggggtgggggaggggggggtggggtggggagaaatcacataaccttaaaaaggactatattaatcaccttctttgtaatcccttcacagtcccaggtttagtgaaaaactgctgtaaacacaggggacacagcttaacaatgcaacttttaattactgttttcttttttcttaacctactaatagtttgttgatctgataagcaagagtgggcgggtgagaaaaaccgaattgggtttagtcaatcactgcactgcatgcaaacaagaaacgtgtcacacttgtgacgtcgggcattcatataggaagaacgcggtgtgtaacactgtgtacacctcaaataccaccccaacccactccctgtagtgaatcctctgtttagaacaccaaagataaggactagatactactttctctttttcgtataatcttgtagacacttacttgatgatttttaactttttatttctaaatgagacgaaatgctgatgtatcctttcattcagctaacaaactagaaaaggttatgttcatttttcaaaaagggaagtaagcaaacaaatattgccaactcttctatttatggatatcacacatatcagcaggagtaataaatttactcacagcacttgttttcaggacaacacttcattttcaggaaatctacttcctacagagccaaaatgccatttagcaataaataacacttgtcagcctcagagcatttaaggaaactagacaagtaaaattatcctctttgtaatttaatgaaaaggtacaacagaataatgcatgatgaactcacctaattatgaggtgggaggagcgaaatctaaatttcttttgctatagttatacatcaatttaaaaagcaaaaaaaaaaaaggggggggcaatctctctctgtgtctttctctctctctcttcctctccctctctcttttcattgtgtatcagtttccatgaaagacctgaataccacttacctcaaattaagcatatgtgttacttcaagtaatacgttttgacataagatggttgaccaaggtgcttttcttcggcttgagttcaccatctcttcattcaaactgcacttttagccagagatgcaatatatccccactactcaatactacctctgaatgttacaacgaatttacagtctagtacttattacatgctgctatacacaagcaatgcaagaaaaaaacttactgggtaggtgattctaatcatctgcagttctttttgtacacttaattacagttaaagaagcaatctccttactgtgtttcagcatgactatgtatttttctatgtttttttaattaaaaatttttaaaatacttgtttcagcttctctgctagatttctacattaacttgaaaattttttaaccaagtcgctcctaggttcttaaggataattttcctcaatcacactacacatcacacaagatttgactgtaatatttaaatattaccctccaagtctgtacctcaaatgaattctttaaggagatggactaattgacttgcaaagacctacctccagacttcaaaaggaatgaacttgttacttgcagcattcatttgttttttcaatgtttgaaatagttcaaactgcagctaaccctagtcaaaactatttttgtaaaagacatttgatagaaaggaacacgtttttacatacttttgcaaaataagtaaataataaataaaataaaagccaaccttcaaagaaacttgaagctttgtaggtgagatgcaacaagccctgcttttgcataatgcaatcaaaaatatgtgtttttaagattagttgaatataagaaaatgcttgacaaatattttcatgtattttacacaaatgtgatttttgtaatatgtctcaaccagatttattttaaacgcttcttatgtagagtttttatgcctttctctcctagtgagtgtgctgactttttaacatggtattatcaactgggccaggaggtagtttctcatgacggcttttgtcagtatggcttttagtactgaagccaaatgaaactcaaaaccatctctcttccagctgcttcagggaggtagtttcaaaggccacatacctctctgagactggcagatcgctcactgttgtgaatcaccaaaggagctatggagagaattaaaactcaacattactgttaactgtgcgttaaataagcaaataaacagtggctcataaaaataaaagtcgcattccatatctttggatgggccttttagaaacctcattggccagctcataaaatggaagcaattgctcatgttggccaaacatggtgcaccgagtgatttccatctctggtaaagttacacttttatttcctgtatgttgtacaatcaaaacacactactacctcttaagtcccagtatacctcatttttcatactgaaaaaaaaagcttgtggccaatggaacagtaagaacatcataaaatttttatatatatagtttatttttgtgggagataaattttataggactgttctttgctgttgttggtcgcagctacataagactggacatttaacttttctaccatttctgcaagttaggtatgtttgcaggagaaaagtatcaagacgtttaactgcagttgactttctccctgttcctttgagtgtcttctaactttattctttgttctttatgtagaattgctgtctatgattgtactttgaatcgcttgcttgttgaaaatatttctctagtgtattatcactgtctgttctgcacaataaacataacagcctctgtgatccccatgtgttttgattcctgctctttgttacagttccattaaatgagtaataaagtttggtcaaaacagatcaaggagggagacactcacaagtcattttgttgcaccccttgcacacatcttggcacacatgtacataaagtgtgttttacatatcatactccttcaatcaactgccctgagctcgcctttcagattttgacatttaattctacagagacaatcttagaagaaacatgaagaacaagctgtagctccaaactacagaatttttacttcaggctagcacctacaaagtttgtaagggaagtaactaatgcactagtcgtctttgaagtaacattggaaagagatccggaagattgatgaataagaaatgaaagccacgaagagtctcctagataggagccttttaactctaaa

SEQ ID NO: 70191 - DNA, 1037 bp, Homo sapiens
ccctccttgatctgttttgaccaaactttattactcatttaatggaactgtaacaaagagcaggaatcaaaacacatggggatcacagaggctgttatgtttattgtgcagaacagacagtgataatacactagagaaatattttcaacaagcaagcgattcaaagtacaatcatagacagcaattctacataaagaacaaagaataaagttagaagacactcaaaggaacagggagaaagtcaactgcagttaaacgtcttgatacttttctcctgcaaacatacctaacttgcagaaatggtagaaaagttaaatgtccagtcttatgtagctgcgaccaacaacagcaaagaacagtcctataaaatttatctcccacaaaaataaactatatatataaaaattttatgatgttcttactgttccattggccacaagctttttttttcagtatgaaaaatgaggtatactgggacttaagaggtagtagtgtgttttgattgtacaacatacaggaaataaaagtgtaactttaccagagatggaaatcactcggtgcaccatgtttggccaacatgagcaattgcttccattttatgagctggccaatgaggtttctaaaaggcccatccaaagatatggaatgcgacttttatttttatgagccactgtttatttgcttatttaacgcacagttaacagtaatgttgagttttaattctctccatagctcctttggtgattcacaacagtgagcgatctgccagtctcagagaggtatgtggcctttgaaactacctccctgaagcagctggaagagagatggttttgagtttcatttggcttcagtactaaaagccatactgacaaaagccgtcatgagaaactacctcctggcccagttgataataccatgttaaaaagtcagcacactcactaggagagaaaggcataaaaactctacataagaagcgtttaaaataaatctggttgagacatattacaaaaatcacatttgtgtaaaatacatgaaaa

SEQ ID NO: 70192 - DNA, 1029 bp, Homo sapiens
caccttttttttttttttttttttttctgagttttctctcagcaaagaagaggaggtggctagaacttgttgccaaggaaaagagcctgattagagtgtccaattgaagagttcttattggctgccaagaacactgttatatggcttgtagaaataaatcaaagtctcgagaggaggccagaaagtcaaagaaatgctgttaaatcttgagtcctgtatgatgctgaagaaataaagggaaaatatagggtgtaaattgagttgtaattccaaccaagtcaaggcagtcagttgtgatggccaaacaacagatgcatgaaggctttaaaggacaaaaaatgttagactctggctgctacccaaacacccttgccgctgaaatcaaagagtccaatattcttgcagagacaaaatcttaaagacaaagcagcagacactcctggctaaaagggtttgcaatggatatattgccagtaatcttaaacccactcagcagagactgagtaggcttgggaagcaaacaggttttgtagaatgacgaattttgtataatgcctaacatattattggcactcaatggcctcattattattccttcaagtattagttatgtagcacaacagtatatgaacacaggactccctgggtggggaagaaaagaaactggcacgatttcttcaagtttcccctgctggttccacctctgggggtctgggctgaaaggacagagaaagtcaaaaaataatatctgacatctttttattgcttactataccccaggccctgtgctaaatttatatgcattatctcttttttgttgttttgttttgttttgagacagtgtttcactctgccacccagactggagcgcagtggcatgatcttgggttactgcaacctccacctcctggattcaagtgattctcctgcctcagcctcccgagtagctgggattataggtgtgagccaccacacccggcctatatgcattatctcatttaaccaacataataattctatgaggcttat

SEQ ID NO: 70193 - DNA, 1052 bp, Homo sapiens
atttaattgtgaaaaacgaaatatatttttaaataatttatatgtggaatgctgtttttcaaagtgggtaatttagtttaatggaatataaccactcattcatccttccatccaacagaggcaagtttggacttgccttgcctttttctgcttttaacatttgtattcaaagttgtacaccattgtcaaatgtataatgtagcagtaaatcattagaggaagtaagttaagtcctgttaatactgttctcaaatataaacatatttctttaatctcttccctatagttttttttttatagtgagataatggagttggtcttagccgctgcaggagcccttcttttctgtggattcatcatctatgacacacactcactgatgcataaactgtcacctgaagagtacgtattagctgccatcagcctctacttggatatcatcaatctattcctgcacctgttacggtttctggaagcagttaataaaaagtaattaaaagtatctcagctcaactgaagaacaacaaaaaaaatttaatgagaaaaaaggattaaagtaattggaagcagtatatagaaactgtttcattaagtaataaagtttgaaacaatgattaaatactgttacaatctttatttgtatcatatgtaattttgagagctttaaaatcttactattctttatgatacctcatttctaaatccttgatttaggatctcagttaagagctatcaaaattctattaaaaatgcttttctggctgggcacagtggctcacgcctgtaatcccaccactttgggagaccgaggcaggtggatcacgaggtcaagaggttgagaccatcctggccaacatggtgaaaccccgtctctactaaaaatacaaaaattagctggatgtggtggcacacacctgtagtcccagctagtcaagaggctgaggccagagaatcgcttgaacctgggaggtggaggttgcattgagccaagatcacgccactgcattccagcctggtgacagagcgagactcagtctcaaaaaaaaaaaaaa

SEQ ID NO: 70194 - DNA, 1056 bp, Homo sapiens
tattttcatagaagtagagaatttctgtcctcccttcccttctccccaccaaaggggagtcttgaactattagtttgctatgtgaggtaaaattctttaatttaaattacagccatatggcaaatatcctaagaaagtagttgttatttttaaatttctttattgtataatattagtatactaattgcaaacattattcaaatgtgatagaagtttatatggtaaaaagaaaaagtttcccccattcattttgggctcttttctttgtcttgaggctcctttctaccttgtactcctcaaattttccagatataaaataatttgatagtttggtgtggatcattccagattttttcccctgtactttcataaacatataaaatagataaattttattaaatttgataatactgctcatgctattttttctttaacttgaaacacttaatattatgtctttcagtcctgccttaattttgctgtttgccctcggatctctgggtttgatttttgcgttgattttaaacagacataagtatccccttaacctgtacctactttttggatttgtgagtactctgactttctctattcccttaacaattattcctgagttttaaataaatgcatatataatacatatataacaacggcagaacaaaattaatgagttttttttagagtactttaggaaattaattgtaattttatagtcttttaaaacttttaacagtttattagtttcaaatattagtatgtagtggaaaaaatgctgaattggaatagatgacctggctttgctgctatctgattatgtgacacttggcaaggcatttatcctttctgtgtctaagttttttcatatgtaaaatgagaattttaaagtagataaatccttgtgataccttctacctctaatattctattattttctttggagaaaattatgttgtggctttaatttcataaaattcaaattctttattgttaactcttctttgttattatcttatcactctgatcttttaaagaaccattttgctcaaattatgtgca

SEQ ID NO: 70195 - DNA, 1033 bp, Homo sapiens
gttttactatttttgaaattaagacataaaaaaacttaacgtttatatgctttctatttctccttttcagattcaagatataatcattcttttaaaatgttctgcttttagtcttttgctatgttgtatcctgctgtgtacaactaggcatttaatacatttttcattttgatgaaaacatttacattttggcccactaattttttttaggctcatgctttttggagagaggtttagatatctcttacaatttttaaattattttggaagctttgtattcttgtctagttttagttatacattacattattaggaggaaaattaggaaagaatacgtgtaaaaaacaattttttaaagaggaaatttgattttactgttctatgataaatggttaagaaaatagtaatgtaattttttttctcttttagcctttctgagaaaagtctacagcattctttctctgcaggttctcttaactacagtgacttcaacagtttttttatactttgagtctgtacggacatttgtacatgagaggtaaggtaatgagatggtaatgaataattttcagacattgcatatgatcaaaaaggcatattataaacaaaatccacttttttctattaacttttgaggttaaaatgtaaaaaaggttcatttactcttataagcctgattagttttgtttttgatgaagaaaaatactccacaacatggtatttacctctgaactttttagctttagtttcttagggttaaacccttggtaaaaattaagaatttttactgcatgccatttttaaaagtcttaagttttaaaaactttattagactatattccctgtgctcaaagcctaagacagtacttgaaaaataaatgtgcgttcattttagttttggctcatgactagcataatttcaccaagaagttttcaaaagagctccacatgattcatccctgatctttaatcagggatgaatcataattatttccatgatacagttttgttatattaaaggaaaggagaacta

SEQ ID NO: 70196 - DNA, 1036 bp, Homo sapiens
tttttccttggaaagcaggatagtctgcggggctcagactcatttatttgtcttgttttcaatctgaaactgtagtgattattttttcctccccaggatagtgtactctatccaatacttctttaagaattggcctctctttggaagtactcagttttagacatggcatagctcaggctccagaagccacccctccagaaagccttccctgctgttctcatctttagttagaggcctgtcttcatgctcaaaccacacttagtgcatacaattactgtattactggcatatagcagatactcaacaaatgtttgaactacactgatttgcagtatttctcttaagagtttttagaaatagctaaataaagtgtttataaaaaatgtgcctcaatgatataggcagattacctcatcagaaagaaatatattaaaataacattaccatatttggctaatatttttgctttttaaaggcttccttttaaaaatgataagctatctaaaacatatattggcatttggatagtctttgcctctgtgaaacatcatctcttcaaagagatgaggaatgaatatattcttgccagaacttgaaatatggaggaagggcaaagacattctaactcaatgatgtcagacattttattctagctatttttctttccttacagcctaaacatgcattgaaatagaatgtctcaactttatcttctcttgtttgatatgtaattgcaaatgctgccactctatttaactctgttctggtacaagttgtaacagagtaacaaaattcaagatatgaccttgtgtatatcagtcaggataaactaagttatgctgcagtaacaagcagcaccaaaaatctcagtggtttaacatagcagaggcttactttttgctcccaggaagaacactgagagtccagcaaactctcttccatgtagtgactcagcatttcaggctgctttgatcttgaggcagccccctgtcaacttgtagtgaattgtgccctggttcttcagtgtttctggctg

SEQ ID NO: 70197 - DNA, 1034 bp, Homo sapiens
ttacaccaaaaagttcatctaatttagggagactatagaccctgggttaagaatcccagaaacagatcctttccttaattttgttcttgtctttctgtatatgtaggagaaaaaaatgcagtgtaagaagcattggaagaggtttttatctgagcttgaagttttactactgtgagtatgttttctctggaatttcctcctctttgtgcctgggtttcatctctgttcattttttattttacagcacagagcttggcgtgacatgtaataaatttgggttggatgttagaacttcgaataaattttgatatctgctttagtatattccttaaagtacattttaaaatagatcatttacataattcacttgaacatattttaacaggaaactgtcacaaggaagtaggttaaatcatgtgtgactaacatggctgaatagtaatacttagaacattagagtggtctatatttcaccatttcctccttccttagagaaattccagtctagaagctgtttcatcagtataactctattcaggaagagagttttagacaaagaaatcaagcgcttttgatgtgcatattatttttctggaattcactcctgagtctgagagtccttggagacaaattgaaatgacttcgttttcatatacatattcatatctgcagctgtgcagccttcctcattgaaggcctctaaccctgtagagttcacttgtcatcctttacaaataggaaactttttcagatttttttttaaccaagatgtgaagtcgggaagcagggaggaagctgaagagagaaggcattatactgaatccattttcttttatactgaagaccagaaatcaaaatagtagaggctaatcatcaaagcttacatatcacttagtcaataaaaaatgaaatccaaaattgtaatagtaaaaagtttttacatgtgagttttatttattggcttatgaaagtaagattcaaacattgcaaaatttcaaaagtacaaaagcatagaccaggaaaagattttctcc

SEQ ID NO: 70198 - DNA, 1028 bp, Homo sapiens
gtaaatagcaataaaaattgtttgtccttgagtctccagtgtcttgctcatcctactgagcctgctgtctcataactttatatattaacctatgacaagctgagcagcaaccccaatgttcatttttgagacatgagaaaattagaagcaacatctcccacatttcttcttctagacataaagaatcattcacccagagtaaataccccctgtcggtgaatttttttctatttgccctttatcttcaacctgtccaaaagtacatgaatacacctttgctgaatatcaaggaagactgaatttaaaaggctgctgctgcttctgaaccatttcccagtatcttgaaaaaaacttgtagtatgcttttgacttgggcagaaaaggagctgattgcttacttgtttttctgatgaaatgaactccataggaaaagactctaggttttacttagttctagaggggcggggtgacctacccatagacgtctgtgcctgttgcagtgtggcaatccagcaactgctaatggctttgtagaatcagcataaaattaatgcacactcatgggacctgaatatagagggaccatgagggtcttcagtcagtggagttatccgttggaattgctttcaaagggctgaggtggccacccacaacctaaaacaatccctcctccactcagcttgcaaccaacactgagcacactaagtgctcaaatatatgttttactgagtaaataaatatctggaatgttgctaaacatatttgtcctttggtctaaacttaaaataagtattagcttattttaaagccccaagcagcaatagattaattttattaagtttccttttgtgtgactgagttcatcaaatcctttcctgaatgcagagtttgaagaagaaagaaaagagaaggtgttggggttttggctcttgatgggagatggggacagagggtcactaactgaagcaaagggagcatcagggcagggagggaggcagaggcaagctctgcccatgtcccgttctttt

SEQ ID NO: 70199 - DNA, 1022 bp, Homo sapiens
gcagaaaggccaaaagttcaatggccgtggaagggactgatttgctttggaacaggcagggacacattgatgagcccttgtgaaaccacagttctcaaacaaatgcccacagccatggatctccataccctgacacatgcctgggtgggcacattctatggatgggttacattgaagtccttgaactctttggaacactcagaaaggcaacaattgtcagcagccccaccaccaagtaaaatataaaatacattgctagatgcatttcaagccttgtctcttccataatattcttgtttctgatcagatctctctgggtactctgtatctttgttacctgttgggcattctgtctagcagtgttgcttaaatgatttttatagttctgcacatccagacaagttcctgggatagtgacctggaagaactggcctcctcttaagttgtgagaccacctaagagactctagaacctttcagtttccacctatatcctagacaagctgcagactttcactagagcccagcttgtcaaacctagttcctcagcctagtcagaatccaaagctgcattccatcccctgctcaccacagtcctcattcttctgtagtctcaccttatcttattctccaaccttgtcctttcttttccaaccaactgatttctcttgcttttactatatacgtggcaattctttactctgttcctttgaacaaattattgcctccaccaggaatattctctccgcttctttcaaccaatccactgcaatgacccactttttccaagacttggcttggaactctctaacgagaggaagccttctcagaccaaccactcagtgggcatagttaccattgcactacacattttgtgtttgtgttatctttctgatcaccaggttgaaccttcaaggacaagactattatcatcactgtctctccccctgtggtctaacacaatgctctgcacacaacagatgttctataaatatttgtgaagtaagatgaatgggattgtca

SEQ ID NO: 70200 - DNA, 1053 bp, Homo sapiens
gctaaaaaatgtcttagtaatttgaactcttcaaagagaatgttataaaaacaaaacctgcttccaggtggtggaatttgagaaggaaaggacttaaagaaaagaatcttgaaaagttgcagcctatattcttggccaaagaccctcacatttttattggagaaacgaagatgtttttgacttacaggatcacttaaaagcatctgaaggcagtaaacttccttgttatttccctcctagcccttagtgagcttaattgttttcacatttatgaactattttaaatggaaatgcattttatccttagcattttccatcccagacatttcattcctgctaatgtttccaaagcaaagagataatcttggtgaacatttctaatgtttcctataaaatcatgttctttaatcagtattgccatttgtctcctgccaagtgaaacagtctttcatacaagggaaatggtctaggaaagaaacaaagaagaagccatttgcttcaaaatggacttttttttttttttaatggaaattgatcagagatgtaaggtcagagtgagtgagtgcatgggtaatttcctctccaaaagactagaaaaactgagtggttgggaagagggcatagggggccacagattggcccctccctgccaccaggacacccttgcctgaagacccaggctcctcctgcctttatccccagacgggaaggttggagcccagctcagtgtttaacaggcatgtcaaagcctacagggaatgcaaagtgtctttctttgtttgactgataagattctttaatcagtctcctccctttccctcataaccccctcaaaaagcctatttttatctttcagaaaaattttagatatatataattctttttcctcagatttttcctgttttcccccagtgcctcccctcttctaaaatatccaaatatgattttttctaagggatgccaaaacaattaaatatgacataaattaaaatttcccctattaattctatttgccaccactctaatccccaacattcatttacttatatacat

SEQ ID NO: 70201 - DNA, 1034 bp, Homo sapiens
ggcatggtggcacgtgcctgtaataccagctacttgggaggctaaggcaggaggattgcctgaacctgggaggcgtaggttgcagttagccgagattatcccactgcgccacagcctgggcaacagagtgagactccatctcaaaaaaaaacaaaacaaacaaacaaacaaaacaagaacaacaacaaaaaactggcatttaagaattacaggttgggcccaccatttccttattcccttccaatcttccacatattatggttgaagtaaaaaatgtagagacttgcccaagttcacaaagctagttggtggcaaatctgaggcttaagtcaggtctcttggtatttactttagtgtagtttcttttatacctggttttaagtcacttaatttactcctcaaaataaagggcgttagctaatctttaagatcccttctaattcaaaattctatagctgaactaatttcatgaaaatgaaagaatattctttataggtagagtgataaaaggtaaaaggaaagattattcaaacttaatttaatgtctgtttgcttctttgttattaggttttaaatactcttgaaagtactcaagccagcttgtattttgctgaagatcctcccacatcactaaagtccttcaggtgtccttctcctctattcctggagaatgtaccaagtattccagtggaagatgatgaaagccagaataacaatttactaccttctgatgaaggcctgaggatagacagaatgactcagaaaactccttttgaatgcagccagtctgaggttatgtttctgagcttggacaaaaagccagagagcaagagaaatgaggaagcttgcaacatgcccagttcttcttgtgaagaaagttggttcccaaagtatatagttccatcccaggacttaaggccctataaggtaaatatagatccttcttcagaagctccagggcattcttgcaggagcaggccagtggagagcagctgttcctccaaattttcctgggatgaatatgaacagtacaa

SEQ ID NO: 70202 - DNA, 1050 bp, Homo sapiens
gtggagggagacagaaaaagaggtaggcagaatgcagtgttacaggcaccctaccagacatctttagagagtgctgtagggagattaaagatagtggtaagtttgatgaaactttgaggaaacggtttctaaataatctccagagttaacttttgtgggtttttgtttgtttttttttagtttctatttgtgatgaaaacacacaagagacatgtaaagtgtttggacgttttccgataacaggtgcttggtggagagtgaaggtacaagtaaagcctgtggtgggatcaaggagctatcaatatcaagttcaaggatttccgtcttactttttgcagtctgatatgtcaccaccaaatcaaaaacatatctgtgctctctttcttaaagagtgtgaggtctccagtgatgatgttaataaatttttaacatgggtaaaggaggtatcaaactacaaaaacctaaactttgaaaatcttagggaaacactaagaactttccacaaggaaactggaaggaaagatcaaaagcagcctacacagaatggtcaggaagagttgttcctagacaatgagatgagtcttcctctggaaaacacaagtaagtgtgatttttatcatcaactttcagtgtaattgacatacttaataactacagtgtttaaaatgttaccactagcatagtattctttttaaaaatccatttggtgaaaaatgtgtttatgttgcttttggagtatgccattgacatttcaggtttctcatctgtagcatgaagggattatatgagctgatctttaaaatcttccagttcctttccacctctaaaactgtgattttaatctctctttctaacttttgtattcacagcgattaccttgaatcattaataaaaaaaaattcagttgctggccaggtgtggtagctgctcacgtctgtaatcccactttgggagactgaggcaggaggatcacttgagcgcaggagatcgagactagcctgagcaatgtagtgagaccttgtctctacaaaaaattttttaaaaattagc

SEQ ID NO: 70203 - DNA, 2037 bp, Homo sapiens
atatgaattttggggggacacagttcggcccataaaaggtatggagggctcaggagtgatgtctccattaagaaaaaatggagccgatagatgacgtgctcagtagattatagtgaagggagttctgtatctcttctgcagagtttaggcagaattgttgatagacacatagaaaactaaacaagtcaagaaaatgaggcagatgttaacttcatgatacacaccgagttcaacagaaaacttaatgtaacagagtacatcctgtcactcagctgtgaatcctatttgcataagcataataaatacctatttaaccaaaattgaacaaaatgtatactacaacatttttcaaatatagaaaccaaagaaacacctgtggaggtaatggtataaaatagagtgaccttccatagagatagactttccatagtaaggagttaataatgaatatctaaaatcttttaaaaatcaaggaaaaatatctatagtacttagaaatatggaagtaaattctggaagaaataactaaagtgttggagatgttgcctttagaaggcatgagaagggataaggaaaggattcataatttttttgataagccttatagtattatttcacttttaaaactgtgtgttagtgtgataaaatataatttttatttaaaaattatatagatctctaattacggtgcagccagttagaaaattagtgatgttctatggtattttctgtaaattttgttgaagttcatgtcttctgggatttaaaaaattattaataaagaacatattcataaacacttatgatgtttataaaccaacctgaactttatttcttaaagataacctacagagagtggaaactcctgcgatgtgaggcaagttggatagcattttgtcagtgtgagtctcttctccagctgatgactgatttggagaagaatgcattaataatgtattccagactgaagcagatatgtagagaagatgggcacacatatgttgaagtgaatgacttaactttgacattgtcaaatcatatgtcatttcatgctgcttcagagtctctgaagtttttgaaggatattggtgtggtgacatatgagaagtcctgtgtcttcccttatgacctttaccatgctgaaagagccatcgccttttcaatttgtgacctgatgaagaaacctccttggcatttatgtgtcgatgtcgaaaaggtgcttgcctctattcacaccacaaaacctgagaattcaagcgatgatgcattgaatgagagcaaacctgatgaagtaagattagaaaatcctgtggatgttgtggacacacaggacaatggtgaccatatttggactaatggtgaaaatgaaattaatgcagaaataagtgaagttcagctggatcaggatcaggttgaagttccactggatcgggatcaggtggctgctttggaaatgatttgctccaatcctgtgacagtcataagtgggaaaggtggatgtgggaagaccacaatcgttagccgtctttttaagcatatagagcagttggaagaaagagaagtaaaaaaagcctgtgaagattttgaacaagaccagaatgcttcagaagaatggattacctttactgagcaaagtcaactagaggcggacaaggctatagaagttttgctcacagcacctacagggaaagcagctggcttactaagacagaaaactggtcttcatgcctacacactgtgtcaggtaaaacctttgacatttcatctgtagataaaacatttgtcggccgggcacagtggctcacgcctgtaatcccagaacttttgggagactgaggcgggcagatcacaaggtcaggagatggagaccatcctggctaacatggtggaaccctgtctctactaaaatacaaaaaattagccaggcatggtggcacacacctgtaatcccagctactcgggaggctgagtcaggagaatcatttgaacccaggaagcagaggttgcagtaactgaggctgcaccactgcgctccag

SEQ ID NO: 70204 - DNA, 1043 bp, Homo sapiens
agaacatcactattagattactggaacgtatctgttatcaaatgcatttatttatttgttttatattttgtacacttattttatctatttgaggctgtagattcttccactttcagtaagacattgaacatgattgaaaaagggactaactacaaatgtctaaggcctgttttttttttcccctaatatgttgactaaaacatatgcctgtacccagtttccctgtggttataggtatgaaagatgttctatttagattttgtcaccttattgtgttattactatttttatatcttttactgtttaaatgttgttttttgtaaggtatttaactttaaactgttaaataattttaaacaatcttgggggtattttttctcagagtaagtcttgctactgtatctttttttcttttaggtgacattagacagttacccagtattgaacctggtaacttgctgaaagatctttttgagactcttaagtcaagaaattgtgctattgagctaaagacaaaccatagagcagaatctcagctcattgtggacaatgctacaaggtataatattactaagagtttgcattttctgtctgttgtattagaaatttaaaaaatggcctttgaattagaatgatttagtacaatacattaactacaccttttagcaaaactcttccatccttcaactataaaccttttgccctacagttagaaaagcaaagttaatgtttttcattactggtccagtataagttattattgaaatttaaaaatggatgaggtttcctgattttaaaagtatgtatatgaattaaaattgtattaagcttaaggactagaataagcccaaggggaatggagatttggaaataagttcatttacgtgcaagggagaattggggaagaaatatcccctaatttttgtgggagaaagctgaaggcaaaataattgaatgtggtatttcactcctagatgaatcctagaggcacccatggcatcttacttcccttaaatagaaaagaacccttctcttcccttcgt

SEQ ID NO: 70205 - DNA, 1543 bp, Homo sapiens
aatgagacatagattttaaaaagcatcatttcctttgttgctgcttaaatgtagaaactatagaagtggttgccttgtatttgttctcacagtgtagataccctcactgaaagctgtgaggaaaagtaaactgcaaagaatctactcagacttatgtagtcaatacaagaaatgaatgtatagacttcaaaataagaaataacaggctgttcttcacagagtcaaattgaagataagtttcaaagactgaaaacttctatttgtgtttattaaaatatttaggtatagatatattgtttgtgctgaaatgcaaattttaagccttttgaaattcttaatggtaattgtaattcttatattttatgtttgacccaaagatagaatatctttgaacgtatttgaacgtagaacatatttgaaggtatgcaaaatagttctttggtttggtgacaggatgtaactgatgtaacttttggaaagagaagatctttgaccattaataatatggctggcctggaagtaactgtggattttaagaaactaatgaaatattgtcgcataaaacatgcatgggcaagaactattcacacttttcaggtaagaggagacttttatcaaaccttttaaataatttaccaaccttagagcgccttgcattgttttcgtaaatttttgttgcacttattagcaaacaaaaattaggaaacaaaatacacaaaagtacagaacataatagagaagacgccacccttttgctcttttttgctccagagctctctttatttttagaaacaaaggcattataggtaaagtctcctccttcaggtcttcccctccctgcctgagtctccagtatggcttggcatggcactgtactcatcttatctttggttaaattctgatattttgttcatcatggatccttttgtgccttaattttgatttacaaaactgttacattaaaatgtcttgatttatcttgattgctgagtttcttgggaacccattaaattttgtactggaggtgagttcctcacttgccttgccctagtcctgggtctgcctcccgccttcctccaaagtgacttctgccccgaatttggtatatatcactcctattcatgtagaagcaatatatatgattgttttctgtgttactgaggcttatgtaaatggtgtaatcatgtttctatacttttgcaactagcttttattttttattttttgccttatcaactttgtggggtataatgtgcatacagtttcattataaagttggttgagttttgacaaatgtatcctctctctccatctttgtgaggcaaccttttatccccccgcccccaacttatgtgggaatattgttaggtttacagaagagttggaatgatactacagagagttttcatatacctttcacccagctttccttggtgtttaacattttataactatggcatatttgtcaaaactaagaaattactattgctgtaagactgctaactaaactatgcatattcgaattgcaccagtttttccatta

SEQ ID NO: 70206 - DNA, 1578 bp, Homo sapiens
tttggatcagagtaactatattgctatacagttttgaccattctctatgtgtgtgtgtatctatctatctgtctatatatatatatagatatatatatggtttttaaaatgtggctttaaagtatctctgatgttcacaaaatagtatgtcaactgtgtatatattatatatataagtatataatatatattcacctattgctacttaaaatttctatattttatcattacatgtaatatttttatacatatatttatatataatatatctatatgtttacctattactggctacttaaagttttcatattttgccattatatgtaataatgggttaacacatttacacatgaagcctgtaccatcatttcagtcttttattaggaaaggtttaatactgcatgcagtctttaaaatttgctgctgggtttctacaagccagttgtggacctatgaaacctgaacttagcagcatgtttagcagtgtgtttagagttcttggaggatgaataaaaatggaacccataaaatggacacataataatagtctggccaggtagaagtgcttgagagcactttgaacacttgtctcctttccttgtctgtaaactgtctgaacctattttatagcatttagtcttcacaccatatttttcctgccaggggtccgaggagcaaacagttgtctatgtggtggggaaggcgggccgccagcactggcagcatgtctacaccgccgtgaccaggggccgctgccgagtgtatgtgattgcagaggagtctcagctccggaatgccattatgaaaaacagttttcctagaaaaactcgtttgaaacatttcttgcaaagtaagctctcctctagcggcgcacctccagcagattttccgtccccacggaagagctctggagacagtggaggacccagcacaccgtcagcatctccactccctgtagtcacagaccacgccatgacaaatgatgtcacctggagcgaggcctcttcgcctgatgagaggacactcacctttgctgaaagatggcaattatcttcacctgatggagtagatacagatgatgatttaccaaaatcgcgagcatccaaaagaacctgtggtgtgaatgatgatgaaagtccaagcaaaatttttatggtaggagtgatgtttccatgttcccaagttttatttaaatatcgctaacttcggtgtgcttataaatgactgtgtgcttttattagtgttgcattgtgctgttggacttaaaaacaattgtttttctcatttctgtcaaatttcccttacctcactgtctgatttccccttcatttcctcactccttttctccttcccagcctctaactgaagacaactccccaaagctcagttcttttttcctttgagaactgactcattctcacagtttcagccatctccttggcaccagtgatttggctaacaaagttttgactatagtaacatttcaggcaccaggaattagagataagtgagtgacagttctcactctcacactgattgtcatggtggagacagtcggctatcagtaatgtggtgatt

SEQ ID NO: 70207 - DNA, 2296 bp, Homo sapiens
tactgtatagaaatgcagtcgatttttatatattgatcttgtatcttccaaccttgctgcacttgtttattagttacagtgggtttttagtggattccttaggattttctatataagtgatcatatcatctgcaaatagagatgcttttagtgcttcctttttcatctgtaggcctttaatttcattttcttgctaattgccctggttagagcccctagtatattgttgaatagaagtggcaagagtgaatatccttgtcttgttcatcatattagggagaaagcattaaatctgccaccattaactgtgtttgctgtggatctttcttttaagtcctttattgagatgaagaaattctcttttgttcctaggttgttgtgtatgaagggacattgaatttcgtcaaatcctttctctatgtattgagatcattgtgtagttttgtcctttattgatgcagtgtggtaatttttggatgttaaatcaatcttgtgtccctggagtaaatctcacttggtcatagtatacaatcctttgtatgtgctgctggatttggcttgctggttttttgttggggacttttgcatctaaattcatgaaagatattggtctgtagtttctttttcttgtgatgcctttgtttggttttggtatcagagtaatagtgaccacatagaatgagttgtgaagtgtccccttgtcttctattttggaagagtttgtgaagaattggtattaactcttctttaaattaatctggccctgggcttttctttgtggggagtttttgttttgttttgtttttgttttttgagatggagtttcgctcttgttgtccaggctggagtgcaatggcacgatctcggctcaccccaacctccacctcccaggttcaagcgattctcctgcctcagcctcccaagtagctgggattatatgcatgtgctaccatgcccagctaattttgtatttttaatagagacagggtttctccacgttggtcaggctggtctcaaactcccaaactcaagtgatccacctgcctcagcctcccaaagtgctgggattacaagcatgagccactgcacccggcatgggaagttttaaagctactgattaaatttctttacttgttataggtgtatttagcttttctatttcttcttgagtcagttttgacagtttttctctagaaatttgctcatttaatctatattttttaattttctgacatacagttgatcatagtattcctttatggttttttaaatttctgtaaggctggtagtaaagcctctgtttcattcctgattttagtaatttgagtctctttttttcttggtttagctaaaagtttatgaattttaatctttttaaaggaccaacttttggtttcattgattttctttactgtcttcctattctctatttcattaattttaactcttgtcctattacttttaggagggcctcttaaggaggggtcgtatgctgacttaaattgagggttggtcaaagttcaaaagcctgggggaaggaagcttaatattttctctagatcagtaagtacaagcaattcagctaagaatttgcttcatttatgaagcaaagaatggtaattttcaggacagtctgtgtctgattttgttataagtaaatgggggaagggagataaacatctgtgagtcttatctaagtcacccggggaaggatggttctttataataagccatttcctggaacacgcaggcgatgggcaggggggttactacaaccttatagaaataaaatttctttaactctgcctatatttcagggtatagtcctcaggtaaagcttcacattgtcaagaagaacttgaaaataccttttttccataaaaacacaatgaaactaatactatgtaacggaatattccaaagcactagttcttataaataactattggccaaaatacaaataactgacccaattcaaaattctctaagatttcattaagatccttttgtagttcataagcctgatgcatgggtgttcacacgcatgtgtgagatgtgcctccctcaaaccttgttatggcgccagcccattaccggtctgtcatgaaaaaaaaaatatttcagtaaaagaggatacttctagtatcctttttaaaatttgaattggaagcaaatagtatttcatcccagcatgttaaaattgcaagggtcacctaccccagcttaccatttgctaaacacgcatcagtcaccagtggaacacacatttccaatgctaaaggtcttgactgcttgg

SEQ ID NO: 70208 - DNA, 1051 bp, Homo sapiens
acatcagaggaaattttttacaagttcatcttactatcactttttaaaaagagaaacatctgtttgaaaatattctctgtgatgatttccttaattcactttgaaatcagtttcttactatgaagtcattaatgtaagaacttggccaacaaagcttttcttctcataggctggctctactaggggaactagtgtttggtaaactgctgggactaccacaatgggaggggtacaggtataaaattaagttatcttaaaatgtttcagcaatgatgcacgtaggagaccataataggtggtggtaaatgttttgcccacgtataggaatgattttaactaagatgtatgctattccctatgcaacaaattatcaaacaggatatgtcttgtgacctgttttttttttaaggacacatttttaatagctgaaaatctctgataatgaattagagtgtgtagtaaacatgagaattagttatattatcttatttttaaaattcaagactaagaacttcagagaatgaagagtctattaaaatgaggttcatcttaatgataggcaaaccaaactcatactgcttgacatgttttgaaaactggtaatattgagggtgtacagcacatgtacttaaaaatgacactggactatcttttgctctgagccatgccacttaccgaaattgtaaatacatttttcacaaatgcattgccaattattaccatccctcaaagcaataaattgtgacagttgctttaaatgtttgtcagcaactgttttcatttgttcagatattttgaatagctacactaataactgttattatttggtgaacataaaaaaataaatagatctgtatattgatggtagactctccatattgaaatgattattttccaaacattttcattttggtcaataattcaaactaccacttaggcaaagtattcgaacactgtgtcctttgtttaaggaaatataaaaaaaaaatcacctttctttttgtgcaaaaaaaatattatttcaatcacatttcagaaccgccagggcaag

SEQ ID NO: 70209 - DNA, 1096 bp, Homo sapiens
acctcccagagattgtattttgagaacaaagtctctgaagatctgtttttaagcttctttgcttggctgagcccataggaggataccattgccatgcttacatctcggcgtacatgctatgcagaatggctgccaaatttgaccctagggaaagaagagaaagcttactgaccttgtgcagctccacaggagttggagacatgatctcctttatttcttgtttcatttttctcagggttactgacttcctacccacatctgaaggcagggtgttgctccgagttgtttggctgtagtgcggccgcgagctgctgcgctcctggaagctggcctgtcgccccagctgactgcgaggtgttggagcctcatgattcaaactcatcgtgctccccgacatgattgttgcctgtggcattgacaatttttagaaacaattaagccatggactaaggaaaggatttggtgctcaacagtaagcacatttctccttctgcgaggtaaaaatacagtctcttcagggcaaaaccaaaggctggaaaatggatgtactaattgaactatgaaagtctggaaaatgctttgcaagtgacatttataatgcacatctcaaatccaatttaagtacttaagccattgagtttatttaatcaaataccacccctggcagttttgaggcaaattgaaatgctctaacatttgcttactgtaaactacattttaagcattcactttccactcagtgggctctaacagatgggattcatgaggccaccttgaatatatcttacagaaacgaattaagaacttctcaatggacaccaggctgcctgtacttgcaatgctgcctctatctccaactgcagttaacaatgggctggaaagggatgactgatataaaggcaaggggttcttcccaagcttcgtctagactgtatattgtctttcctttggccaagtggcctgtccccagagtttgtagaccagctaagtctccatattatttgatacagattaagtgtttcttagaaatactctttgtataagatcctcagagaaagtaaaaataatcatttattatgttattatattcaacttt

SEQ ID NO: 70210 - DNA, 1014 bp, Homo sapiens
atgactctctttctatatttcgtgtgagatgaaggagagatattctgaatccaaaaaaaaaaaaaaaaaaggccgggtgcggtggctcacgcctacaatcctagcactttgggaggccgaggcgggcggatcacgaagtcaggagatcgagaccatcctggctaaaacggtgaaaccctgtctcgactaaaaatacaaaaaaaaaaaaaaaaaattagccaggcgtggtggcaggcgcctgtagtcccagctactcgggaggctgaggcaggagaatggtgtgaacccgggaggcggagcttgcagtgagccgagattgcgccactgcactccagcctgggcgacagagagagactccgtctcaaaaaaaaaaaaaaaaatgtctggcaagttcctaacccagcctgtgtttcttgacaacagttttgcaggggctgccgatagtgcagagacagaacaagaggagaacttctggtctcaagcgctggaggatttggaaacctgcggacagtcaggaattctgagagaactggaggtagccttggtcctgctacttacttttattgtttctacattcattttttttggtccttttaagtttgcatttctcacaccagttcatttaaaagctttaaccctttccacaggagaaagctgacaggcgtgtgtctttgagaaacatgactctcttggtagctaccctttatgtttatatttttgcttgtgaagctgccttccctacccccttgccttctggacagcaatttgattttatacaatgcagtcaaaagtatatccccatctccacccctcaagcttactgacttgtggcttctgccattgctccctgctaaccctgattgtatctgtttcctaccaaatcgctaaaaagcgagctaagtctcccagcagcggcgcatcccattctcttagttgctttagaaaggtttctttggcatgttttcatttgtacctggaatagaaattaatgtgatcgttaagaggaacataaga

SEQ ID NO: 70211 - DNA, 1053 bp, Homo sapiens
tcatcatgccaacccaacactagattaaggttgaggaccagcacagcctcaccacgccaggggccagatttagtttaattatttcttcaaagctgaagataggattgtttaaaagtcacaaagcccagatgcaaatggctaaagtggaaaaaacatgaaaccagctagctcaactccctttttcttagataggatatagacacacaaagagacaaaatggcctaccccaaggttccccagctggtgctcagtgatagagccaggactaaaacccatgtaacctgaccctaaggccatcctcttaaagcccccacaatgatccctggtttgaggagtagggagccagggtgcagggatacactgatgttattatagaattgtgatgaatattgagagattcatttatctttttcaactcttgctaaaccagaggccataatttaacctcccaccattgccattcagtttttatgcagagacatgatctattttggaaatgctggtattcctggtgcttgctccaacctaaagtcagtattttctgtttgttcctctagtgtccttagcctccagcacagtaggattggctgggcaggttgttcacacagaaaccacagaggttgtgctgacggcagatcctgtcacaggatttgggatccaactgcagggcagtgtgtttgccacagaaactctctcttctccacctctgatttcctatatcgaagctgacagcccagcagagaggtgagacactttctttcacagcatcattttctgctctgcgtttctggtacctgctatctttgaatggctagtaaattatgaaacattgctcaatgcaggaaatgcaagatatgatgaactgtcttctgacaataaaattttatgttcttgatcaggtttgaaaagagtaatgagcatggatgcctttaactagcagattttgtccatcaagggactagaagctatattaattaaaaaggagaaaaatccataaaataaacatatcctgaagttcaacttcaatagtttctgccatgggggaatatacat

SEQ ID NO: 70212 - DNA, 1052 bp, Homo sapiens
tttagccacttcagaatcagtacacgtctatagacagaagtcagaaagctgggggagtgagcagaaaagtttggaaaagcagcaagaggcaaattttttcatggcacaaaatcatggggggtggaaagggatagtattaaaaacactaaaagggggaattagccttgaaatggaaggaaggatacaacctcctgtagtgggggaaaaaaggaagagggaacaaataatgataaagagaaattgaggctaaacagaatgttgtttaaggaactctcgtcaaagggttgcatcttttcagtcttataggaaatgaggagtaacatttgaccatgatttagggtagaaacatttgagacaaatcctttgtggaatgaaataaggtgtcaaaatatcacacaacaaataatttaaggacctaataggattgtgaattcatagtgacttttcctagcacccttcagcaacttagtaacaacagtggagttgaccgggcattaccatagaggataaagtattagggtataggaaaatcccatgaggtttaggaatctttgagcctaggagatgcattattaaaatgctcaccaggggtccaggcagagtgtggggaaaatgatgccagcaaagccagtgggcgaagacaatggctttccacctgcacttaccagatccccacatgaggccagggaaaacctcaggggtctcccattcccacatcaactacagtagctgtttttatctggaatacaaaggcatcccttatatgttttcattttaagggggaaaaatctgttgctaaaatcaatagactcaggagacaagtgagagggaatgggactgaaagtcataaagaggagacagattgcaggaagtgggagagatggctaataaagggtatgtgatcaacaagggggattcagatattgagatcttgaagatctattcattttgaaggaagatggagaccaccatagggctctgctggcagagagtggaagtagggtggtattgctaggaactgacatgaagagagttgaagaagcataaagcca

SEQ ID NO: 70213 - DNA, 1059 bp, Homo sapiens
ttattatatcagaattttgcttgcttagttatctgtcccagttatgccctgaaacttgaagttttacactctgtttatttatgaccttccatttctctctctcctgcattatcatatgatagacagatatgctggaaaattgtgtaacggagctgagcaagactaggaggacttgggagatcagtagaggattctgcagtctttatggaaaattggctcccagcgggctcagattttgaatgaataaaataagaagttgaaatttttaagtcgagcttaattactttaactgtttatcttctgtaaatttaaaaaaaaacatacaaaaataacaagaggagagatataaaattattaacaaaaatttctggaccaagattaataaaattaagctatatgcttttgggtttgcatatttttattcatttaaattgttactatgtatactagatgtgtaaaataagagtatgtagtatgtagatggacatacatgttttaaaaaagaagacaaaagaagacattcacatgcccatcacccagcttaaaatacagaatattggtaaccatgttaagcccctctatatccctcaaagatttcatcatcctttatcttcccaaatataaggttgtcctgtgtttttaaacttatttatctttttttattatttatttatttatttattttatacagtttctactctcccatcagtgtacattttggttgtttccagattttgccaatataaatgatgccccagttaacttccctctacttgtcttatgttacacacacgctaggttccctggaatgcacaccatgaagcggcctggctgggttatgggcctgcaccagtgcagctgtgctggaccaggccagactgttctgtgtcccctcccatcagcagcatgtgacacccgttgctccactgttacttagtttgctcaggctgtcctaacaataggtcatagactgggcagcttagacagcagaaatttattttctcacagttctggaggctggaaagtctgagatcaaggtcccagcaagatttgattttc

SEQ ID NO: 70214 - DNA, 1105 bp, Homo sapiens
ttccccataatctcagtgcccctggatattatgaacttctttaatccatgccaatctgctgggtaataattggtatctgtgtttattttgcatctgcttgtcttgttttatgaattgcctttactttgttttgcgtatttaaatctttgtctagaatatattttgttattacatatggtcaaagcctagtttattttaaaaaacaattccacttgcctcccttgtaataacctgagttctcatatatacttaggcttcttgactttttgttccattgattcatctgcattatttctgtgctattatcactgtattttaattacattagtcttaagttgaatatcttagatgggatggggtagagggttaggaaggaggtatgcctattcttactcatttatccttccaaatggattttagaatcattgttcataatttgcaaatgttagtctttggattacttagatcagattcttaactgcccttctgggccctgactgatccctttcaacccattctccacccggcatccatagggttcttcctaaagcaggaatctgcttctgtcatttgtgtgctgaagacaccatgatggctccccgtcatcctggggataaggctccgactctttaatatagtctcattggtgacctggctcttacttaacaatctagcttcaatttctctctctgccctaccacacacacacacacatgcaccctctttccccttccactgtactcctttctagcagtcctgaactgctgctagcccatggactgcaccaggcacatggtgcctccctgcctttcacatgctggagttctagctggagttccctcttgctggagttctctcctctccatcccccttttcttctgtaaacctttctttccagccttgatttagatgtcactttcccaacaccaccctcctccctgcaaagtctggtttagttgttcctgttgtgttttctcttggcacctgtaacatcccctaggatggcatttaacactatattgtaagaacctgtccactggcttctctcccccacgagactgataaggtcgtccaagctctgtgtcttgtttggcattgtaattca

SEQ ID NO: 70215 - DNA, 1022 bp, Homo sapiens
ctttggaaaaagctcacaagattaagaaataaatctgtcatggtgcttcttgtctcccccaagcagcctgagatacaggtggcatagatggacttgggcccataagatcttttaagaatacttttaagagtattcttctatcagtggcttaaactgaggtagagatttctgagaactgcacaggtggagtgggatgccctcccttggatgtggagctacccgccgttgggcacttggaaggaaatggccagtggagacggtgctggcttcattcagctgccgttgggcacgacaggcaaagtggacactgtggtgtagtggaaataatatgagctctataactcgctagacacattctcctagagcctttaaaaactttctgtggctcggtttaccctttctgtaaaatagatacaatagctagccctaaaacacaccactttggttcataacatagaatttctagcctgctcttccacagaaggaaaggagcccaaggaaatctgatatattcctacatccatatgtgtgtgattttactatttaatgtcttcaactgtgtttcttcttcctgacatatcgattttcctcatttccgtgtatccgaaacctacgtctttttcatgtcctagtttaactaccctgtctaaaatgaaactttaccaatttccatcaaacagaagtaatttccctctcctctgtgtttcagccactcttggggatgctcgatggcatttagcatgcctttccttgggttacattcatgtgctgcttttatctttcctactgggctacaagctccttgtgagggaaataatgcctagcccatctttgtatccctatacggtgctcagcatggttccttgcacattgtcagtcaataattgtgtgtttaattgaattgaatgagagggagaaactgaacttagtacaaatttctggacctttttctctgcccagacttgagggactcagcttatctgactgagtttgacttagcctaaggtgataacaaatacaga

SEQ ID NO: 70216 - DNA, 1050 bp, Homo sapiens
tcctcaaagttaggtccatagagattttccccaagcaaatgaattttttttcctcattacccagtattgtcacattctacttaacatgttgccagtgtgccggtaaacagttataggcctacagatataatcctaatgtgcttgtttgctcttttccccaattagccatggtgtattaaagtgaataaaatcttttaaagtctttcagcagctacatttgctcaagtgctcatatccacgttaaaagaacaacaatcatgagtattctctgatttggaaataaagaggattgagaatgctggggaaaaagctaaatgacatcgggagaaaagcagtccctagagcagaacacagtatctctcaaagcttaagatttgggaaatagtttaaattttgctgatgcctctcctccagcctcaggcttttctgagctctacagatgattccagtgtgtgaaataaaccaaatattgatcctgctttagggtaatcccttcaactatggaatgtaaatttaaggagataaatggatacagggaatgaaattctaggtttcttttcttggtgcttaatattccagagttgctataccacctgttgactaggtaggctggaatcccctaaaaccaaaaagtatatgcatcatgataggaaacaaatgttctactaggaggagctagcacatcatctgggtcatagcaggcaataataattactaactgtgtacagtagtactatgtacatattgtcttaaatattttactcatattaacccttttagtccttacagcagtgctatgagttggatatttttaccatgctcattttggagatgaagcaatttagggagagagaagttaattagtttgcccaaggttatgctgctagatttgaagctggtcagtgtggtgtcagagccagactcctaaactctactgtgtgttacctttctacattgacaatagagatttgttgaataaacaagaggcagtagggtagtagtttgagggaagagttgaaccctcaagattatagggttggccagtcctat

SEQ ID NO: 70217 - DNA, 1044 bp, Homo sapiens
ttaaagtagttcttaccaaatcctaggaagggacgggcttgtataccacaaaatatggaaaatgcatcatgaaataattcacccaatcatctaaagaaaggtgtgcttctatgcttccctttggagaagttttataataggcacaagaatcttgactcatcagctgctagcagaaatatattaaagttcccttttttgccctcaagggaatatgatactataaaaagatgtgaagttaaacaggttatgcatgatttccaccatactgtgtttaacttgtatagacttttgagggccaggagtgtagaatggggaagtggagagagagacttcagaggaaggagaggaaagaagcagaatttttgactacagcaggcaatgaactgagaaaataacaagggggcagtcaggattaatagatattagccacagttagagggaaaacctctctagaggggcattttgaatggagtaaatctcggtctttctcaacctgggttactcatctgaaccgcagaaccctgaaaatgctttgattgattgttttcttaattcttccaaggttggtacacaattaatatcattctacatgcgcaggagtatggatactttagaataatagggctccattctctcactgaacccagggtgggaatggctacagtgttacgtatgagaaggaaaagacctttgttctatataaatcatttctggccaaaattttactatcccaaatggtacacagtgaaatcttgaaatgattacattaagtgccaaagacttctggatgaattaatcatttgacttaaaatgtcttaaggatagagatggaaagaagaatgggttgataactatagaaatagaatactggccattgtacaggcttgagatgatactacagtaatgctaaatgtaaaactagacaaaaactcagaaaaatatttgcttgagaaaacgaaaatgtatgaattatctgatctttcctacaactccagtgaaattttagacaacaccaagggtaagatatgtgttacatggtgttta

SEQ ID NO: 70218 - DNA, 1055 bp, Homo sapiens
actttgcctttttctttgttgctcttgctgcctctgacttcagtgaacaactagctgggctgtatgtttcttcatatttggtgaacaacagggtccttatgatcttgtcagaagcaccaggaatgaatctgaggtgtgctctggaaaggtgggcacaaaacacatgccttttcctttttctcctctgcaaacagttaacattcaagaatcatgttatttggaagaattttctcttaaagtggcagagctattgttgtttttttaaagtaatttatgagcgtcctcttttccataagagttttacaaacagtattgcatataaaagaaatccactagaagggaaatcctttcacatttatttattcgacaaaagtttattgaacattggcgctatgtgctaggtactgttctaaacaatgaacaaaatagaccaaaaaatcctgccctcagttttaaaaaaagccatgggcagggagcagcagacaataaacagaaaaataatccaaataggtagcgtgttagatggtgattagtgacataggaataaaataaaacaagaaagggtgataagctgggtatggagggagtactgtcaataaactacttcatccaacctgttttagaaatctaatttcttcccttgatctaacctagctgctgtgcgcacatcactgctccttatggttggggttggatttttgaagtagctgtgtttctttccttcctagtagcgcataagcccaccaccgctatatcctgggagtgtggaaaatgaacattcttttaagacagctttagtctatgtattgaaaattaatctttttaatttggataaatatagaacctctccctattgggtttccacttttctttattattcaaataatgtgcttttatctgcaaattgttggtcaaagtatctgacataactcagctgtatgatatcctaaatccatgagattatttatattaaagtacttattaatttagcccttaaaaaaaaagaacaaaatttgactagccctacaaaatttgaaaagtaatacttccccctg

SEQ ID NO: 70219 - DNA, 1050 bp, Homo sapiens
ctatattacaaatggaatggactctggagcctcctaatttttcagtgtacacacaaatacacatatatttgaatattattttcatagccagtcgtactctttgtaaagcacttgaaaattgacaaagtgctttcttatttattatctaatttgatcatcacagcagcccagtgaaattggtaaattcagtactgtaacagaatggtagaactgtaaggaattttagagacacaactgccttattttgcagatcaagaatctaaagcttaaaaaagagtattagacaagactctttgatcccaagtgacagaaatccaactccaactaaattagcaaaatggagaccatactgaccgaagtaactaagtccggtgtattagggatttagaaatggatgaatccggatgttccaatggcatctccaggaatatgtcactctccatccctcgactctattttcctctgtcttggtatgattcaaagtcagcttttcccatgtggtgataagatagcaactccaagtacatagcctgccattcccagtggaatgcagactatcttctttgcagcagttctaacaaaagttctgggattacatctcattagcatggcttgtgtgactgcctatttctggaccagtccccgtgactaagggattgtatgttccacttagtcagccttgatacccatacctggaggggtagacgtaggggagtgccagctccatgcacaccacatggaccgagagtgggtccgcaagagaaaattaaggtgttattccctgaagaggaaggagcccttgatgctgtttaagcatgagcaattcatgtggattaactgacctttggtataaatgggttctgtagcttttaagttaaaatttagaactacatgtttagtattgtgagttagaactttccctgtgaatatacttttccagcaaaggaattgtattttttttttcacctttttacatccagggcccatcatggtggctggcatagggggtgtgctcagtcacttttacccaagatgaaacagccaatatgt

SEQ ID NO: 70220 - DNA, 1017 bp, Homo sapiens
tagattgcatgctgggtcagcagttgaggagtgctttgagaaaagtgtcttccccctatgagcaaggctcctcctcacacatggtcagccccacttctccacccagaggaggtagagcctgttctaggaactcctgttgaacatctaacacatcgtactgcactggcagcctgatggtctttatgacttggttagagacagatgatttggaagtgggaataaaaagctttcttccttattttaaaaagatttgcctttgttttatgaaattataacaacaacagttatcagtaagactttagtgcttcagagagatgttggacctcagataagacacaaaaggagatctcacttagccataccctcagcctgcaactagctctgcccttaggctctgggtatttcctgatctttgggatgtctactgtggtaatccgggaactggttaccagcatctattccctgggatatggaagcatctcaggaatagtaatgacttataattttatacttagaaaaccaggatgtcagtgtactaggtgactgtgggttggggaagaatattagacctcagaaataataagttaatatcaccagcaatatcaataatagtattactgtttatcacgcactatgctaaatactttactaataatgtaacataatcctcacactagatatttttattatcttcatttatagttaaggaaagtgatgctagcagatgataacaacatataataatacgtactgagcatttactgtgagctggcactgtgcccatctgccaagatcctatcagaatcatgattcaaacccttgtttttattattataggatgaaatctccttggggaagaggtaaaggatatgtggaaactctctgtttccacatttttttgcagcttttcattaagtctaaaagtaattcaaaataaaaaagttttttaaaaactcaaaactacaaagctcataatggccactctctgctgcctcctctggataatggcctcaagta

SEQ ID NO: 70221 - DNA, 1240 bp, Homo sapiens
agcagtgtgtctaaaacacagtctctgggtaaaagctttcactgagttaggcacagtggcatgcacctgtcatcctagctactcaggagcctgaggcgggaggatcacttaagccaaggagtttgaggctgcagtgagctgtgatgatgcctgtgactagccactgcactccagcctgggcaatgtggtgaaaccccaaatcttaatttaaaaaaaaaaaaaaaagctgccactggcactggttcccatcacctgtgataaagcccactctctaacatgccactctatgtgctccgcagcccatccctttcctgcctacctccccagcctcatgctttgccactcccaggctgaacttttagtaaaaccccagaaatgtcaaagcacctgttgctccagcatacatcacaccatgcctcagatccattccttcactgatgcttttccctctgcctggaacatctttccccttttctctaactttattttcctaacgtttgtttatcctttgagactcccccaggagttccttctctggtttcccccagcccccaccacaatctgggttgtatactcacttctgctgctactacaatactctgaatctctaatgattgggcagaagaagagaagctctccctgccttgctgcatgatgctagtccctgacttgcccctcccaggaggtggactcaggtatctaatgtgttcctttgtgatgctcagttcctccctctctcttctctttgggagctggtactccttgactccttcccgcccttcattctacagggcgggcctcatgcaggtggatgtggttgttcagcactgctagtgacattagcagcttaagtccctgtgagtaaggatgtgccattcagccctttgaactctcatactaagccactttcttcaatatcagctttattagtaacaaaggagatattttgcttgccatctgcctgattccattatatacctctctgtattagtctcttctcacactgataataaagacattcccaagactgaaagaggcttaatgaactcacagttccacacagctgaggagacttcacaatcatggtggaaggcgaatgaggagcaaagtcatgtcttacatggtggcagtcaagagcaaatggaagagtaaaaggggaaaccccttataaaaccatcagatctcatgagacttattcactaccatgagaacagtatgagggaaaccgcacccataattc

SEQ ID NO: 70222 - DNA, 1083 bp, Homo sapiens
tcggtttagaataccaagttgtggacttagaaattacaaagtaagacatctggtaagaaattttaaaataataatgaattgatatgtcttgttaaaacaatccttcagtgtggggaatttgactgtgttaggtcacagagtgagcaatagggtgaatttaaatgaatttttttacccttgcctatctctaaagaaattcccaactttgtctatcaaggagcttttaaaatgtttccatttataatttagtaaatgtttgctgaccatccactgcatacaggctatgtgctaggtattagatactgaggtgaaaaggacctagtttctgttgacagagctgctaggccagtaagggaagcagatgtataacaacatgataagtttctgatcaacaaaaacaggtataaagtaaacagtctgagaaagaaggaattaactctatgagagagaaggaatggttggtagtttccttgaagaggtagcactggagtcgagtaacaaaggatgcgtctggtgggtgatggacagtggaggatatttcagataagctgcacagcatgagcagcggcaccaagaatggggggttcaagagataaatatcttgacttttggtctctactgctgcagattctgcttctactgttctgagggggaccccaagaagctgcatttttgacaagcaccctggggactctcaggcagagcttagtctagctgagtgcagtcattcttaaattttaaattccttgagtagagattgttgtacttatcactattcttaataccttacacactacctggcacataataggtgatcaataaacaaatgttgaggaagaaaatcactggctagacatttgaatcataagagatgctctatttcttaagtaccttctgctttggctctgagtaaacaagtttactgtctccccagtcttctactttgagaaagtagaaggttgactgtcataaagacaaaaattaataaatgacatttttgatggaaggatattaggttattttagtggaagaaaaatagtctgctggtctgttttctaccttttctggctcaaaagtttataa

SEQ ID NO: 70223 - DNA, 1149 bp, Homo sapiens
ctaatttaattttgtttatcaattgggtacattgaattgaagtgcaatctcatttatagttaaagaaaagaccaacacaatgactgttcaatatgcatcaccattttaaggcctaagcagacagagagagtcaatcttacaatgatatgctgaagattacatttttaattctcttttcaacggcactaatagaaatcactttggcaatacatttcttggatttacataatgacagagcatgacaagattagttatcatttttaaccactgagttttctggcacgatgcttgtcattgcatctgtgtatacaccctttgcaaagctatggtgacatcagatgcgtacattttctaagccaaagaaataaacaccttcctgggccatgtggtgactttttttttttttacagtgagcaaaaattcaagcccattataaatgactaaacaatattttgagatttaaaagggccattacacaaagatgtcataaagcaagcattttctttaaaattggcatataggcttttacttatacagttggcatgtacatactgccctctgtctacaaaattcaagaaaaataattttctgccataagttgttgttcttctgtgataagaacaggctgttataaatatgtatgttctataacttattggacttttctttctagggtaacagaagagagagttttccatctaagaataagttttgtttctaaagatcactcctgcctagggtttttggcactcagaacatattctgttataaaagcagagttatataaatagtaatcaggttctcagcaattttattgatttcttgcctgggctgtgtttggttatgagaaggatgaagagtggagaccacttaaatagctgaactagagtactcagaacaagcctgagtttcctgtcttaagagttggggaccatggagttgatgagggtgtcaaaaaattaaagtgtttcaaaacatggaatttaagcctcccacctgccacctcgattttcttcccttttctgccactcctaagtgcctcccacctgtggtgacacacctggttgtgcctgtcactacagagtcatggtgagtgggagggggatgttaaccatctagatcttaattcagtctattggggcccaaatg

SEQ ID NO: 70224 - DNA, 1003 bp, Homo sapiens
atatttttgaaatttgagcttttttggacagataattataattcttgtaaactcaggagattgctatggatctttagtaacagaaattgtaaatataaacttaagcaataaatgatgcatttttcaaccattgttcctgctcctagaatttttaagtaagctacatacacacaattcaaatattaagacatttgcaattatagctatttatgaaacaatttgcaggattctaaaaccactactagccattagtgatagatactattttatagtagaaattcagagtggtggagctgtttatgacgctaggaaatgtttgtgctttttaaattttacggtaaaataaaaaccattagtatggcataaatttattggaaagtagattaaaatagaactactaataggtgtaataatttcatagttcagtcattttacagctatcaagtggctattatatatgagtcagtctgctgtatgctggttttgcgaagcattggagacagagttttctgaatattcacttaaatagaagataagacaaggaagaattataaaaataaagacaaatatgtaattttctagttatcgctatgatgcatacaattttccttaagatatatgctatagtaaagcagtgattaagcttgagtcttatagtcagagaggcttaagtatgtattctggggctgggtgcggtggctcactcttgtaatcccagcactttgggaggccgaggtgggtggattacgaggtcaggagatcgagaccatgctggctaacacggggaaaccccgtctctactaaaaaatacaaaaaattagctgggcgtggtggcgggcacctgaggtcccagctactggggaggctgaggcaggagaatggcatgaacccaggaggcagagcttgaagtaagccgagatcgcaccactgcactccagcctgggcaacagagcaagactccgtctcaaaaaaaaatatgtatcctggttttaccttccatcat

SEQ ID NO: 70225 - DNA, 1044 bp, Homo sapiens
cagtggcattaagcaccttcacattgttgcacatctcccatagttttaaaatttctttattatgacctaattcttttcttgtctaccatagtatttgacaccaagtagtgctctagtaatgtttgtgcagtcagatagattttcaggtaacaagtagtcattttcccaccatgtttatttatagtttcaatgattaaataaggcagatattgtataaaaggttataaacaggtctcattggacaactggataacatcttacttaacagtaaatgctcttatccaaaacattgcacagtgatcttatgtggttatagcaccttcatcccacagtccctaaaactaaatgtaagacatgtaaaaagtcaaatgtcaaaaatcattttatgacacaatttaatatctcttctcagcccaatgtgttataataccagcttaatgatagtccaaaagtggttttcatctttaatctcttttaatggtacttataacaaagacttcttttcttttttatttcattctgttttgtttgaatccgtgaaacctatttctttcttctttagcaatccagtaatcctccttaaaataatgaaatccacaggcagagaaaatatctaatgagatctctctaagaataaatgtgtgtgtctagaaaacttcatgggctgtatgactccaaagccagaagagtaggcttatagtctccctttgttatttaaccaacaatgataaaaacagcttttattttaaggttaataattatgctttccacacttgcttagtgtcttttcttcccaagaatacagaatattctattgatagaatgccattaaagtttcaggcattaaagtgacagggcagccaaaggcacataaaaagagagagagaaaggtaatatacatttttttttcaaatttgaattaagtacttttcctgcataacagttcagtactgtggtccgtcaccttctccccagcacactgggcatgggaaataccatgtatgagttttttttttttttttttttgtagatgaccctcttggt

SEQ ID NO: 70226 - DNA, 1081 bp, Homo sapiens
gagtgcaagatacagtgaagtgatgtggcaatattgctaacttttaaaaatattgtcaaagagatactgagttcgaggaagaggaagatagaaattatgctggaaatgctggagagataaggagtaatgagatgactttctgaggtgagctcatgcctgtaatcctagcactttgggaggccaaggcagatggatcatgaggtcaggagttcaagaccagcctgaccaacatggtgaagctccttctctattaaaaatacaaaaattatctgggtatggtggcacacgcctgtaattccagctactcaggaggttgaggcagcagaatttcttgaacctgggaggcggaggttgcaatgagctgagatcgcgccactgcactccagcctaggtgacagagtgagactccatctcaaatttgaaaaaaggagaaagagatagagggtagcctggaaatcactagaggtgaaacagaggacaatttgcagaacctagaaagaaaaaaacgagtcagtcacagtgaactgcaacctaagcaaacaagcatcttatgcaactgaggggaatgacatagtaacccctgtatccaagggaaggaaactgacccttgtttagccccataatttattcaacccacccagatgcacacatgatcgtggccagctcttctaacattagtattttttgccgcttcgcagctgtacctgaaaatccctgatgaatagttgtcagtctgcagagcccagggaatgttagaatgtaagggttttaacacaatttcaaaaaaaaaaaaaaaaatgacttgcaaactgtatatcaaagcaagcactgatgtatattcaatttgcagactacttttccagaaaatgtcatagtggatcttgtctagttccaatgtatctttatggtatcaatttatctacctagtgaaattctttccaaatatctttttaaatttttcatataactttttttcagggacttttagtagcagatgaatatcaatttaaacatttaaaatatagttgacccttgaattgcatgggttcactagtgtgcagattttcttccacctctgcca

SEQ ID NO: 70227 - DNA, 1101 bp, Homo sapiens
aattgttagagaaaggggagctgtttttctgagcatcattcttcacaaccaagcccgtttcaaggagccttggtcaaattggacattttttttctttaattgaatttctagctttgaaaattaaatgtgcatacattgaaagcatatgtgcccatatcacatatgcatctggctatgctgagagagaatatgaactcctccacccagggttgagaaagaggactttggttggctcctgcttccagcatgtcctagctctttaatcttagtttttttttttatctctccaagcctaatttttctcaaatataacgtttaaataatctcattatatattcatgagttgttgtgaggattgcatgagataattatccaaggcatctagcacagtgtctggcacattagtgctccataaatattaactgctcttatagatgtaagtttgattctaaatacagtcttcatttacctccctatagtttggcttgtattcttctaatgggatgaatcaacagaaggctaagtggtttttccaacatctttaatgagttaaaagcacttttggcgttagaactcaggtttcaaaccatctatgccatgggccaggagccagaaattatttctggccacagttcagattctaggagaaaaaccggagtgactgcagtcttaacatcctttgttgaagtcaagaactgtacactgatgctgatgctgacatttgtatcacttatgactcataggcacggacaggggtgaggatggtccagttaaattcagatggccagatccagctgaggaaggcaaacctgaaattagatcttttccatctagggtaaaagtggggctaggaaggccagacagaatgaaaaatcggtgatttttgcaagatgtatattcatcatcagtgatctaacagacatggcatagcaacaaggacatctgattgccagaccacacccagtcaccaggtttcttggcacagctctatctgaggctctccttagttcacattaagggcatctgtcagaagagcttggataaaaatggcaggactcagggtcacaggggagagctgacaaggggaggatctcagtcttg

SEQ ID NO: 70228 - DNA, 1094 bp, Homo sapiens
cctgaaaaagaaattactattatcatagataaggacaaggaattctgtacagctataggatctgtatttttgagtggaaggtagagaagctactgtcaatgaaaattgcctcctttcacttgaatatgtaatggaggaaaggtcctctacaaagatttcagtctttccatagctgtagcccttgtggcaatccactggtaactgatgtttttgaatagaaaattgattaatttaccggcacaccaattttaacactattaactttgtctggctttattggataatgttggctttcctcctcctccttgttatcttataatctggggatttgcacagtatcctagacactccaggacaggatcctggtaaaggttgagtgcatggccacacacacacacacaaaaaaaaagcctatttacgttatggacatcattgattcaacttgtcccttggaaagtatgatcactatttattctggctgatatattgacttcttccaggtccctggctcttgatccacggatctaattggatcagtcataccttggcttctgaaagggttcctcctcatgacccctactctgtttaggattcataataaagtttccctggtcactccaccagcttggataatagcaagactcctgctaccacccagacttaatccttccactttgggggaggttgccactcgcccagtggttctcagcattgtttctaccccaacatatttgggaatacaactatacctactagtaacctacagctataatcattccccaaaaatattttcaacaaatatttaatgagtacctgttgcatgccatctaatccctggggtagatgttaggtgagtaaatgcagtccttgcattctagctggagaatggttctcttctttatttatttttcatgtctattattgctaccatgggttttggacggctgcttgtttgtcttaagaagtagacatctcttccaatcaggaaaggctgctgtttctgtggtacattgaaaagtttcattttctaaatgctacctgttcttatgacagagaggtatgtactgttctttttttcaataagaatttaattc

SEQ ID NO: 70229 - DNA, 1010 bp, Homo sapiens
cttttttagtacgctgtactatctttacctctttcctttggtgtttctgaccttttcttacattttgaaatgtccctatccctctccttctgcatgtcaagtcttatcctttttatgatattcctctaagtttacttctacttgctctgtgaaattggtcatttctctctgctctgtgaagtgctttgcataattctcctacagcatttatcttctattgtagtctttcatgcgtgtatttgctttatccactggaaggtaagctgctcaagaacaaaaacattgtcttgcttatctttgtgtttagaactccaagtgcaatatttgggacctagtgggcatagaataaatgttgaatgaatgactacatttattaatcagcctgtttttccttattatttactctatgtgggttctaatttatttactctatgtaccttgtctttcttcagctttgattcatctatagtcttgagcaaacataggaagtctttctgttctctatatgaataatctgtaagtcatttgtgtattttcttcagggttttactgaccattcctaaatgctgattctgcaaaactgcagtcctttttactgactagtttatatatgttggagtctgacatcctattgaggtaatttggcagctttaccaccagggagccatagaaatctccgtgttgcttgttatctatggaccttatctgatgaagcaatcctttcagttatggccatcaggtgacgtgtaaaatgtttgtccctgaaattcaagtggcccctgcaaagcgatactcctaagtttgccttttataggaccagaatgattgttaaaaccagaagccaaattcattaatttcttgctgtgatatataacatagccatacaatactacacatttagtaaatgtcagcagtattaatagaactgtctgtaatataattgagtaagatttctgtgtataaaactaaattatgatggatgagttactcaaaggatgaaggaaaataac

SEQ ID NO: 70230 - DNA, 1098 bp, Homo sapiens
atctcatttacacatatgtaaatttatatatatgcataaataatgtattctttccttataatctctgaatccgtattacgtgaattatagttgattgtattcaatgtattatgtaactcatcttttattccctttggagttaaagatcaaatatttatttttatttttattgagccagacactctgtacatttcacagagttcacaagacaaccctgggggaaaaaaatgttggtattattaaacccattttgtagattaagagattgagtttcagaaaggtcaaatactttagctcttgctgggtatatgcctttgctcaaatctgaatacagacttatccctcatccccaaataagcttttcttactttgtgtgctattgtgcccattttccattccctgttggcctgaaataaaattcctttttaatccattttatttttctcttaagctttacctatgtttttcatcccaatcagaaggcacggaaagaaatgcttcttttacttcatgtttagcagatgtaacttacattttgagtctctgtcaaggatgtgtagcttgcttgattttagaagcttctgctgaaagatattcttttcatgtacacagttgcctcttggattgtgtaggcagcagtgctatggttattagtcaagttatttaatatcctttttgttagcttagttttcaatttttaagtagtttatacagccaaggaatctggatataaattttatttactcagtttttttaatcccttatattctttctagagatctagttttatttgagagtgtttaatatgttcatttccttctcagttcacttcttttctacatccaactaaataggctcttttggtatttctaatcctaaatccaaaactgtccttatctatttatgctctatttttatcataatatgtaacttaatcttagctaatcagctcaacctctcatcaccattattgccataactcagatgaatgtggcttaatttattataatgctattttgcccataaatggattctaacaatttattgttctgctagcagtggcctgcagtgggcagggacaatagatacctggaagcc

SEQ ID NO: 70231 - DNA, 1051 bp, Homo sapiens
tttgtttcaatttttgataacatagactataaacctttgcagattttcagttttaacatttgttcagcagaccttttttcagttacttgtggctagattattattgaatgaataccagatgtatacatccatcgtctatattcctttgtcaaaaggaaaaataaaactactctggaaaatcacaacagatcataattatttaccagcaggttgtcacttaacccctaaggggcaactaagaggagatgcatttattgtggctggatttgatgattcacactgctaagtgttaaaaggagagggaaaaaatgaaccatgtttatccaaggaaatgctgtttaagcatgacattcaagtgtgaattgaatacattgctggatccaacagtaacattttctcaccaaccatgaaaaatcttttctttttctgttgtgttctaaatcaaactcatatataagctttctattagattaatgcagctttatcagatactatcagtcatttaaccactttcagtaaacattcattgagtgtctgctatgggataggcgttaagaattcaaagttaaataaaatagtatctgctttcaaggatctcacaagctgattcagacagcaatgaataataaatatacataataaatgctctgggaacaaaatgaagagggtgattagttctgcctaaggcagagggaaagactttgagtggaggaaaccttgatgtatgatgaaaagataaatgaagatattggttaaggtaaataatgctagctgctacaacagagaaactcccaaatctcagtggcataacatcataggtgatttatttttcacttaggtcacaggtcaacagctcaaagcaggtcagcagtggtggaaggtgactgcgtgccacagaatgatttggggaccttggattcttcctactgttactttaccatgtcccagatccttagaataagtggtctacagatggaagtcaaaaagtggccccattccttccattcacattttattttctatgattcatatacgtagccacatctaagta

SEQ ID NO: 70232 - DNA, 1032 bp, Homo sapiens
caggagacaggttcactgcgccaatgagttaatgctcagttatacagaacatggtgtcccagccagaattttctaaagactaccctgaagcaaagatcgaaataccaatgcttcattggggatatacaaattcaggccagtgagatgaaggaaaagggaagagagtcaccaaaagacaaatatgatatgattgcactcacgtgaggtgtctaaagtagtgaaactcatagaagcagaaagtagactggtggctgccagggtctgggggaggggaaatggggatttggtgctcagtgggcatggggtttcagttttgcaagatgaaggagttctagagatctgttgcccaacaatgtaaatatacttaacactgctggtctgtacacttaaataaggttaagatggtaacatttatgtgctttttaccataatttttaaaaggatgggggaaggaggcaagggaggaagtaaagcaacaggaagcagtggttccagggctggttactgcttctcaagaccaacaagggacacagccattggccatgcagctgcacccacttgccacatggaactctactggataggctggagaaaagaaccacactccacaacagtgaaaaagagaggtgagggcatttatctgccctgctctctccccattctcatagggcagagttcaccccttggggagtgaattccctgacatttccaggttgcattggcctctccagctgtagtgtggactgccagctcccacatctgtgagtggccagagaatccagaaacttcagctgggtaacggagaggtcccactgcccagccacagcctcaagagaacattcaacactcccagagcaggtgacgctggtggtggaaacttagttccccaggtgggaggaagcatagccaagggagtatgaagatgtgcataagacttttgtctgatacacactgctatccttttttgtgctaatgaattcattgctactatacctttctttgttattttttaacaatgtaaaaggctttgat

SEQ ID NO: 70233 - DNA, 1067 bp, Homo sapiens
ccctgcaaacagcctcatatacaaaacacattaagcacagggaatgatgaaatgaaatcaaccagtattgtttattaatttgttagatgttttaataaagccaatccccagggcagaatcaatctgcgtaaccactgcacattgtatatgctccgattaaggcatttaatacattaccttgcagttgtgtgtgttcatgtctgtctcctttaaataaatatgagtttcctggagggcagggactttggctcatttctttttgatttcccagcataagcacagtggcttgtacagaatggtgttagtggtgtttgtagaattgaattgaaccaacttttgcatctatgcaccgaaggatttaagcagatgtttagccacaaattttaagttgtacagcatatattaaatcatacagcatatatgaagttgtacaacatatattattgaaattaacaataaggagaaaataggaaaagtattaacaagtaacaggaaaatgaaagagggaaaggaagactaataagaagactaagaagctccatccccttgtttttcattgtaggctcctctgatcagggattggggtcctcccagcctcctctgaccaggggcaaatgaaactgttgatgcagttgtggagtaggagtcttccttggggccaggtaaattgccttcagtctagaatctccttgttgacagttattccttgacacttactattgaggaaagttcatactgagcaagtgtaaatcaccagaaagtgtctccaaattcaaaatgcctgtatctcaaaattgaatgtcataatcatgggaagagcaaaaccatggagacctagttttcccattattttaatttattatgtgccaggctctgagttaagtgctatacaaatattaactgatttatttttcttaataactctgagggataggaaatgtaactatcctcattttacaggtgaggaaaccgaggcagagagaaataagtaacctgcccaagttcacatcagagctggtatggggtagagccaggactcaccccaggccacatggctacagaatcca

SEQ ID NO: 70234 - DNA, 1023 bp, Homo sapiens
tgaacttgctggaaagggagattttttttttccctcctatattcagaggatttgcagcaataagagagataacgaagtgtgtgtgctcaggatacacagacttttctccatgactgagttaatttctcagacatgtgttctgaaaatggtacccgtgcccttgtcccctggcccacagaataatgcagtgaagattcctcaccacagggaattcgctgtttctcacttctcatgttggggtctggtggccttttcatgcttgagtcattttggttattaggggagaactgtttcataagcatgcagaaagaggaggtaaaacagtggttctcaaacttcagggagcataatcacagggtggggagggtggcacctgaagtttacgaggcctcaccttgagtgggcctcagtatctccatttcctccaggggatgctgatggcagtggtccaagaaacacactttcagaaaggctaaagtaaaaaaaaaaaaaaaaatttccatttggagaaagattcgtacagtgaatacctttgatggaggcagtgatcctcaaatatggtccctccacagcatccgcatcacctgagaacttgttagaaacaccaatccaaacctactgcgtcagaaactctgggggtggggcccaaccagctgctcttcaacagagctccagatgattctcatgcaagctcatgcacaagacctactggattagggaggcgaagtgctgttgtggaatcccataccattggttctcaagagtggctgcatgttggaattacctggggaggtttaaacactgggtcacatgcccagagattctgacagagttgatctggagtgtgggctgagtacaagaattgttttagaggtctctcagttactctaatgtgcagcagtgtcctctgggtcaggttacctgagttttttttcaccctgttatgtgaaaaactaagcattgcttttgtcctcagtcaccactaataaaatatcaccatatcaaaaggatagatgttattgt

SEQ ID NO: 70235 - DNA, 1009 bp, Homo sapiens
ggcctcccaaagtgctgggattataggcatgagccactgcaccccgccaactgctaagttttcactttgggcttgtctggtaaaataagtggaggttactggtaccatgaaatagggagtatgccttattttatttataaataaaaatgggagaaaatctctatgacagagtaaagttaaacagatccctgacccgtttggcttaccttttcaagcttcattgcccatgtggtcctcagtcccctgcttgtgtctggccactttacgggcctctaacattggcttgccccagcttctccaggtgctgacccagcggtgaccgtcagcttgctatttcccataatcttttttgaaaagattaaaaaaagtctgtcccatgatgtgcaagacctgaatccttcttttctttttattgacagaaataaccctcacagaataatcttggtcttgaccaatctacaaaaaataaatttgggatcacttttgttggtgaacttcatactgaattatactctgtccatgcactcttgaattttaggttccctgaacaataacttagtttgaatttgaagtttgacagtcctaaaggactgcttttgatattattcatttggctagttttttatttatttcattctttattcagcatttgctgtgtccactatataaaaatgaaaacaaaaactcacatttatcgaacacttgctataagctaggcactgtgccaaatgctttatatgttttagttcatttcaataatccatgaggtaggctttattattactcccactttatagatgaggaaatgggggtacaggtggttaaataatttcctccaaggctacaacctggtgagtggcagatttgggataaaatgccatacttgaatagctccaacagttgtccttcaaacaagttactaatttttaaattataaactcataaaatattgtttagttctcttattatctagctcttacttattaaacctgagagtgtcagcaaggtg

SEQ ID NO: 70236 - DNA, 1704 bp, Homo sapiens
taacagacaagcactccagcttgttttggaaatcctttgtccacttggtgtaggaagtttcattttcccagctgccacatttgggggaaggtttcctctcttatatcttgccactcttgatggtctgaggcatggctaccagcttgtgctcaggcctaatttgggtctccagtgggtttcaataatcagtctaaatgagaaaagctctttccctcccatttgtgctatactttgtcacaagggcctcagagctgagctactttgtgctcaccaaagcctaaggggctttaaagaaggaatgcttttctatctccaatccccagagttccgcacaagcctagatgttgggggtaacacacaccaatgaacccaaaatcaggtgcccctctaacctgaggcctttaccttttcagatcaagtcttttagtaatagtagctttttcccttagcacatgttattttgttgatggtttcacacccctctgttaaagacatatcccattaatccttcaaaatgcccaactgtggctgaagcttggcaccaacaggattgatgttctcaatcagggactccaccaataaaatgtgttgctttcagcaattttctgaaggatatggtttatttggggttttagctccctgcactgtcatttgggattacattttagtattctttcttgattatatgacaattcctctgtgttttataatttctcatttaagatctaaacacacctgggagtcctctgcttaatcgctctctattgaaagtcagatgaggatgggatggagagctctagctctggacatcacaggaccaggtttacattctggcactgccatctatgagcacatgaccttggacaaataactgaaatcactaagcctcatttccctaaactataaaatggggatgatatcttacctatctcatggggctgttagaggaccaaatgagataaccatgtaaaatatctgcacagcatctagaatacaagttctccataagtcttggctatttagttatcgcctttattatcaccatatttattataattttcctgtggtcctttggtcctttttatgaaccatttgtatgtgcagatcctgttttaatatgttgaaaacttttctatagaccgtggcacttgcagtgagcctccacagatgtaacctcatttagatctgagacttttggctgtatgtggcccaaaccctaaggacttagacacttgtcagagctagtaaaataacatttcttattcattacaggcttaaagaactttctttctttctaaaccaacagcaggagactctctggccttggggtgggacccagtaggctctgaaaagccaggtcatttgtgtaactctgtggatctgagtgagcctaagaactgactcattcctggggacctctctgcgctgggattgaccaaaagtaaattatctccaagtctctttggaccaaaatgaaccccaaatttaattcagccttaacatataccctatggatctatagcaataaacaacatatgggcattactttatgatgtactcaatggtttgattttaattttatcattggctttataggaattgctgtatctatgtgtgtgttgtgtctgtgcaaggtcttgtatgattatggctcaagatatacatttaaatatagttgagacttaatggtgcattgtattacta

SEQ ID NO: 70237 - DNA, 1005 bp, Homo sapiens
gagaagccctgcgggaaagaaaactctttattccagtgtttctcaaattgatttgaccacagaaaaccatttttccccctagtaacacctatcagtatatcacagaatatcaattttctgcacagtagagttggagaaagagcagttgttttttctctgctttttattttataccaaatagaggtgaattatataactttataaataattattattaaatatatttaaaatttttatcttcatcaaatgaaaggtctctgtccagttacaggctagtttatagctgattgaccacagaaataggccacagatgaagtgaatatttttgtttaggatctattttgtaatagattccatcccagaaccagttagattaaagctaacatgacaaatgtttaaagctaaaattgacaaatgaagatgattttaaaaaaccagacccagctattaatttcctctaactatattacattttcagatacctgaaatgtggccaggggaatgattctacaacttctactgtgttgtcaaagatgccaactgatgactcctctcacgtgtattttaaattatggagatgtatttaacagacactgtcaactttaatctgcacatagaaattcttaattgtcccaaccccctttgtttcagcttgtttttcaggctttctaatgcattcaccttgcttcttcctattctctctcctccctctctgtgctccttaaaaacatccactaggctggcaattaggggctgagcacagatgcatcctttaatttaatttcacattccatcatttgaaacatgacccagtgtgtctgcttatggccttcagagtgctgggaaatcaatatgttaatttacctccatctttccaaatcatctttgcaagcaagcacctgtgaaatgagaggcttgcacaggggagggagtgattctgtgtaagagacagccccaagtacctgtattctccccctccccctctttgttaatgagctatattct

SEQ ID NO: 70238 - DNA, 1736 bp, Homo sapiens
aaaattatgacgattatatggaaagtaaataccatttttgttcttctgttaaccttgatagtcttacaatatgaatgaattgaaaggaaatgcattttgcaatgcatgatgaatgagcctgcacttcttaaatgtctcagttctactacaggttagatatttagaaagaatgtgaggaaaatcaaatcttaacgcaagctgtcttttgccaaatataatttcttatctgaattttttcatattgaactcaaacttgagttcaatacttgagatagtattgaactcaaaactagtatttttttagcactttaaggtataagtggttacctagactctatttagaataccttatcttaaatatctgtggatacttaagaagaaaactgtaaaatcgatgtgttggccatgaatttttaaccctgcttatcaaatgttgttaagaacattgccaaggaaataaagatgtatcattaaagcatgtcatgtttgcaagatcatctctctgagtgttgattaactcctagacctttaagcacagccacctcacttataagttgctgccaagaggaaaatgcgggtgccactggttagccattgtcaaatggatgtatttttctcagatatgaataaatgagaactggactgtgacacagaaacaaactatgcactttttttccccatgacattataataatcaagaaacaatgtggccaggcatggtggctcacgcctgtaatccaaacactttggtaggctgagatgggccaatcacatgaggccaggagttcaagaccagcctggccaacatggcaaaacacatgtctctactaaaacagtacaaaaagtagccaagtgtggtaatgcatgcctgtaatcctagctactcaggtagctgaggcataagaattgcttgaacccgggaggcagaggttgcagtgggccaaaattgtgccactgcactccagcctgggtgacagagtgtcttaaaaaaaaaaaagtacctttactcatttgcctttcagctgagaaatatggcaatgcactattaattcaaagaagcagtattgccccttggttaaaatctcagactccagagtgagaaatgatcagaatcctggcatctctacttaactgatttttaattttgtcaaagtatgttaacttctctaaccatcttcagtttccttctctgtaaaatggagataactgttatacctatctatcatctcttgtggagaggagagcaataggaaaacttaggcagagattgttacatagcaagcagtaagagtaactacctttgtaaataggaaaaatctttcatgagtcaagagtactgggttctgatcccagctttgtcactaactacctatgcaatttggggctatcatatcagttctctgaatcttagtttccataaccagaagtgaaagaaattgattgcatgatcttgaaaattacttccaattctaaaatactattctggttagcagaagcatttaaaaactcaaactaaaacaaaaagccccctccgtttctaattggtagttaattatttcagtctttacttaaacattcctttatgtcagggaaagaccttttgtttttcaccacttctatttccccaggaacttcattgcctccagttccagagaaaggtgttaagaagaaaattaacaaccacttgctactgtgtgaacactaactgctcttaattgctttctttaagatagctt

SEQ ID NO: 70239 - DNA, 1066 bp, Homo sapiens
tgatttttattttgcaaaatgtggttgtcatatccatctagcagaatgattttgattttctacccccaactccaaattcctagtcgtcttcaccttttcctcaacccttattccattcaaaaagctataatttcaatacaaaaacttagtgtcacttgctaaaccaaattgctttatttttatttttttgtgtgacaggatcttgctttgtcacccaggctagagtacagtggtgcagtcatatctcactgtagcctccatctcctgggctcaagcaatcctcccacctcagcctcctgaatagctgggactattggtgcatgccaccatgcccggctaatttttaaatttttttgtagagttggagtctctctattttgcccaggctggtctcaaactcctggcctcaagcaatcctcccacctcagcctcccaaagtgctgagattataggtgtgagccaccatgcccagccctgctttccttttaaaggttacttaagtgtgtgattgtctgataatccaagttattattaatgaagtttttgttttgtttggctttattttatttgtttttgcttattaacccaaatgaatctctaaatgatggaatttcaggcagagtaagagagaattttggattgggtcactttactacatttggctaagtatattctacttaaataaaaggacacattttgatatggggaacttgcagcctctcccacccgaaatatttccatcgcctcaacctttttctttttgagacagggtcttgctgtgttgccaaggctggagtgcagtggcacaatcagagctcaccacagcttccatcccccaggctgaagtgatccccctgtgtcagcctcgtgagcagctgggactataggaaagtgctaccatgcccaactaatatatatatatatatatatgtatgtatgtatgtatgtatgtatgtatgtatgtatgttaaattcttggaagagtcagggtttcaccatgttgcccaggctggtcttgaactcctgagctcaagcgatctgcccacctcagcctcccaaagtgctg

SEQ ID NO: 70240 - DNA, 1045 bp, Homo sapiens
caaattaattatggaccattatctatttgtacagcaaagtttgtatattatagttttggtaataaccattgcaataattataattttatattattttaaaattttacaatgctataacatacattgtcctttttggtctttctagccatcttataagttgataaattagctgttgttactgttattcctcattttatagatgagaaaacaaaagcactgaaaatttaaatggcttatccagtgtcacacaactagtgaatactggcattcctcctgattcacttatttccaaatcttatgggattttctcctctcctgaatggacttagagctctttgaaacaagctgcccatccgacttaattctcctgtgcctagaacattgcaggttctcaatgtgtatttgtaaaacagattcatctaaactagaatggaatttcaagtgtgagcctttttgtaaagaattttactactcaaatactatattctgtcaacctaatagaattatgctgtgaccttgaatatactgaaattgcattttaaagtcctaaaaataaagtaattgagagttgtcttggaaaacataacacaaaggcaaaggataagtattttattgttaatctatttaagtttaattcctttctatcagttatcttttgctgcatgacaaattaccccaaaatttggcagcttaaaaaaacaaacatttcttctctcatagtttctgtggatcaggaatactggtgcagcttagctggatactcgggttcatggtctctcagaaggctgtgaccaaagtataggctggggctacaatcatctctcggctggaatggggagggatcccttctaagctcaccaacgtagctgcaggcaggatccaagttctagatggctattgtatggagataccagttttgtgagggctttttctcccggcaaatgcccctctccactgagcagctcaaacaaggcaactggtcactcttagaataggtgggccagagagagcaagaaagggcatgcaagacaaaaaaaacacagtt

SEQ ID NO: 70241 - DNA, 3021 bp, Homo sapiens
gtgtgtcataatcttctctgtatttggatcctaaacatccattgagcatgattcttaagctaaaagtacacttaccatgtcatcagaggatactaaaatgtatgattgctttatagtcgttgtttgttttctgtagaacaaaattattttatgcttctccctagtctttcaagtgcactccattataaagattcttaatggcttttgtatgtccaaggaaagattatatgtcaaagaaattatttccagaaagtgcacaaagttgtacagggtctttcaggttacagcccacagcatcaccatcttctgtgctttgtggagaattagaccctttatattgctattgtagattatgttactatcaatagataaacagggaattgtatgttgcttgttggaataagttattttctacataacttactatgtgttaaatatgattcagaggattggacttttatgtttaaaaataaatttaatgtaagatgaaattcctgttttctgataattatctgaactgcttttcacgattgagtctagccaacaaacttaaaatttatgtgtagtttcagaacagtggcaaacattttgtgaaaacaggtgcttttgattactgctaagctggtcttatgttttcacattgtgcttctgctggcagtagtatgtggttcctgaattttcaggtgcagaaaataacatttgatttgtgaagccccatttttgagataaaactaggcacatgtcaaatgtaagcaatatggaatgtgacgccaacagtggcatccttgctgattctaaaaattggatataggttaacaaattgctgtagtggaaagttttacaaatgattacagctctggttaatacttgtttttgtaaactgtaatctgcctgcaaaaaattaacttctgcaagtattttgaagacatgaatatgaacttatacctttaaaaactttgctcagtacatttcaccctgcttataatcgtgatcacttttaggggaacagctgttaaaatttagggtgagatgtacgggtgctcagcagttggttgtaaatttccactttatggatttacagtggtctttcattattgaagtagaattggggaatccccatcaccttaaaactgttatttatggctggttttatctaccaatgccaagttttcatgatttataggaacaaacacctctctcttttattcttaaaaattccaaatcttctgtgtaatggtgtttttagcactatttggaagatgatcaggcataaaaggaattttaaacctaagaactgttgggatcttccaatccagccctctgattttacataaatttaatatctctaacaacagagtaatttgctcagtaattgtttaaggcttaaagagagaaaatgtctaactcaagattacacagctcagaatagaagtaacgtaagtatttaagtctgtgaacttggtgtatttttaatcgtatcctcccccatacacttcccattgcttcaaacactgccttcatgtgaaatttcccacaaccctgctcactctcccaagggttagccctggagcccctgtgtatgtgaatggcacccccaattactccatcgttttgtgattacttacatacagtgtccttttgtgagtgccatatcctcatctttgtattccagcatctaagacagtgcctggaccatctatagatgtttctgtcttaaaaagctgtgaagaagactgattcccataagccacccacagaaacctatctcattactttgtagtcactattcgtgtatttgaaatgattaggaagtttagaaaaccatactctggctgtaagaatcttagtttgccatatcaatgattccgatgctattcctctccatctactactctgtgtagcacaggaaaacacagctcctgcaacagatgttttgagaatccaaatgcaaggaaaatagaaggggaaagcagtgtttatactttataagattcttatagacctacctttttcttttcaacacatgctacgaagtttattatgcttgatctcctgagatcagtgcatgctaggccctatgcttcgtaatttatgtgcattagctcatttaatccacacaactccatgagactaatactattatctttattttccagataaaacttgagccaaatgagcttaattttctcaatgttacacaattgtcggtatgttagctattatcagccaatatgcattaagcactactatgtgctgagagccatggcaggaatatcccagctcccaactgcagtgctgtgtgccatccttccccatgctgccagtcaactgtgccttcatgatggcagcctccatcctcgtgatgggttgataaactcctgagtcagcttggatataattccacggctccaaaaggagaaaaagcagcaaacgcaacatgctgttatgactaaccatttttgtaatgaggtgaatgttcttctcagtacgttcattcaattattttgtattcaattatactttgaataggagaatttaccttacactctagtgtgactttgttgttgttgttttttttcccactgaatctgaaattagggactgatgtatgtaattcacagcatacttggactggaagaaaatttatcaccaaggtgagcaaacagatccagtttagagttgggaccttgactcagctttgtgtataatccctcagcaacgtagtacaagagcaggagggctgtgacattgtcctgtgtcatgtccagccatcacaatatttgaatatgaatgcattttgtgtctgtaatacctagaactcaaattgtgaaaagtggaacagtaaaaaaccaatgcatctatataaacaaaaatgtgaatgtgggtataaaactttcataagatcagagagttctctgaggaattccaaataaatctagaattcatgagaattggaaaactatataggaactagttttatttatttatattttctattgctaagtcacacatgaatcatat

SEQ ID NO: 70242 - DNA, 1619 bp, Homo sapiens
tgaacatgttcatttccagacaaggcaagttactgaataaacctatgcctcctttaaatacattgtaagttatatgttaagttgctggcttatttcaagaaatacaatatgtgttcaaaatctatatcttgacccaaataaacatagactctattgaatttaatgtgcaataagatttcatgcctcctttttattcacattactctttcacggatgtaacatatggcatgtggaggtgagtaattccttcaatgctatttctgttttaactatacaaacacagaagagctctgtattgggcccacatccatgtggtaatttttatttcttgttttctacttattttttgttgatttctacaagatcaccaaggcttctatttatttaataaaaagcatattctagtgctttctgtttgcatgatgtagtggtcatcatttgtctgccttaaaactcctttttcattccccttggaagagcaatgttcatatttaaaatgctcctgtttctccttcagttctgtcattattgattgatcaaaactgtgataatttgggttacaattatagaaaactaccacgttttagtctttagtgatttgtctgttcataaacagctaggtcaatcagaatgctcctgtgagagtttgcaaattcaactcagtgcactgtgctcatggagaaaccattctggactgggagggaatcaagcccacatccaaaggagacagacatgaaggatcaagaggctcctctcagggttgtattcactaattccagtccttaaggtctctaggttagagaattagaaaggaccagaactcagattggaactcagatcagctagtttcaagtttgatagtgttggtaagctcttatttggaaaatatgattctttagttattttcatttgatagtaataaatgccaccgatggaaactatattctttccataaaagttcccatcctcccaaaatataattctcttaatgggactaaaaaactatgtgactttggatgaatcacctgggtcagtatgcttcttcagtttcctatttgtaaaatggggttctaaatcccagtggagagtgctgaagaccccagagagagaggaatcactggcaggtgtagtcagtagagctgtgtctccccagggcagcatacatcccaaacagctggaagaaggggatagctagtgggcaaatttggacagatgacgttccgcttagcagcataactgcagtgcatttaacattctttgcccttacttttcatttagagagttaagtcttgttttagagggaacacacaacttccccatgtacctctcaccagatcattcaccatgatgccagatggaaacatgcctagtggtgtattagaatataatagaatttttaatctgctttttaaaatttgaagtgttagaattctaccccactatctcactaactattacataatcttacaaccaaaaagcttttctgaaacatccaaccatgggactgagttatttggatctgtagatttaaactaaacgtcagcaagtaggtttatagatatgtagaaactgagctgaatttcagttgatatccaaacctttgaagacctctgttttag

SEQ ID NO: 70243 - DNA, 3305 bp, Homo sapiens
tctgaactggtatgaaaaatacctgctactacctgccatgataatattagctttgtgatcttggacaaaccactaaaacaccattgaacctttttttgctcatccatagaggtataatgacattcacctcattattagagctgttaggttaaattaaaagattgtgtattattattgtcatatatttagtgactattcaggtctaaaatccagatcttcaaatttctcattcattatttgttaattgttctagtttgttttggttgagggaatcagaataataaaggatttgaaaccaaaaaaaaaaaaaagaaaaaaaaaagaaacctaaggacaagtgatttttttaatttaaagatgttcataaaacattttatagcatctttttgtcagcatcattaagttagtgtttctttccacaaacttactcctaaggcatacaaaatgggaaacttctgggaataaaggaacttcacagaaccattgaaagtaactacatattttagatgtgatatgttcttggctgatgaatatttgcctttctaagtaaatttctccctgctccatcattatcaatttatatctgaaaatagggaactgtgtaaatctagaagacagacaaattgcttgtgaatctaacagagagtgcaaagtgcagtcagttccctctgggatgatcctacaaacttgacattacacagatattgaactatctttattcagtaagaaggctttttaaaaattatatttctgggaacatggagctgcagtatatcattagtttcataggtaatatgctgacatgcttgattaattatattgtaaacaaatcagatttttcctggtgttaaaagttctctttcgcttaaagacctgaagaagaaagaagctatagagaaaaaaaaattattcatgattaatgctgacctctctagactttagagtacctctctcgtctactatgaagtgtttctgattgtggttcttaaaaataattttttaaagcttgtgatttttagagataaaggatgaacagcatgtgagcatattatgaaatttctctttccactgtcttcaccaagaagaattaagttttgtttgctgtttagcccatttactttcatgtttttttaaaaatgtaacaattgagctaggtttatatttgagttcagtctaagttgagttggattatttgtatttcttttcccttaaaccaggcagtttcctttatttgctgattatggtatgctgttactaagcctatgagaagcttctctgtgaagtgcattttaatatttaaatcaaacagtgattggaatacattaatgcccagtgggtaaacgtgtcatttgaaagcagctgctgagccttctccctgctgctccaattaacacatactgcacactcctgtcagcaagagggctgtgcatatggatgaaaccactttgctgcttattaatatgatatgcaagggagcacaaagggttaatcagtacgcccattgcaaaacaatagcttttcaagaggtttcccaagcacatgttttgagataatgtgggctaggattagggtgttggattagcaggtaggaaagtcagttcagtctctaactttggttcagtccattgactaatgtgtttccccggccctcccttctcctatacccccgccccgatgatgagatgatggagatattggatagtgaaattctcgtgctgggactcctcttgcctcagctgaatctcttgaactttgttttgaagctatttaaagtccaaagctttgctgtttgttttttctcttagtcttttattaccatttcattttctttctcttttcctcttttttttttaaaaaaattacagatttgacagtttattgatctaaatgagaaatattgtcaaggtaaacccatatcgctattattttctttcccctccgatggccaaagtcgccgtgttgatggtagcccagaggtagatagaagggtagctgtcctggtccaggtttggtattggtcattcatgctccaccggctcgcagagcagctgggctgttgctgtgctcttgtgctagctgtgccgcgctgcacggtgagtaagagatggaccgcttcctgggttttgtcaaggcgataagaagatctaggagaagaaaggggaaaaagtaccgaccagaagaggattaccacgagggctatgaggatgtctattattacgcttcagagcattttcgaagtaagcgcttctctccatcctccggttccttctcgcatgctggggctaacaataaaccttgtgtggagccttaatcttaaatgcaaaaggtttctcagatggtgttctctgtgagcagtctgtaagtactgaagtgctatgttttgcttgatttgttgcaagaacagccattagataatagcatctagacagtgtcaccagccaaggtctgtacacatcgttaatattttaggtgaaattaattatgttattttaataagccattcaaaaaagttgcaagccaacgtagtaggtggccagaatatgctctgttgtagttgttgctttcctttttctttcagaatagggaaggctagctcatttggaagaaataattgttcatgttcaagttgatgttaatgcttaatgctcctgatacagacttctagacagttatctgtgattaatctcaggtgttgtttgtacaaggaagttcaagtacctttctctgatgcatgtttacaattttgttattaaataaggttaattcttatttgctgtcagctagaagcagtgatacctgtagtatccgtaatatgtctatattgagacatttgaaacttagcttataaatagaagagaactagcagttttcttttatctgtcagcgctttaagtttctggtaaggtttagacttgtcccactagatttaaaatgcccagaaatgcctaagggtgcagagagaaagcagctatgcacagagatcactgagtttatgatgtgccccaaatgggggaagatgacagttatgtatgatctacatttttaaaaagctaaaaattatttatttgtcttcttcaataaggatctttataaacttatatttcaattctaattcgttctggtcttttgatgtctaatcatgaatgcatcccacttataaactctgagcattaactaataaataatttaaatcccaatttctgtggtattgaaagccatgagaattccttctaaatgctagaaattctgttgcgattgatgaagactgagggttgaaaattcatgtggtggcaataatacaagaa

SEQ ID NO: 70244 - DNA, 1032 bp, Homo sapiens
atgtattattaaatatatatatcagcattaagacattttgtgtttaagccaggtgtggtggctcatgcctgtaatcccagcactttgggaggccaaggtgggcagattgctggagctccggagttcaagatcagccagatggtgaaaccctgtctgtctcaaaacaaaacaaaaattagctgtatgtggtgagacatgcctgtagtccgagctactcaggaggctgaggtgggaggatcgcttgaccctgagaggtggaggctgtagtgagctgtgattgcaccactggactccagcctgggcaacacaccaagattctgtctcaaaaaaaaaaaaaaagacattttgtgtttaaattatgtgctcatgagttacatgatctatgagtttcagttagtaagaagggatattacaaatcatttgctacaataaagtaggagtgggtctaatgagaataccattagtgccagagaacagagtgtttttttctttcccattctcatcctcagtaggtcagggtatctctcccaaggctacatgaaggctgcagcgattattggcattgcgtgcagatgctatgaaatctaaaagggccagattaatttaatgtcttaaagatttctcttatagactgtgtgtttcatactgttactcaaaaaaaatactataaccattactcaatttaattatgcattgaagggaaccccctaatcgctgatctaggaaaggttataaattgaagatttaatctcaatagctggtccatttcttttttcctaaaaggggatgaagaatccagttcagaagagtacggaaatcatgtaaatgctatataggcaattgcctacttcccaaaaaagaaaataattagtacttgaaaaatacatatttgttaacatatatttgcccttgctggttgaaatgcattttgttgaatacttcaaactgctttattttctcatgtgaacgaatttttctaataaatttaatattatagtttagtgaacatttagctcaactgataaccaattt

SEQ ID NO: 70245 - DNA, 1018 bp, Homo sapiens
agtgatactccatcgcaaaatgaataaataaataaataaaagtaaaaaggagaggcagaaatgctggataactcaaattggataaatggctgttaaaaaatctaaaactcacaagtgctttaaaatacttgctattaacccaaataagtttgcttgtaaatcatagctaggattgggggccaaagaaatggctttaagagaaaaaggccgagaaggcaggaaagatgaatcacatggcaatgcatttagagacggaaaagaagagaaatttaaattagattatttatgacagcttagaagtgagaccacaggaacaaatttaaataccaagaaaatgttcctgtagccaaatgaataaataaaattctcagcttttagaaattcagtacttgggtaaaaaccaaccaaccaagagacaaatataaataaataaatatgtataacttaaagtaagtagacttttcttatctccaagtagcttgaaaagaacaagttggcaaggagaaagaagggaaggagggagggaaggaggaagagaggagagagtcagagagagagagagaatcagagagagacaaggaaaatggaatgaattccgggaaatagaaggcattaggtaatatattcttcagaaccatcaaacattgagcttaaatagattccgtgaagtctcacaattaccttaaaagacactataattagcactatatttttcatcacttcaaagcatctagctgcataaaaataacatcttgtagctagaagagactttctagtccaactctttcctcctaagacacatacaccttcaggaaaaaatgagttccgatacaatgaacatttttgaaatccttataatagtcagaacggcacacttagcattttacattcagaaattatttttatgcttttgctcttttatgctcattctacacttattgaatgaacatattctatatggtagaaaaaaagtagaaaaaaatctttgaaaactcaataacctcagttatctgagccc

SEQ ID NO: 70246 - DNA, 1023 bp, Homo sapiens
ttcctctgatatggtttgatgtgtctcccctccaaacctcatgttgaaatgtgatccccagtgttggaggtggggcctagtggaggtccttggatcatcggtgcagatctctcttgaatggcttagtgtcattctttggtgatgagtgagttctctctctattagttcacatgagagctggttatttacaaggagcccggcaccttttcctctctcttgcttcctttctcactgtgtgatatacttgcttcccctttaccttctgccataatcataagctccctgaggccttcaccagaagcagatgcctttaccacatttcctgtacagcctagggaaccgtgaaccaaaataatcctcttttctttataaattacccagtctcaggtattcctttatagtaacacaaacagactaacacacctcctcatctataatatagctccatgagaggagtgttaccctcatatgcactgttctatctttagagtgtgaatagtgcctggcactagagacacacaggaagcatttgtcgaataaatgaatcagatttagtgtgagacaagcacatattcttcatagttcatggaaacatactgtttaaattattcaagggcctttaatgttttcctcctaaaaagtatgtcaaacaccaaaatcaaccagcaagaatgtgaaataggaccagttctaaaagttggtcaaagccatcatggattaaacatctagcatgtgactggcactaaatacattttatagggcaaaaaaatgaatccttagagctgtagacattctaaaagtgtaatttaagctaacagttttaaactctttacttgaacttgtaactaaagctactatcaaggcgaatgatgacttagaattttccctccatattctgtttcacacctaccgcataataaatatcgaacatgtaattatgtgtgtgaagaacaattgagtaaataaatgaacaaacagacgaatgaaccagataaatgctcaataataaaagtaaagaggagg

SEQ ID NO: 70247 - DNA, 1057 bp, Homo sapiens
ggtccctttgccttttgccatgattgaaagtttcctgaggcctcctcagcgatgcagaactgagtcaattaaacctctctctctctctctttgttaaatataaactatagtctcgggtatttcttcatagcagtgtgacagaactaatgcatataccttattgatttatttatttaatttttctataaactcattctccccccagaatgtaagcttcattaagacatggtcattgctttttttttttttttttatggtatcactagtacttagtgcagctggacacataataagtattcagtaaattctttgttgaattaataaagggacaaatatatgttagactatcggaatgtaacaataaaaaggacagttctaccttgaactcacagttaaataagcagataattacaaggtttcataagaagcagctataataaagtgaatgaaaatgaaaagaaggctcctttcagtaaattaacccttattatcaataacaatacatttaaatttttcttgctatgtaccaatctccaagagcttcatgtactcatttaatactcacagcaatcctatgaatatggtactattgtttatcctcatttgtagatgaggaaatggggtacagagagtttaacttgctcacagttgcacagctgaaggtggtacatttacttctaaaataaaattcatagatttataactatatataaagtatgtaactatatataaaatttataactatatataaagtatatacacataatatagacaatagtttaaggcacaacccttaaacctgtatctccaccattattcctatcatagtaatactatcacagtattatccttccagttattcacaccaaaagtcaaagaatcatgcttgatttctttctgagaaccctatttccactcttgcccattttccataaacaaccagaatattcatcttaaatgtagatcatgtcacttccctatttaacactgtgcactgagttctatgtgctcctaatgcatgtggaatagaagcccacaatttgtatctgggcctgga

SEQ ID NO: 70248 - DNA, 1050 bp, Homo sapiens
gtgcctgtaatcccagctactcgggaggctgagacaaaagaattgcttgaatctgggaggcggaggttatggtgagctgagatcatgtcactgcactccagcctgggtgacaagagaaagactccatcccaaaaagtaaaaaatacaataaaattttcagttttagtgtcaaatatggtacatatcaataagtaaaattcatataaacaaaagctctttgatgtcctcagtaattttttaaagagcagatgggtcttgagaccaaatttaaaatttacgctttaaaatgaaatagtccgtgggaaatatatatgtgtgtgtgtgtgtgtgtgtgtgtgtgtgtgtgtgtgtgtgcatactgaaaattatgtatatatatatactgtgatgaaacaagtttgctgcctgtcagagagtcatactggcataagagtgtcataaaagcacttagaagtcttacagttgaaaaacaggcttaattttgtttgacttggtatttctcaggctcttggataaaatcttatttgttttctgaggaaaggatgttcatgaggaatcgtcttttgcgaatactgctttatttacattttgttttgaagatctagtgccttgagtaggttaaaatgttataaaccccacagttctctagtataaaatataaagggggcaaccttaatcatgaagcaaatatatgaacatatttcatgagcaaatgggactgaggatctagttttgtttttttcaaaatgactttaagattctgtaagaagttcaaagtctactgttagaattcttgtttcttgtcattcagaaaattttcattgatataggataaaaagaaggctgttagtcatctgaaaattctaatacttctttaaggttttgaggctatattttaaaatggtagtctcaagtttttgtgttttcttaaaatgtaccagtgtggtttagtgaaagagtaaggacttagaggacttacataaggttggttacaaataatgtgtccataatttattgaatctttaatggataagtttataaatatcagca

SEQ ID NO: 70249 - DNA, 1056 bp, Homo sapiens
tcattatctcccaaagtccatagtttatgttaaggttcactcttggtgttgtatgttctatagattttgagaaatgtataatgacgtatgcaccattatggtatcacacagaataatcccagtgtcctaaaaatcctttgtgcttcacctatttatccacccctccttctgattactagcaacccctgttttttttttttaattgtctccctagtttttccttttcccaaatgtcatacagttagaatcatactatgtagtctttttggattggcttctttcacttagtaatagcattgaattttccttcatttcttttcatggcttggtagctcattttttttggtgctaaataatattccagtatctgaatgtaccatagtttagttatctagtcacctactgaaagacatattggttgcttccaaattttggcaattatgaacaaagctgacataaacatccatgtgcaggtttgtacatggacataatttttaatacctttaggtaaataccaatgagcatgattgctggactgaatactaagagagaatatttagttgtctaagaaactgccaaattgtcttcccaagtagctgtaccattttgcattcccatcagcaatgaatgagagttcctgctgctccacatcctcaccagcatttggtattgccagtgttgtggacactagacattttaataggtgtgtagtgctttcttattgctattttaatttgcatttctctaatcgcatatgacttggagcatcttttcacatgcttatttaccaccgtgttagccaggatggtcttgatcacctgacctcgtgatatgcccacctcggccttccaaagtgctgggattacaggcgtgagccaccgtgcccagcccagcgtatttcaaaatggttatttttccctcttcctgccaaaagcaggaggagatatttcttcagtattcactgtgagaacctcagcaggtttcaggaggtaaagctcactaaagtaaggtgcctccagataactgagtctccctggagtttttatctttcaggct

SEQ ID NO: 70250 - DNA, 1084 bp, Homo sapiens
gggtagaaaataaatggatgatgtggccttaaaatttgaaaggtgaactcagtgtcaacaattccaagtatcatgcctattcattagttttaatttttttagtttagcctttggcagtctcttgctctctttaacctaatactatcacatatggcatcatctatagttatgattatatctaaaattcacaaggcctgcaattctataatttattaaagcctgtagaaaaggtagtgtgtgaatgttaaattaagataaaataattgcctcaccacaaagctggtaatttatgtcatcttgggactagtatttggtccattttggaccctgaggcatgggagtccccaaattagggcaagtccaggatttgacagtgatgtgtatctccttcctgtgggaggctgcagtgaaagaaccatggaaagacagtgtcgtactttcttctcagcagcttccaaccaccaatgaagcactaagaaaactagaacttgacacacttattcggtagtggccctataagcaagatatgtttttatgaaaaagaatttatttttaagtttgaattatagacacatgtctatctaatttttgcagtaatttcaaaatgatacctcaaaagagccagtgcttgtttactgaggtagggaaaaaaggcaaatgtggaagggagaatttttttcatgtttttcaaatcaacattgtcattcttgcactaaagttgaatcttctaagcattaaaatagatgagtgttgcatacagactcttaaggtggcctgcatagcacctgtctcctggcattcatgcccttgtgtgatcccctccccttgagtgtggatagcacctgtgacttgcttccaaccaatggaacagggcaaaggtgagaggatatatgtgattacatctacctaattatgtgattagtgtataaatttgtagtgtctgtccttttggcactctcttgctctcgctgtcttgtgcgctctctctctctctctctctctctctctcacacacacacacacacacacacacctggttttgagtaagtgagcaacctctacaaactaagggcaagccccagcc

SEQ ID NO: 70251 - DNA, 1489 bp, Homo sapiens
gtgcatagactgaggcattagtgtgtgtatgcaaattataaaataaactcacagatgaatactgcatgcaattaacttgcagaattaaatcattttgaaaattctcataattctcatagaattatgtctattacagtttgacctcataagtaggtgacataggagtcatctgcatctgtatactcattttcccataatggtccctaataggttcattagggactccagaatcactgattgggcaattttgcttgctaaattatttcaaatgtccatttttttactgacaccaaatggtaggatgtttttctgttcaataaatgcagggttttttcattttttctctgtttccttttgtgtttttatttgaaatatgaatctgttgggaattaaattcaaattagtctaatttttttcatagctatagtcgctatgataatgctcagtattgcagtgacaagcccttagtgtcttgatttcattgctgtttgctataaaacattcaagtctgtggtagagatcttgtagtatttgtgatcaaggcagctcattgtttctgcccctactctgacttgccctttaaaatgtctttttcagcgctaagtttaaaattggctacatagaagtctgcctttatctccgaccccaatatttcactctgacaattctgtgatccttgtgcctattctgtcatcctttcttacttggtgggcttttcttgtttttaacctcttccattttctctcttgcccagtcaccactgctaccaaaccaaaaagaattacctgaatcaactcacctatttttatcagtccaaatcaaagtacattgtgcccccttatcgggtgatgctctgtccttgtactttttctctactattattttaacccagtcactgatcccaaacattcctcatcagattctttggctttattatgtctaagttgatttgttcacatgcgtgaatgagcgtgttgtgcctctgctgctggcaagattcttgtctgatcagagttttgcgtctcctgtgtttactctaggcaagagactcctgtcttattagtgtaatcttgatgttccaacctcatcttggtatttggtaactattttaccaatcacctgctgagctttttcactttgaaacacttgaaatatttttaaagttattagaattggtactctaaaaatcatagaaacaaatggtacccaatgatagagtaatggagaatataactcacccactgccattctggaaagaataaactcattgcctttaccccaaaattggttctcctgctcgattttttttttttttttaggtggagtctttctctgtcacctgcccaggctggagtgcagtggcctgatctcggctcactgcaaccctgccttccgggttcaagcgattctcctgcctcagcctctggagtagctgggattacaggcatgcaccaccacacccagctaatttttagtaggcacagggttt

SEQ ID NO: 70252 - DNA, 1003 bp, Homo sapiens
gattttaaaaatatgttagccagttagaaaatagtagctgagtgacctgccctttaaaaacaaaaagaggctcactgggctgtctgtgcatgtttgaccttgtcagtcaggcaatagagggccagaggctgacataactcctactctcttctgcctctcaggcagcccaaatgaccagttagagagtttggggactcttgttctatcaagcttggcacacagtaggagttcagtaggtttcagtctaaatagattgctcagtagtgtgaaaatcttaggtatttcagagttaatattatgccctgatgtaaaatgaattcactttataaggtgaataataacatcactggcaagaaaaatgtcaaccaatcagctaggagaatttttacatatgcctcattaacagtgcagcccttactgtcgttgtctaatgatcttgttccttccctgctcttgtctaggacaaatatttcttttttaaaagttgcctcttacgttgttttgtagtcattccccagcagattaacattagaaaaatgttgggttttcacaattgtattagtgattaaaagccaccaccccaaactgatagctcattattgttccttaataagaataacctccactgctttatacttgaaataataactttggagatggaaagcctcaagtttgcttcagttggcaatcaatatcagaagcctattattattattattttaaatccccaagtagtagagattttcctttaattacatgttgatgggacattttatcttgtgtgcttgaggtagctgtagctgcagcttgaggcacttatgggcttgaatggggcttgaatttataagcctaaaccatgaaacagcagtgcaggaccaaagcctgggaatacaaatatccaagttaaaataatttcccatttgggtcaaggattaaattattgaatttgcaaccttattgattataatggctacctatagtatctattaaacacacttatcaa

SEQ ID NO: 70253 - DNA, 2061 bp, Homo sapiens
gttaaaaccaaacaacataaaaactttgcaacctgaaaatacagtaagttgatggtttactaagtcttacaatacagtttcattattcaacagaggaacattctaatccagaagtattccaacatcttgaaaatgatgtacccacctcaggaacccacatctggattcataagaagcactgtataaaagaactaaagtttaaattgcttcatgattgcccaggggtgtaggtagcttcctagaggaataatgtattcaatggataagctgttaccttacccttaaaatcgttttctaaattcttttttgactcttagatttgtaatataactcatctccccttttgtctcactttgcctttctctttaaccgattaccgttctgtttagctatatgtgctctgggttataaagtgtaagtatctccataagtcaaacatggaaaagggacttaagaatattttctggaccgatatccttcattttgtagatgaggaaagaggaaactgtggcacagaaagactgagaaactgggttggagctctccagctgcagaccgacagagccagaaattgaactgggctcctattcatgtgctttctccactagaatatgtttaccagccaaaaggtagctggtccttgaaagtgaagaagggggacagattgaagatgtaggaaatattttgtttctttcaggtcaggtctctttactcttgggctagcccacatgccttttagaaaccaggtaaacatttatgtatttatttcatttgattcagcaaatagtatgggcttcacattgctattgaggtgggggtgaggaaggaaggtaaataaaaggattttttcatttttgttttttgagacagggtcatgctctgtcacctaggctgcagtgtagtggcacaaacacagctcactgcaagtcttgacctcctggattcaggtaatgcttctgcctcagtttctcgagtaggttggattacaggaatgagccactgtacccagccaaaaggatttttaagatctaacagaatttgcagtatcattaggtagtgaaaaataacatggattgcagtgttagataataaaaaggatgtttcaaaataagtgatgaagtagatgtttagagagaaaggaattgatgctggctggagtgacctgtgcaggcttcacggaggaggtttggatgtgagatgagccttgtaggagatggaagaaatggttatggccagatagaagaggacaaggtctccttagcaggaaggagcaagtgtgagtgagtccagcactgaggtatgaattgtagctgtccaaggtagaaagctcatgccagggagaagaggtgctgcagaaagagttcagatttttgtcttgcgggctgttaatatgctggatgcagaaaagtgacagaactgtgctttaggaggatgaacctggcagcaatatgcaggatggagtacagttgggagaacctaggtggataaaatgcaagaaatagtgaagactgggcctagaaagtttcagagacttgcaatcagaatcccatcccggaaagcagcccatcaattgccatcctctcatttataaatttgggactgtgaccaagaaagttgatgtgaattcctcagtatgacacagaggttggtgaaggaactgggtagagtcagaatacccataatttgactctcaatcagttttcttattttttcatttaaagaaatacaaaattttgaacctagggaaaaaagtgcctttgaaatgaattttaaaagttgagtagggagttgtaatttgagaatgcagtgaattaggttttactgtttatttaaagttttgactaaatgaatagaaatgtctatatagctcattgttttatgccatagtttagatattatttctcccaggaaaccttctgtgacccatgaattcaggttattttaccctcctatgtattttcagagtaccccagaatttacctaccatagattttccatgctgggttgtaattgttggatggtcagccactcctttggattgtcagctccccacagatagga

SEQ ID NO: 70254 - DNA, 1053 bp, Homo sapiens
atggagaatatctattcctttaccatgctgaataacttcatagtactgaaagtgaagacatacattaacaccccaccctcaaaacaaaaaaacatggtgaatattgttgagagacttgccctggaaagcatgatcaaaggaaaggtaggcagtgtttcctctataaacctcacactcctgagatactgagctaccaaaagcctccaaggtgctgcaccagttcacacttctgtgctcgacattaatatggctttacctgtagtttcagacactccatcatctctgcacacttgataagcttgtacttatccttcaagactcagctcaagtgtcctccagtctttgaagctcactgatcacatctcttttcctctttctatgatagcttactactcttattcttgtctccctattttgaatttatatgatgatatgccttacctccctgcacctcaaaatgagctccttgaagtcaggaaccacattttattcatttatatatcctcagtgcctagagcatagatggaaaatacccagcacttaacttatgcctccactcttcaattctgtgcttgaggaaaacattgcaaattgttcttttttttttttttttcctgagactagccagagccccatagtatttctgaactccaccctagagatagctgcttactacagattcactgtgagtgacacattagtttcaacttccttgctaccactggcctaacaaaacacctggctcacagtagttaatcattactatttttaatgtgaaaattatattaaaataataaaatccaagctttggtttcacttttttattattattatacttttagggtacatgtgcacaacgtgcaggtttgttacatatgtataccatagtcgtcatttaacattaggtatatctcctaatgctatccctcccccttccccccaccccacaacaggccccggtgtgtgatgttcctcttcctgtgtccatgtgttctcattgttcagttcccacctatgagtgagaacatgcggtgtttggttttttgtccttgc

SEQ ID NO: 70255 - DNA, 1095 bp, Homo sapiens
cttcagatgaagaattagtaataggacaggactatctattaatgctgagctgaggaggactaagaagccaagtattttcccccaagtgcaactggtgctgcctgctagttagtgttcatcaggatgttgaataacacagccctgcagcacccacagagcactatttttaggaattgcccagattgacagtgatctcttcaaaaccattttctgaggttaatatagttgtaattacctacacttatatgatactgcttgttttgtctaagttcatttgatgagtctcccatagagaatggaattagacatcccagtaagataagggatggcaactactttttgttcctgtagattaggaggattgttgctcagtctgagaaaattattttattcagagtcacttttttttctacttgtattatttatttatgtagtgtacttacctgaaagcataaattaatattcgagtttgaataatggtttagaagcagaatcatgtgcagttggcaaaaatgaaacttgcttcttgtgaggaacttatggaccatacacaaatgctaaaggaactaaatagcttctatttctgtgatggctaatactggtttttttttgtttttttgtttttttgtttttttgtttttttgttttttttcagaaaatgtggagaatatgctagtcttttgggcctcattttgctatttcctggcaatttgttgcgtttagtattttagagtcaaaaatggttttgcttctggcttatttggctgatatcaatggtgaattcacattccttcatatggctcatattcccaaatgtgcaaagtgtggtgtagggtatggtagaaattgttaggaaaaaatacctggacagattcatagggattatgtaataggaaaactaagccaaaaagcctagtcatgatgggtatagtgatcatttgttgatgggcaaagttatctcattctttaacggaagagctctgatacatcaaaattttcccataaccaacaaccacaaaaaagtcaccaaattaatgctaaaaatactagatcttttttccaggatgatatttttctccacttcaattagtattt

SEQ ID NO: 70256 - DNA, 1058 bp, Homo sapiens
ttgaggcagcaataattttctggatttgatctgcagagtaacagggagtttgataaaggtcagcattttctaaaatgctataaacaggtcttatattttatttttcagagacagggtctctctctgtcacccaggctagagtgatcatagctcactgcaaccttgagctactaaactcaagtgatccttctgcctcagcctcccaagtgtctgggaccacagacccacaccaccatacccagctattttttttttatttttaatagaaatgaggtctcactgtgttgcccaggctggtctcgaacttacaggctcaagcaatcctactgcctcagcctcctgaagtgttgggattccaggtgtgagccaccacacccagccctaaacagacctttaaaaattattttatatggtcagatcatattattgatgactgatctttgtcgacctagtgtagatctcaattcaagaatatttatggagtgtcaagttaataagtataatgatttataaaatagtctctgatatttggagtttatagactgtttggatggataggacatgtactcaaaaatcatggtgtatattgaggacatgaagagtattttaaagaagaaaaagagaaaaaaaattgagtatcatcacttttggcaggggtggaagagaagccatgagatccactcgggatccacacatgtgaagtgcttagagggcccctggttgaagatactctttgtcaatggtggagatggttcatgtgattaagcaagatcttgccaagtgttggagagggaagggcatgccagttgaaagaaacagcagtttctgctcaaaaccttctagtggtggcacagctccctcagaataaaattcagcagactcaccctgccttactgggctctcagtacaattcagtgtggtccttggatctctgctcctctgagaactgctatgggtctgtgaggagacaggttcagaagctttttgtagcagtagttattgcactgacattttaattgcattttataaaattatcgatctgcagtggatcctgaaaa

SEQ ID NO: 70257 - DNA, 1038 bp, Homo sapiens
cgcagtcttgaacttctgggctcaagtgattctcttgccttagcctcccaagtaagtgggactacaggcatgcaccactacacttggctaactttttattttttatttttttaagatagggtgtcactatgccacccagcctggtcatgaacacctggcctcaagcaattctcccatcctgacctctcaaagtgctgggattataggcatgagccactgtgcccagcctgcccttaaaaagcaaatcatttaagagtaggtgtttctctaatttgttataggcttttcttcatatgatgataggtttttaaatctgtgtttcaaagccatcaaattggggacatcaataaaagtcgcagccatgggttgggtggtccagaaagaccaggaaaagtaaggctttggttatttgtcttcttcttgctttacacagacccctgggtgatagttttgaggttaatctcaattttcttctgtaggttgaccgaaagaaatggagagttacatatagaaggaaaaggttaactttaggaaaaggagaaaagtgagtttggaaaataagcagaagtaggaaaattgtggaagagagataatctaaaaatataggaagaaaagcatacagatttgtatttgcatttgtatgttttgctttaaaacattaaatcgtgaggggaaaagattatttgtttcactctgaagattacaagaagatagagatagaaaaagctgagggggagataatgagaatgtgggtgggtagatgaatgaatgggtgggtggatggatggttggatggatggatggttggatggatggatgcatggatggatggagtaatgaacagaatgtgttgttgaccttttaaaacagtatgtgtcaaaattttggaggtccctttgcagctagaaaataacatatttctatccatgcaaaaaaaaaaaactaccacaaagatctgctagctctatttagatagtctgtcttattggcttcttactcttaaggaaagcgttttcctcattgtctaaagaaaaaagt

SEQ ID NO: 70258 - DNA, 1653 bp, Homo sapiens
gcatggagtaggcatccactgcccatcagttcctgtctcttggcccagtatgatcttgaactgagaatgatgaagatgaagaagatgatgatgataccaacatttattgagtttttgttatatgccaggtatttcattaagcacctcataggtattattttataatcttacacatccctataaggtaggtaatatcctgttttacagatgaggaaactgaggcacaaactgcccataaaactaataagttgcagtactgcaatgtggatctaggtagtctgatactaaatcttctttcttatgcattgatagagattttagtaggtttcttgctattcgtgctgttctatgtctgagtgaatgctagaaatatataactgggaaaaaatagtgttctaaaacaattatcacgtattttcatcaggtgattatgtttgaaaaagtagaaacaggcaagaaaatcgcagcattgcctaatccttcaacagtctgcattccagaccctaattcctaagcaaaaggccagaagacccctcttcccaacctacaccaattctaatagcagggttccaacctctaactttgtttaatcctcacatcagtgctgagattttcattattaacacttttatttacacatgaaaaaagtaagtctcagaaggatcatatactatggtcaaggtcacacaggctataaatggtaaaaattaggctttgagtgcaaatctcacattctcaactactgcgagagctataatgttaaagtttccagtgcaatgcagtagttcagcacagtgagataaggccataaagcaatgtggcagggagaccaaattggcatgtaggctttgaaatggagtggccctttaatgaagtagtaacatacgaaggccatgactgtaaatcctagcattgacaaacagtttacatcctgttgttcatgtaccagtctttccagtgtgatagcacttgttaccaataatcctgtcagaagcatgaacccagtctctacctccttttcatcttcatgtccgtgctcaaatttggcgaagttcacacaagaaataatttctgtatttagattaggtgcattcagaatgaatagaaataacacttcaaaactagaactaaagaatacaactgacttcagtctaacagtttaagcttttataccacatcagactatattgatattctctctctttgcaccaagggatgttctgtggagaaacagcattgctctataagagattacattaaaaaactggggagtatgtcaacacataacattaccaaacatttcttaaacctatttttttcaaccctgatttacatcttgggataaaattaaattcacaaattttcattctatttagtaataactttatcatttttctcttaaaaatgcctcccttcagctatacccatagacctggaatttggcaagtatatgcatatttgccccaactgtctcatggtatgtttatttctgtcatatgcttatgattccttctcctgctgcagagtctgctgatcattttaaagcgatggttctcaatccagatcattttgtcacccagaggacatttgacaatgtctggagatatttttggttgtcacaatggggaaggtgttactggcatctaatgggta

SEQ ID NO: 70259 - DNA, 1072 bp, Homo sapiens
caacagatgtgatttagtgagaagcattgccagataattccaactcagccataagtcactcttcaattcttccctgatgaagtctcagattttggaacagaaagaacatatgtcctctgtgtcccatccaatttcctgacccactgtgtctgtgagcataataatatcattgttattaagttttgggatagtttgtttcacagcatagttaactggacaaattgataaggtaaacttgacattttaatgacagagcattattgtcggctccaaaggcctgaacaaagcctttccttttccgtagaagcagtatttattgaaaaatttagagaataaatttacacatttagagtaggcatcattatagcaactgtcactttgaagcaccagatgtttttttatatatattttactgttactggttggtgcctgtaccaccttttgtagtagatacgaatccctggcttcctggaatatatccagatttttagttgaaagaaacacaaaccttgcctgatcagccaggaagagattttattataggataaataaataaattctatagctcacagaattgtcagggagggttggaatttaatataggaacagttgagtgtaaacttacaggaacaatcctagaaccatgcattagaactggtctgatgagaaaaaactgcaacctgtgctgttgcctgatgaacataaaggaaatccctgtactgactgtccctgattgttggatgcctctgctgccaccaatgccagcaaaatagttaggactccccctaaagcttgtcttcttagatttcttgcttccaaaccaaagattcaggagcaactgactaactggcaaaacctcctgcaggtgcatgtatcctagctggaagggagtcttggaacttgagttttctagattctgctgttaggaagccaaatcaagaaggctgcaaatttcccaaatatagcaagggtgtaaaaaggtgctgggtaccttgaaaacttgacagttatgtatgagctgggttgtattaaaagaagacaaacagaagtctggctggccacaacaatgaag

SEQ ID NO: 70260 - DNA, 1070 bp, Homo sapiens
gtaaatcatgcagaacatggaacagtttttcccactggggaacagtaatccccagtgttggaggtgggtcctggtgggaggtgattggatcatgggggaaaaattctcatgaatggtttagcaccatctcagtgctaatctcatgatagtgagtgagtgaattatcacaacatctggttgtttaaaaatgtgtagcacctgccgcgtctctctctctcttccttctgctccggccatgtgaagtgctagctctcccttcgccttcttccatgattgtaagtttcctgaggcctccccagaagcagaagctgctatgctttctgtacatcctgcataaccataagccagttaaacctcttttctttataaattactcagtctcaggtatttctttatagcaatgcaagaatggactaatacaccatatcatgaaacataagtcttcagaagttaaaaaaaaaatctaaaacctgccagatataaaaagaatcagcactgtggtatatgaactatatattaatggaagcaatgcataatcataagattgtcgtcaacagacacttgttgtgcaacaattatgtaaatgtactggggcagaatcgatggataagtccaaagccctggcctgaaaaacaaatacacattccattttaaaagatgctgggtatattttcttctgaaaaggattggtactttgactaatagctctcaggtcttacttttgcaatcacacagtaatagcatttaaatttgccaaaagaataactgatgaacctgtatcttaaaacagcacgtatctccaccagatcacatgctgatgaagacagatgtccttcaagaatcttaagagaccctttgtagcagaacttgtttttgccagaagggagttaggaaagatttcagtacatcttttggcagtgatgataagatgtagagaaacgtaattgaattttacaagggaaaactcagctgcaacgatctgctcagtgggaaagatcaaaattatgccattatcaacaccatctttcatctataaaactataggaaatacatgaacatgataaaaatcc

SEQ ID NO: 70261 - DNA, 1298 bp, Homo sapiens
atgatattgaccaatgtgagtgttgaccaatgaactcaacgtcaagacattttacctctactacatcctccatttagcatggtgtatttcttttgaatccattgttaatttcctgtcactttaattaacatggctgtatttgacattatcctaaagttttcacccatccccccaactccctttttttagcagatcttaccacccacaatcctagtgaggttcttgggctccatctgctccttcctttgtgcactcagttctcttaaacacatcggtcctttgctccttcccttctttgcatggctggtcattctacatctggctgtcatgggctgacctctgctgaacctcaagctatctggtcttgtacaaattacctactctctgtgcctcatcatcagctaccctcatttccttctcgcccctgcacaatattaatcacttgcatttctcccagtaggccttagcatgaacactgcctactgtgtgtagacacctcaacctctgcttaattgggttcactctttcttacactgcagttgactctggcatctggaccttagacatgccggccataggctcccataccctccttgcatacctttattatagtgctagttatactgtatttcaattgcccataagctctgccttatctactcttatactgttgtacctacagcagtgactggcacatacggtttaagaaatttaaaaaatatgcactgcaagttgagccgtgaaaaaataaggagtgaatgaatgaatcttataactagttgccattcaattcattctgccttgacagtgcctcttaactctgttactatctttgtcttccctcctttgctgttcagcttcctccagctgaagcttttgtttatttttggagaggcgattctgagtgctgtttggagagtggcttcacatatggtctttggagtcttgctgccttggtttgtagcctatgtggcttggtttgctcagtatgtggccttgtccaaattacgtagtctctgtgccttatttatttatttatttaacctataaatgaatgatagaaataatacccccttccacagggttgttgtgtggattcatcgagggagttcctgtgtagcactaagcacctggtatgtagtaaattataattatatgtaaactatttaaactgttgcctccacttttttttttcctttttgcaagctacttcagacttgcaaataaaaatagagattaacacagcaaacacctatgagtgcagccccagtttaagaacaaaaataacaagatagtaa

SEQ ID NO: 70262 - DNA, 1099 bp, Homo sapiens
gaagtgcggatctcagttccctgttgctagcaaaagcgctaagcggtctcactgaaattattaacaaaatacgtaggttaagcatgcagccttttgctctgcatttccccatttctgtgctcttaaaactgctattgtaatgttaaacaaaaggcactcacatatggcttgagtaaaaacctgatcaatttgttgccagaatgccttggagagctaacatttagtaagtgtaatttttctgctcacacttgcatgtgcactggcatgatcaccctctctaattcagtgatagtagctaatatttttgaacaatgtgccaggcattatgctaatgactttgcatgcattatctcatttgatctttataatgctgtgaagtagatgcccattttgcagatgtaaaaacagaaatttatagaagttgaacaacttgaccaaggtcccacagctggaaagcaacagagctgaaacccgatctgccctcttctccactatgtagtatagtgtccaaacggggatgtctttgtgaaatgggacactgttgctatttacatcgggatgacagttataaatcagggctttactatgcaaaccaggacgtatgttcaccctaactataaaccctctcaagggagagcttttgatcattgagacactaaaggaggaacctgggggtcctttttaggtcctttccccaagtttggaaagtccttagtctctaatcagattcagttttcactcagaaggggcagccttccatgaatgtgtctactgatgtaatacaatgtaaacatggtcagggctgtaccccagtccctctctacttatattatagagttttcatttgcttgttcaatatagatttattgagcaccatgggttgggtattttgatgggtactgtgaaaatgaagatgaaaaaacatgatccatgccctcaaataatttataatctagtgtgaagactaaggccaaaaattaaggaatgggcagtactaaagggaaaggggtgcacagttgcaatgggatcacgactggaaatgtgaaaggggaagatgagggagccccaaaggagagtggcattatgggttttcatgtgg

SEQ ID NO: 70263 - DNA, 1793 bp, Homo sapiens
caaaaaaaaatgaaaaaaaattagctgggtgtgatggtgtgcgcctgtggttccagctactcaggaggctgaggtgggaggatcacttgagccccaggtcgaggttgcagtaagtggtgattgcactactgcactccagcctgggcaacagagagagaccctgtctcaaaataaaataaaataaaataaaaatgaataaaaaagtcatttcttaggtttgtgcccctgaccagttgaatcagaatcaccggggttagaacttgatttctgtgtttgttaaaagctttttgaagcctagatgattttgatgcacaccaaggacagacagctgctgatctgggcctattgttatctaaatttaatttatatttaactacagtagcatttttttctcttttggtggagggtgcatctaggaataaatatcttctctggctaaggaaaagcacttttaacatgggatccacctctctgtttcttttagtatattgaacttcaaagtttttaaagaaaagtgtaagcttataatcatttcttagaggttagtttcttaagagattttgtattttagaatagaaatacatgagacatactctaaacactctcaaagcatgtgtagaatgttcaaattacttaaaaggtcaaataaatatctgttgtaaatattcttgacctctagaaaagaaaacacaaaagacctagatggagatatctatagtttatgattatgtcactagaaatgataacagtactaacattaataggctccttatatgccaggcagtattttaagtgccttaaggcagacactcattcaatcctcataacaacctgtaaagtgggtacattattaatcccattttacccctgaggacgttgaggcacagggagaaaatttgcatttataaatattttgtaaatattataattaggcattatgatttgaacattaatccttctttttcaaacatttctatgcttcagcagtctttcttatttcctaatactgctatattttgaaaagctaactttcattaaaatttgttttactcctaaggcaaagccagaaggcgaagtcttcaaacaactttatctcctacactgacgcagttagcaaagccagaaaaacaaagcataagatcaagtggttcatgcaccacagttttaattgctttactttctcgattccccaactttccagatttgaaattcatttatctaaagagtgatactgggagatggtgagatagagtgaaaagggcacatggagacatagacctctcgtatagctctcacttaggtgtgtgatcttgcaaaaattcctatacctgttgagacttaatttatatgctataaaatagggttagcaatagtaataacagtaattaacaacagtaatatcagtatctgccatcacttcttcacggtattgttgtcatgatcaaataaggtatttgttagggagtgctttttgtggtatgatgatatatagatattaatctttaaaattaattttatcttgctcttattgttactgttattatcttatttttgcttagtactgtcaccaactaaaagtggttccacgtgtccagggttggtagaggatggatgaatgggtgctgtagatgggagcccagctcaggagtctcctcttatgggtcgttaggagattttacatttgggaatatgagagcattttcaacagggaaacggctcagttagatttgctttcaaaaagaaaatgttgactgcagagagagaagagatggggcaggttgtaactgggcttc

SEQ ID NO: 70264 - DNA, 1018 bp, Homo sapiens
ttgtagtagagatggggtttcactatgttggccaggctggtctcaaactcctgacctcaggtaagccacctgcctcggcctcccaaggtgctgggattacaggcgtgagctgccgcacctggcctgaaattatttttaaaaaggaatgtatgtaccacatccgtgcacagacaaacaactagacttacaatagagaaaggtggcagataggaaaaataagtttgagactggactctggcactgactttatttctttggacaaatcatgtaacttcttagagcttcaattttttgtagttcaactctgtcttctagcattgcttctttattaatgtcccattatgattataaaaggccaaaatgtttatttaaatgtagtcttcaaatatttttagggcactcttactcagatttgaatttatttatttttatttatttattcaatgatatttgatttatttaaatgtggcttttcacatttgatgatagcaactgtgttcagtagaaaaacatattataaactcacaatattttagctcctgttagcaaaaataggaacttgaaattctctagatctgtggttcctaaccctgactacacattcctgtaacctaaacaggctttaaaaatgtcagttctggcagggcaaggtggctcatgcctgtaattccagcacttttggaggccgaggcaggcaaatcatctgaggtcaggagtttgagaccagcctggccaacatggcaaaacaccgtctctactaaaaataatgtgaaaattagctgtgcatggtggcacatgcctgtagtcccagctacttgggagcctgaggcacaagaattgcttgaacccaggaggcagaggttacagtgagctgagatcgcgccactgtactccagcctgggtgacagagagagactctatcttaataaaagtcagttcttggctaggccctgtggttcatgcctgtaatcctagcactttgggaggctgaggtaagatgattgcttgagtctaagag

SEQ ID NO: 70265 - DNA, 1744 bp, Homo sapiens
ctcagtcatattttctaatggcatctcctcatctgtcagctctttctcaaggtactttcccatgagagagaaggaaggaaatctccatgtcaaagcatttttcttcctactgatttaattttatggtttttatccttgtcgtctttaaggagcatggctacctcaatgctctgtggagggaaacaccaaacagaggctcatccctcccagtgtttagcccctgtgatgaggaggatgcagatactcctcttctactttgtattcttcggtcatcattctaaaatcaccacatcagcccacatccttctggtgcaaccttcagatgggagagaaatcctttcttgttacttcctgactgcagccaggccatccactgtcccatccttctgaaagtatgtgctttgtggccagatatgaacattttcccaggggtagctgctctgctaggttcttgatacgcaaaacttgagcccttgagaggttctggaccattgagtcccaactgcaacctacttaatatttcatagtaaggctatgcaaggccttgtatgaattttaatcattcttgacattatctccaaaatggttgggacttttgctagtgcttgtctaaatatggactaaatcttcatggtggaaaaaaatataaaagctttaccttgctttgagatcttttcacttttacttcattaagacaaattccttattgaagtatacatgacttctagttactttataacaattataaaattgctgtttaaatgcactatgtaattttagaataacattaaaatatagcaacactttactactttccccatttccctttcaaatccatatgttctctgtgatgttaagtctctgaggaagacctcataaagtcattgagcatccactggtgatcctgcaagataaaagatccacagcctgtgtttcaattctggcattaatgaagttctttctagacacagcacacctgttaccctgtcacattctctaccctcttgctaaaattcttctttaggcagataatttctttttcagatctaaagatggttaacccatcagtatgtataataaactcatttgtgttccagttatgattatttacatttattaaaattttatctattcttttttcccctaattttatattccctgatgctaactatttgatactgagcagagaatagtatttagttgcagctgtagtactttcgaatgttgtgtcatctttctctgacacccagactaacaagtaagttctttaacagcattactcagcattatccagttttgacttgtgttcacctgtgttcatgttaacagcatcagtgttttcacaggcaatttttttaaacctaaattatagttaaaatcagttttacctaaaagttttaattttagttgggtttgcattcaataagattaagcttagatttctaatcgtcataaggtaaaatatgtttgtggttcaagcattgcctttggagcaaaactgacctggatcggaaatttactttgccaccaaatggctatgttcacgagcattttaagttctctgagctggccgggtgtggtggctcacaactgtaatcccaacattttgggaggctgaggtgggaacattgcttgagcccaggggttctagaccagactgagtaacatagtgagaccctgtctctactaaaaatgtaaatattagccaggcatggtggcacatacctgtagtcccagctattgg

SEQ ID NO: 70266 - DNA, 1070 bp, Homo sapiens
ttttatactgtatggttccacttatataacatgttcaaaatggaaaaatcatagtgatggagaacagatcagtggttgttggggtttagggttggggaagggtatacctgtaaatgagtggcataggatgtttctttgtggtgatggaacagttctgcatccattttgttttttgtttttgtctttgttttgttttgtttatgaggcagcgtcttgctctatcacctaggctggactgcattggtgctatttggctcactgtagccttgacctcctaggctccagcaatcctcccgactcagcctcccaagtagctcagaccacaggtgtgcaccaccatacctggcttatttaaaataaaatgaaatttttgtagagatggggtctcatgttgcctaggcttgcctcaaagttgtaggctcaagcagtcctcctgccttggcctcccaaaatgcagggattgcacgtgtgagctaccacatccattccagttttgtatcctgattgtaataatgattgcacaaatccatatgtgtgataacatttcatagcaaaaatgtgtatatatgtgtatatatatatataagtgagtaaatgaaaagagtggtagactcctgaaaaggtctctcatttagataaagtattgtaccaatgccagctgtgtgatgtactatggttatgtaacttgctctcattggtgagacctgggagaaggatacacagaatttctctgtattgtttttgccatttcttgtgagtctaaaattatttctaaataaaacattttttaaaaaaggttctctctggaagttatgttgaatcaacactgaagggacaaaggggaagcagggagaccaattaggaggctgctgtagtcatccaggtaagagatgatggtggctgggaccaaggtggaattggtgatggaattcctacctgtcccttccaggctgtgcaatgggacaactttaagagccagagtctccagctgtcactaccctgtcaccatccctactatcatctctggaccccatatttcacctgtgctcaccctgacaccacttctgccc

SEQ ID NO: 70267 - DNA, 1019 bp, Homo sapiens
cttccctgtggattgcacacacacaaggcatttttaggtataacagactttattgaatgtttggggcaacagggatcagttagcagttccatcaccacaacacaacctcaaactgaatttagaattttctgtttctaaatgtcctccagtcatcccatcacagaattctcttaggtcacccttgtagcaagctccagtctcttgcagcttcatcctgctccagttctagctatactttaaatacagtttttctcgcattttatgcacagttgtctagctggcaactccttatttgacttcatgcctgcctttgtctaaaaatttgttaatatcttgctaaacaaaatgaccattgattctttaccagtatagcagaactggcagtgacttttttctcaatgacaggaattttaactttcccctctgatataagaagtggccatagtcattttgagttttaaacacatttattatttaggctaaactagtaacaaaaatgtattagtgttgcttttaaaaatatgataagaaacacagtgtactatggagtgtatataacttcctcatcttctggtaaatgaacattaatatgaaagtaaaccagtaccactggttacattaactgcaggaggtagtggtgggtctgcggccagctttacctttggggagaaattcttgaataaggcagtggttgctaatcaaatctcatttctgcttgttaatggtgcccagtagagaacattacccatacctcagtacagggctcaggtagaaacaaggggagagaatggatccagaccaagtgaggctgtgacagttgactactataagggtgcattagtctgttctcacactgctacaagagatacctgaggctgggtaatttataaagaaaaagagatttagtggactgacagtttcacgtggctgggaggcctcacaatcatggtggaaggcaaaggaggagcaaaggcatatcttacatggcagcaggcaagagaacgtgtgtaggggaactg

SEQ ID NO: 70268 - DNA, 1785 bp, Homo sapiens
agcacttggcatgtttttagagagtaatttcaaggtagttattgtaattgttgctaataaacacactacattgggcacaagctggactaggaaagagtgtcataaaaagaaatctgtaacgataagggattgtaaattgctaacgaatatcctaacaaaataaagcttttattaaaattaagaatctctttctcttatgaaagaactgggaaggattattttagctttacttggcataggctcttcatgataagaggagtgtatatatatgaattttgagggcagcatccagagcttggaaaaggtccagagaagagcaaatgcaattatcaataggttagaaaattggccctttaacaaaaggttaaaggagttggatgcatttagcctggagtagaagcaatttaataactgttaaagagctgttattaaggaggacactgaccaatgttctctctccccatcgaggacacaaataaaaggaattgtttaaactggaagagaagagagggatttagattaaatattaggaaacatttcttaggagtgagcatcattaaagaaaaaaatgccataagctataaccagttcctgaggaaggctaaggactctgtgtctcgggatattagtgtagtgggcacaacacaggctttgaactcagacagaactgcttttgaatctcagttcttgcctcggctaacataaataaaaggatcttaaaaattcctccactttgtagattttttggggaatgtggaacatagtatttggacacgcatttaggtgataaaggtgataaataaacattattttcccctttaactactgtactgttgcttgagattttacagtacacaggttaggcaatgtattcttgtcagtactgattatttttctttgttttgcgaggatttggcttttattttttattgaaaaatggatcctagcaatttgtggcggattattattacttggttttacaaagccataactggtgtgtatgcatgtgtttggattcacacttacatcttgaacaaggaaacattagaaaggtatttcaaaatcacagtaaaaaatacatattagaattcacaaaaagaaatcactggtctaaacacggtatgcctgaggcatagcgttaatttcccctgttttgccataattggatctgttacctggtgtactgccatttcatcaactgtttgtgaaaatctctatttagagaaaacccttgtctgtttagctcatccgccaccatcatgactgcctcccatgcatttgtaggttggtctttgaagcatatgttctgaagcggctgattgccttcctcagctgtaacctctgggtcttaattaagggaacattgtatttttctgacctaaatggtattatagcatgtgcagttgttaaactagtggagttttctgtattttcagaggctaataaggaggcagaaactctgaaagttgctctgtcttgattctcacctccatggaagactccaaaactgtgaccttaagctttctccctaagtaggggagtgtgattcttagctcttggggcagggctttagggcactttcagtgagcgcttatagctctttcatgaaaagagcattgacacataccgagtgcctcctgggtggtgggtgcccatctaagtgcttcccatgcattgattcatgccatcttcccgacaacactgtgaatttctaactgtttattattgttcacattttatagataagaaaatggaatcacagcaaatataagcaacatacccagg

SEQ ID NO: 70269 - DNA, 1022 bp, Homo sapiens
gtctcaggtagagtcttatagttcctgattgtaaaggtcaatccaagtttattaaggctactgtacatcccagctttcctgacatagccttgaattgaagggcttttattcttcatcataaaaatgatctcttaatgtgtgccatcttcccttgtaagactatttgatacctttgcaaacaagaaagcctcttgtcaaaatatataatgtgatttttctatttggagggtctcaagaagcataagcagaactgagtgaaatatggagggcctccctttccaccagatgtgtccacacggagtgattgagtggtatgccctgtggcagcaagagtgacaagtcttaggcctacttctgctttcactttttcttttgtctattgcttaaaataactgagctttatattttgttcccctcatcatgtgaaattgcagatgtttactggtttcattctttcttttgatgaactaactccccctctaatggatggtttttgttttcaaaacaaagctgtacatttcagtttgaatagctccctctgatataataaagttgttcttttaacccatgtaatcaagatttcctttcattttaaacttaaaaataatttggaagatgtgagtgataaatttccatgcagctgatttaaatattctggttcattttcattcatgtatctctactcccatgggagaaatgtcaaattagggaaatagcagtgcattcccttcctactttcaaaaaacatgcaggatttaagagccaagaccgaaagtattttgtcttagcttttagcttagaaactgctagttgcctacccaatatccattctccatttactcctagaaacctgatgtttttccagttggcaatgtgcccagatacacactcttatttcctagcttcccatgggtggtcaatgagattaggtagaagtccttgggtgtgctttcgggaaggctatgtgaagcaggctgactcagttgagagggaaatctttttggcccttcccttcttcctcc

SEQ ID NO: 70270 - DNA, 2803 bp, Homo sapiens
tctcctttgttgaggacaccgcagcaccatagaagtagccaatcttttaaactctcttttgctttaccaataaaaagacaaacaaaaacaaagcttacttttttttgtttttttttttgagacggagtctcattctgtcaccaggctggagtgcagtggcgcaatcttggctcactgcaacctctgcctcctgggttcaagcgattctcctgcctcagccccccgagtagctggggctacaggcacctgccaccatgaccagctaatttttgtatttttaatagaagatgaggtttcaccacgttggccaggatggtcttgatctcttgacctcttgatccgcctaccttggcctcccaaaatgctgggattgcaggcgtgagccactgctcccagcccaatctgaacattttaacaagcttcctatttaaaggaatggggtttcataagcaaataactaatatatgatgaactccccaattagatatgtcttttagacacagtctcagaatataaattcccagaatttcatacacatttctaaccttcattttttaaattcataattgaaaacaccatcagccaactctcagatcaattgattttccatctgtgatccttgcttcttatcattttgactaattaatacttccattacttccacttttccatgcagttcttggccagtgggcagggcagcaccaccatgcaggggtttgaaatatttgttcaataactgatgtgcaaaagtctgggttatagaaaggttgaaaacgtctctactaagattatactacagtgccctctagcctatatagcagggagaaaaatgtttccccttcctgctgttcatttctagtggcacattacagtatttgttatataaagggtatgaacctgctattaaataccatacttcctaaaaggcagacataaagttgctttcttatagcacacataaaattactctcttaaacagtcagtgccttcttgctgaagaaatacccagtatcctaaagtgtcaacaggtgcagaaacactgcactgctgtgtctagggactttctgttgaaaacctttgcttggctgagtaaaagtagagaagagtttaacttccatctctcttcctcatcctccatcagaaggcagcagtccataaaccctattcttaagtgtggcaagtgcagatgcctttggtgatatctaattatccttgatctctaaatctttattgtctattgttaatattctttcccttcatatcattttgggaaagaacaatatctatagatttaagcccttctgtgtctatgttgttttacattcaacaaatagactttaaagagaaaatgtagtgtttcctaaaatctttctttgattacttgatatctgtggttttctttcctacctccccttcaaacagaagccttgaaatactaaaaacttaacctcaagaatttcattaggcaaagctcacaatattttttttggagatattctttaaaaaataatttatctttcttcaaaatcttcaaattgtaaaagtaggtgaggagtaggacataatttattctactgtgttggttaataaccttgaaagtttacttaaaaggcagtctctttcctgattatacaaaacatttaatgggaggaaaaaagcgctcttgaagtattgccatacacagacttttaaacttacaaaaaaaaaaaaaatactgcagcacgtttacactctgccataaagtactataatgaataattaaaacaactagaattgtcaaaataaataactatggattgcggtgtagtgctctaaatttttttaatgcttttttgcatgttgatttacatagcatagtaataagtcaaggatttcccagtcattaaagtgaattaacaagaaagtattttaatgggtagttttgtcttatttcagaatttgactagttatttaattctatacccttctcttgcatttactctaaaaaaaactgtgtttgtataaataatgtatttaaaaataaacaaatcagaactccatggtctgaaaaacagaatttagcaactaatttgtcacgtatatgtgaagctttccctagtacctcacttccaagcattgaagaaatgaacatttcacgcagaacatgtatctttactgttcaataattcaaaagcgctaacaacaatatgcatttaagggtctttatatttcattcgaaatacaagctcttaaaacaacaacatcagtatttctgtgtctatatccaaatatattaaatgatgtctaagtgaattttcccagaagattgtcactatttcccatattaagtcattggtatgaaaaattccagttcactttcatctctccctgtatctcttttgcaatattccgaagtggcctacttggtaacctcaactttgagctgatgaatgaaactggcagttttcacgagttgtcttctagtcctggagcaaaggactgagtataggaggaagactgctgaatgacatctgggagactgctcagctgatctgagatttgaagctggtggtgttcacatacttctgcaccatcccagaatctttgcctgaaaccatccctcaggccagctatttcttggaggtctatgactaatgtcacattgtaaaggaacaaaagtttttaatccatgttggtgatatgattggcattctcatttaacctcataatatattaatatgatcaaattttgctaaatatgtgaatgtaaatccaaaacagtgaattgttgagagtgggaaagaagtctggggaggtgggagag

SEQ ID NO: 70271 - DNA, 1612 bp, Homo sapiens
gaagggcaatccaacactgttcttgtcactttgcatgtcttcttcttaggttggcatgaccctttctccttgttccagccaccctcccctcaaataattcagaaaaatgaatggaacttgttgttgtgcaattgatgtaggaatctctttctgttttacttttctacctgttttctcccctttctttgttgttatttgaagtttctcatcatatttccaacctcatgtagtctttcttcacactacccccttctatcgtcatctcattggtacagcatttgaaattactggaatatgacaagtgctgctgtccccatgtctttggaatgctgaccccccacttcctggaacactcttgctcctccttttacctgacactaacccctggtcaccacacagatctcaacttgcctctgcttcctcctgggaacctttcctggccctttagctaaggtgagattcatttgctgaatgtaacccagtccttcttatctcttccttgttatgcttaatgtacctgttgtggcttgtttaatattcataaaatacatatgagcagaggccatttatgtcttgttcaatgctatatttccaatgcctaatgttctattactataagtaatgttgagttgaacagatgagatagaagtactaaattggcaaaatcttactttattttccccgacccagttcaaatgtcatctttctttaaagttctcctccccactagcaaaaatgtacttctctcatagaacttacacattccatcatgattgtttaaaagtcaactaacaaaaaatgacaaggttttgaaagacaagaaaagactgaggaactgtcccagaatggaggcgattaaagagacatgatgacaaagtgcaatgtgggatcctggagtgaatcctggaacagaaggaccatagtagaaaaactggtgagacaaagtttgtagtttagttaatagtattgtaccaaggtcaattccttagttgtggtcattggtatgaaggttatgtgagatattgacattaaggcaagctgggggaaaggtctatgggaaccttttctacaattttcaatttttttctcaaggtttaaaattactttaaaataaaaagttaaaaagaaaagccaactaggagctttctatagacaaagtatatcttaagaatgtagatttctagcccctgatggtgtccagtctagtaggtgcccaataaacaccaaagtaatttacccttgcttgctcccattttggttatttgcagtctgttttgtgccttcccgttctggtcttacctagcaacagcttggctcctttagggatgacctagtcccagagtgcatatgcttgagaggccagtatcctgcctttctgtggcaatgatgctgtactacatacatcctatgtattggtaacttgctttcatcagtactgagagtaataaggaagatatataaaataataagagaaagtgggaaatctgggctcttttctaccttattttatttttttttgagacagggtctcacttggttgcccaggctgagttcggtggtgcactcacaactcttcagcttcgacttcctgggctcaggtgattctcccacc

SEQ ID NO: 70272 - DNA, 1256 bp, Homo sapiens
agaaatactcctatgttttataaaattaagtatgccaacattttggaatattatttaaactgatcattttttaaaagttgtaatcattacaaagtaaaactaaaatgtaatgaaacatagatgctggctatgaaatccagagatgtaggtaatattattttattttaaaaatgtagattgatgtaattactttttctagagtaagctgaagatgcaggtttattcagcgaaaaccagagatatagttattgtaggcaacatatctcagatgctggtgccaggaattgatggcagctggttgcacactgtgttcactccagtgttgctcagtgcattgaactaagtattgttaataagggatgacacattgaacatgccaacaaagtaacatcagtaaaatatttcaatatacttgtatgtttttggacaccctctatattttcattaattttgcatgataagaaaggaagaaaaatgagccctaatgatctgtggttatattttattatatccaatttcatctacatactattttcttgattctaggagagcaccaggaactgctcttacaattatcccaaataaagctctcacatagtaggagtcatttcttcaaaccttctctctcccaaaatatactccctttttttcttagttacatggagccatgatataataattataaacaaagggtatgcctagagagtagaatgccaggagaagagaatgatgactgaactccaatcttaaaaggcaatcttgtggaaagggttagtggactgactctgtgtatactttgcaataaaactagagccaatgggttgaagccttcagaacatagatttccgcctttaaaaatttttttctaagagttataagtgttaaaagcataatcaaccattttgtagaatttccccccagtggatatatttaagtagagcttcaaagccaatttccagatattaaagcacctgttttatgggatctcaaagctccagtttctcccactgttgtagcacctgataaatcaccatgctctgagttttgcataatttgcttctctacccatctccagggagagccccttgagggtaacaaccatatattacttatttttgtatccccatccattagcacaatgcttggcacgtagtagatgctcaataaatgtttactgaatagatgaaggtatgaacggctgcagttgaaataatggttgaaaaatgttttcttcatgttgtagaacctgtccttca

SEQ ID NO: 70273 - DNA, 1050 bp, Homo sapiens
ttgggaggtccacattgcttgtgagctaattaaaagctttgagaagttttggagtaaagaaatacatggataaagagtattatttgttatggtattttggagtttcaagcacttgtttcaggtactaaagcagatccaaagctgctttttgaggccaatttttgccctagatgctgtggcggccgacttgtttggcaacctcttatccaggtgaagattgtaggcagtttttcagcttctataatggagtgttaattttgcacattcatgtttggtatttgaagttctttcaggcatgaacacgtggtacctgcattatgggttttttcattagagtttaaacttgaggtaacttccatctatatcctgtaacagccacacctgagtagagaaagaaaataatagtcatgccttttctattaatttaggttccgctcataaattaatgatcatggttcatgagagagagatattccttgacttcttcgattgtagcccccacaaaaataccctcactagatgacattaatgttattttcttaaattttattgaagatatatgtaatacataacattgttaggattattttttcagtcttctattgcatatttttgttgaagacatattactaaatgtgccttatttaaattccccttattaatactccttgataaagtctgtttgaaatatagtaataaaatatttgtttttcccttaaaaagtattttatcctatcagatatgaatcaaatataattgaatattttttcatgttttttctttttgcctaggctgccaggaagatcaaagtcacatttaatacacatcaaacatcatagtaatatctatacattttttttagaaaacaggcttctgtatttcttcaattcctttggtacttaaattttgtagtgaaagtgaaatacttaatatttaaagtctgtgtccagaaaattaatcttgaaaccatttgaatggatacattttttcatagatataacattatatgtgtgttagatttcacactggccttcagagcttcctaatcca

SEQ ID NO: 70274 - DNA, 1091 bp, Homo sapiens
gcatcccagccccttagggcttggctttcctgctgtactccagcctcagggagttgatgtacagatacctccgtgttatttgcaggggccccaacctaaaatagcatgtgggactttttgtccactaattttgaactttttttaaaaacatacttgccattttcctttttattaggctttctgatacaatcattttatatttagggtagaggtgggcatacttaggacccataggctccacaatatgcaccattctgtgtgtgcccacacatgcgtgcatgcacatgcccagagtgccactagcccacctgcccttgcccccaacaaaagcatgcttcagcccttctcaaggaccagccaggtgccttctggcatgatgagtttctcacagagacctcctgtgagaagaatattctgaatgcacttcctctccctttgcttccaattttggctgagtgttaataggtgctcagcaacctgaagggagaactatattttcttcctcgtctcatccccaatgtctaactcagtgtctggctgtcactcattatatttgtttaggcagcagcaggaagtaatcctgaaagcaattctgaaaagtcaggcttgaggcctcacaagttcattgcccagcatacaagacataggccccaccctgtttaatatctttcttctcaacagatagcctcacatgcaaaagctacacagttaggagatctgtgccaaatctggaatttgcagtggctgatgacagacagcagtgtcgattccgtcactctgcttgattcccacccacgtctgatgcctgctgagaacacactctgtgtgattccaccctgtttccgtctcactcgcctttgtcaccatacactcttcttttctaaagctagctggctctttgtctagacagctccctccctcatctccagatggctttgtctgggaagcctacagtcttttccactaccaccccaagatgcagaggcaattaaatcaggctaactctcatggtgttactccagttaataggcatttaccaaacagtttggcattttctagaaagaaaatgacaacattttcctcacttagtc

SEQ ID NO: 70275 - DNA, 1291 bp, Homo sapiens
aaatgagtgagtgggtgcagtcagtgatgtcaggccacctgtgggtgccccatccctactatgctgagttcaaaagcaggagcctgcagtactaggagaaatccatgcatggggcccagaaatgggaaggtggattcacctgggaaatattttaatagaagtaaagaacaaggccaagaaattgctcaagagtctggctaggaggtagcccagatacctttcaatgatccagataaggcttttgttcttgtgtactgatcttatgtattgacatgtcaggagccaggagcagtccctttcctgtgtattttgtgtggaatcttgcctggggctttaggcagttgacacatgttgggtttatggaaaatagttttctttgctattttgtgtctgccaggacaacatattaggtcggaggctatcatagcattttctttgctgttgtaaacagttctctgagctgaagggcttctgaagtcatctattatgtccatctaggtgagaagtgctgtctcatgactggtaacaatggttcacgtatcacctgcctctaatggtaacatcaggacctctcatttcccagtagtgactttaatttcctgtcaccatttcctagacggttatgttcagaggctgggttgtgccatggcacatgaaagagaatgacaggatgcatcctcatttcatgttacaatttgccagaagatcattagagaagtccgtttatgccttactgcagatgaacggatcacatgattgcattcccattatttggcactgggattgaggtattagggaggtggagagtattacactcaaaataagtacaagtcttagtagggcagcagtggtcctcatggacactggtaagccgagtagagattcccccaagatgataaagttttaaggaaagccttttgggctatgggcctgatttatgtctgagttacataactttctttcctagacacataaaaatattaagagtaatcagtgacctggtggggaagaggttattcttcatcagacatcaaaaggtccccttagttcttgggttccttctataacttccttgatggtccttttccctccagtcactggacagtgcttactactccttgagcttttgggacatgaatgtgacatgtgtcttgtcatcgtatctctcacaacatccagctgcttgaaggagatagaaggcatgtgtgtggatataatcaggtggttgttttttaatcaggttgatggcaaggaccaggggtgactgcaaaggagtgattataccagtggg

SEQ ID NO: 70276 - DNA, 1344 bp, Homo sapiens
ctgggttcttactctgtactgactcaaaagtacaagtgggtttgaggatttggtggaggcggctgtggcagcctttatctgatgatttctactttattttttctgagatcttctgcttagatttgagtgggggtagataaaggggttaaaagtttgtgaagagttgagaagaactcttgttgagtaggagggtgaggtgatggtggaaagtgaatgggttgttgagcattcccaaggaatcagttgatgctctggactatgacttagtgagatatctaactgccaaataatgtgcagtatggcaagacaagttttttgtctgtttttgagacagggtctcactctgttgcccagatggagtgcagtggtacgatctcagctcactgcagcctcgactttcccagttcaagtgatcctcccgctttggcttcctcaaatgctgggattacaggaatgtgccactgtgtcagcctaagacaagttttttaaaaaggaagtcatacaacctgataactgtttatatcaattgcaattaggttcagctgcttgtaaacccaagctactagtcatttaagatagaggtgcatctttctctcgtagaaaataaatgttgaggtaggtagcgaagggcttgtatgatattcatacagtcatcagtggctcagctttacctgcagcatgggctcaatcatatatatcaatatttttttctagggattttgctagatcttaaatggaatttgtttaatgtatagtgcattcagcacatatttattatatgcccactgtgtgccaggctcagagggagatcctgtctttttgatctacttttcttaggccaggctttctatcctcaagaccacctcatattcacaagataattgctggagttctggccatcatgcccacattccagatagccagagggagaaaagggggaagggtaaaagcagtcaactgagtcagttccctttgaagtattttcccagaagcctgtcaatgacttttgctaaaatctgtttggatactcttaagcacaaaggaattcaggaattatgggtttggtttttattttcttaactcaagcacattgctgcctgtaactgtataaggacctgctttttaagaaaaagactggatatttcataaatacttgcagtctgcaacactttcctactcagaaatctgttgtacatccaacatttggaaaccttagtttaaaatttgacaatgtatgggtacattgtgaaactttcttacaagctaagaatgtaaatagctgccactgatttctctttaagatgacagagaacacggagtcctggttttatagaaggtgggtga

SEQ ID NO: 70277 - DNA, 1046 bp, Homo sapiens
attcttatcttgctctcttaattttttttcttttttgagacggagtctcgctctgtcgcccaggctagagtgcagcggcacgatctcggctcactgcaagctccacctcccgggttcacaccattctcctgcctcagcctcccgagtagctgggactacaggcacccgccaccacacccggctaattttttggtatttttttaatagagacggggtttcaccgtgttagccaggatggtctcgatctcctgaccttgtgatccacccgcctcggcctcccaaagtgctgggattacaggcgtgagccaccgtgcctggccgctctattaatttttatctggcttctcttatgagtgaggcatcgtttgttttgtggtacctctcaatgttctctcagttagccagttcagaacaagataactcttaaaatcagctaactagtgcatttccataccaagttttaaggaattatactataatatgttgctatgcccagagaagacaacaggaattcagagaatgtgattgcctctttcagctaatgatgtgactctaaggaagttgcacagacacatctctgtctctctacctgcagcatgggccccaacatatgtatcaatagtttttcctagcgtttcccctagattttaaatgaaatttgtttaatgtatagtgccttcagcaaatagttattatgtgcccactgtgtgccaggctctttgcattgtggtgatattgacagatatgatgatatagacttaaatatagtgtaatatgatgtagacttaaatacagtgtgaactaaaattgtttcagtgctttctgtgttccaggcattgtgttaaaatatgccaaaaaattggctgggcatggtggctcatgcatgtaatcccagcactttgggaggccgaggggggtgaatcacctgctgccaggagtccgagaccagcctggccaacatggcgaaaccccacatctactaaaaatataaaaatcagctgggtgtggtggcacatacatgtaatcccagctactcgggaggctga

SEQ ID NO: 70278 - DNA, 1021 bp, Homo sapiens
tgttaagtctatagaaacaactagagatattttattcatgagtcctaatttgttccttactggctgcacccaagttctatggagtggcaatttccttcccgtggctggaaacagagagggactgaaacttttcacttagaaaatattgacggtgttcctactgtgtttcaaaaactgaaacccatgggctggtcacagaaatgaatgataaggcagggatgatgaagagcatagggacatgtcttattgatcttatttatcttcaatcaatatgtgttctattataagctctagaggagtggggacattttttgctgctttgttggctgtgtatctctaacatctgacacattgcctgacacacactgagcataccacacatacttattgaagtaatatttcttggagccaaaatcattaatgattcttgaaaggacaatgcaataataaagggatgtataacagtagctcacaggcttgaatacttggatggctctctaaggtaagaaatctaaggaggtcagttaattccttctcacctggagggtatagacaagtaataaaggatttttgatgtcagaaaagctgtgaaaccatgatataatgtaacaagttggagtggtgtctatgtcgtagaagccctttcactcactaagaatacttagcgtagcacctaacacatagtgcacatttaataaatcattgatgaatgaatgatgagcattctaattagatttgggagaatattgtgattagattaagtagttcatatcctactgtgcctgcatgcttttatttttttctttgctcttagtggtgtgatttgtgatattattagtgctttgttattttaatagagttatatttctagtggaaaaatgtggcctagtgaaatgtgccttgtctcactattccatgctgaatgagagtcagcttgtgtgtagcacacggcatagactgggcacctcacaaattgccctctttagtgtctgaaggaaaataacttgaaggcctactaacc

SEQ ID NO: 70279 - DNA, 2341 bp, Homo sapiens
gagatcaagaacaacaagaaagtaccattaaaacaaggtgctcttgtgggaatatgaattgtgagagaacatgttttgtacactttaggagaatgagtaatgctgctgtgggaggatagtagagttaggaattaaaaaaagagattctgttagaggtaacaaggtaaaggttatcaaaaaacaacttattctaggaaaaaagggttccctgagtactattatgtaaatctgaatacttagatctggactatagcttaatattatgcagaatagaggctgcttagtgacatgtttagatccctattcaaatatttgcaagtttagaagggaagcaaattccagcttgacatgaataaacattattgtactatatatgtaggtggtttatttatgggtatgaatgtacatttatgtatctattcactaaaatataagctccctgagggcagagatgtggcttttttcatttcatttcattattgtgtccttagagcctagaaaaatgcctggtatatagtagcccctcaattaaatttttttggatgaactaaatatgaataacatgtataccctggttaaactgtataagggaaaaagcttaataatagatattctgcatttagtatagtaaatacatttcaaaatctacaaaatgttaagctaatattacccaaagactagagttatgttttagaaaaatctcagcagtggtttccatataagacaatttatttttagcttaattgtgcagaagtgatctcatcttttattgtggatttctctggagaattaatgtgttgatgatcctgaacctctatgcagctcctctgggaagaggtacatacttagtcatgcctttatattgggataaaacttggaaaagtggtgccagcctcagtttgtgttgactgtattcaagaaagaagttacattacatcagcaagagttagtttgctttggaaatttatgctcagccagtaagtccagtatccagaagaaaaattaggctaaaggctgaaagatattacacatatgaaagattgttaataaaatggaactcgttacctataggaacaatatcattccttgctagtttcattgccattaaaatacactgatattgggctgggcacggtggctcacacctgtaatcccagcactttgggaggtccaggcaggtggatcacgaggtcaggggttcaagactagcctggccaagatggtgaaaccctgtctctagtaaaaacacaaaaattagctgggcgcggtggcaggcgcctgcagtcctagttacttgggaggctgaggcaggagaatcgcttgaacccagatggcagagattgcaatgagccgagatcatgccactgcactccagcctgggcaacagagtgacactccatctaaaaaaacaaaaaacaaaaacaaaaaacattgataatctatagtctttccctctgattttagctcctcggaatttttttttttttttaaataatcctatccttctgctcacttgactaagagactcaattcagggttgatgtccaattaagtgacctattcgcttaagtctcagagcctggcacagaggagccctcaacaaatacttctttcagtgaatcccttgtgtaatgttaaaatattgaagcagctggtgtatgatcatgatgatttctttgcaggttaggaattagttcatagagtgatagggtttctagtttattaactttctcaaatgactaatggagtaaaatcagttaggtattaataaacagttcgactaatgggatgaatgtctgtggttgcaacttttgttgctcctggatggaagaacatcatgaggctttctttggggttgtagctcataactgagatacatgatacacttaattcttgggtcctaccacctttttcaaatttgtggccaggagcctttatattggtggccaggagcctttatatttatttaatattgctgggttgtagttaataagaatagatctttgatggagatatgaaaggaaatatttaatggcttattacttgtaaaaatacatatatttttacgactattcaaaagaattttacttttattctaccataatcttaattttcaatgtctgtgataatgcttagccacaaaccatacaaatgtttgtttggttgtaagaagccttcaaaaattggcacataacccatagccaatattggggccatataaaaatttaacaaaatattaaaaagagaggtcctgaaatttcacagtgattcagcagagttaagaaagacatttttggatagtgttaaaaaaatcacggaatcttgagtcataatgtttctt

SEQ ID NO: 70280 - DNA, 1145 bp, Homo sapiens
aaacataaaaataaacagtgaaattaattttaattatgtgttttatttagcctaacacatcaaaaattattattatcattattattattattgaaacggagtctcgttctgtcaccaggctggaatgccgtggcatgatctcgtctcactgtgacctcacctcccgggttcaagcaattttcctgcctcagcctcccaagtagctgggactacaggcgtgtgccaccatgcccagctaatttttgtatttttagtagagacagtgcttcaccatgttggccaggatggtcttgatctcttgaccttgcaatccgcctgccttggcctcccaaagtgctgggattacaggtatgagccactgtgcctggccaaaaattattttaacatgaaacgaatataaaaattaacaggttgtgttttattcttttatttatactaaatctttgaaatctggtatttattttatacttcaataatatgtttcaattcagactagctatagttcaagtgctcaattgtcccttatgtctaattgttactatattggacacctggtttaaatcatgtttcctctgcaatttctcaatatttcagagcctttcccttataccacctgtttgttgtaatctttactatgaccaataagataatttttcacttttgtcaattattgtagcatcaactgcccctttctctgctatcatctttggaaactctaatatctattgagagattgtgatctctcaatgtcttatcacatctccactttacctatcaccataatatcatctccactctaaaatctcttaagccccataattctttcctctgactgtgatgaatagcattctgttatcatctattctcacaccctttctccaattttttttgaatttggggggaatcatttttacagttattttaggtatgagcttgtgtattacttaattaaattgttgtgcctaccagatctcagaaaaactaccattgatccatatgtcaaatatttattaaacatcagctatttatttgttatgcacttttctaggtgctgaggataaagcagtggacacacaacacagacccttgctctcatggagcttacgttctactggcggagcagatgagaaaagccattgtcacat

SEQ ID NO: 70281 - DNA, 1058 bp, Homo sapiens
ggaagaagaacagaagtagcaatgttatgcttggcagtcatctacacacaaatgtagttttgtgaatgaagaaaacctcacattacttagcataagtgaagacactgggcagccaggaaaaaaaaaataagaacagaaaaattgaaaagggatgggaaaagaaagaaaaaccacttaatttggaattcatccctgatccgctagtggcagccacaactagcttggagaccttgcataaattcctcaaccttgatggaatgcatttatcttatcagaaaataatgaacacaacaatacctatctatagtcattgtcaggattaaatgaattagtacatgcaaagcacctagaactgtgcctgtaagtgttctatgaaagctagcagatataataacattccctggtttcagagtagaaattctgttttattgattcctctatgggtagtgcctgcaacagggcctaggttaagatgtgacatgtagttagttttcaataaatgtttgctgtgcgattggatgaatgtcaaagctgaagagatctgataaatttacagatatggattgtaaacaatcctccactgaatagtgctagatatgtcagaacaatgaataattcaggaggatcatgattacgttactggctgccatttaattgtacatccttttaattatcagtatatttatgatcctgttttggatatctcaggggtggtatgaaatgaaaatgaaaaggtgggaagatgtaatgggaaggaagaaatgagcaagggttttcaggcatcaaatgacacctgtagcagctcctcacggtaaagccacatgagttgaaggaatgtgtagctttgaagtagaaaaagctttaggggaccagctcttttgtggattagatttatgctatgtagctcaggaccaaagcacaacattaactggagacaagatttagattcatcgtaaagaagacatttcagaaatggcaacagtgaccttataaaaggggtgagtcattggaactgttaaacagagactaaataaccacatgtcattcatgctattgat

SEQ ID NO: 70282 - DNA, 1106 bp, Homo sapiens
gcactttgggaggccaaggtgggtgggtcacgtgaggccaggagttctagaccaccctggccaacaagacaaaaccctgtctctactaaaaatacaaaaattagctgggcgtggtggcacatgcctgtaatcccagtttctcgggaggctgaggcacgagaattgcctgaacctgggtggcagaggttgcagtgagccaagagcgtgccactgtactctagcctgggcaacaaagtgagactctgtctcaaaaaacaaaacaaaacaaacaacaaaacacctgcgtaatttgccttttaaacttttggtgaggaaagggtgtgaaatggcccagtagcagtcctctgagtgacttcctgggctctgcattacatcaggctgttccctttccctttcggaccttatgtgttaccttcctgttttcacccctaccctctttccatcagctcctcaggctgcaggactttctcacacatctcagagttccttaagtgccttctttccctcagaatggcacccccacccctccacccccacgttttcttcactgctgcagtgaatatactgacattctgttcagcaaagtgccctgtcaaaaatgtaaaatgctctaactaaggtggatcagtatcctatcaacttgaatttcaagccatatgtcacatttacttaaaaggacatatagccttttacactgaaaagatagactttttgtagcagcctcaggatcaggctatcagtcacgctctaactctgtaaagggggaaaccaagtcatgcacaagtcacagaatcatagtgtatgagagctgggaggacctttgagattatcgagtccctttattagcagatcaaaagcctgaagggtaaatgagatgccccagctaaaatgagtactgtttcacaacacagcaacctctgaaagtcctttctgtcaacaacattagagaaaggcatcagttcctgtacccactgaagttttatttggaaaaattcatgctaatgtaagtcattatagcaacctttgcaaaccctggcagttacaattattgattatttcaggacatcggtgaaagattagagatgatagatttaaagaatattatt

SEQ ID NO: 70283 - DNA, 1026 bp, Homo sapiens
caataataatgccaacctctgatggtttatgtataatgtgtgtaatgcaaaccaatttagcaatttacatgacacattgtaagttgttcatgaaaagatatcaattaagactagatatcaccacccccttaaatgtcttcatggctaactccttcatctcctttggggctttgctcaagtggcactttatcaatgaggccttctgcggccaccctctttgcaaatgcaacttgcctttcttcctttagtccttcttcctggaacttgcaatcttcttttctcctcccctccttgcacccccactgcctcccccatagcacgtatctccttctaataaattatatattttatatattcattatgtgctttttaaatgtctgtgtccctctgccagattgtaacttatcaagggaagggaatctctgcattcactgatgcaactcaagtgctaaaatcagtgcctggcacatagtaggcacttaacaaatgtttgttccacatcgaatggttgatattactgtccgatgaaagtggattacaaattattctttaggcacttttggggttctgcatatttaatttgacttaggacaagtttctttaattaggctttgtttttggtactgactgatggtctccccaccccagaaccaccagcttactggtgtggttgagacagggatggggttccaggacacttggccacaaccagacattcatctttctcctagggatctagtcctaagtggctggattctaggagaaattgcacacacaaaaggactgtgtagctaaaagagtttgatactcatttttctataccatttagtacaaatgaatttgttttcccaaatattgctgaactctgcagcaattttttattggtgagagcagcagttaagatttacaaagttgttcttagaagatggaacctaatagcgatgtcatgaggaaaagaattagcagaagggaagagatgagacagaagggatttagatggaccaggcagatccactgatagtggaa

SEQ ID NO: 70284 - DNA, 1011 bp, Homo sapiens
atttgttgtttaatcaggatcttactcttttcttttttgttttgagacggatctttatttaggacctcgaatatttaaaagtcctggacccctgcacatttactggctcattaaagtgtatgtttgcagttttttatctgtcgtcttctttaattgacgccttaatgccgtggcttcatagggggtgcccagttcttactgcttcctgcctgtttttgttgcagagaggccactttcgctttttagtattatttagtctaagtcgcactgtttagcaataagacaggcacgttgcaaaggcctcatgcttcagtcagggcctgtaaaagactccccacttactatcttctaatcagaaaaggcctctccacttgacccatttttcctgtctcgattcctttcccctttgaagttcaatgtggaagtttctttgcataaaattgtttacgataatatattaatcctgttagtaggtttccatccatttcaaaaacttccgtctcctgaagatttcctcttattattaaaggaaataggctggtttctttctaaactttaaaactgttagcttgggctatgcttgcatcaccactaccacagccatggtaaaaatagaaagattttaatatcccaaagagaggaagaaatatagaactataaatatatatatgctatttgagtaaggctgaattcaagggtaggctctcaggcaaaactggcctatttatggatcacctttctgattcaaaacatcgttctctacactactaggctactttttaaaaagtttttatggcaactctgcatagaaatccacccttttgaaatacattagagtaagcaaacaacgttttttagcaatatatttgttcgtttgatcaatattcagctgttaatcaatgattattttctggctgccaggcactaatggcggtagtggtagcattcagaaatgcacagagtaaacctgcacttgccctcatggagcttagaatttagtggggacacaga

SEQ ID NO: 70285 - DNA, 1149 bp, Homo sapiens
taactggtatatttctggctacttagaatagtacctggcacacagaaggtattcaacaaaaaaattgctgaataaataaatgagtaaactgcatgatttattctttagaaaaatcactttggcagcactgcgggaaacatttggaatgtggcctcaagcaggactgttaggagattgttgcaatagtcccgctgaagttgacggtggaggtgtagatgagaagactcagctaacgggtgagttactcaggaggtagaactaagagaacttgtaatgtgattgtctatagggcttaaaggagaatggtcactcccaggttcctggtgtaggcactgacagaaagatagggttattttctgaggtaagaaacatacaaagaaaagtagactttgggtctgggttggaggtactgagttcagtgttggtcatgtttagcttcaggtagcagaatgacatccaaatcaagatgtctacttggtggtgactgagagggggctgtctaggctggatcttcaacttagacgtgaacctaaagctgtagaaatggatggtgttgttcaagtagaaggtgtagacgcagaagatgagaacaaggagtattgagagaagaaaatagaaacaggaaatcaaaataagcagtgaaaagtttactgcacttccaaaaaactcttgaattccttattgttatgtttgtcattacattacagaactttaaaacaaatatgtagttcagattctagctctgaagctgtagtcttggtaacttaacctccttattccttctttttcttcatctctaagatgggtccaattataatccctacctttattatagatatgttgtgagggctagatgaaatacatgtaaagcctttagtattagaatgtgcattcaataattgttcactcatttttaattattaagtttaaactttcattatttttatttatttatttttttgagacagcgtctcactcttgctcaggctggagtacagtggtgcaatcatggctcactgcagccttgacttgctgggctcaggtgatcctcccatctcagcctcccaagtagctgggactacaggtgcatgccaccacacctggctaatgtttttttttgtttgtttgtggaggtggggtcccaccatg

SEQ ID NO: 70286 - DNA, 1052 bp, Homo sapiens
tcagtttatttctggaatacagcaattctttgatttctccttataaatatatgcaagaacaacagtgtcctttagttgttagaatcttatatagtccatatattcttcagcacccatgttattcattgtctttttacaacctgctatttaaggacaaaatacatagagtcacaaatggaaagtaaagaagaaccatctctttcatctcctcctcattttgtcatcacagtgtgaagtgtcagtatggagaaggcattactttgaaagcagactgtctggcagaaactgcaaaactgcattttgcaatagtgtcatccaaactctggggaattctgttattcagaagcctctgtggttcattcatgcattaagaggatgagtcttgctgctttctcatctgacagaggagaatgttgccatgacagctgttaggaggtgaggagatgtgtaaagggcatccataatgaaaagagaaaatagcctggcttcttaggtctcactgatgatgcatggagtggcttgtgtggattctcaaaatgaaccttgaaaatccgttagtcccattttagtaataatatctcacacacacacacacacacacacacacacacacacacacacacacacaatgtttcttttccagtagcctaagaagcatgtagaaaaattaaacctcaactaaaaccccctcatagatacctccttttccatctttggagtgtagactgaagatctaccatattgaaggtttaaaacatttgttttgttagtgattattatgagggaaaatattttccaaaaaggcagaatctttttagaaaatgtcctaaaaccagaaaaggtgttagagagtaatcagagagcttaagtagatttcatctctttagtcccagagagtaaaatatattttctttatctaaagatgttgaaggagtatttactgattgaaggatatggtatcttgcattttcttcaaaataatatgggaatggggagttttttagggccacaggcaaaaaaaagattggtaatgaatcgattatagaatatta

SEQ ID NO: 70287 - DNA, 2756 bp, Homo sapiens
gaagaaaaatacttaaagagttgaaagaaaaataaaccctcatcaactttgaattctaaatccataaaaattatccttcacatgtgaaggagaaataaagactttctcacataagcaaaaccgaggggatttattattagcacagcatacctattctttataaaatgttaaaagaagttcttcagagaaaagaataatgatagttcagcaacttagatcaacattaaggaaagaacatcagagaaggaataaatttaaggtaaagtaaaatcttttgcttttctcattaattgagctaaaagaaaactttgtttaaactaataattgtaacggtgtattagataattatagcatatggttaagtgaaatgaatgacaacaatgtcataagagattggagggaggaattggaaatactttaagttatctgaactacacatgaaatggcatagtattagttgaaactgaacttagattagtttaaaatgcatattgcaaactctagaaccaccactaaaaaagttaaaagaaatataattgagatgctcagagagtagataacatgttatataaaacgctcaattaaaacgggagaaagaagaacaagaggggagaattaaagcaagagaaggcaaaataagaaaaaaatatataaaacataggaaacctagagtcgtaggcaaatccttattgtctacaagaagcccactttaaatataaagcatcaagttaagagtaaagggatggagaattatacagtatgttaacaccaatcaaaagaaagctggagtcactatcttaattttagacaaagcagacttcagtacaagggaaattatcagggataaatagggacattaagactgataaaagtatcagttctccaggaagacataatcataaaaacatatgcaccaaacaacagagaatcagaatacatgaggcaaaaactgatgaacttgcaaagaggcacaatttcaaaataacaaattgactattgtagctgtggacttcaacacccctctttcactagttgatagatcaagccagcagaaaatcagtaaggacgtagttgacttgaatagcattatcagtcagcttgatctaattgacatgtataaaacactccatccaacaatagcagaatccacattttcaagcttgcatggaaattcaccaagatagatcacatcctgggccataaaacataccttaacaaattttaaagaatagaaattatacaaagtatgtactcagactgcagtgaaattaaactataagtcaataacagaaagatatttggaaaatgccaaaatatttacagattaaacagcacccttcacaataacacatgactgaagaggtcacaagataaatttaagagtattttgaatagcctgtagtctcagctacttgggaggctgaggcaggaggatttcttgagcccaggagtttgagtctagcctgaacaacatagtgagacccaggcacttgaaaaattttttgaataaaataaaatttaaaatataacttataaaaaattgtgagtttaactcctgtcttgccatatactagcagtagcagtacaactgtgaataacatacttaaatggctgtgcttattttcgtaaaataattttagtatttaaaacttcacctaaaataagttctaatgttctattgcatagtatggtgactagagttaacaataacatgttgcatatattttgaagtagctagaaagaaatgacacatatttgaggtgatagatatgctaattaccctggttttattgttacacaatgtatacatgtatcaaaacatcacactgtaccacataaatgtgtacagttattatttgtcaattaaaagcaaaataaaacaaaaacaaacacaaaaaattgtgggatgcaaggaaagcaatgcttagagaacaactgataccactaaatgcttacattagaaaagaagaaacaatgaaacaacaaaaatatctttcaataggtaaatgaataaacaaattgtggtgtatctatacaaaaaataaataaatggaggagaagaagcagtatctcctacagaattccaaacaattgatgcagatacttcactctcaagaaagtggtaattttccactccttaaagtgtaggttatgcatagtgactttgtttcagagtatagtgtggaaagggcaaggaagcgactttatggtagttactcacagccagatgatcaagacatcagcagtgataagcactattgctattatgtatgatgtgataaagataacacttcacctctgtggtcttccttcccaaaatacataactccagtctcataatgagaaaaacgtcagacaaattttaattgatggcattttacaaagataaatactcctcaaatctgttaaggtcattaaaaccaacggaaatctcagaaattgttagagccaagaggaccgtaaggaaacatgacagctaatgaaatatgttttcttggatggggtcctagaacagaaaataatattaggtaaaatgaagacaattgaataaagtatggactttagttaataatgatgtatcaatattggtcctttagttgtagcaaatgtgcacttagaacgtgtagtaataggggaaactctctgggttgatataagtggagcgatgaaacaaataggtgaaactgtaatatttgtaatttttgcaatttttgtaatttttctataaatctaaaactgctgaaatacattttatt

SEQ ID NO: 70288 - DNA, 3117 bp, Homo sapiens
aaaaacctaccccaaacccctgaataacctacataatgtgggttttttttgtttgtattaaggagtgtttttaatatttaaaaaatacttttcaacaatggttctactgaaaaaataacagttttacatgacatatagatttataaaaattacatgttactgtgtttatagaaaaaaatggtggctgtgttttaaaaagacattgaagcaactcttgtgtgaaaatacacaggtggtgttgaaatagaaacaagcctaggcactagggttcctaaggtctgctttcatctcagcctctcatttgttatgttacatttcagggctatcattaatactgccattgtatcccatttttctttcatcttctcttttcaccccggaccctgtttgggggccaggagttcctttgagaatgtgaaggcggccctaaaagctctcctctaaataatgtgcaaatacacaacagatttgcatgtaagtttaggggtttcatggtttctggaaagcatctttggaccttagctgagtgtgcatgaattagaatgcattagtaagaacatggggctgcaaaatataccatatgaacaatagttagagcatttcactgtgatgagctagaaaaagaaaagcttgaggacaggtcgttaatgaactgtcacacatatctgaagagctgttatgtggaaggaagaagtttatttggggttgttttagagctaggtggtccaccactgtagccactggtcacatgtgactatttaaatgaaaattaaataaaataaaaaattcagctttccactcatagtaggcacatttcaagtgctcagtggtcacatggctgctgaattggactgttatatctttgtaagaagttctgttgggcagagctgctctgaagttttgaactttcaacagagtgaattatggcaaggcagatttcagctcatttctaacaaaactgttctattaattttaactgttcagtgccagagctgttgaactggctgcctcaaagaatagtaagctttctgtcatttgaagtactcagacagagactagattcctactttttggagtgatgtagaagagtttcctacccagaaccttagggtgtttaagtgggaagaagactcagcaattcaatgtttcttttactgcagatgaagacacagactcagagtcagacagttttgcccaaagacccacaactggttaatggcaaatgctagctgtcctcatgaatcctagcttagtacttttcccattccacccattggctaatgttttaacaacaaggtcctcgcggttcttgttgagcaacacatttccgcttctggcattcaccagcttttccacttattctctcccactcttctgcagtgaaaactacactgcagccaagctgaactggctatattgaaatacgttattctgattcctgcctctgcgtctttgctattgctttgccctttatcaaagtgacatttcttcacaaacttaattctacttattttctaacttctcctcaggtctcagaatattcaaacccataccatctcttctctttgctaaactaccttgttacaatgcactcagacatttatactctctgtgatgattatattttgtcttatccctttgatgagcttcttaaagactgtgattactattttcatgcatatatcctttttctgtctccctcactagaatataagttcctcaagggcagggactatagctgtctttttcaccataccttactatccagttgctatccagcaagtgtcttagcaccataataggtgctcaacaaatatttattgaatgagtgaatcaatttttctcttcccaagcatgctattattctccttaagtttgccatgaattctcaataaatacttttctaagcaaacatttctgtttctataaagtaagtattgaaaataggaatatgaaaaaaacaaagtaaggcactccagcatgtaaagtgcttgggagtcctcactcccttccaaacctgagcaagtaaaacttggtaagttttcctggaactgtcagcaatctcagggcaaatcacttgccaccccaaaatctgaagaaataggtacattcagacagtcacagctaagatttgcttacctacagcagaagcaactggaaccatagactagaagggccatttaaatagtaattttgatgaattgctggaggctaagtgttgactagcttgagagtggaactcctaggcgcaggagtctgagaaagggtctcacacgtacatggattttacctcccggaaacccgtcaggttttcacagcaaagagccaagatagaccctgtcctggctctggcaaagggaaggggaaagtaatgactttgaagtgcgctcagaatgttctctatgataaagacttactctccaaggaaaagggctttaccagagtcttatcccatctggggagaagatagttctctgactcgaggcacctctagattcctgtgtcaactaaggaaggaggaaaaaggttaagaaacatttgtaaaggtcacagtacagcaacataggcccaccaaaagattgagatgtaatcctaagaaaatggaatgtttcccttccccactccttaccaccacagcaacagggctccttataataacagtggattacagctgaaagagctgcaagatgcagacagacactggctggccaaggagagggggtctcaggaaagtccaaagacaacaggagagatgaaaaaaaaaaaaaaaaaagacactagaggactttgaaacctctgacaaccacatttatagcaaacattatatacaacccaatcttagacagataagcctcaagctgaagtcctttttgcctcatttcctgttatctgatacatcatgtctagctttcaacagaaaattacacagatgaggctgggcacatggctcatgcctataattctagcactttgggaagccaaggtggacagatgacttgaggctagaagttcaagagcatcctgggcaacatggtaaaaccccatctatacaaaaaataagaagattagcctggcatggtggtgcatggctgtagtcccagctacttaggaggctga

SEQ ID NO: 70289 - DNA, 2238 bp, Homo sapiens
ttaaaatttcacctatcaaattggccaaattgagaaaaactgataatagccaatgttggttaagttttaaggaaatcaggagtggcaatgggcataatctttccaatgggaaattaagcgatgcatgtcaaaatttaaaatctacatactctgtgaccaaaggcagatacagggtttgtggagcccaagcctatgcaactggggaagggagagagttcttttaaaaaaggatcccaaagttataaatacaaatttaggtatgacattaaatatttagttcgaatgagaaaaaatcacaacaaatttttatgaaattggtaaataccataaacatcacaaaatccatctctatgaggcaaacttgggaatcagtctggctccagggcatggctcttaacagctgtgctctgactgcctcagaatgtatcattcatctgtgtccattgactactacagaccaaaacacatttgcaacttcttgtcacctctgctgctagtgccttggtccaaacctccatcgtgtctctcttggatcatgggaacactctcctaactggtctctgtattttgcccttgaacagaatgcatgtattatgtttttaacattttttagtaattgactttctgacactcctctattttatttattatattattttggttactctttgattgccttttcatgtgacgatggttttgtactattttctacaaaaagacaggaaagataagtcctctatcatggtaggtggaaatctattttttattgttaatagttgcataaaacctgaaaattctcacgcacacaaatttgctatttgtagcactgccacaggtttgttgcatttgtaattgcatatactgcattattgaatatgtttctgacaggagagagccttcgtttagtctagccactgatggaaactgaatcctttgtttacaattttagatacctgatgattggaagaattttctacagactagcttgtggctctatacattttacatgctgtttctccttcactactcatatatttctggtgccaggcttggcaagaggtgttttcattgtgatgtgacctctgaccttgcagggtgagatggaatgaggggcagtaggaatattcctgcctttttttctagtctggaacagctatcaatacctatccctggaggtgaccccaaatccatataaaaaagccactaaaccaaaataaagtataattccaaagtcagtttgaccccccagattccaaaaatgtccatgtctccttcagtgcagtcaatttaaaggaatgtttgatgagaggaaaattgcagtggatggcaacagcagtcataacagatccagttgaaatattttatttttacaaattttacaaaagcagagccattgaacacatttcgaggatcccttttacgtcttggaagaagctttaggaaatgagggaccctgaaaattacacttaattaggcacttaatatatgtgcctctgtctatgacctggatacttctaagaatttatcataaggaaaatgtgcagtaaaaatcaataatagcaaacatttgttgaacgcttactgtacaccagacaccttgctaagaacttcattttgactttttataatgagcgttttatttttatatcttatttaaaaattccagagaacaatatccgtgtttaaatgggaattttagtttagacaatgtcaaaattatgttcatttttacttcatcttttcacttcaacttttatatggatttatgcagtttatacaacaactacatagtgaatgctaggcagtgttctagatgttgaaattcctgccttcatgaagcttatattctagttggacaagatactcaataaataagttaacaaataagataaataagtctgttatcgcatgttggatgggtataagtactaaggagaaacaagatagcaagcaaggaggtaagaaatatgtatgtgtatggagtgggggttgagattttagatggatcatttcacagagaaggtaatacttaagtaaagaccaggccaggtgcggtggctcatgcctgtaatcccagcactttgggaggctgaggtgggaggatcacctgaggtcaggagttcaagaccagcctggccaacatgagaaaccccatctctactaaaaatacaaaaattagttgggcgtgttggcaggcgcctgtaatccccacctactcaggaggctagggcaggcaga

SEQ ID NO: 70290 - DNA, 1361 bp, Homo sapiens
ttaaaaatgggcaaaactaatctatggtgttgaaagtcagaattgtggtgtacctcagggagaggtaaacactgagaaggggcaccatggggtctgccagcttctggtagtgtgccagttcctaatctagggactgataacttgagtgtgttcattttgtgttcatcatactcttcacctaatcatttgtacacttttctgtaacctttatgttacattttaaaagaagttaaagagttatgttatagaacttaatgtgcattctttagaaaaattttatcctaaagaaatgtaaatttatagtcagttctagagcttatgatgtgtctttttgaaagtttgacctgcacctgtaccctaaaacttaaagtataataataataaaaaaaaagaaaaaaaagaaatgcagaaaatgatttgacaaaaaaaaaaaaagtttgacctaatcttaatcatggcagatttgggaatgctaatgtttatatatatactttcataattacaccaaaattgatgaatctttctctgggagctatccattgatgttccttgtaattagcaacctgcttctgtttccgaaattgtattttcaatcatataagtgtgttcaaaggcctcagcggggaccagaattagctacaatttatattcagttcagaacatagaattcgtttctcaaatttctcattagcttggcagtttataaacttggatgtgtgtatgtgagttttaggaatctgaggattggacaaaaaagagagacagagaatattaaggcagtaaagaagagtttggaagagtagagataagtagaaataatgacattagaaggcagaagtcttcagatagtcattcagaagcaagatgatgaaatactcttttggccagacacatcatacttactcaacctttgtatttagcttcaattgttggttgaatggactcagctgttcacactgtagaagtagtggtagtggtagtagcataaggagtgtagattttgctttaaatatcactcatttaaaatacttttgttctttgccaggtgatatgatatgatatgatatacatgtcacatttcttgtcatgcatgaacctaccctttagttggagaaacaaggcatttggaggtgaaatgttcaaatgaaaatatatgtacaagataagtggtgtaaatacacacacagtaacagtaacaatatttgatacattttgcatttgtttgtatgccagccaaataataaagaccagctttctaacagaaaaatgacaaaggactggattggacagtctgtgaggagcgatatataaatcaccaatacatacatgaaaatatgttcagtatcactggtaatcaaagg

SEQ ID NO: 70291 - DNA, 1050 bp, Homo sapiens
cttctttttttggctgaaatctagtaacttttaatgtttaggacaaaaagaagacagctaatctgagaccaatgaaagaaaggaatgcagaagcctgatgcctgggcatcatcagctatgcagtagcatttcctccttgggaaaaatattgacagtttgaaggagacttgagatgttaacataattacttaagacaaaggctgagcagggagagagagtggtcatttcaaattatatggtcaaaaataggtaaatcaaagttacatgctttcaatttgatgtatgtgcttttcattttggtttatgattcagaccacttacagttgatctctgtagaagtgcttttaagtcaaagtttcaaaaatgttagggaatagtgctttttagttattttttagtataataaaaaaaattccttgcttctatgtgtgactatgcactttacgtatcaaaaagtaatcttaaaaattcccagagttgagtctatttattaactcttgttgagatagtttctgggtttggatttaaagtctaaaatgtgaaactttatgaaaagtagagcccagggccaggtgtcgtggttcagatctgtaatccaagcactttggaaggccaaggtgggagctttgcttgagctcaagagtttgagaccactctgggcaacatagtgagactccatctctacaaaaaataaaaataaaaaaaaacttagccagttatggtagtgtgcacgtgtagtcttagccacttgggaagctggggtgggaggatcacctgagcctaggagttcaaggctgtagagaggtatgattgtgccactgtactccaaactggatgaaagagcaagagccaaaaaaaaaaaaaaaaaaaaaaaaaaaaatgctcagctctagaactgactatagtaataaaaagaagacattctttagtgacataaaacttgggtgttatatcttacattggctattattcttacgtgcaacaacataacaatgagaaaaacaagccagatacaaaaaagtatgtattgtttgattcccatttatataa

SEQ ID NO: 70292 - DNA, 1052 bp, Homo sapiens
tctgcctctcatcacatggcattctccctgtgtgtcttttcgtatgtcattttccttttttaaggacacctgtcatgttggattagggcttactaatgacttcatcttaacttgattacatctgcaaagactctatttccaaataaagtcacattcacatcatagatacaggtatgcgtctttctgggggttacaacttaacccataacatagtgtctctcagaactgaggtttgttcaatgtgggttcatggccataatatgaataacaacaacaacaaaaccctgaggcttggagccctcagaggggttgagaggtgttttgacgggttcgtgaagacagcagctgtagtgctctaactttttcatggtggctcatatgggctattaccatataaactagggaagccaactcattttcactcctgcattcactcattgagttgtttttttttttcaccttgccaaaatgtgtgaattcatataagaggaaaagtaatttcagaattatctagtggtaatggtacttgcaggatgacgggcttgttttttttttttttttttttttttttttttttaagaagagaagttttgtggcttggggatattatataaatcctcaagtggggtcatggggatcaaaatgcttgggatttattgctatacaggaaaaaaagtgtattttctgtttaattcttcaaaaaggtcacacatgggatctcagcaggtttagtaaatcatatatcctgggggaggaacccagatggtgtggagctactgacctagcacagagactgaggcatgctgctggaggcataaagcttggctggcctctgtgggcttgggttgtggctgtgtcacggtctaccactttgccatttgtctctgtggatcctgaaagctgcagataaaaattttaaaggcttagctgcctgtaatttaagaaagaacttggttagaagtcagatcaagtgaaagaaaatgaaatgtcattgcacaaaaggaaaatgaccaatctggtggaaatggagcattttttaaaatagttttttg

SEQ ID NO: 70293 - DNA, 1775 bp, Homo sapiens
ttataggtgtcactaggtccagctaatgctcaactggaggggaatatataaggacatgaatatcaggaggtggggaacattaagagccatcctagaagttgcctaccacaggagtctaggaaggtgaatgattttatgttcccatcacacacaaaatcaagaaggagacattggatattgggtatgctgttagccattgctatctcagagagtgaatgcagagtacaaagtttggagacagaaataactggatttcagtgctagatctgctacctattaaatgagttaattaacatctttgaccttctgttttctcaacaaagtcacagagttactatccaaattaaatgaggtaagatagtataacagtgttctttataagttctcaatgaaaggtggctctcccattactatgtagtggagctgcaactagaattcagtttcctcaaaggtaacagcagtgatttttctcagtgtaacacaatgtagcccagacatattaattctaaaattgagagtgtagaagcctaacatttaggcattttgctttctcatttagaaactactttcttttccagtaggctgtctcaccatgtaggcaaatgtgaaggactcatgtacagcaaagctgagtcctcctgcaactgtgctgttggaatacctacaccaattgaacagtgtgacttcctttatttttgaaaaattgtagtttttgtttatccttttaagtagaggctttatctttataaactgtctttgggttagataaacgtatatcagaaccttgctgtaaagctaaattttttcttttctgcttttcaacctaaagtctaagttacagttttggtaatacataggaacttattctttaggtgaaattcctttatgtcactttgattacactgaataatctatctttagaattcagtgtattattacaacaggatcagttgtttaatattatagtcatttatatttgtccagttattctttcaaaaatatattttgagcacttgctttatgcaaggaaccaaggaagttgctctgagggagacagatgtaaaaatgtagttttgaaattaaggaatttacaatgagaaaagagaagtaacaatgaacacaaataattataagaaggtagttctttaaaaagtcataataagcattaagtattaaggagaattcgagagaggaatggatcacttccagcttgtagatcataaggaagattgctctactgcatggccaactcctgattagagattatgcacattaagctcttgaaagagacttgctgacattgtcaccttctttgcttaagtgcttggttaacataaataggagcttcgattactataattcaattggaatagaaggccttttaaatcaaaatacttaacctctctgccctaggaaaagtaggaaacagcacatttgcagaagggattcagctatgttaaacatgggtcctttagttgtctagtggtaatttggccaatgctcaaaacacggaaatggagaacaagtcacaagagcagaggaagatgaaagatgctgagtagacacagtaacatgaataaactgaataatcgaaactacatccagtgtggatttgtaatagagacactattgcatgctggtgaagaagctggctctggaatcagtctgcctggggtcatcaaactgtggttctgatgcttggccaagttagtttcttcttgtctcaattttctcatttatataataaggataatattttatttcacagagttgtt

SEQ ID NO: 70294 - DNA, 1086 bp, Homo sapiens
tttgggttggttccaagtctttgctattgtgaatagtgcctcaataaacatacgtgtgcatgtgtctttatagcagcatgatttatagtcctttaggtatatacccagtaatgggatggctgggtcaaatggtatttctagttctagatccctgaggaatcgccacactgacttccataatggttgaactagtttacagtcccaccaacagtgtaaaagtgttcctatttctccacatcctctccagcacctgtcgtttcctgaatgatttttagataagaattttgccacacaagtgtatcacttgcttggattgtgatgtgcattcagaaggagcataggaatcaagatttgtggttgagttaagtaatgtattagatttaggtccattaggggcagggcattctaggctggagaacagcatatctcaagggcgaaaatcaggatgagaaaaagtaagcagcacattttaaaaaagatgaccctgaattttagacacaaaactactaagtacttttaatcagaatgaaatcaataactgttactgcctgttgaccagaggcacatgaattacagtgatggagttgtttttcagtgtcctcagtgaaggatctacaaacgacatgccatcttgataaaacaaaccaagattttgatttacagtgctgttttagggcaggatgagatgtctcagaggtagtaggtgttactgaaaacatcattttatctttgaaaacctgagtggcagtgctcatttttccactttaacatgatgagagaaaaatttaatctttaatgatcagtccttatttctctaactgttcccaatagaagggtgatttagcttcaaatttggtacccaggaagttgaaattggatcagatacaattaagttgtaaatcaaaatgtcttagagctctatgatagaaggaaatttaaacagtaaaaattttattttaaaaataattcctgaggtgtttaattatagtaggacattgctgatatcacttatttaatttatttatttattgtgtaggttctttatgtttagattttgaacagctttaattgccttcttgtgacata

SEQ ID NO: 70295 - DNA, 2705 bp, Homo sapiens
attggctacccagagtagcaacaaagaagaaggtgtccagtgaataagcttggattttaattgtgaagctgcagcaagtttacacacaagagtatcagattaacacagaaatctggaaatgttagaactttggttggaaatttcctgtgacccttgggaatgacagctttagagccaggattgtgtgattcacagtatagtcttccacagtctcctgtctcttttataaggtgtcctatgagactaataatatctttcttaggggactgttgagaaggtggaattttgcactgttctatagtaaatgctcagcaggtggtaattaagaagaaattatgtttctggaaatatttgtagatgtaagttatgatcagcatttagcttgcctatccattgttctggttcaaagagttttgcatgttagccgatctcaaaactaaacatcttccattataaagccatcaaatcattctttattgagagtttatcaataagcatttaacttaattaactccctcttgagtaactggataaatgaaaaaaccatattatatatcagaatttgaaacaagaactgaaaactcctaaaacatggaaccaaactcaaccaggtattatttaaaaatacaggttcttagctgggtgcggtggctcaaacccgtaatcccagcactttgggaggccgagacggggatcacttgagtccaggagttcaacgccagtctgtgcaacatgggaaaccccgtctctacaaaaaattcaaaaattacccaggtgtggtggtgcatgcctgtagtcctagctactctggaggctgaagtgggagaatcacttgagcccaggaggcagaggttgcagtgagccgagattgtgccactgcactccagcctggatgacagagtaaaatttccatctaaaaaaaaagaaaaagaaaaaagaatttctagaatatcagagaagtagcacaaggctatgtgaatgcctagtaaatatttgcatgtttatctgtttatttattattattatttttgagacagagtttcactcccatcacccaggccgtatatttgcatatctattgatcaaggaataagtggcactattagattaaaagaaagaattaactagcactattatttcacactatcaagaaagattattgtttggagtcctttcttaattacttattgatttgaagaatttgctactagaagaaactcttaagtttatttattgtttcttttgtcacttgtttcttttatcctgacctctggttttataaatgaggaaacagagaccttgggggctaaatgacttgaccttaggtaactacctattgactgaggcagacctggaaatcaggctacatttactgagggcacaaaggaaggggaagcgttcattccgtggctttcccaggcttttgcacgtgttcttgtagtgctgttgaccgggcattcctgaaagcattggttgataagagtgacagagaaaagaggggctgagaagggatgttttctaacttgctaattttcactgggctcagggagaatcggaaatgagtgagtactactctttggtgacacactgtggccttatgactctcttaatgaaaggtcagcttagcaagctgttgaaaaaaccaggctcaagtaatgctcctttggaaaagattgattggggtggaatacttgcagttggactccaaagatgacctgtggtgttgatatgggtagattttctctctggcagacatatctctgttcctttacatttgtaaggggagacactactctgcactcttgttctccagacagcagagaagcttagcattctactctggctgagacttgtgtggaaggagagagaatgagtaggttgataagaaggcaaggtctaaaggacctctgctgtcagaaaagtaaaagcctggattcccatctctcattgtactttatctcaaaattattgccatctatcagtatcattggttctttcaacaagtactggttgagtattcactaccagtcaggcactgttcttggtgtttggggtatcacagtgagcaaaccaacaataacccttgtcttcacagaacttacattctggtagcaggagacaatgaattatgtttcaccctcccaaactgctcccttgatatcctctctctaggttcttattcctcaccctttcctagaaagctccaggagttcagctctattcccatgtatttcaccttcttctgacccctgattaggctttattgtaagccagaaggcacacatactcttgctgaatcctgtatttgtccaacggaccctaaacaggtaaagttcttatatactgtctctttagatttatatgatgtctctgagcttcttagaatttctagtaggaattccaaatgtctccaaatgatttttatttttatttttatttttattttatttttttaaaattttttaaaaattttattttattattattatactttaagttttagggtacatgtgcacaatgtgcaggttagttacatatgtatacatgtgccatgctggtgtgctgtacccattaactcgtcatttagcattaggtatatctcctaatgctatccctcccccctccccccaccccacaatagtccccagagtgtgatgttccccttcctgtgtccgtgtgttctcactgttcaattcccacctatg

SEQ ID NO: 70296 - DNA, 1070 bp, Homo sapiens
cagtgttaaatacattaaatacattactacttaattaaatgtctcttgaataactggataaatgaacaaaccatactatttatcagaatttgaaacaagaaccaaaatttctaaaacatagaaccaaactcaagcagataccatttaaaaatgtaagttctagaacatcagagaagtagcagaaagctatgcgtatagtgagtgcctagtaacaacctttgcctgatcatcagaacaaatcccacctccctagatctctaactttttggaatttgagacagtattttcttcatccttcttatgtaccatcccttttaatgaattatatctaatatgttgctagtcaggaatatccgccttctaggaatcttagaactagcattaacactttcatttattttaattctgtgaaatcttaacaagcaacactgaattgtctatttgtaatattatcatttttccttggaatttataattccttttaaatcatttacacttttcttccctgcctctcactttgcagcagtcaatagagctgattgtatttatttctgcagttgtaactcaaattccattaaaggttttggtgccgtcagccagatcatgttggagccagggattccatttcctataaacaagttaatatcttccattatttttcttccttgtgtagtgacagtgtttattgttgttccgaagccaatttgaagcttaactttagaaacattatatattaatctgaccatatttggttttaaaaaagtctctatgagtgaaataaagattttctgtttaatgatgattaataacctattcggatggattcatctgaggaactgaagataattttgccatcaggccacttgtatatgggcacaaacagatgggtcttactccaaaccctgaaggcacagacgagacgcccccgtaattgcttagggaagaattgtacagccatggcctcttcccaaggacacagtgatcttcactgtgataactcccaaatttgacgcttttcaacaaggcaagaaacctcaccacattcattcagtaaaaacttcccatgctgt

SEQ ID NO: 70297 - DNA, 2337 bp, Homo sapiens
ctaatttcctttgtgatatttttttttttgagacagggtcttgttctgttttccaggctggagtgcagtaacaccctctcagctcactgcaatgtccgcctcctgggctcaagagatgctcccatctcagcctcctgagtagctgggaccacaggtgcatgccaccacaccctgctaattttttgtatttttggaatacacagggtttcaccatgttgcccagcgtggtctcaaacccctgagctgaagcagcctgcctgccttggcctcccaaagtgctgggattataggtaagagctaccacacctggcctttttttgacccattggttatttggaagtatgtttttaaaatttccacatatttgtgaatttcccaaatttctttctgttgttgatttctaattttgttccactgtggtcagaaaatatgctttgtataatttcaattctttaaaatatatttttaggattgttttatggcctaccatatggtctagcctggagaatgctctgtgtgcacttgagaagaatgtaactctgtaattgttgggcagagtgttctatagatatatgttaggtctagttagttgatagcacatgtcttatctttttaaatagatttaccaagctttgtaatcaggacttgttgatatttaaatacctctgaaaaagccacctacctatttggctctatactttcttcctgaattgacatggttccaaacacactgatattggaattgtatttaaaaaaaaattttttttttctaaaccttcacattgtttttctagggtacaggtatttagcttccagtgggaaatatgattgccaaatgcagcctgcttcttcatgttctgttactgaattatcttaaaatcaatacaattactgcttctctaagaattgtgctgcacatggaggataaattcacagttttagaggagattcacaaattttgacgttcataaattatgctttaattttttgcaattgtttctggatatctgcatttggaggctatagcccttcctctgaatgggattcgagattcaacagagtgcaatctatgcctattaaggaaacatacccagaacattcttggaaatgtgaagattgtaagagtatctcaacactaccatgaaatgcctgtctatttaagtcatattttgagtggtgtttcaatgtgtcctgttctgtgaaagcattttctcttttatgaaactactaaaattgaagccattagtgttgtaaatttggaatccaagttgagatggcgtctggctgaatacactctagaggataaaaaaattgttcagtttgacaaatgccagggttttcactgatatagtttactattgattaaaatatacttattgctaattatatttttgggtggactaaatttttttacactgcttttatatcaccattaaatatccagctgtctctatttcaacactgttattaataaatcatttggctttcataatgtaatatgtgaatatgttgcacattattgaaaaattggctgtgcccaagttttctctatgttttcttgtattcttttactcagaaatgatggatgtttgcagaaatgaataaagtattttgattattctgtattttactttgaccattgtcatatttatgtataactacttgatttttccttactcagctatagggaagaaatatttctttcctctcctgcctgctgtggcaatgccttattctcctgaatttgcaaatgaagccgtgtctctaatcattactaatttgattttttcctattttaggttattatgttgagtttacataacttgagttaaaagctgataattcattaaatagtttgtcctttttttttgagacggagtcttgctgtgttgcccacgcttgagtgcagtggcgtgatctcggctcactgcaagctctgcctcccgggttcatgccattctcctgtctcagcctcccgagtagctgggactacaggcgcccaccacctcgcctggctaatttttttgtatttttagtagagacgggatttcaccctgttagccaggatggtctcgtctcctgacctcgtgatccgcctgcctcggtctcccgaagtgctgggattacagatagtttgtccttttttctttcttttttttttttttgcgacggagtttagctcttgttgcccaggctggagcgtaatggcgctatctcggctcaccgcgacctctgcctcccgggttcaagcctcccaagtagctgggattacaggcatgtgccaacacgcccggctaattttgtatttttagtagagacagggttcctccatgttgg

SEQ ID NO: 70298 - DNA, 1952 bp, Homo sapiens
gaatagctgaaacttaagcatgacccttttctctattagtctttctgtccagtggttgccaaatgcatcttctgaggtcttcagctcgatgctgtgtggggaactcatgccccagttcctgagaaatgacaagtcagtgctggttctcccttcttccttttaagtgagcagcctctggcagatctttctggaagtgtagaaggttttcctcaggtttggactgagatgtggggatggtaagaacttctttcagtaggtagattttcatgtgaataagtgaaagggtgagggggatccacataattcctaaatattcaggaaagtggaaacaatggggtatggtttttggtaaaattccaatctcacatcactctgtcttccaggatgggtcaatctctatcttcctggcaccagttgctccattttctctacatgccatttttacccctgtggtttgggagaggggattcaatgggtttggcctgggtttctctattcccttgtgtagcaaaggagcaattgatgaagtgaagataattgtgatgtagaagaggtgattctctggcactgctctttagactccaaggcccttaggcaatggagacagtcagagtgtctcagttctgctgtgttggctcaggtgttggctacctctagaacctctttgtgcagtcaggtactttgtctttttttttttttaattgtgaaagagtttcaaattgttagttcgcatttttaatagctttattgaaatataatctacgtaacacacaattcagtcatttaaagtgtgcaagccagtgacttcattatattcacagaattgtgcaatcattatcacatcaattttagaacattttcatcattctaaaaagaaaaccttgtatccattaagtagtcactccttattttcccctccccactctaaaagtctctacccctagacaactactgatctactttctgtctcggtagatatgcctattctgagcatgtcatataaatggattcatacaatatgtggtcttttttaactggcttgtttcacttagtgttatttcatttttattgccaaagaatattccatcgtatgtatataccacattttatgttttatttatccattcatcagttgacggacatttgggttgttcctacatttttgctattatgaataatgcaggtatagatattcatgtatgagattttatgtggacatatgttttcatttctcttgggttatatacctaggagtgaaattgcagtgtcatatggtagctgtgtttaacctcatgaagaatggccaaactgttttccaaagcagttgtaccactttatcttcttaccaagcaatgtataagtttctccatgtccaacacttgtattatgtttttattatccaccatcctagtagatgtgaactagtacttcattgtggctttgatttgcatttccttgataaataatgatgtaaagcatcttttcatgtagccatttgccatttatgaattttctttggagaaatgtctgttgagattatttacccatttttattatttgtcttcttgttattgagtgttaatagttctttgtacattctagatataagtccaatatcagatatatggttttcaaaatttttctcctattctttggatgttattttcacgttattgatggtatcctttgaagaataagttttaaattttgatgaagttcattttatttgttgtttcttttgtcacttggtatttttggtgtcatatctaataaggttttgcctaacctagtgtcacagtgatttattgttataatttcttccatgagttttatagttttagctcttacatgtagatatgatccattttgagtctttttttttttttagatggcatgaaaaaggggtaggtcaaactttattcttgaatataaatatccagttgtactagaac

SEQ ID NO: 70299 - DNA, 2383 bp, Homo sapiens
ataagagtaagtgattagatagtagtagcagctaatatttttcctgttatttagctagaaaaaatgaagattcggagaaatatagctaaatcttaacatgatctgtttcatagaaacatggtattctttgatttttatgtgatatggtcctagatattatgtgatatggccctattagattgaacacatgtggtattccttttgccctgtagtacttacctaatttatttataaaatactgtgctagaccctgagaagagaaagagatgtacaagacagagttagagttgcttccctcgagaggtccttgcctagttcgaggtgacaataaacatgtgaaaagagtaatgcctgacagaaatttgtgctgtcatatgatctgtcactctgtgagctgtagcaaagattttgaaatcaagaaagagaaatctttgagctcctgaatgtggaacaacttaatgggagggaagaagaaaaattgggggctttgaaaggagaacagcgtgagaaaaattatgagtgcaggaaggtgtaagacaaatgaacaggggaatgagtgttcagtgtagcaggtgtgatgatctgttaccaaaatatctcacactatgaccaaggattaacaaaaagtataagtagatggaaccatgatatataattatatcttctctctctgtttttctttttggtgtctttactctgaatcctcttttgcatttttaggcttctccttgtgctttcatatgtacattaattatttagatagttctgtattacacttttccttggtgatggttaataccctttgccattatctttatgacttctagttggttttaatattcacttacttaatcttctctttcttgatttacaattttgctttatttcttcataacttggtcaaaattttcattcaattaacaaaaagtgtgtttgaatagcgtttattatatagagaggcagcaaagtataattgttgagtgcatgggctttggagatagtctgcttgggtttcaacctggctctacccccactagtaagactctaccaccagggttttctaaccttcaaatggaaattccaacttccttatgtgggtggccttgggcaagttgcataacttccctgggtcttagttattttgggctataaaataagatattaatcacatgtttctcagtgctgtgaaaattgataagataacccaatttggactacagcacattaaaactcttattattttttattattgtttgctccattgagatgtaggtatgaacaagacagaccagatctcctcagtcttggaactgttttttcctgatgttatcattgttatgaagaaaatgtctgaatgtggtagagaattgagggcatgtgaggtgtgggcagcttttgatggggtggtcagcaaagcgtactttgaggaggggggtccttttgagcttagactcaaatgaggtgagaagaaaaattatagaagatcattatagtttaagggcacttaggctcaaatgctcgtactttttaaaagaaggcattggagcatgttttaatgctagtgggcacaattcagtaaagaggaagatgttaatgcagccaggaagagaggaaataatggcagaagtattgtttctgaaatggacagagagccagggcagctaaaaaggttggtgtttgtagaagttgagactcttaacttgtaaggagagaagacagaatatgggcctgatctgatgcagatagattcctgtcctgttttattttctctttgaagaatgagatgaggtctttggtgattgggagtggggtgatgggcaagtgtgtgtatgggaggctagtttgaaagtttggcaagagaaaagaataagtaaaatgaacctatcagggatctgcagtgggattccaggcaattcttagtgcccatttgtgatttgtggtcgtgaatttaaaatgagagctagccaggagggttgtatgcataaacaaatatatatttttttttatcagaaaagtacctgggtagtatactttctacagtttgtacataactgaaaagtatttttttctaaccttcaaacagaaattccaacttccctatgaaattatttggccaagatcttttattcaaaactctgtggtccagcctttctaatagaactttctgcaatgacataaatatcttgttatctctgtgtctagtacagtcaccagtagccacatgcggcttttgaacccttgaaatatgactagtgtcactgaggaaccaaaatttttattttattttattttcattgcttaaatagccacatatggatagcagctactgttttggacatcacagttatagacattaccccactggtttctggcatttattatt

SEQ ID NO: 70300 - DNA, 1135 bp, Homo sapiens
tctgtctcccaggctggagtgcaatggcgcaatctcggctcactgcaacctccgcctcctgggttcaagcaattctcctgcctcagcctcccgagtagctgggactgcaggtgtacactgccaagcctggctaattttttgtatttttagtagagatgggatttcaccacgttgctgaggctggtcttgaactcctgagctcaggcaatctgcctgcctcagcctcccaaagtgctggaattacaggcatgagccaccacacctggccagaatgatcatttttaagatgtcaaaatgtattacagaattaacagtgtagaattacttaatcaggaagttaattggaaaagtattaatactataaatgaaaaaacataatagtctaagtacaacaatttatccattcctttagcaatagttggacacttagaatgtaaaactgttcaaacaaattggtatattggagtttgggtagaaagaagggcgttggaagaggaggaaaagagggtgagatgatacattaatataaattactgaaaggtggtgttcacatttagaattttttttttaagttgcatgtttaggattttagtgctcaggaggaaagaaggccagtgttgcccttccagaccatcgctgccatttccctgtaatatatcgtgtgtagaggaacctaatgcctgcagttactcagccaggggaaacaggaggcataaagccaggaaaatccaaggtgctgctgggcaggggagaggcatgagtggtggttgactcttctccaaatacccttcccttatggcaaaaagccaactgtgattctgatttcatcctgataagtacaaaggacttctttacttagagaagtctctgaagttaaatattaaaagcaaaggaaagaaaggaaagaaaaaataaaagtagataaagaaaaggaaagaagaaaaccatggtgtaattctactggatatgtctgggttctcttagaaatgattgcatgactatctaaaaatgagaaaagaaaatagatgtcctgaatcatgaacccaattaatcatatgtggctgttgtaagaaagggaaataattgtttttgtttctttaaatggattagagaattttagtgtgctttgttgtat

SEQ ID NO: 70301 - DNA, 1154 bp, Homo sapiens
gtaaaagttatttcatatttcctgcccacagtgacaaaagttgatattttatttttgtcttttttttttttaaagttaatgcaacaaagttcatcttatgacttttgaaaaatgctctcatggttgcactggaagatggatttccccattgcttttatttcttttatagtgtattaaattttttgctctttctgttatgcatacatttcagtatttgttcatgattgtgccttatcttagataagcttgtccaaataagtcatatactctatattcattcagttttctcaaaatgaattccgttcccaactctataatacttttatttccctttaaactttaaaaaaagttatttgtaatgggttttgctgtcatatggtgctcaacatttaactcatgtttttttctgtgtggtgtcccaataaggttatttttttcactcctcttttctttaattcccatccaaccagggtcatggatggattgcctttcagcatgttgtacttccttcctttctatactctcctcctttccatggccaggcttgttgatgattttgtaacaatggaactctatctctttcctggagtcctcatcaaactaggtcttcatcaagttctgaggggcatgattttaatcattgaataatttattaatttaatccaactcactttgccatccaggtgattttccagacttagaatctcaaatccttcacctaccaagttctcagggtgactgttacaactggggcctgtccggtaaaaatgtagtatctgcctgcaaatgtgctatataattgaaagctagtgagtaaccggctggtgcttttcagccaattaagacattttaagtgtcgtactgtactcattttgtggtacaaagtggtcacccaaagagatcaagtcctaattcatgtaaattgtaaattttaccctatttagataaagagtctttgcagattagtagttaaggatcttgagatgagattaccctggactaccaggtaagcccctaaatgccatcacaaatgtccttatgagagagagtcacagaggagaaggtgatgtgaagacggaggcatcagttagaatgatgctgccaaaagcccaggaatgccagggcagctactaggagctgaaagaagttgcaag

SEQ ID NO: 70302 - DNA, 2620 bp, Homo sapiens
agggatcagatactttaatttttatgactataatatgcacatattgttagtgaaagcatatggatttttaaaaaaattattactaaggacaatctacatttgtagattcttctagaatcttttgctgttattagttacaaaattaatagcatctatagtttctttagcacttactgtttgaacactgtgctagcacttcctgtatatcacacagtcccttaaaaggaaggcattatcatttcagttttccaggtgagaaacctgaggggtagggatgttaagtaacttgctcaaggtcacatatttagtatgttgtgttgatggagttcagatcccatcctctctaattccagagtctgggctcataaccactgtgcccaactgctattttataatctctaattttatgtgtcttttattgtacattaaataacattcttttttgagagtaagcagaatataaataatgatgtattgagtggccttctgttaaagtgaattcatagccttattgttggaagtctttaagataaacctttacatgcaatatggtggatggatttgagacttgcttatccaaactccacatttttttccccaaagaatcagctatttctgcatattttctttcagtttttaatttcatttttctgggtataactgtactttgagcatgaacggggcagtacccccttttcctcgcatctcctgtgcacatatgaaagttgttagcatttagactggcactaacttttcaatgaatagagtgggatttgatggtattctgtcatttgtcaaaaagaaaagtttaaatacatgtatattatcctatgtcatagaagcttttattatgattgattccttctgaagcagtatactgtgcagatgctttattcatgagttgttatttctgcaaaaactctgtgggttcctatttcattttcctcagctgaatatgccatgatttttttttgttgttgttaaatttatccttatacaggcaatattatttcagagatgttgatgcacattgtaggcctagaacacagctgtttgtaaaatttaatgattgtggactgtagttaaattcccgcaagttgatagtatagatatcaaaggcatcgattgtgcaagaaaattatctttgatttgtgtggcaagactgctgtcacaccatgaccatgattttcctgtggtggcagggatgttggtggggatggcattggaaataagtgacatatgactgataatagtaacaagaggaacaacagatgtgtagtgaactcatctgtctaataaactcttagacattgtatatttattaaaacaacaattgcatgtgaaagtctcaacaccgacatcatatttgcccatcactcttctttttcttcctttgtctttgatttgcctcattctttgttttttgggggggatgaggggagttatttctttgcattacctttctgcccttattagaaatgcaatggattattaaaaagtattgaagagaaaggcaggttgtatctattcatacacatattgtggatattacttttctgaataaatgctgagttagagtcctttatcccccgcatatgaatcttgttgccgtgaattttgggagatacatattgaacactggtacggagtgttcttttttacttcttgtgtatttgagtggttgtgtatgtgtgacaacaggaagaaaatcataatgatgtaatgagttatttaaggcactttttatccctctaccctctgcccatcaccactgtgctctcctctctagtgaaagttgttagcatttagactggcaccaacttttcaatgaatagagtgggatttgatggtattctgtcttttgtcaaaaagaaaagtttaaatacatgtatattatcctatgttatagaagcttttatgatgattgattttgttctgtagttttatttcccattctagacattcaagggaaactgaaggtgagcagtgattggccaaactctacttaagctctgaattcatcagaactagaggaaacattgcccatgcatgtatttgctgtagaaaccaaggcaacagattgtctttatgactttgtgcatgggtaaacggaaaagcaacacacacaccatgatcaaacaaaagcccttttttgttgcttctctctgccttgggccaaattatttcctccatccctccctttggagcctgctcccttctgtccttaggtttgtgccagccagtagcctcgtaggtgcattagaaattaccctcagatgaaggctgtcaatgtgacttttaaaatgtttattttttatttttttgagacaagatctcgctttgttgcctaggctggagtgcagtggcatgatcacagctcactgtagccttgacttcccagatttcagcgatctctcacttcagcccctcccctacacacctttataccactccggtagctgggactatagatgtgcaccaccacacccagctaatgtttttaattttttgtagagacgggtctcactatgttgccctggctggtcttgaactgctaggctcaagtgatcctcctgcctcagcctcacaaagtgctggtattacaggcttgagctaccat

SEQ ID NO: 70303 - DNA, 2173 bp, Homo sapiens
ataggtgatgatgatgatttcagttttggagatgttgagtttgaggtgccaatgagatagctaagtacaaatgtcaagaagacggttggatgtgccactctggagcttggaggaaagatatgggtagtaggtataatttaaaagtcatcagtatttacagttctttgaagccatgttgataagtgagattgcctagggagacgagtacagagaggaaggtactaggcctcagtcctgagaactcaagcatttatagtttgggaggaggaggagtggaagcctccaaaggagactgagaaggagcagtcaaaggagtaggcagaaacctaggagagttgggtgttcctgcgctgggggggagacagtgtttcaggaaggagggctggttttatatgtccatgctgctgcacaggacctgtggtgtggggctcggtgtccccgctttctgcactcagatcttgttgacagctcttgggttagctacaatgaggaagtgaacacaatctcactggcctattctttcaaagttttttcttctggctaatcatctttatttctttctattctttctcatatctggttttgaaactctctaacattcttgtcactctccctaagtatattctagcatgccagtggccttcttaaaagtggcatctaaaactgaactcgttaattcgtagtatagtcatagttgtacgtaatagaaagggactagtgtgttttcttgccatagtcattattattttttttaaatgtgaattcagattgctttggcttttgggagaagctgtatataatactgttaactcagatttagcgtgaaggcaagtaaaacacctatgtctttctaaactcgaattgctattaggtcagatcttacacttgtgcagtcaattgtttgaacacagaaacagaggattcaatttaatctactatgtgttggctcattcatttaaatttttttcttttatattacctatcctcttagctttgtattactcatgaatttcataaatatatatccttttgtcttcatctgaatcactgattaaaatctatagaaaattagagtttggagacagtcccatggtatacctatagaaatcttgcctaaattgacaccaaatcattaagaaacaccctcttaggatagtggttcagctgcctagaaatacgcccttgcattcattacacctctctctttagtaaaagcttaatgtggaaatgttatttgaaagtcaaaagagaagtaattgggatgagaactgttgaaatgctggtgtatgtgatgggccctgatatttgttatattagctagaatttcttcagtgtggactccaaatgcagcttatactatcttaaagagggtagctattggtttcccacactcatgtatctgtccttttactatatttaaaaatgcacagactttattgagtagctctaattgagtcctatgatttgtcttggatgaggattaacaggttgtagtctatttgaataatatgttcaggaggaatgaaggactttcacagtgttgagcagtctatggtcagtctttgaatccacaaacagaaaccattttggggccaattataattcagcatggactgcaggtgttaatacttctttaaagtctgcatcatgctaaatcactctgagaatgatagtgggtaaaaatgtgctctttgtagataaaattttattcctaaatgataaaagatagtactgcttcctagctgttttgctttttaacagcaccaaataactcaatacagccttcagatgagttgaatgcgtggcctcctgtcaaagttaatcgaaagataagcatcttcctccatgttgttagcaaagcaggtgaaaccagtggctaattaccctcaaaaagaaagctaaataatcccctcttaaaatcttcagcaattacatatacaatatcaaatacattactttttttgcttgattcccaggggaaacaatctttagctaattcagttgggggacacaagaggatgcggttttctaaaataaaaatcatgattaaaatagccagctggtcttgatcctgcacttaaaatatttcagaccaaagtcattgctatcctattttgatataaaactccagtgtctcaattgcttaggcccttgaaacaaatacaagattaat

SEQ ID NO: 70304 - DNA, 1054 bp, Homo sapiens
ctattaccatggttgacagaaaatatccctggaggtgggactctatcccatccagataaaatggctgctacatgttggaggctggatagaatggatattgggcagacaaccacattctctaatatacatcccttctttatttgtttcctcagctctgtaggagacttggcaaccagctatccaagttaactagaattccctgtaaaataacaacaagtgttcaaaaggccctcctgtaatgaatgtgcatgaatactggatttgtcacatctatttgggatattcagaggttttctgctttcttcctaattttcaattgtgttctagatagatgaggccaaatgactgagcagtagatagatgaggtaattaagaaggatttggccaataaattactgagaaaatattaagaaatacatcctctaatcagattgtttttgaccattttattacacaagtaatatatgttcattgtttaaaaaacagaaaagatagataacctatttgaagataatgaagagcatttgtaatctcatagctctgacttaaaacccagattaatttttaacccccttctgaaataaaaattgcctatttttatgtaagtatttctgtatggaaatggcaagtctattgtgtctttgaaaattagaaacagcaatatttattttctgctgcacctgatattttctttcctcaacaaatgttacccaaattatgtgacttggtaatttataatattgcctgactgatatttcaactacctgttttttccttctgtgaaatgcagattgaaaataataggttttctcaaaaagttgaaaatgtttcttttagacataaattattttctatttacaaagctgttatatttattcagcatatctcaaaggaaaattgttttcaaaaatgactgttttcagagacacacttcttcatcattccatcagaaccttataatgaatttgatgcagattgcttttgaggggtttatctctcagtcctaaacatataggggcatgttagaaaatttgggattctaggtgtgatgcct

SEQ ID NO: 70305 - DNA, 1021 bp, Homo sapiens
aggtctgcagaagcagatgacagtgatggtgctggaggtggggccaaagctaggacttgtcattaaccagcagggccatttctacttcacactctattctaatgctactttcttgttgtctctcatgtggggataatatttctgatttcatgccaactgctcagttttcagctgctgaggattctgctgagtgatgcatcatgtatccctcctcctgtagaaattcaagggaaattgctctctcaccatcacaacatggttgaagcccttaagccggattgtttacactctgcctccatcgcaggattatttgtttccttccttgcatcgctttgggtatttgatgctctattcgaatcattccttttccctccctcctcactctctccatttcagatgctcaacatggaattcctgtcagaagtctttttagagtgcttctccaaagctctgaggacttcctgaattataagagttcaccaggcccaagttgtagtgaagatgccagtctgtctgctatagcaggatttattttaaagcatctctgaagctttttgttttattctgctcagagtcaagagaacccctcttggggacagtgaaatatacttaggcacgtttctcctgagcacatgtttatattttagcgtgaaagagccccctaagcttgctaagaatttatatagcaaagattgcaatttctcaagtcccttgtaaagtcattatggttcatatgacctctgggataatgcacatcttaatgtgctgcagaatatcagtgtacacatttcttgatcagagtaggactctacctagaatttctgatgtgtatgtgcacgtcttcctcgctttttttctctctcaggtaataggacctatacccttcaaaaagtcatagtgtcttagaaagtgctattttagttgtgtagtagagattctttctgctgttcactaggagaagtgaatatttatttttccatttatttatttcttcacttattttacacttaaaacatttaac

SEQ ID NO: 70306 - DNA, 1156 bp, Homo sapiens
cgggtttttacattaatctttcgtgtgtgtatgtgcctgtgtgtatgcgtgtgtgtgtgtgtatatattataaatctactgtttattttagtaattacatatatggattataggataaattctacatttattctcttttttaacatgtttacctaagacttgatttgaaaattgctaatgttgtttctggcctagtcatcctcatttggaattatggcagtaacgttcagtaatattaacaatttttctagatattatctctctggctgggaagattttccgtagatgattcatgtaaagcttagaaactgaaggtactttctgaagaagcatttaccttttttactactcttattttgagtgacttttcagtgactatttttcacgatgtacatctttaacatactgcccttccttccttcatattgcatccttttgtattacagttctgtgcagtcagggccagccgtggggctgagcctctgtgcacctacagctcccaagcgagctggttgagaaggaagcgtccgtatttacatcttggcaccatgcaggcctcctgaggtcctaactatggctgtttgcattgtgcagctgctaagcagattcttggactgcctgtttctcctgtagacgcatattcgtgcgtgtgtattgtgccagctgtgggtaaaattgtgaagtaggaagtttgccttttgcgcctgaatgatcgttttggcagtcatttctgtctccaactcaaggctcctttttactcctttctcaacccacggtttttgtgctctgttgttcttattaaaacctgttttgtgaaaaaacctgttatcagccccatttaataatgtgaatttaagtcaacttctccctgaagtatatgcattttaaactgtatccctgagtgtggtgtgaaaagcttttctttcctagctggattttaggttttgggaaacaagcagagaggaagagggtgggggaagggagtacttacttgatgcatctgaaatcatgctgtgggtccgtggttttccaactgtttttagtcacatatcccattatgctgaagctcagtatctaaaattggttttacaaaatggagctgactggctgagacagaaatggagtgttcagaggcccatttattcacccttccttt

SEQ ID NO: 70307 - DNA, 1054 bp, Homo sapiens
gttgggaaggaaaagggaatggggggatagggagagattggttgaaggatataaaataacagctaggagaaagtataaatgggaggaataaattctagtgttctgtagcacagtgggatgaatataattgacaatagtttattatatatctttggatagctagaagagaggatttggaatgtttcttgcacaagaaaatgataagtgtttgagatgatgggtattaattgctctgatttgatcattatacattgtatgtatcaaaacattactatgtaccccataaatatgtacaattatgtgtcaattaaataaaaaataaattgtagtatatccatacaacaaacactactcagtaattaaaaaattaactattgatatatgatacaacagagatgaatctgaaaataattatgctgaattaaacaaggttgacctcctcaaaaagaatgtttactgcatgatctcatttgcctaaaatttcaagaaatgcaaacagatctttttgttgttgttgggggacaggaagaaggagggatggaaggtgggatgtggtgggagaaaagagaccaacaaaaagtaaataaggaaatttttgagagtgatgaagcacatattttacatattggatatccaattccatcttgattgtggtgatggtttcttgggtgtatatatgtccaagagcttatcaaattgtgtattttattttatttcatatttttttgagacacggtcttgctctgtcatccagactggagtgcagtggtacaatcatagctcactgcagccttgaactcctgggctgaagcaatcttcctctttcagctcccagagtatctgggactacaagtgcacaccaccatgcctggctaaatttttgtatttgtagagatggggtttcaccatgctgcccgggctggtcttgaactcctggactaaagtgatcctcccaccttggtttcccaaagtactgggattataggtgcgagctactgcactgggcccagattatatattttaaatatgtggagtttattttatgtcaacaata

SEQ ID NO: 70308 - DNA, 1815 bp, Homo sapiens
ccttgacttacaaataggtccagtaaacggccaaatggcctttaggatcagaaaaccagtaagtcctatttcagacatgctgccttggcccgggtttccccctctttctccttcactttctttcattgctctgatttaaaacactctccctcttcatactcagttgattttgttgtgtttcccccagtgtctatggctgcaggtctgtcctccctccgcagatccttgcctgtgttcttcctaacgtggacccagccagaactccttagggtcagtttcctcttcagaaatacacacgaatctgcagtgcgttgggcatcttgattatttgtttgtgtttcatctttctcaagagtcatagaaagtaaagaaaaagagggtgatgagtgatggaaggaaaacattttttctttttgataattttaactatttgttaaaaaaggattcaaagatccccaagtgtgaacagtctgaaaagggctttttgcttgctgcagggacctgagaattgagaaacagctgtgaaactttgaaccctggctggaaggtcctggtattgactgtggcaagaaaacgggggagctaatctgtaatctgcttagatggaaggaaggaaagaaagagaaaagagaaaaaaaatcaaagaaaagcaaagaaaaagaagagaaaatataaaagagggaactagctttgggtccccatggaaacatatactggcaggagacactgtgcccctggtttgagcttaccctctagttcctggtccgctggagcctggggcattggaatctgccactattagtgtgagggtgacagggagggaggaaagggtgagagtggaagttttggattccactgcttaatctatagattcaatgtaatcccaataaaatcccagcagacattttttagtagaaattgacaaactgatgataaatttcatatggaaatgcaaaggacttagaatagcaaaaacaactgaaaaaaaaaagaacaaaggtaactgatttagcatatatcataaagctgcaataatcaagacagtatggtatcagcatcaagaagacaaataaatcaaaggaacagaatggagaatccagaaataaacccacacatttacgggtaactactttttgataaaagtgcaaagataattcagtggagaaaggattatctttttaacaaatggtgtggaaacaaattagagatccctatggaaagtatgtgcttccatttatcttttatatcttattaaaaagttaactcaaagtgtatcatagacttaaatgtaaaatctaaaactgtaataattctgtaacaaaactagagaactcctttatgactttgggttaggcaaaaatttcttagataagttatcccaaaacataatctaaacacacacaaattaatgaattagactttctcaacactaaaaatgacaactttttgaaagatatgccaccacctgagaggaaataattgtgaaacatatatctgatcctgtatctagatatataaagaactctcaaaactctgtaataataaataaaccaaaattttaaaagtgggcaaaaggtttgaacaggtacttaagcaaagaatatatatgggtaacaaacacataaaaagatgctcagcatacataagcataaacatgggaacaacagacactataaactactagaggtgggagggagagaagggagtgtgggtggaaaaactacctattgggtactatgctcactacctggatgacaggatgcatacctcaaacctcagtaccacgtggtatacccatgtaacaaacctgcgcct

SEQ ID NO: 70309 - DNA, 1759 bp, Homo sapiens
ctcagtgtgggtgccacatcaggcagaggttttggaaaactgagcatttcccaaggaatagcatccacattggaagttcaggtgctcactggttgctttactgtccctgcaagctgttggatgtccttactgataagatatctccccctcctccctgctctcctttcaatccagacaagaatgtttgtttaagaaagatctgttgccttgtgtggtggagtgtgcctgtattcccagctactcaggtggctgaggtgggaggatcacttgagccctggaggtcgaggctgtagtgagctgtgattgcgccattgcactccaggctgaatgacagagcgatacccagttttaaacaacaacaacaaaaaactacaaacacacaaacaagcaaagatttggatgggaattcacaacaaattctgcacaactctattaggaaattattttgtcataaaataaggctctgtgatgggttcttaaagagattatattattcaaaagaaaggggtcaccatttttctggggcttctgaggagttgtttcctctgtaatagattgaccatgagatatgagatcatcttagaaatatgtttttctgctttcaacagcacttgagggcatgttaacatgtgtgagactacagtcagctaaacaggccatcaggataatgaagaagaggaaggattacagagagccgaaaagctggaaagccagcttcaatagaaataatgacaggagctaacatttattgattacttactaggtaacaggcattgttctaagggcctacgtgttttaactcaatccttaggacaaccttttgagggaggagatacggttattaacctcatttaggaaacctttgtaggggagtgaatagaaaatgggacactatggaagtcaaaagtaaggaagtagaaaacaagcttgagaaaaaattttcccaacaaaaggctgaaaatgtagaatatgagaactatggggaaaattatagcagcttttaatggtgttatctttgaatggtaagattaggcatgacatttgttttcttctttatgtttttcaatgttttaaaataagaactttttgaaaaatgcttttttttaaacaaagagcatagttgacagagagcatctaaggttttcaataaataatcttaaataattcaatgaaaattaaattgcattacaggcagtattcagggagtagacaagagtgaagcagccccgacagggagttaacctcctaattgggaaaatagagcagagagattcatgctgctgaagaagcactgtgactatgcaccttcactcctccaactcaaaaagaagaagaagaaaaaaagcccgaggaaaatgaacaccactggctagttaggagtattttgagaattcactttaaagtgctgagaaagcactgttatacatgataattaaaagttagttaataatttatgcttttaattttaataaattatttatttgttttaaatatattatgcctcgttgcctggatcctgttatcttccatttatccacacttggggtaaacctagctgaggaccctcgccgtcatgacccaagataccatctggtggcaggtgtaggaattgcgagttaaaccctggggggagagaaacctggggcaatagtctagccttagaaattcaagtccatgaggagatactaaaggtaatgaacatatgaaaggactgactctgtaatgcacgtttatttattctatctcatatttctatgga

SEQ ID NO: 70310 - DNA, 1150 bp, Homo sapiens
gatgtatctattactttacctgtcgtgaggtgagcggttatatatgtacaaagaaattgagattataatccctatcatctccagctctgggcttaagaaaacagctaaccgagcagttgcttgaaaaaaatgacaggaagaaatttttagtaattaggcttctaactaactttgttgctgtccatatttcttctccttcaaacctctgagaatctaagagctgccaccctaagtacttgtcctacttgcccttatgcagcttgggctaaagagaatgtttttggtaaaataaataaactagaaatgatagggggttaaaatgaaataaactcaccctagcactttttcacagttagaagcaaggtaatttaaatttatttttatctgctgttctcagaaggtttggtgaaacctgaggcttaactgcttcattttaatatttattattgagggagtatgggaaatagtggaacagatttttatgaatcagagagagaaaacaatactttaaaagtacaattccagattggaaacttttttctatctgacaataaaaagccgtgttaagtggctatttttgatctttcttgtacagacctcattgcttgagttatgttgccgcagagagatgggtgcttctcaatctgtgctgcatggggatgtatctgcattttgccttaaaatttacctcctgtgcatgtctttattgataataacttatatttccctatggcaataattttctgatgtcttagggaatgtttatagtaagattctaggtagattttgatttttttcaatattattattattattattattattatttgagacagagtctcgctctgttacccaggctggagtgcagtggggcgatcttggctcactgcaagctctgcctcccgggttcatgccattctcctgcctcagcctccccagtagctgggactacaggcgcctgccaccacacctggctaatttttttttttttttttgtatttttagtagagacggggtttcatcatgttatccaggatggtctccatctcctgacctcgtgatccacccgccttggccctcccaaagtgctgggattacaggcgtgagccaccgcgccaggccgattttttttaatattatttttattgga

SEQ ID NO: 70311 - DNA, 1831 bp, Homo sapiens
aggcggcaagaaagaggtttctttatttttcttgaaaagtgagttctcagcctaggaaaaactgtctggatctgagctgtccaacccatacccattgctactagccacatattgctattaagaaattgaaatgtgactagtttgaactgacatgtgctgtacatataaaatgcacattgaatttcaaagactagtaagaaaaaataatgtaaattatttaaataatcatttttatattggttacctgttaaaatgataatattttggaaatgttaaataaaatattaaaactaatctgcttcttgttatctttttaatgtagctcctgaaatatttaagattatacgtgttgcttccatttgaacctttcattatattttgatgtgacagttctgattgagatctgtgcttttcaaccagaggcaactccccaacatcttgcacccccaaggtatatttggtaatgtctagagacatttttggttgtcgcaactgagcatgtgactgcatttagtgggtaggagtcagagatgctgttaaatgtcctatagtgcaaaggaaagtccctttccccatcaacaaagaattatctggcccaaaatgtcagtagtgctgaggttgagaattcctggtatagatattcagaaagaagtaggggaaaaaattaggaacaaaaactccttttaggttaatttgatttgaaatattagaatgaataagtatttaacaacattaaagagggtctattattgtaggtaagagtaaggaaattagagacagttggggaagaagcataaaggcaatagattttcctaggcattttaacaaatatttgttgagtgactacacatcctttctggaacaagatgaggggagaataaatgtatatatacaaacatatacaaatattgaattctgttcatgtgcgaagcttctacagggaaaagaaaaataaataactatgatttcctgtcttcaaaaagcctgcaggctagtagaagatggcatgagaaatatactatcttctaagacaacgaaaagcctatagatttcaaaggaaaatataccatgtctggtggggaaaattaggaaaggctttatggagagcatcctgtctgaagtgtatccctaaccatggacaggacagcagtccgtggagatgttggaagggcatacaaaacaaagggaacagcatggcccaaggcacggaggagggaagatacagggtatgtttggagtctttaataatcaagttgatgaaagggtagaatctcaatgggaagcagttggaaatggactaaaaaatgaaaaccccaaacaaaagaagacaaacaaaaacaaataagattaagattatttataatagatggggagattaaaagaaagaagagatgagagaggcaaagtgcgtaggaatagacatttgatttgatgtaggcaaataaaaaagaggaaggaataaaagataatcctgaggttttcaacatgggtgtctgaagacattaataaggatagagagagcggtcaggtaaatggaaagatgatgggttcaggattgccttgtggagtgtgcggtaaattatccatgtaataaagaggtggagaaagcccctgagatttggatctggaggtcaagagagtgataaggattacagatattggagtcacctcaaaaagagcaatttctgacattttgagaatgggtaatagcggaagatggtgtctagtgaggaaggccaggatatgcccttaggtgtgactgtcttcgggtgatgaaaaagaggaagagaagtcagtgaaagtgtgaggatgtggcagaagatacaggaac

SEQ ID NO: 70312 - DNA, 1033 bp, Homo sapiens
cacctggctcaaggccccgtcctgcaagcaccattcatggcaagtgccttacataggtgttccattttttttatcttttatattctatttatattgtaccttttctatgtttagatacacaaatacttagcattatgttatggttgcttacagtattctatactgtaacaggctgtatgggtttgtagcctaggtgtgtagcaggccataccatctaggtttatgtaaatgcactctatgatgtttgcacaacaatgcatttcgtagaacttatccctgtcgttaagccatgcaaactatgattaggaaatagaagtcattccttcgtcccctggtgagtttcagtacaggaagcaggctatgactctaacccagttctaggtaaagggaatttttcctttaagattgacatgtgccctccagcaggttccttttgcccaggtggtttgaagctaataattaagttctttgttggttcttgaaacattgactgaaaagtttgacttgcctgaaaacatataggaaaagttttgaattaagagtgttgtcccttattggaatgtgttactgagaggggtcttacaatcatttctttacagcctttaaataacaatttaagtttttcatcagccttgatagattaggcttagaactcctgaggggtaagcacagattaaaataaatctccaagttgctttctatcttttcctggctgtattatgtgctactcttttcagattcaacaaacatttaggatggcaggaacactgtgcctgatatttttacatatattaattcagttaaagtaattctcacaacaatgtacaaagcaggtatcattgcttgtgttatagatatgagacaaccaatggttcaggaggtgaagttactctttgaaagttgcacagctaggatggggtgggtgagagaacttggtaccaggacttggagaacttggattctgtcttaaaattccattgatgagctctgaatctcaggccagttttcagtcttgttttagactccagtttcg

SEQ ID NO: 70313 - DNA, 1019 bp, Homo sapiens
tgaaatgcaaactcggctactaagtttttttgtcgatgagttcaagctaattttaagactctggatatatcacctacccaacccaagcctctggttgcaatggtgaaacaatggtgatgaacctgatgtcatcccactgtaaatattaaacaattttgatgtaaattttagatgaagagaagtcatatttacatcaaccttccagtgcatgttgcaactgatttatttattcagcgatacttttttagaatgtattctgtgggggaactgggtgctgctctagtgctgagggtgtagcatttttcctcactttttagtgcttactctttgggaaggaggtacagcactaagaagttaaaaatgcacgtaaatagatagtttgtcaggatgagataaatgatgtgtagaatataaagactaggttagggaataataatggaggagaggctattttagatatggtagttagagaagttagtttccaatttccaagtggaatctaatttattctctctctcttttgtttttatgtatttttgatgtcttcttggcagcctcatatcattgctaacctctccactccatggaatcacattttcctgcaaacgcatcatgagcacttatttaaatacctaatcattggcagaaatgcagctgtgttcatcattgtcaattctgatttgtatgatgttcccatccaaacatacctcagggtacatttgcacatctaattacaacattaaaactaataatagcctgataaaatactactcagacaaatgtctaagtaaacagctggctgtttcattgtgtcctgaaggacaggcagattcagactttgttccctaacttaagggactgaattccaaactgcgaaccctcccccatgcacaccctgctgaggggggctgaggcagggggtgtctaattcaaagggatatcctcagataaaagagcttctgcgaagcccgagctttatggaactgcatggaggaaacacgtttttttttctactttat

SEQ ID NO: 70314 - DNA, 1014 bp, Homo sapiens
gaagattacattatgttagtatagccttagtatttaagtattattattattattattattattattattttcaggcagagtctcactctgttgcccaggctggagtacagtggcccaatctcggctcactgcaaggtccgtctcccaggttcacgccattctcctgcctcagcctcctgagtagctgggaccacaggtgcccgccaccacgccctgctaattttttgtatttttagtagagaaggtgtttcaccgtgttagccaggatggtcttgatctgacctcgtgatccacccaccttggccttccaaagtgctgggattgcaggcgtgagccactgcgcctggcctgagtattatatttttattcagagatcattggtgcagtatttaagtatgcatgtgtattccccaaaccatacttacacacttgtcggagactcacacgggtttttcatgcttcaagaaatagatgtaatgtttctcggtatgtttatatctttgaattcatatttttataattttgaagaagtataggggcaggaggaggttgagaggcaacttggagatgttgtggagaagtcaagtcttcaggacttgatgggataagtagaaggagtcgtagaagccatggatgggtaggtttagtaatttgaagctgccagaggagtggaggattttaggggccagcagtgtattaaagagatttaattgtgaagccacaacaaggagggctatgaaggtacaaaagtgttgacatccttattctggctgggtgcggtggctcacgcctgtaatcccagcactttgggaggcagaggcaggcagatcacttgaggtcaggagttcgaagccagcctggccaacatgatgaaaccctgtctctaataaaaatacaagaaaaaaaagccaggcatagtggtgggcacctgtaatcccagctacttgggaggctgaggtaggagaatctcttgaacttgggaggcagaggttgcagtgagccgagatctcattg

SEQ ID NO: 70315 - DNA, 1054 bp, Homo sapiens
gacctctgtatttttcatttaaaaattgttttgggaataaatgctaagtgtgtgtgtgtgtgtgtgtgtgtgtgtgtgtgtttattatttgtgactatttcttattacatatagggatttgggaatgggtttggtcatattgctgtggtacgtatttaggccttgcctagtactttagggcatgtgtatagtattgatctgcagtgagtacagagtcatgctgcgctaagttattgattgatcatatttttaaaagtcaattgtagatcatctaagataaaatgtatatttgtggcaattgaactaattatgaggggaaaaattcccttttgatttgtatagagtctgcctttgctcagatggaatgggcagatgcctgagtgataaaatttctggaatttcttcctcaaacctttcctttcacaatcatgttttgaggttaaatttgaaatgctttagttaagaaagcgcatgttaagcttatacaaatgtaaacatcattagtttttaaaaggggctctgagaggcactaactcaaaggcagttagtagacattaggaaaaaacaaacaaacaaacccaaacatttcaatggtgtactaagttttaaaactcctgtggaagttctcagatgattttatatcaatgtacattgtgaaactctgaggagggggtatactgctttagtagtcaagtgtttttattgcaagccacaaacaccaattggaattcagtttaaaagagagaatttattataagaattcagagataccttgtggaatgtggcagtgggaatggagctggctcacaggaatggatgggctagaaaaccatcaggatcctgtccacgtccttattggggcttctgccagtgtttctgctcaatttcttccctttctccattgtctgccttctatggactctccttggaagtcccccgcttttagtaacagcataggaagctttaaaagtcattggttagtccttcacaagctgattcagtattggatagtcagacaacagttatagacatcagatagccagtgtagatcata

SEQ ID NO: 70316 - DNA, 1044 bp, Homo sapiens
ttgaggaaattatgtcttcctttctgtctcctttgtagttgaaattagaggaaaccaagttcattggatttaatagtgtagtaatgatgatgattataaataataataaaagtaactgtagtacagttctccagagaatcagaaccatctctctctcttctctctctctccatatatatgtgtatatacacacgcacataaatatatgtctatacatgtgtgtctatacacacacacatacacacgtgtatatataaatatatgtgtatatatatttgtgtgtgtatatatggatatatacacatgtatatatgcatatatgtgcatacatgtatatataatacacatatgtatgtgtatatatacacacgtatatttgtatatgtgtacatatagagagagagagagaaagagagagattgattttaaggaagtagtttacaggatggattatggagatgagtccaaaaatccaatagggcaggcctgcagggtggacactcaggaaagagctgaagtctgagtccaaaggcagtctgctggtggaattcccccttgcttttgggggaggtcagttttttgttccattaagacctttaactgattgggtgaggcccacccacatcagggagggtaatctactttactcagtccaccaatttaaatacaaatctcagcccctgccaaaaaacaccttcataaaaacatccaggaaaactgtttgactgagtatctgggcactgtggtccagccaaattgactcagagctaaccatgacagtaaccaacctttattgagcacattctgactgccaggccctgtgcgacattctttccaaacataatttcattcaatttttttattatctctgtcagttgggtgtctccattccccagctgaggaaaccttaggaatgaagtggatttgttacccactcaaggtcacacaggaaggaagtgtggggctgggattcgtgtttcttacctccctgtctaaacacgtaaacgacaaattaggtgacccatgaagggacacctgagtgga

SEQ ID NO: 70317 - DNA, 1070 bp, Homo sapiens
gggtggaatgggccctagatatttcagttcagcagctgagaaatgcctttggatttcctccaaatagcttctttatctattcactgtttgaaattccacattagagattctcctttttaaaaaaaaaaataaacttcaagtttcaaatcttctgtacaaatgcaaatatctcagcataactaagtaataaatatattgagtaacatgttagtaatgtgcagtagcttatagtaatgtgttagtgagtttataaacttttttgtggattatggggtttttctctggccttaaatagtactgataagggagagagcaacatgattcttggttattgggagaaggggtgggagaataagatgatgatgatgccccaactgtgagaatggggggcgtagaagaaaagctgggtgatggaagccaaacgccacttaattatctcttttgctctgggctaagccttctttcttgatctttgagaaaatggggaaaaaatctttgactttatgcctgaagacttttggttgtatctttaggaggagctgattgatatattttgcttttggttaagagctgtagatcacttttgcggtctcagaagaaaaatgatatttgagggctgaacggttatagttttaatgaaactgggaagactttcagatccttcccaagtcctaataacagactttaggactttttctagagtttagcgattcctcctatcagcaggctccagaagagaattctgtgtaataaagatgaatacttaattcgtggctttcaggaggatgaaaaccaaaggaagagtaggtgctacatcaatttcaatgatggccatagaactgcaagggctccccagaggacctcactctcgcctgcagtccctcgcacctgcagagccagccttggcctttgtcagtgaacagcacacacctgccagcccttatctactcacactctccaggccatttagagccagggctgcaggcagatggcaccaccctgggatcctttgtcattccaaattgtgctatcatgtggacaagtccatttgtcccatgtgaagctcttct

SEQ ID NO: 70318 - DNA, 1033 bp, Homo sapiens
caaattgggaaggtttgttctgtgtgtttcaggtgaaatttccccttctaaggaatccgccttctcaggcccagccagtgcagatgcagtctctttaactgttgcgggtctgatcactctcatggcatgtggttgaagtgttgacagccccggccctgtcaccagcatttgacttgtgttggagatcgtggacaaaacacttaagtcagtttgaggtttactgtgtgctggcccagcttccagggtggtctggactgccccactgccactccaagcatctttttattcagtctttttcttaaggtagctacaactgtaagttgaaacttcagagtaattccttagtgtgcttagaatcccattaagtctcacactggcttactcaggtatttactcccagtgtatcatttgccttcctcaggccaagacagtgtgcaagtgactttgtttcccatccatgaactaaatggaaagacatgtccttcattatggcccttacaggaaagttgcctcctgtaacagacatgctattgggttggaggagcaacatagcacagatgttcttgagtaataaatacaggatttccagctaatttatttgagctctgagtaacagggtgatcaggattctcctgctttcttaaaactcagcaaaagttcatgtagaatttctctctgtctctgtgtctccctcccttcctgtccttatccctatttctttacctgacactgaatcaacaggattttgctgactaattacttcattgaaaaaatcagagaataaagttacccactcttcccagtgggtaacttgggaatcttgattatctttttctaaacatgattttgaatcccatctccaatgtgctgtgttacattttctgcagcttagctcaagtagtgttgagcgcatacactctggagatgacctacttccattcaaatcttggctctgccatttattagctatgtgaacttaggtgcatcttttacagcctctgtgactcagtttgctaatgtgtaaaatggagat

SEQ ID NO: 70319 - DNA, 2738 bp, Homo sapiens
tctcctgtctcagccttttgagtacctgggattacaggtgcgcaccaccatggctgactaatttttgtatttttagtagaaacggggttttgccattttggccaggctagtcttgaactgctggcctgagatgatctgcccacttcggcctcccaaaatgctgggattacaggtgtgagccactgcacctggcccccagctgtagtgtttttatttttattttttcgcacatgacaaactatatattttactcatttatttgtgtattttatatgcctgctgtttattgttaatggaagccacttgaaagcaggaatttttatctgtttcgttactgttgtatccccaacacacagaagagtgcttggctcatagtaggtgcttagtaaatatctgttaaataaatgaaatctctcaggttgtgttactaagagcataagagaaatgatttgcagatgatgatataattgcattcacttttaagatttccattgcttttagggtttacatttgagctttaagcatcttgatttcaggggaagaagaatcaggaacaatttatattccatatcttgcctggtcttcccattgtggatgaagaagaattggggacctaaataaactttacctcctctcctgccacaaataggtagatggccggtaagcagtgaatttctctttcaccactggaaatctatagagtggtccttgaaaactgccttttaatgtctaaattttcaaattatttctgctaaaatatacctctgttgaggatccacatgatttttaaaaatgttttaattgtttaatttttatttatatttatttttttttttttgagatggagtctctgtctgtctcccaggctggagtgcagtggtgcgatctcggctcattgcaacctccacttcccaggttcaagtgattctcctgcctcggcctcccaagtagctgggattacaggtacacaccaccacgcctggctaattttttgtattttttttgttagtagagatgaggttttgccatgttggtcttgaactactgaccttaggtgatatacccgcctcagcctcccaaagtgctgggattacaggcatgagccaccacgcccggcccaaggatacacatgatgttttaaagcagaaaaacagtagaggaatgttttgtagtgaaaatctttgtctcgatatttattctgacatatgatttttgtgttagcaatcgtgtcataatcttatttgtgtccacattgcctgccatgggtcaagacatggtgtagatgtttaatatttgttaagtgaatgagtaaatgggataaaatgagtttacattttaaacaatagggcaggaaagagatattctatacttctatattcccaaggtatctgcttggtttctctccttatcccccagctttggaatatcagaataacaattttatgactttactacatttttttaaatgcctggcacagcattcctcaggcattcattaaatacttgttgactgagtgatctaccccttcctcctgcagactatttaacctaagggagactcctgaatgaatcaaaggcccctcatggattcctcatcatggaactagtcagttagatctgggatatatgcagtggatgaagaatgaatattcactgatataattttttccttctgttatgggaaaacaatctaggaagcttgattttaggatagagatttgggctttaagaatctgaattggattctaagtctaattcctacactaagtggtcctatagatttgaacatactatttgacttctcaagttcttcctttgtaaaataaccatagtaatacctactcttcagggttgttgtaaagatttccttcctccctccctccctccgtccctccctccctccctcccttcatttttgagagagagtctgctctgttacccacgctggagtgcagtggcgtgatcttggctcactgcaagctctgcctcacgggtttacgccattctcctgcctcagcatcctgagtagctgggactacaggcacccgccaccacacccggctaatttttttgtatttttagtagaaacggggtttcactgtattagccaggatggtctccatctcctgaccttgtgatccacctgcctcggcctcccaaaatgctgggattacaggcatgagtcactgcgcccggcctgttgtaaagattttaagactacctgtaaaaatacctgtcaagagtgggccaccagtaatgatagctatatatagaatagtaaaatttagacaataatgtagtaattacaagatcctatacaaaacaatgtccaggttttcttgttattacacatgatgcagttacctgagggtcattttagaaggtgagttccaggatgtttggagatccctgtgtctcatgaagatggttgagggagggggacatttgccagtttctcatgctaaaataaatatttggtaacacaataacttcttgttaaaaatatttgaaaaaatgattatgaatataacccagaaatttatctaggctaatctgtgtcagacttaaggcctccaaacgtgtcatagaataatacatacctggataaaggattgattttaaagaatatgcctccatttgctttgttactgatatgtggttcagcctgacctcaggctctttaagtcacaattttccagttctcttcctgtcagtgacttcatttgatgaatagcttt

SEQ ID NO: 70320 - DNA, 1212 bp, Homo sapiens
caggtaaatgtcggaaacatgaagagtgtagatctctggttcaagtactgattagaatcagaattgtatattgagacccagtatcttgatacagagcctggtgttttttctatcacatattgccttttttattgcctcactccaccggtcaatgtaggggaaaaagtaaacataatgtggtagaataatataaaaataaggaaccaccaaagtgatggactaccagactgtgccatgatgatagcttattgtacaatagctttcttcttttatttatatacaatttatattacctattcttaaaggaaaaataattattctgtacatttatctcctaaaactaatttagaattttacatgagtttttaagctgaaagagagggaatggttgtactgtatttattttttagatttatcttccctggtaatgcaattgggtagggttttaagtttattattttctgaaaacaactaagtactctgtgaataaagttttaatatacttcttgtactatactcaaaatcagaaagctggagtttaagtcttctgtctcttagccattttccctggctatttggcctaggtatagaccgaccatcttgactgtggctttctcatctgtaaagtaaggatgattcttggcatactgacctttggggtttatacttagaggtgaaagctattaatgtaacgttactatatcacaaaggccagaaattgtgaaagacagagggtcttcaggtacatttgcctattagcaggccatctctggatggaggcattatttggataacttgtgtttcataaattggaaatttttattaaaaaatttcaatccgtagtcttccaaaatgaagttcaaacatgaggttcccctttggactcccatttgtaacaaaataactcaagtaatgcaacaaagttacaatgcatacaatgttgcagttatccaaggcagcctcatttctggctgcagctggaaaagtccagctcaaatactgagtgggctctgccactccctggtgttacttatctgcttctttcagtccaggcttctgacaacccaatatccaaaagatcattattctcaattaaaatgatgtttggaaccttttgaagggagaaaaaattcttgcagctctccactgccaacacatttttttttttttttttttttgagacggagtttcgttcttgttgcccaggctgga

SEQ ID NO: 70321 - DNA, 1319 bp, Homo sapiens
ttcatttcttctgaaattgaaaagattcttaaatataaatataaaaaatctacttattcaaattttcttattcaagaagcctactcatttaggtatgtcagtggccaaagggtgctatcagctttatgggaaaattagtgttcttcaagtatatctgcatattaaaagcacctgatttaatttcttaccacttttcatttcaacagcgactaaactttaagcaccaagtgaggtgatgaatacaatgtaaagaagatatggtctgtgtactagatagattccttaagtgccagcacagtagttgatgaggagatatttgaggtccagatggcattgggtttaaattcactccagcacttactaactctaggggctttttaactttttaaagcccttgttttctctactttaagatgaggacaagaaatatctatgtcatgtgaggattaaatgaaattaacaaatatggaggaatgtatgatagtaccttgcagatggtttggagttcagtaatggcaactaccattttaatggtatgtttatataggtctgttaacaccttaggatatcctgatgatgaaacaatcaatcaataatttttattctttaagaacctcataaaacatttttaaaaagtctaatgttttgtgaaaaactacactgaaacatagaacttgatgcagccaaggtctttgatgtattctagcccagctctcatgaaaacaaagaatctagtgtagagagagaaatgtgcccaagaccacattttatacacttagcaaatgtttattgagtaccaactgccaaagtgccatgatgggatgagaaaataatggtttccattttaaaggagattattaagtatagttgtagagtcatgggctatgacagataactctaggacagcttctctactcttgtacagattaatgcggagggagcagagaagaggggttgattgtgctgggggtgggtgggaagaaagaagtttctgaagacagctgtcagaggaggtggcatagaggaagtgttaaaagacttgaaggaaggggaggagattagagagttgggaggggatagaaggaaaggaatttcaggcaaggagcatggtatgttccaaagcattgtgaaatgagacattctgggaaccatgactggtttcttaaaggggatggagtgtagagtatgaacatacttatgagcatagaatataaatattcatttcccctatgggatgaggaatggagctggatgggagcattagactagaaagggccagattggaaagggcttcgtatgccaggttaaagagtttgatt

SEQ ID NO: 70322 - DNA, 1044 bp, Homo sapiens
cataatgcttggaaagattatctgtttctgcaaacatactttttggcatttttattattgaggaaaagagaaaaatattaatttgtattttctcatttcctttgcttttatatttagatttaacaaatatatataatctaattatataggtgtgttaagtgcatttcacattagcatatacattcaccaggggaaaacacatgcattttttatagcacttcacccccttgcctttttttcctcttacaagttttggaggtctacaaatgaaactgagaacttctctttagatttctgttttagcaattattatttcttgacagggtctcactttgtcacccagtctggagtgcagtggtgcaatcactgcacaccgtagcctctacctcctgggctcaagagatccttctgcctcagcctcctgagtagctggtactgcagacatgttaccaccatggctggctagttttttttgaattttattttttgtggatatttggacccctttagatataaataaagagcttttataaaatatctatgagaatactatgcagccataaaaaatgatgagttcatgtcctttgtagggacatggatgaaattggaaatcatcattctcagtaaactatcgcaagaacaaaaaaccaaacaccgcatattctcactcataggtgggaattgaacaatgagaacacatggacacaggaaggggaacatcacactctggggattgttgtggggtggggggaggggggagggatagcattgggagatatacctaatgctagatgacgagttagtgggtgcagcgcaccagcatgtcacatgtatacatatgtaactaacctgcacattgtgcacatgtaccctaaaacttaaagtataataataataaaaaaatatctatgagaaagcacagggagcttaaggagtagacctttactacaaacttggcctgtttcatttcccaaatcacccatatcgaggagatctggtgaccccacccacaacctccttaacaaaaagtccaatgtggaattt

SEQ ID NO: 70323 - DNA, 2571 bp, Homo sapiens
ggggggcgggatgagagggcagcgggagaggggtggtgctgcagcagggaacttttcgcttggggaaagattttttctggcgaggatgtaggggaaactccagcttctgcagggcccgctcgcacgtggagctccgagcggccgtctgtggggtgggtgctggggggtgatggtgggcatggaggggggttcctgcagtgctttaagtgacttttcaaactttcctccacctcccgcggccaccctcgcgttgtccccgcctctggctgggctgcgacggcattgccaacccaaagttgctggagattcataaagaaggaagaggagaaggaagagcgtaggggaggcaagggggcgctgccgcaggtctctagaaggggagaggaggggaaagattgtcccctcgatcagggtctggggctgggagtgactgcttggagatgagttatgccccagcgcagtccccgctgtcagtttaataccgcaggactgcgggcttttcttaattactgtctattttctttgcaaaaggcggctctctgcctggtgccttgcagcccttttgtgcttcagcttgacaagtgtgctggacactttgcttttaagtaacttgcggagaggaaagttgaaggccttttgcaccttcaaggcttagttctgttgaggtcatttcatggtgtttggatggtgcagaggttggccagggagttcagcttggtaacctggatatgatgtactgagtgcaccagaatttcctatacaggccccatggggctagagggatgtgcacggtggctctgctagcatccagaggaacgctggctggcaaggtccaccagggtttatccctttgcttcttctatcctgtcctgtcctgtcttcgaggaaggtgctttggaaccggataggtttcaggatgcaggggctccatgggctgtgggaaacagccggtgctgaggttaagcggcgcagcgtgggtaggtgggcgaggaaagccagaggaggccggccagtctggtgtgtggagaaggcagtgttgtcaagggggcttaatgcagcagtttggtgagctggtatggacggtggcttggttattgggcatgttaaaagtttcaagcttttgaataacacttactactgaagaaccaatgtacaatttccagtttttctctaggtggcacaacctgtctttggtttgtatcctgtttaatgactcagggaattcatccctttttaagcacctccttattagatatgtgcattcattttccagcacactttctggcaggtgaccttacgtctacccattcaaaaggcacccctgctttaggaatgcttctgcttctccctttagtaaatcatatctttaaagttgcaaatagcagtaccaataatttataaccaggtaaaagcactacatgaaagcattctgtcaagcatggagtgactgtcctatcaactaaatgtcacaatgtacttggcattaaatgtatcagtttgcttaaaaaaaaaatcaccatgcttccgacaagttttatcagaatgctgaagtgggtagatttttggattgtcacgaaatgtacttgtatgtcttttggaaatatatggtaacattgaaagatgattgtctaatctgcttggtggagataagactgaaattcctccagagcataaaaatctgagtaagaaattgagtgttctgccttatctcccccaataggagaaaacaaaaaatgtttgttactttttgccttttttcactttaaaggtttcttctttctcactttaattaagagatgcttttctaaataattagtatatatttttgtttggttgtagcatttctttttgaagtcctgcttcttttggaatggacaaatatatggttttgtttctttcacaatttcctgtctaactggtgtttgtgtttcagtttgtgtgtgtgtgtatatatatatatatatatatataaatatatatttaaactgagctgcctatgtgacttgtaatgcatatatcagaggacattgcttgagcttggcttatccttttggatgaatttcagtgtaaagagatgagagatgttttctatttgtatttcaggtcaaattgtgttaagcttttcccttgacccttgaaattctaagtgattcaaataacgttgaattggattcttttaaatataaacaaaaagattaaactgtcaggttggtcaggaaaataatgaacatggaacaaatacattttaaattttgtcttggattaacattaaccaaaaggtcaatttcgaatatcttactattaaattctaaggttggttgtgctcatctaaaccactgcgctttccacattccccacaaccccaatctacatgtaaacattctaaaacccattatggagattactctagcataacatttttttcatgtagattttatttagtaaaatctcttcttgagatgtaacgcaaattaatacaagatgctagcttctttgaggaccgcatatttgaaggagtatgtatcttagccttattcctaaaaaagaagaaaaacatgccaatctcaattc

SEQ ID NO: 70324 - DNA, 1034 bp, Homo sapiens
ggtcttatcgggtgaggacgtttgcctctgctgctgtccctggcctgggtggctgtctgtcattacagaactgcccagctgccaaagcaaatggctatctctcctaagcactggagaggctcaggtccagaagcttcaaggatagaggaactgaagggctaaatgaagggcagagtcaaaccatcccagggggttagcagtagaaatcctgtctgagctgttcaaatcttctttccagactctttgagaagtaaaatccagaaaatcaatatgaacgtcacacctgtcacctttaaatggcccacccttcatcctaaaatgaacaagactccttgggtactttagtctgctcctaaccttgtttcaaggtctagtcctgccaattttatatagagaaaggcatttgccattgatttcccaaagggacaaggacaatcaggccataaccaagacatttgatgtatgtatacaagcaaagacctaggttttgacaacaaagaaatgaccacaacattttacagcagcttatataacatttatatgtccgtagtgggtctaacaagtatcgttctggaaaagccacgcaataaatgccttgtgtggactgaatcatactcatacagttatagtgcaatcagcagtacacttgtcctgccaaggtgagtgatggattatagtgcagaggaagttccagcttacacctgttaatagtattttaagccacataggcaaaattcctacaatgtggtagactctgggctaaaagctaaggatacaaaaagaaaattatgctcatgcctgtaatcccaacactttgggaggccgaggtgggagaatcactggagcccgagagtttgagatcagcctgagcaacatggcgagatcctatctctatcaaaagtaaaagaaaaagaaaaaaaattaattagccaggcatggtgatgcacatctgtgatcccagctactcgagaggctgaggtgggaggatcacttgggcccagtgagctgtgattgtgctactgcattccagcctg

SEQ ID NO: 70325 - DNA, 1125 bp, Homo sapiens
cgggaggctgggcagggagaatcgcctgaacccgggaggcagaggttgcggtgagccaagatcatgccattgcactgccgactgggcggcaagagcggaactccatctcaaaaaaaaaaaaaaaaaaaagaaagaaagaaacattagttatctcggcattttgtcttcccaacacaaaatatcaggtaaagggtttcatctggaaaactaaaattttccccacctcttacctcataggtgatgccttgtagacacagctttggacagtagatggaatgaaacgtcagactggaaggatcatgctagtttccctgaattctggtcaatgtcccaagattgaaatgagttgttcctagagctgtgggagtggatatctgaaattacttctttaaaagctgcaggaggctttgggactatgaaatggtaaaatgaaatggtaaaatgtcaacttgcaggaaattaaacgtttcaaatcctgagcttgaccttggaaaatgttgattcctgagcaactacaggaaggaaaatcacagccacagtggactcgggcaaagaaggtcatctaaacacaaagcctaagagctctcccaaacagtagaatgctggaataaggaaaaaacaggacaaataggtcttaactccagtgctactggatcctagtcactcaaattctctaaaagccattgagcccatataatatagtgatttagcatctgggctctggacagtctcggtttctagtgctggttctatcatttaccactgtgtgacctcaaactctctacgcctcatctgtaaaatggggctagcaatagaacctaacactcaggattgttgtgaagaatcagtgagtgaatatgtgtacacttggcacatagtaaatgctcaataatagagctcctgttactattcccatgagctgctgtgagaacacctgagataaaagatgtgaacatgctgtgaagaacacaaatggccacacaaattcaaggtgttgctagtttgtttagttttccagtagacctaccttggtagctcaccagagatctggatgaaatctcaaattgtattgggaaagagtatgccttctataatcctggtagtacctgcaacttgtgtttccaa

SEQ ID NO: 70326 - DNA, 1035 bp, Homo sapiens
tacctaaataagtataaatgggatattagaaatttggggaactatgttttcagtatcatgctcttgctatttcttaattgtctttaatccctggagttatgatgtgtgtccagactaaacatcttctaacttaaatactagctggttaatccttttgatctgcagtaacatttataatgcttttcaaatgtcaagggactttcatcaattctccctaattatctgatgattgccactctttatttttccatgatctccttgaagtttccttgacctccttggaaccttcattttaagtccaggtagccatttttccctttgttcctttgagttcagtccaggaatttaatgtgtataccttcagttagccatcataggtccaaactctttgccagatcatgaaaataaatgacaagagaggccatgaaggcataaaccatacacaatgcaaaatagacacaacttaggaaagcacattgaaatctcattgactgaaagcacttggcagcatttgcagcaaaggaaaatgatatattaacagcatactgtaatatataataaaaacaaaaatcactaaacaaatcattgttacatgggtgggtctagaaggatttcacctggtgtgactaaagtgtggggaacagtgggaggttggttgaggtcagagtattgagagttttgattgacatacaaagcagtttaactttattccgtgaacaatagagtgtttttgtagttattttagtaaatcagggttgtgtctcaaaaagaacccaaaggtagtgtgaggaacagagtgaaataataaatgtctagagacggaagactggtcagatgctgttataagagtccagatatcaaaagatctgatctaaggcaggagcagtgggaattgagataaaagagaaggcttgttaaatcttttgcaaactaaatcactggggctcagtctcctactgaatatgtcaaatgatatgagaaaacaattaaaggcatttggcttccagcttggatggcttgggggaattttgagag

SEQ ID NO: 70327 - DNA, 1051 bp, Homo sapiens
agcgacggttaagggacaggggacgagtggagcaagtgggccttaatctgaaaataacttgattgtttaatgacattaagagaaaaagattacgagctttgagaaggaggaagcctgggagtaacgacagttaaggagttagcttgcggaaccaacataagaatttataacagggaggtgtcgtttgggatcagacgcgtggcctgcattgccgtagccaccgtggtgtaatgttgccacgtaaaaaccacaaatcccagaattcagtcgggtgatacactggctcagaatgtgattggctgcgggaactagtagcttcctcattggctcccgtggaaggagtgaatgctgggatttgcagtctgatgggggagccgtgctgggtaaaaaccttagaatcgtcgcgcactccgtttctgccgcggattcttatattctccaatacaggctttttctgttatgcagtatttgcagagcaggctgctgcagtttggccaggcgcattgcggatcagttggtgttcttgccagaggcctagcagcagcttcctagcgctactacttgcacctcccaaggcagctgagcctccccacttctctggccagacacactcctaccgtgcatcgtagaaccacctctctgacgccagcaggaccttagtaagagtaatgggtatgcgacagatggctgtagtcaggccctactgatttcaaaatagctaaaagactatctctgtagttagcttttgtggccttgatggacctgcagctgtgtattgctccctcagacgtacaaattcgtggagatgagttatgaaagtatttagtatccaagtttttcatctgcttaatatttgggattttaaacacaagttttgccagctaggggtcaacatccctgaaagtgttagggatggagctagctgacaggcctttctaaaagaacagagagcctggtgaagagatgaaaaatcaatctcacttgatactcctgttaaaaacaacaacaaacctttaaatagctctctactaacacataactcaaatccgat

SEQ ID NO: 70328 - DNA, 1050 bp, Homo sapiens
attgttttttaactctcttctccacagcgtgcgtggggaggcctccgtgaactctgaccttagctttccgtagcgcccgcgtctgccgcccccgcccccggagcgaaggaggcgggctttggccttttgccctagggagcgagtgcggagcgagtgggagcgagacggccctgagtggaagtgtctggctccccgtagaggcccttctgtacgccccgccgcccatgagctcgttctcacgcgaacagcgccgtcgttaggctggctctgtagcctcggcttaccccgggacaggcccacgcctcgccagggagggggcagcccgtcgaggcgcctccctagtcagcgtcggcgtcgcgctgcgaccctggaagcgggagccgccgcgagcgagaggaggagctccagtggcggcggcggcggcggcagcggcagcgggcagcagctccagcagcgccagcaggcgggatcgaggccgtcaacatggcgagcgcctcgtaccacatttccaatttgctggaaaaaatgacatccagcgacaaggactttaggtgaggccgagatccgaccctcaccccacctcggggttctcgcagccgcggccctggccgtcacgcaggccttgccccaccccttcggccgtagccggtagcttctctgccccgaagtctccagcccaccggtccgctggcctcccgatccctgcggagcccctttcctctcccctcttgcaaccccctccccccattctttctcctaggcagttgcccgccgcggtctctaggccccgtttgcttgtctcagcgcccccacatccttccctgccccaccaggaggcgattcttgcgtctcaggtagcgcgaaggggctaaaccacccaccattgtggagaagggagttgctctaggccgggagaccgggcgccgggcctattcgcttgccatcctgcggcgctaggccgccttgctcgctggggcccaagctgctgcccactcggggacccggcagcctcctctctgcccgcaggtgcgcgtgggccttgctgcattc

SEQ ID NO: 70329 - DNA, 1061 bp, Homo sapiens
ccattgctgtcagtttggctcatcctgtaaaggtggtaaatttcattctgattgtggtcaatttcagtctgaaggtagcactttataataatacaattttgttcaactagtcattctcctgtataagtttagaaaggctaaagaaattatgtggtgataccatacatgtgattattgactgaagcttgctttcttaaatttcctgtgaaagaaagataacatgtacatacctagttgtttttttcttaaataaattacatgaaagaaatagtgctctgatactaaatgacagtcactgctgaatttggtaaagattatgtatgaattttggttgtactgaatcaaaacaattcctggaggattagtgtaatattgatatattcctaatagttggtgaatgctaaacaaggtatatttaggagcagtacgtgatttccagtaatttggcatcattaagatatttttatcaactgtcttctaaaaaacatttttataatgcgctgtagccatctagttaataaacaagtctttggaactaaagcactttatatgtttagtttaaacagacatttaataattaattagtgagcgtttggagtcaagaattttgaaattttttctgcatatttttagtataggcatttattttaatttgctcttttttaaaaaaatgatgccttgttctcattagaagtttatttattttggcttaaataccaagatttgtggctacatattttaaaaatacctagcactagaaggatcttgagggcaaggttaacattatggaatgaccaacatgtgcaaagcactctgcctgtactaaggacgagagaagaaacaaatgctgccaaaatgaagagcaaattttattatcctcatggtagaatccaaagagaatttgacctagtcacaagatctgggttctaatcatgtgtgattctttgttatgaactgtaagatcttatgcaagctatttaatttgagattacattttcacttctgagaggcatggacatgactaattacaaaaggttgttataggcataaaatttcaggtc

SEQ ID NO: 70330 - DNA, 1036 bp, Homo sapiens
tgaacgtactagttattggaattatccttaaaattgccttacatgtaatgcatttctaaattattaagttgttttgccaacctttaccacacagtttatttcccatgttgcggactatctccatagctgtttatcaattcagctccaatagttgtttttttgtttaaacatggattttgacatttctctgtagtgtacaaaataacgtatttttactaaaactgtatctggttcaaataaaagaaaaaagtgttaactagttatcttagttggattgcttctgtaagtggaggggagccaagaattatgggacaagttcatttgacttttaaggaggtcttagggctttatttgaatgtgattatctcatattctgagaaatcacttttaaaacaatgaattgtttggtaaggcatgtggagaagaaaatctgagatgccgtttataccttattttacctgagactctatttatcttggccaccattcagtccttttcatttaaagctgagattagatgattgatcactctgggtttttgccaggcaacacactgttaaaccttcctttggcagtggttcttaaggggaggggaggtgggcgatgtcagggggaagagctactttttagaatcacctcttcactattttgaaaataagcctggtggctgggcacagtggcccctgcttgtaatcccaacactgtgggaggccgaggtaggtggattccctgaggtcaggagttcaagaccagcctgggcaacatggtgaaaccctaaaatacaataatactaaattattttttataaattatttcttataaattataattattataaataatactaaattattatttttgtatagtaaatactaaaaatacaaaaattagctgggcgtggtgacaggcgcctgtaatcccaactacttgagaggctgaggcaggaaaatagcttgaacctgggaggcggaggttgcggtgagccgagatcctgccactgcactccagcctgggcgacagagcaagactccctctac

SEQ ID NO: 70331 - DNA, 1026 bp, Homo sapiens
ttcttaatgtttggaaggtgttcttaatgtttttggttaagggcttcctagatagaattcaaatctcatgtaaagaaaaagtaaagaggaacttttctcacctaaaagcagtgatgcaattaattagaatgaaagagtactcactgtaggtcctggtagtcaatttgagatcaagactgacctggggaaaataattttggatagtggtacctcatataaaagcatatcagtacttaaaaagtctcaccgtctctctggatacaatgaattttaagtacattattgctcttttccttggtagcttttagattaaatttatgatcactttttttaaaaagtggatgagttttataataaaagatgtttctgttgagtgaatggtatagcagtggatttgaaaaatcattatctttttaaattaatgctttaaaattttcaaattaacaaattttatttttttgataggtttatggctacaaatgatttgatgacggaactgcagaaagattccatcaagttggatgatgatagtgaaaggaaagtagtgaaaatgattttgaagttattggaagataaaaatggagaggtacagaatttagctgtcaaatggtaagttgttttttactggttgagtctttcttcctgctcccccaaccctgtttttaaaaactctatgataagtagtaaattatcttagccttgtactatctctttctagtgtgtgtgtgtagaatttttaggtgactaatgtttagtgtttgtatatggtatatatagtgtatttccttacagcatataagttactaaatggtattttcttttaattcttacgaagtgcatgtagggaactccaaaaacaatggttctctcatttgtttcactatagtctacatttttagttgagttaaaggcctactttcctctatgtatctctgtattccagtggggatgaaattttaaaatgaaatgactaaggaaaattaaaaactaataataataacattctttttttttaaggcagggtct

SEQ ID NO: 70332 - DNA, 1028 bp, Homo sapiens
cattttttgagttccttttaacttcactcccaatttttattattttatattcggtctctccatgtatctgccatgtttcagttatcactgtcttcattttggattaggctatatttaacctttcagttttttttatttttatcttttcttttaaatcaccaaattgacctgcctactacttctttggtcaagcagtcagcagtcatcagttgagcatctatttgagacactgatctgagcatttatcaaattaaattttcatgatgttacttatgcttgaaaaaatgcattggctgccagttttatcacatttcaagtcattgaccagacattaagagttctctgtaatatcataggtggttatttttcctatggtgttttccatctgccttttgtataaagcagttctttttactcctaatttgtttcaatatgcattctacttgttttagtctctgttctttacaagaacttgtttcctcatttgaaatgcttttcttttctcactatctcatgaaagctcagtaccagcctggcgtggtggcttatgcctgtaatcccagcactttggaaggccaaggcgggtggatcacttgaggtcaggagttcgagaccagcctagtcaacatggtgaaaccccgtctctactaaaaatacaaaaagtaatgggacatgttggtatatacttgtagtcccagctacttgggaggctgaggcatgagaatcacttgaacctcggaggctaaggttacagtgagccaacatcacaccactgcactccagcctggcgacaaagcaagacagtgtctcaaaaaaaaaaaacttaatacctaaaaatctgactgttaatgttcagtctcttaccctgtaaatgctgacattgcatttaaaagtttttttaaatttgtttttaatcatgccagagtagtgaatgccttcatttcataaatagttatggagttccttagttcatcaaccagatggttaagtttttgaagataggggccatactgtctttgttattcaat

SEQ ID NO: 70333 - DNA, 1068 bp, Homo sapiens
attaaaaagttttgtgccagccatggtgttgtgcccttgtagtcctagttactcaggaggctgaagtgggaggattgcttgagcccaggagttcaaggccagtgtgaacaacagtgagaccctgtctctcaaaaaaataaaaaataagttttctgtatatttgtcaactaattagctttaggggtatgacgtggggtatgatacggaaagcagcttcagtttcatgatactaggatggaaatcaatgagaaaaacttggaaaccaactgcaaaaatcttaaccaatcacaattttttatgtcatttgtatactatttatgatacagacatggtatatactttatcttgaaagttctaggcggaaaggttaacatttctacttatgtattttcctgtttttgtgcttatctagctttttttaaacaatttcttctttgtattacagtcttggtcctttagtgagtaaagtgaaagaataccaagtagagacaattgtagataccctctgcactaacatgctttctgataaagaacaacttcgagacatttcaagtattggtcttaaaacagtaattggagaacttcctccagcttccagtggtaagcaagagcacatttttcttcctatttctttttgtgtggaggtatttctccccacccttttttccccttctggccaaggagggagggaggtggctgtccttacagatgttcataggaatccctttggacaattaagaaaattaaagcgtgaagccttattttccttagaaataaatgttaaatgaatattttgattgaacttgtatgtaatatgaatttcagtgaaggatttttatatgttggagcaagattttatactgtgtgtaccatgactgcagactagagttatgccaacctatgcagtgagggaagagataaccaaaatattgcatcctgattagttcactgtttccagtattaattttactttgcgtcagtatttgctatgtaaaatgtaacaccattcagacatagctgtggaatagttcagtttactagtagctttaattaaagctgagcctttta

SEQ ID NO: 70334 - DNA, 1050 bp, Homo sapiens
gtctcatctgcaaaaggtgagattatcacctatttcatgggaagatttagattggtaataatgtagtctgggggccgggcgaggtggctcacgcctataatcccagcactttgggaggccaaggcaggtggatcacctgaggtcgggagttcaagaccagcctgaccaacatggagaaaccccatctctactaaaaatacaaaattagccgggcgtggtggtgcatgcctgtaatcccagctacttgggaggctgaggcaggagaatcactttaactcaggaggcggaggttgtggtgagccgagatggtgccattgcattccagcctagggaacaagagtgaaactccgtgtcaaaaaaaaataaaaaaacaaaaaaataaataatgtagtctgggtatgttatttccactcatgtacttgaatcattcactgtgctagttttcatgctaaaggctgcatacgtaaactagtctaaacatcaatcatatgggaggtcttactgttccttctagtttgtagatgggagaactgaaattcagagagattaggttaattcacccaaagttgggtgagtaattgggtaaagattcaaatccattttcttttaatcgaaaaaggatgctttcttcaatgtatcataccagtgttattttacctttattaaatagttacttatttcaataaaacatttcaccaactcagaagtatgttatttataattgtattagctatgtatatattttttaattttttttctctcattgaaatgtgtttgcattgagccaatttccggttcttacaagaatttttttaaccattcagattcttactttcacagtgacttgttctttttcttctctcatcagtaacaacatgacctactgtaagtagtaacaattctgatttatgagtcctggaacgaggtttctgctttataatgaagttacggaatctttgggttggaaaggaccttattaaaagttatggctgatttttttttttaaagaagctgctaagcattggagctcagaatatatgctttttaatt

SEQ ID NO: 70335 - DNA, 1034 bp, Homo sapiens
caagtgatctgcctgcctcagcctcccaaagtgccgggattacaggtgtgagccttcacacccagacttgtggtttttgtttttgttttttaatattttcccaagccaatcaattagatatcctataattggggatttaggtctagattcccggagtcagtttggcaatgtaaatttcagtgctgcattcacttagctcaggtttcagttgcattggtagataaagtgataatttaatttttctttcactatgaattagtctcaactaaatttgtgttctgaatatttgcattgaggtcagaggccagacatttagtagtggccaggcatcttgaattcatttgttgttttctttctttttttattttattttaaggcaaggaggacttcttgttaatttccatccttcaattctgacctgtctacttccccagttgaccagccctagacttgcagtgaggaaaagaaccattatcgctcttggccatctggttatgagctgtggaaatatagtttttgtagatcttattgaacatctgttgtcagagttgtccaaaaatgattctatgtcaacaacaagaacctacatacaatgtattgctgctattagtaggcaagctggtcatagaataggtaagaaatctttaaaagttttacagttttctttaattaaaaaaattaatgcatgtttttaaagaaccattatgcttttcttaggtgaataccttgagaagataattcctttggtggtaaaattttgcaatgtagatgatgatgaattaagagagtactgtattcaagcctttgaatcatttgtaagaaggtaagtttttaagatctctattttttacaaaaagtttttccttaagagtagaatcataaggtctacattaggtgtgtgaggagaagcggccttttggatttcagatataacagacaatacagtatttgaaactaatgtcatcttgctattataaaatgtggtcatcacatttattttgaaaattttccttgtcattgttaggactttattt

SEQ ID NO: 70336 - DNA, 2030 bp, Homo sapiens
taatatattttttaaaagcttagtaaaagttgtgtatttgtgtactagaaggcaatacaagataagtaacattatttttcctcttgactaatgcagtagcatggtgtcttgagaccttactggttgttttctgcatttatcccttgacactcctggttttgagaagtggcttttaatcataccatattctgaaaatcagaaattgttagattcatttttgttcctttagttgagaaacacaaagtattcttttatttgctggccctgtgggcatttatatgttctgtcctctcattacatcggtagaagaccaagcctaggtgaatatgcactggcatttccacaaataatcctagttactgaagagcacattcatctgggtttggttttctaataacatgttgattatataccgatttctgtctatactgccatacattaaccataacatagttaaaatcgggattaggggagttcatcttaaaattgattaaataagtacaatttgaaaggtaaaccttttaaaatagtaagtccatgggagagaaagagcaagaatcattggtgctagatagtctgggaactactgtcctatgttattgctggtaataaagcaaaatgtggcaggtaatgaatcaaggagtaaaatgcagctcttcaaggcagcttttgtttttgtctttagatgtcctaaggaagtatatcctcatgtttctaccattataaatatttgtcttaaatatcttacctatgatccaaattataattacgatgatgaagatgaagatgaaaatgcaatggatgctgatggtggtgatgatgatgatcaaggtattgcaaattaaatagaatcttttgagtttttgtgaaagacacttatagatggagatgattcttagtccaaattgtactgtttgttttatttagttataatagtgaaaagggaaatgatctcaatatttgacaacagcaaattaagttagagggcatccatgtattgaactgttatgcaacacattaaaaaatcatgtctaaaaatcattcattaatgctgttaataaggtgagtgaaaagtatgtagcaaaaattgctcaccatagcccaattttatttctttaagtatacagaaaaaaatctgtatatttacaactagtactattaccacttgttttctcttggctaggaactatgtatgatttttggttttaagtactattcaaattttctacaaagcatttttgtaaggagataaaccaaggttttagaaagaattgaatctgtagatatacatatttagggcagcttggcttgaaagaatattagtttgtttattcatagttcatgaaaaattctaaatactgttcgaggccccatttaacattcattaatagcttacaacatttctgaggctcctaagattgatgtaatcacacgatgatttatgatatttactctggaaagtagtagcagcacttcaaggacataggggttgctcatgtcagttgtttctgtttgtattggaagaatcataataacaaatatttaagttggtaaattactaggtaaacaggttggtggattttttgttatttttgagaatactttttagtttgattctttgaatgaatttacataacagctttcctgtcaagtcagtaatttcacccatctttaaaaaacaagtaccaaaagagtttcttaacaccatatactcctctagcagctgctgcctagtttctctcctccacaacagagctccttaaaagaatgcagttccattttcttttttccattctctcttgaatccactcctccagtgatggatgagattgcaaatgtttgactctgcctatcgtattactcagtctcggcaacatttctttatttagcttctgggataccattctagcctggatgtagtcctatcgttgtgattactccagtcttcgatgctgtttcttcttcttcaccctgaccactgtacttagagtatcccaaggctcagtccttgaacttaacctgttatactg

SEQ ID NO: 70337 - DNA, 1088 bp, Homo sapiens
gttctacagtgttttgggattggtaaccattctttttatcacctactctattaccacaaatccatttcatggtttgtcttataaagtccctgattgtttgcttgatttttcctatgctgttaagtaagttctttgaattttgtttcaaaggctgggaaatttatgactataaatatttatattctaaagaagttgaatgtgttaattgatgattttaaagggttaaaataagcagcagttcattacaaagtaaatgagaaaatgtttaactaattaaaaataccattatgtttgttttttaagtttaatttatgtgcagatttacagaaataacaagctctttgttcaagttctagttctgttgaaacctacctgttgctgtatatgttaccggaaagttagattaactgatttggttaagaatatcaattgattttctgttttaaatgatatacttctcttgtcattaatagcctgtttacattaaaacttacccttagggagtgatgatgaatacagtgatgatgatgacatgagttggaaagtgagacgtgcagctgcgaagtgcttggatgctgtagttagcacaaggcatgaaatgcttccagaattctacaagaccgtctctcctgcactaatatccagatttaaagagcgtgaagagaatgtaaaggcagatgtttttcacgcatacctttctcttttgaagcaaactcgtcctgtacaaagttggctatgtgaccctgatgcaatggagcagggagaaacacctttaacaatgcttcagagtcaggtgggttttaaagtaaagtttagaaaatcatgatagtaaatgcaatgcttttaaaattgtctttatatggaaaggtgagttccagaatatctatagagaagcagaaagttctaggatatgtttatatagttaatgcatgttcatattatgttagttgtaaactattctaattgaattattcttggctttacatgataaacaatatttaaataattttaagattcagtaaagtagtctttatctttgatgttaatagagaagtcttagagctgtggagtcatactacttgcgatca

SEQ ID NO: 70338 - DNA, 2662 bp, Homo sapiens
caggctggagcgcagtggtgctatctcggctcactgcaacctccgcctcctgggttcaagcgattctcctgtctcagcctcccgagtagctgggagtacaggcatgcaccaccacgcccagctaatttttgtatttttaatagagacagggtttcaccatgttggccagaatggtctcgatttcttgacctcgtgatctgcctgcctcagcctcccaaagtgctgggattacaggcgtgagccactgtgcccagcctattaatttctttttagtcatgtatgtttcacaattaaaaattaagtagggaagactattttgttgctctctggaaagctaaatgatagcttttctgtaatttcttatcagtatcaagcaaatatagttacaagagaacatatataatacatgcaacaaacttgatcttgtgttagcaatagcaatagatagctgaattaggaatttaacaaaaaaagataaactcttccctttatcctcattctccataattcatgttaagtgtactgaggaaataccaacagctgaaccagctaatgactatatgataattgcaggttcccaacattgttaaagctcttcacaaacagatgaaagaaaaaagtgtgaagacccgacagtgttgttttaacatgttaactgagctggtaaatgtattacctggggccctaactcaacacattcctgtacttgtaccaggtatgaaagaaacataaatctcttttgggacttattgtagcctttttgttaggacttagataagcttaaataattgtttccttttaaaggaatatatgtgacaacttaatatgcacatagagctaactttttaatctaacaatcttgaatacctgaagttagaaatttgtaagtaaaaggttaaaagtctcaccctaaaatatttggctgtaatatttattgtagatggtgaaaatttctacttatagaaataatataatgaagtgggaacattagcagtactataggggttgatttttaatttttctttcttaaaagtctgcacagcaatgattggattttttgttggctttttaggaatcattttctcactgaatgataaatcaagctcatcgaatttgaagatcgatgctttgtcatgtctatacgtaatcctctgtaaccattctcctcaagtcttccatcctcacgttcaggctttggttcctccagtggtggcttgtgttggagacccattttacaaaattacatctgaagcacttcttgttactcaacagcttgtcaaagtaattcgtcctttagatcagccttcctcgtttgatgcaactccttatatcaaagatctatttacctgtaccattaagagattaaaagcagctgacattgatcaggaagtcaaggaaagggctatttcctgtatgggacaaattatttgcaaccttggagacaatttgggttctgacttgcctaatacacttcagattttcttggagagactaaagaatgaaattaccaggttaactacagtaaaggcattgacactgattgctgggtcacctttgaagatagatttgaggcctgttctgggagaaggggttcctatccttgcttcatttcttagaaaaaaccagagagctttgaaactgggtactctttctgcccttgatattctaataaaaaactatagtgacagcttgacagctgccatgattgatgcagttctagatgagctcccacctcttatcagcgaaagtgatatgcatgtttcacaaatggccatcagttttcttaccactttggcaaaagtatatccctcctccctttcaaagataagtggatccattctcaatgaacttattggacttgtgagatcacccttattgcaggggggagctcttagtgccatgctagactttttccaagctctggttgtcactggaacaaataatttaggatacatggatttgttgcgcatgctgactggtccagtttactctcagagcacagctcttactcataagcagtcttattattccattgccaaatgtgtagctgcccttactcgagcatgccctaaagagggaccagctgtagtaggtcagtttattcaagatgtcaagaactcaaggtctacagattccattcgtctcttagctctactttctcttggagaagttgggcatcatattgacttaagtggacagttggaactaaaatctgtaatactagaagctttctcatctcctagtgaagaagtcaaatcagctgcatcctatgcattaggcagcattagtgtgggcaaccttcctgaatatctgccgtttgtcctgcaagaaataactagtcaacccaaaaggcagtatcttttacttcattccttgaaggaaattattagctctgcatcagtggtgggccttaaaccatatgttgaaaacatctgggccttattactaaagcactgtgagtgtgcagaggaaggaaccagaaatgttgttgctgaatgtctaggaaaactcactctaattgatccagaaactctccttccacggcttaaggggtacttgatatcaggtaggtatctagattttcttacttaaaaagttttttattgatagttggttgccttaaaagacacctaataaagaagttaagccatgtctatatttt

SEQ ID NO: 70339 - DNA, 4194 bp, Homo sapiens
tctgtcttcacttcatttttttattcttattttgaacttagtttaaaaatatttttgttgctgcttttagtgaactacaaggagaatcaagcatgtgattagtctttttagctctgtctctgtcatatcttatatctatagaagtgatattgaggaactttatggactcttcttccataccctctgcattataagtgctgagagtggattatcaattgaaaatatattcaccttcagaaatgatagttgcgttgctgctgaaagaaacgttatggttcacttagtgtttcatcaggttcttccctgaccgtcactgaagaaataacaatgacaccagcaaaaataaattatatcaacttagagaaaatataatgtatattgtattttaagtttatcatgtctgtctgttgcttttcttgtaatatttcaggtgatttcctaaaaactttggaagacccagatttgaatgtgagaagagtagccttggtcacatttaattcagcagcacataacaagccatcattaataagggatctattggatactgttcttccacatctttacaatgaaacaaaagttagaaaggagcttataagagaggtaagttagatcacactgtttatttgagcttgtctttgacttaagtattgtatatccacacgttcttttttgctttaacaggtagaaatgggtccatttaaacatacggttgatgatggtctggatattagaaaggcagcatttgagtgtatgtacacacttctagacagttgtcttgatagacttgatatctttgaatttctaaatcatgttgaagatggtttgaaggaccattatgatattaaggtaagatgtttgtgcctatttatacaatgttttagaagaagactttgctagagcaactttcacccttgtaatttactcatgtgtctgagaaaaatcaggttgtctgtgaagattttgataagcatattgtaaactataaagtgcaaaagtaataggcagtgtaacaccagttgacgtgtaagaaagatccagagccctttttattggaggaggaagtggcagtggatgcaaaatgctgtgtgcccacttgcttagtgaatagtccctagatcctttccctcaaaaaagtcccgacagattttgctgtttaaagtataaatctgtaactttttggcctgtcttaacattggaccatagttgctacccatggagggttttcttagcattgtcttgattaagtctcctgagctacctttggggctagtctgaattgtaactgtatcatttacctgaatgaggaatttttgtttttcaatataatatactgtgtttaatatcaagaattttgttataggacatggaacttttcagatatacaaaacaatctgtagaagctacttgagagaaatcatactgcgtcttatgtttggataatgaattttgcatataagtgttctttgttttcctgtgtgttcgtctccatttaaaatgtgaacagtaaaagggtgatttgaaaaatgaaaaatatatgcattgtgtctttttcatctactcttccatttagggcttttggccaagcaggacaaaagtggtaactcagcagtaattgagccatactacccgaactcctactcttaggtttccatgtgtggtagtgacctgagcctctcaaagttcaatgaagagggcctccccaccaagaagtaaaaggatgtgcttgtttaattctatgagtttatagtccaagagaaaaaggtttatgggttatcaggttttacatggattaatctgaataactggtcaactctgttatgatagtggaaacttattatgaaattgtgttccagttcagtaattttctagttctatgattctcaattctggtgcacatgagctttaaaaaataaaaataaaaaaaataatgtgtgccatattctgacaggttcagtaaaactctctggggatggggcttgaagaatgggtatgtttctaaagctctctggatgattctaatgtgcaaccaagattgaaaaccacttttctagttcttatatctgtttgagacaaatctgtctgattctgattggcagattacattaaaaggaaggtttactttgcatgctagttattttcctttaaaggatttgtcagaatttagtattttgtttttagaaaatgatgtcaaatctaaattctgtcttttttattcctaatagatgctgacatttttaatgttggtgagactgtctaccctttgtccaagtgcagtactgcagaggttggaccgacttgttgagccattacgtgcaacatgtacaactaaggtaagaaatgataagtatcaacctaggtcagacttggtgtattggggattcctagccaattcttttctctagctttccaaatataactattccagtgctctgtgtagcagttggtttaaaaagttaacctatcgaatactgatattttataaaacttagccctgttaacggctattcttaaaagtttttgtttattgctatatcaatatgttaacattttgaagtactgatacatatttgaagtactgatatgggataaaatgtgatcaggccacaaaagaggaaatttttaattctggttggaaggggagtcagaaggtttcatattaggttgacaacatttgcaatgaacctcgaaaaatcaagatttttttttttttagaccaagaagatgaaacgggctttgaataaaggcctggagatgtcatcatatggtgtgtttgaaaaagtgaataatagagtatagcaaagaatagggtagctagaggagtactttcttgatgggggctaaagtgtgagacttgctaagcagatagttgaaacaaagagtgtcctactctctttgttacaatcatttgggtctagattttctgtttttataatggggctttgtgtaaaatattcccttaaaagaaaaggagacagctactttaaaaataagtttaaaaacagttgttcttagaatgtaatatgccttatggacctacgagagtagcttttagcaggaagatcttatgtgcttaaattttgttcatgtaagagctgtcttttatagcatgtaatctaagtttactccatcttacaggtaaaggcaaactcagtaaagcaggagtttgaaaaacaagatgaattaaagcgatctgccatgagagcagtagcagcactgctaaccattccagaagcagagaagagtccactgatgagtgaattccagtcacagatcagttctaaccctgagctggcggctatctttgaaagtatccagaaagattcatcatctactaacttggaatcaatggacactagttagatgtttgttcaccatggggaccattacatatgaccatacaatgcactgaattgacaggttaatcataagacatggaaagagaagtgtctaaaagcttcaaaatgttccacttttttttccttcatggagactgtttgtttggctttcttccattgttgtttttgtagcatttatttcagaaatgtgtatttccataatccagaggttgtaaaaccactagtgttttagtggttacagcaacatttgaaatggaaactaaaagttaggattttatggagtatggagatagggtccagtatctatttaccctgtaatgtttaggattaaaatgttaaaattttgtgaccatgaatttctttcttttataaattttctcatttaaaaatcaaaaatcttgcaaaacaaaaaccatgtttctttttcttgtataactttttgttttcagcaacataaattgatttttagctggcagacaagaatatccatataagatttgttaaccatttcagagagtttggcaatttttaaaagataataaggtatcatttttaagtatgaaaattaacaatatccctgttgcgcacactaattttgcatgagtaagtttacaaatatgtatcgtctgtaaagcagcatgtgcagattattcataatatagaagttaaaataagtattagtgcaattttcagatatttatttttgcacagaaaacacattatctggagagaaagaaaggagaatttttgagacttgggttttcttaatgccagtgtgaatttgcagatgttttcagaaaatcaagtcacagtaacaatttgccacttttttctatta

SEQ ID NO: 70340 - DNA, 1070 bp, Homo sapiens
tgcaggctctaggactgaacaggagactgacatgcatatgttgtgtgaatgtcttagttgggtaaagttaaatccaaatacttcaactggctttttcttcagtttgtttgtttttaactttcaagatgcatgttttgttttgttttgctttgtttttgtctcttaagccaattcatttttctaacagttgaaattcttttagtactaaagaaatagatactgctcttttatggctttagtgtttatatacctgtttatatgcatacattaacaaaattagtaacagcagtgcttagaatttcaatgctgtgtcatactgatgattaactccatactcctagtggtgatgtggtccagatactggaatggaagtggcaggatgtggagtccagacatagtctaccactcatgctacttactagtaatattaaggtgttaaacttaggaatttgtcacatgtaggttcctgaggagatctaaaagttaatacaaaaccaagctgtttactgattttcatgagaacatttaagttagtttaggtctacctgatttattttaaaagaaggcagagggctggacgcagtggcttacgcctgtaatcccagcactttgggaggccgaggcgggcggatcacgaggtcaggagatcgagactatcctggctaacactgtgaaaacccatctctactgaaaatacaaaaaattagctgggcgtggtggcagacgcctgtagtcctagctgctacagctgaggcaggagaatggcgtgaacccaggaggcggagctggcagtgagccgagatcacgccactgcactctggcctgggcaacagagcgagagtctgtctcaaaaaaaaaaaaaaaaaaaaggcaggaaggaaatttggtatggcagggcctaacctaaaaggttatttataaaatcaatagcactgaatgataatttttttaatgacagtcatgtattttattaatgatatctgaaagctgcttaaccattaggaattacaattctttatggttggagtatgatgatttcatcaaatgtttgaatatttacataattttta

SEQ ID NO: 70341 - DNA, 1122 bp, Homo sapiens
attgagggcttactatatgcctgggtttatgttaatgaggacttggaaacataagaggggacccagccctggaattgctcacagccagatgagtacatctgatgttaaaacaattgcaataaagagaaataagtaaaagggtgaatcacctaggtatgagaaaggagattacaagaaatatctggaaaggacaataataatgctctcattgactgactactaagcactttacacatattaccttatttaatccccctaaaagccctaatgaggtaactttgttaccttctttttgcagacaagggcactgaggttaacagagatgaaataagttgccctgggtcacacatttagtaaatggtggagctggatcatttaatgtgtgtctaactgaaaatctaccattatgaaacctgacctcactaaaagcagaggagtgtaaaagtgtgtggtgttttttgggtcctgggctatctagctttgttctcttggagagaagagtgacagtagttgatgagaatggaaggactccgatcatttagcctctacattttagagccttgtgttcttactggtaagttcttgcattagctatggaaataggttacagccacaggccttgggcaaaagcaagagtggtctcaggttgagacttttaaatcagactctagaagcactatggagaagagatttgaggaattctagacttagaagcaagggggcatgttacgatgctgcctcagttgtcccagtgaaagacatcaggagagtgagatgaggcagtgttgatggaaagggcctgggatagtaatgatgcatcttcttggtgacttgggaaggtgagggaggtgttgagattttccaggcacacagtgctgaggattcattcgcaggtggatagcctgagtgacacatggaggggaagccttctttttatcaaaaatggaggattatggaagtgggaaactggtttgttagaaaaatcatgagttaagtttgagttgcttatgggagagggagctgatcgatagttggatatgtgtgtcttccactcaggagatagcaccttggaaggtctgagctcagggaacaaatgcgcaaacatcaggccatgggcagttg

SEQ ID NO: 70342 - DNA, 1034 bp, Homo sapiens
gttctccttccccagtcaccagttgctcgagttagaattgtctgcaatggccgccctgcagaaatctgtgagctctttccttatggggaccctggccaccagctgcctccttctcttggccctcttggtacagggaggagcagctgcgcccatcagctcccactgcaggcttgacaagtccaacttccagcagccctatatcaccaaccgcaccttcatgctggctaaggaggtatacatctcaatcctgctctttctcgttggatctacttggaatccaaatagttcttaaacttttcttcagagcatctctaagagctttaggaacccactgtttatccctgagggtagataaattttctgttttttcagagactctttgggaatctggcttttttttttttcttgaacttcttccttccattttggcctttatgatacatatgatgaatttttcccaaagagcggccattcagtaatccatctgatgattttttttttcctttatgcctctgtgcattgttctaaactcatgcacacatctgaattctgcttttagtctttatgatgttgctctggggagacgggatggggcacatgtctatgtataaattttttttctatttgctcaatgtccagacccttagtcttttcttctcttccaggctagcttggctgataacaacacagacgttcgtctcattggggagaaactgttccacggagtcagtgtaagctacagttgtgacgaacagggccgtgtgccgtccatgggtacttggggtggtggtgatgatggtttaggtcttatcccttatgaccctttctgtttcccttccacctgcagatgagtgagcgctgctatctgatgaagcaggtgctgaacttcacccttgaagaagtgctgttccctcaatctgataggttccagccttatatgcaggaggtggtgcccttcctggccaggctcagcaacaggctaagcacatgtgtaagttcagctctcagcctatgcccacctacccctccttccc

SEQ ID NO: 70343 - DNA, 1063 bp, Homo sapiens
gaatgttacattgatagaatcaaagataataagtgaaggcaacaattacaagaaataatcaggaaagtttggaactgtatttgattttactggtttgccttgttttgtttttaatttaatttaattttttttttaaataaatagatatggggtctcgccgtgttgaccaggctggtcaaactcctggcctaaagtgatcctcccgtctcggcctcccaaagtgctaggattacaggcatgagccactgcacctggaccatttttatttttattttttgagacagtctctctccgtttcctggctggagtgcagtgatgcaatcatggcttactgcaatctctgcctccccagctcgagcaattcttgtgccttggccacccaagtatcccaaattgctaggattacaggcatgagccagtgtgtccagctagctgccttcttttaaaaagtaaaattgttcttgacttctaggacagtgatacatagtcattgtggaaaacagcaaatactgaccaaactaaaaaagaaggtaaatatctcacatgtactgttcagggacatccactgttaaatttttgaggtatttaggtatatatgtgttagtatatttggttatttatttatcatagtgtagaaaggttttataatctatttttagcactgttaacatattttcacatcatgaaatattcataatcttatttttatggcgacgtgcaatctatagttacaccacagttttttaaaaccagatgcttattgttaaaatctaatttttactcaaatttctattgttatttcttagtctgttttgaagaaatactgtaaagaaatccatctgtaactacatttttgtttatattattttgtgtttgtgagtactccccaagtattattgtgtagtcaaagaagtcaaagaatgctaaattttaaggcttctgctatgttttgccggccccccagaaagattgtactcccaatagcagtctatgaggttgccagtttctctacatccttgccagctctggtatcattgtgcttttaaaaattaatttttgaaat

SEQ ID NO: 70344 - DNA, 1117 bp, Homo sapiens
tatcatatgaggagatgatactgttaacctgcttttagtaaggcaaaaggcttgactttttttctgttagaagcattacgtttttgttgatacactttcaaccttgtcagtagtgactcaataggaagataaagaaagcaatactttcattgagcatctgctgtgtgacagttgtattccagctatgttccaggcattgttttaagtgctggggatatagcagagaacaaacagacaaaaatcatagccatcattgaacttacattctagtggaggagggagacaataaacaaaataaccaggtaaaatacatagtattttagatactgattagtgctaaggagaaaaataaagctgctgaagtgaacaggaagtggccagggaagtcctcggtgcgagagtggcatttaagcaggatctgaaaaaggtaagggattgacctgtatgcggatctgggaaggtctaggtgacaagaacagtaagtgcagatccctcaggtgaagggggtacctgcccccttgaggaacagctagaaggtcactgttgctggaagagagagagagagaatgagagggagagtagtgttgataatgggttcagagacataatggggtgctaaattgtgtagggctttgtaaatcatagcaaagattttgaatttttttctgtatgcagtggcaagctattggaaaggcagaggagtgacatgattttatttagtttttttccaaggtctttctggctgctgtgttgagaataggtagtagtagagcaagagctggggcataaaaacagttgggagtcacttactctatccaggcaggaggtgatggttgtttggaccttggtggtggcagtgaaggtcatataaagttcaattctggatacacatggaaggtacagccaacaagatttgctgatggataagatctggggtgggagaaagagaaaaatcaagggtgactcaagatttttggccttagcaataaggatggagtcgccatttaactgagttggagaagatcaagaattccgttctggacactctaaatttgagaagcttattagacatacaagtagacatgttgaatagggaactgactatataggtttggag

SEQ ID NO: 70345 - DNA, 1049 bp, Homo sapiens
ttggaataaaaagtaggtgtcaatatttttcttagctgctatgaatttctccctgcctgctggtctgaaataaaataactgcatcatgctttagcttgattgttttagtttttgcttaaatgcacagtctgatgactgtatgtggctaattttgccttcctttgtctttggtccctggctgtatttgtgcaatgtctttgatatgctacttggtgctgtttgtaaagaagcatttacaatagtatatgatgtctgaactctcctgaataggttaaagaactccgagaaaaggctgagttttataggaagcgagttcaggggacgcatttttctcgggaccatctgaatcagattttatctgatagcaactgctgttgggatgtctcctcaaccacaagctcagaaggaaccgttagtagcaacatcagagcattagatcttgctgggtgagatattctttgtggatggcaaaaaaagtttgttgaagcttatgtagatcatagaatgatataggaaaatgacctgactactcaaaatgtgtctcctagtcgaatggaattgtggcagccatttatttcatttttattctcagtgaaaaataaagcaatgtagattgctttatttatgtataaataacacataatgtaaatctggaaggctagatttttataatattttttgttggcagttaatagcggagtagggatgattacatggtagatgtaaaaagacctttagaaggtaaaaagaaagtcaacaacaataaaaaagtagagactgcaagctattaatacatagctattattcattaatagattttgtggctaattcagaacttggctgctgattttatggaagagcgctctgctgttctgggttaaaatgaacatgatttaattatctgtaagtgaaagtaattgaagaacttagaccatggggtcctagtttatgtgtgtaaatgccagtttagggctaggtatgacttgtgtcagcagatgtacacaagcatatgtgaaggtaggagtaaaagaagataaatacattttgga

SEQ ID NO: 70346 - DNA, 1077 bp, Homo sapiens
ttctctatttgagcacggcctgaagacagcacaggcaaagtaaaagacaaagctcaaagctgtcccggatattatctggggcaatgttcatatattcaccttagtgaaatcaagttaaaactaggagcatcgaaagcacccgtgatggaagaaaggcagtgagtcagctaaactcttgagcagtttatgaccatcccaagtcttggcaaagatctccctgactgaggagtctgatagtgggagtgaggaaaagcaggacagaggcagaacagtatgtgtggctggtaaattgatgtcagccgctggcctgttgtgtttaggcgtgacactaggttgaggttatgagaaactctttgttttgaagactgtgttttctctgagatttctacgcttgatctcagccaaaaggccgagcagcgatttctttaaactaagatgagtttaggcatcagaactaaacatctaattgagaagattgttaaaactgaagtcatagtaagatgagattccttatcctgccttgatggaagagaacattgttgttgtcaatttaagatagacttttcaaggtttcctattatgatatcttggtaatgcagctttttttgcttattaaatactataatggtggttgtaaatatttaaattagtggtatagtttgccttaatttctttgagaaaaataattcaaaaagtaaattgaagttggaaaagaataagaatttttagctaagaagtcagtgatcattgatgataacagttttagttgaccaggttatagacatttaatatgagccatgttttacttatatctcttggaagtcatttactataggcatctgattatgaggttcctaaatataaggtacagtactccttcattttcccactcctaacatttcaggaaggagtgtattcacactcctcacatgcactcagacataagtgactttgttgttggaatattaactcactttttgagtcacattagttttcgagtccatatatcatctttatttctttctatgtttgagatatactttttgaatctgtttatagtctagtcactggaaattc

SEQ ID NO: 70347 - DNA, 2254 bp, Homo sapiens
ctcatcccttctcatcttggtctgctccacataagagaagctttgtgaaaagttccaaattttgacagtaccagggcccattgttctgttaagtagcacaggaaagtaattagaaacgaggcagcatgtactgcctggcctgccaggtctatcacgttgcaattctagtgacttttgttaggataactggaacattttgtgaccccctgatttttaattttttgttatggtcaaatttttaatgcttttaaaagcaaaattaaatattttatgttgaaaagctgtacttttaaaatcctataatctgaaggatattgtgtgtatatataggtacatatatctgaactaaatttaaaatttcatttctcctccacaagtgttcttaaaagttgtctttgtaactttttgctttagtagctactatttttgtataccgtgttttgtaggcatcacgaaagagccaagttttatttcaaaaagaagagtcccttaccatgacccacagatttcaaaatctctggagtggaatggagctatctcagagagcaatgtggttgcatcaccagaaccagaagccccggaaacaccaaaatcacaagaagcagaacaaaaggatgttactcaagaaagagttcactcactagaagcttccagggttcccaaaagaaccagatctcactctgcagactccagagctgaaggggcttcagatgtggaaaataatgagggtgtaacaaaccatacaccagttaatgaaaatgtggaactggaacattctaccaaggttctttcagaaaatgtagataatggggtaggcatattcactgcatttcttttcaaaagcatagaattcttcattggtttcattgtcatttctgtaatattacattttgtgtttcagaattttccattgttgttttcttgtctaatgtctataagaatagttgataacaggctgttgactttagttattgtgaattagttctattctgactactcgctattttgtagtagttgtactatgataatctgtttattggatggacctcctgcgtctggattttattcatcatatattagcacctgagtcctaagggagagatcaagttgagacagagaagggaagtaggcccttacttctggcagggtgctgagctgacttctacctagccccttttcagtttcttatcgtgtacaagaagacaaacagaaattcaattgatgaaatgcaaaaggaaggagagctctggctgtctctcagagatcttgcatttctgctctcttatgtcacagctggcctgcagcaggtccctgtgagcacataagcagaggctgcaggaacttgtgtggggatctcaatgctttccacatttctttctccattctgttccactgctcttctctggttcatgtccaccactgactgggaccctgaagaggcatttcagagtgttggagaagaatctgtagcttgttgaaaaagctgggggtgaaagggaacaaggaaggtgatgtgtgagtctggcaggcaggagaaggggtgttcatagaagcagtgtgcaggtgaggcaaagtgctgggactttttggtaatagatttaattatgaatgattagtaggaaaggactgagagtattatatttttcctgggatgcctaatagtcctttgatagaaaggaattttaaatagtttgacacttgaaaaaagatactatttataagttgaagaaagtttgctgtaccacaatgcgcatgtagttaacaattttgcactgtagatttaacattttgttaagaggatagatttcatgttatgcattttttaccacaatttttaaaaagtttgaatagaaatttttaatgtctttgagtggattttgttttttgaacagttggatagacttctgcgtaagaaagctggattgactgttgttccttcatataatgccttgagaaattctgaatatcaaaggcagtttgtttggaagacttctaaagaaactgctccagcttttgcagccaatcaggtagcttaatggatgtaatacatttctgagtaccattatcttatctagtaatgtagatttacatagaattaagagttgaaagaaattaagtacttaagtagcctggaggtaggttctagaaaaccaaaatgagagttttgctaaaatcatcctattacttatgatttatggtagtaatattatactgtcctaggcttctgatgatcattgttgccagatgcagcaca

SEQ ID NO: 70348 - DNA, 1728 bp, Homo sapiens
tgtagccagtttgttgtttttaatatgccaggtatcaaaatataactgaagaaccaatgctaaactgacttaattttaaaatgttgtatggggcatgaaaatgattgctctggctgggcgtggtggtttacgcctgtaatcccagcactttgggaggccgagccgaggaaggcggatcatttgaggtgaagagttcgagaacagcctgggcaacatggtgaaaccccgtctttactaaaaatacaaaacatagccgggtgtagtggcacgcgcctgcaatcccagctattcgggaggctgaggcacgagaatatgaacctgggaggttcacattgaatgaaccagcttgaacctgggaggcggagggtgcagtgagccgagactgcactactgtactgcagcctgggtgacagagctagacctgtcttaaaaaaaaaaaaaaaaaaaggagataagaaaatgattgctctgctctcttttacattctcccctcacccacgaccgcgtgaaagtcatctctcttaccttctatgacacgcattacttcctgcctcctgttaccattttatattatttattccattgaattgtgaactccaaccacaagatatatattgttttgtatgccttaacgcactggcatggtgccttgcaatagacattcaacaccagttaaatgtaagtaccatgagggtagggacttaatccatttcattcttcacagtaatcttcctagcgcgttgcctgggcacagtgtagcgcgttgcctgggcacagtgtaatggttagcgtttgaatttagggattaatggtaatgaacattcaaagagaggatatttgaagagaacagtgtaatcctttaaaaagaaacatttacatattggctttggaatcccttttacttgacaaattaattttcgttttatcctcaatccttttcagaattccaatattttctcttagctgtataaaggtaaagtgaccccctcccataataaagagctaccatgtaaggagggtatagcaaagaattaattattaaaataactagatccatttttgtaaggatcctttcaattgtatcttcctatctaattcaagattggtggaaggtctatgcaaagattgataacatggtaactgattagacatgttattttaaatgcagtccaagatttggatgaaaagctcacgttcaggttttttttgccttttgttgtaggtactcgataaatatttattgaggtagtgaaactaatctgaaattggatctgatacagagaatttgaccgattttacaaggtgtccatttactttttccccataagtattgtttaaataggctgttttattatcgactatcacacagatcttactgatttgcctcatttccttaaagatgtaaaataactgtgtttctctgtatgtttgtgttgctaaagaggaggttgggtattgatctgcagtttctagatttgactggcactaggagtaatttagcatttatgaattagctatttactgctgttttatagcagtgatgtcacgtgttcactctatagaaaagttaggtaaagattggtctgtcttaaactttctgagacataggttgtgactaaaaatatgccctgggttttcttccccctcctgtcattattgaggactccatggtctaagagattaggctgaagtttttgttagccttttcaaattgaattgaattttaga

SEQ ID NO: 70349 - DNA, 1054 bp, Homo sapiens
agtgcagtggtgcaatctcagctcactgcaacctccgcctccaggttcaagcagatctcctgccttagctagtactacaggcgcacaccaccgcacccagctaagttttgtatttttagtagagaggggatttcaccatattggtcaggctggtctcgaattcctgacctcaggtgatccacctggcttggcctcccaaagtgctgggattacaggcatgagccaccgcgcccggccaggttttgtattttttgtagagacgtttcgccatgttgcccaagctcacctcaaactcgtgggctcaagggatctgcccatcttggcctcccaagtgctgggattataggcatgagccactgtgcctggcccagcatttcactaagtaactttattttaaaaatatacagtgaactgattgccgaagtggtggattgcctctacctgtttcctttttctttgccttgtaggaagggaaaaagatgaaaggaaacatgttttgtctatttagtagcaatttttggtgaaagcttctggaaaggaaatggaaaatgctgggtaaaatgaaattataattatctgtgtattctaaaatttatcctcacattagaatatatttttcaaagttactttatactaaattcagggactttctaagttctcagttaatagaactgaaagggtatcaataaaataaggactatatatataatctatttttacttagtttttatgcgccaaaaggtatgtatgttgcatccagctgtttgttaccttgtgttttaaagttgcagttagaatgtggaatcctattactacattgtgccaacatatttgtggctgatgcttctaagttatccacaagcttctcaatacaatagcaaaatgcaggaattcctctggaatcttgaattgagggataggatgagatatataacatatgttatctgttgttttctcctactgctcttgaaattaacaaacttgagatagtgtactgatttgtatttataagattggctgagttcaaatatgtctttttgacgttcttaccaat

SEQ ID NO: 70350 - DNA, 1052 bp, Homo sapiens
ctgattcaagaccattttcaggttgtctgtacgttccccactttaggaataaatatttggtcttctgcttcctctaccaacatattatatttaccatttatgtatgccagggcttggccagatacgtaaatatttaggctctgttgtaactactttgctgttacagcacagaagaaaccacagacaatacacaaatgagtggatatggctgtgtttgagtaaaacttgatgtaacaaaacaggtgataggttggatttcttttcagacctgtgctctatcctggatcgggctcaaagtcatgtctgtaattctgtagttttcttctacctctgagcatcttttaataagtctgcttatagggtgctccatactagggttgtatagtaatcattttaaataaatctattttcctgaatgttttatttctgtgaaaagcacaggaatacacaactttacttagaattctttttttttttttcctttaataaggtactaggttttgacaagcttgcatcatgcgtgagtataagctagtcgttcttggctcaggaggcgttggaaagtctgctttggtaagtcattcttactttacctaagcctttcactccaagacgttctttttctgttgagttttaggttttgatgatttgtctttgttaagataaaattccttaatgactttagaagcaatataatatttttcttgtaattttattcaacttttaattatatctgggtggatcatattctctctggaacattgactccagaatgacacgagttatgctggaatacaatttgagctaagcacagagattgagagcgtacaaatacatgtctttttgcattcgcatttcagagccagataggaataaattttggtctttttatttatttatttttttgaaacagggtctcactctgttgcccaggctagggctcaagtgatctcagcctcctgaatgcttgggactacaggcacgtgccaccatgccaggctaatttttaaaattttttgtagagatggcgtcttgctatattgcttaggctg

SEQ ID NO: 70351 - DNA, 1039 bp, Homo sapiens
tttctttctacatctaattctaaatacctatttttccctaggaaatattagatggaaaggggtaacagggatatatgtgtaatttatttaatagctgtgccactgcttccttaattccagaaatcttgttccagtatggtgagggcatatagttacctagagaaatgaggtatatctaaagtatcatgggagaatttagacagaattacttatgatactgttggaactgttgctggttttgtttgtttatttgagctatttcgaaactatttttttctctagaattaagtgctgagaatccatattgagactggttcgtgtaggtttccctgtgttgacttgagaacacatggcttttgaacttgattacaatttgggggtctttgaatcttgattacttagctatttttcctcctgctttgttgaagtattgctggatattagtttgtaaagttgttaaaatctgtgtgtcttatttttgatacattagcttttttgtgtatattaaggtagttttatgtacattgaaaaaatgaacatgtattttaatttttctaccagcaagttgaagtagatgcacaacagtgtatgcttgaaatcttggatactgcaggaacggtaggtaaaactaaataccaaagtatatacaccgtttgtacagtattgacttcataaatgctagtactctatagacaaatattagttaagcttatttaaaagtactgcttgcagccggttgtagtggctcacacctctattcccagcacttcgggaggtcaaggttgctggatcacttgaggtcaggagttcgagaccagcctggccaacatagtgaaaccccatctctactaaaaatacaaaaattagccaggtgtggtggtgggagcctgtaatcccagctactcaggaggctgaggcaggagaatctcttgaacccaggaggcagaggttgcagtgagccaagactgtggagattgtgccactgcattccagcctgggtgacagagcgagactctgtgtcaaaaaaaaacataagact

SEQ ID NO: 70352 - DNA, 1103 bp, Homo sapiens
tataaatcgactttggtgtattgtttttaaataggaaacctatttccagctgggcgtggtagttcacgcctgtaatcccagcactttgggaggccgagacgggcagatcacaaggtcaggagatggagatcatcctggctaacatggtgaaagcccgtctctaccgaaatacaagaaaaaaattagccgggcatggtggtgtgcgcctgttgtcccagctactcgggaggctgaggcaggggaatcacttgagcccgggaggcagaggttgcagtgagccgaggtcgcgccactgcactccagcgtggtgacagagcaagactccgtctcaaaaaaaaaaagaaactaaaatgccaattttttcaaatagtatcttgtcatagattataattttaacaaagttacataatactacagtattcttcattgagctataattatagactgtgaaaattgtaaaaataactgtcaaaacattattgttttttaacgttcctttctttctattgtaggagcaatttacagcaatgagggatttatacatgaaaaatggacaaggatttgcattagtttattccatcacagcacagtccacatttaacgatttacaagacctgagagaacagattcttcgagttaaagacactgatgatgtaagctgacttccaaataaatatattttatttcaaaaccctgattataattgtttaagtctaaatttaaattcattttaaagcttgtgtattttggttggggggggggtgttggtttttttaaactttttccttgaaaggcaaaaatacccatacatgttttcaaatatatatcatgtggaaagtgagaaatttcctcctttgccattatcctgtgaaaattaaatgttacacccttccttttttttttttcctttgagatggagtcttgcactgttgcccaggctgaagtgctgtggtgcgatagctgtacctcccgggttcacgccattctcctgcctcagcctcccgggtagctgggactacaggcgcctgccaccatgcccagctagttttttgtatttttagtagagacagggtttcaccatgttagccaggatggtctcgatc

SEQ ID NO: 70353 - DNA, 1900 bp, Homo sapiens
gccactgtgcctggccttgattgacttttttaatacaagactatgagaaactaaaaattctattttgggagccttccgtccattatgataaaattttaaggttttttccccccatctctcataacaggatcatagcttgttttctcaaaagtttatgtaaaagtgtcttatttatgtctacattgactaggttgtgttcattttacttaacatatgagagttttctttctctcttttcttccctttggagttatcgtttgcatctccatgaaaagagaaggcagtggagataattgacatcaaagttaatacttatgtttatgttacagattaaattgttaaggctgtaaattttattatacattatttaatattttttgtggcatatgaaaagtaattcttagatttgactcttagaattcttttgatttgaattcatatagcatatttacttatttatttttactctcacaaatgtatttttaggttccaatgattcttgttggtaataagtgtgacttggaagatgaaagagttgtagggaaggaacaaggtcaaaatctagcaagacaatggaacaactgtgcattcttagaatcttctgcaaaatcaaaaataaatgttaatgaggtatggtcaaatatacttaaaatgggtcttcatttgaagtacaacattgaagatgaatggaaaatgtcttaaccccaagttaatatgtactcagggtaatatgttgatgttacaggcaaaaaaaaaaaaccctcatgttaaatgtatctatgtagtaaataaacaatactatttcagtctctattaaatacttgtacattgatatttaccatgaaaaaggaagactggacagaaaatacatggatagggaagacagattaagacttcaggtatatgaaggatgttatatgaaaaatagagtaaaattccgaaaagtatgcatggttcttgaaaggctccaagtcatgttgtagagcaaaaacttacagtttttaaaaggattttttctttgtgtgatggtaaatgttctaattgaactaagttaagatctctgcagctccttcaactaagtattttaaggagcacaatattaacactccccaaaaatttgagcttggcagttataacacctgattttattctcattccttagctgaacaattctgggcattaatttatatccatggaaatttctgttttttcaatttacttttttcattgggggggataggtgttcctcctgtaaattaaaacaaattattgtatttgcagatcttttatgacctagtgcggcaaattaacagaaaaactccagtgcctgggaaggctcgcaaaaagtcatcatgtcagctgctttaatatactaaatgcattgtagctctgagccaggtatgttcacttatctttcctctaacttttaatcactcaaccttattaagggcactctgtcatgaaagcaagtatagacttctttttgttggttctgaaaaataaatggtttatttttataagatatccatgagttagtatgctatcttattaattatttacttatcatcatgagtaaagtatttcacataagtattctttttttgagatggagtttcactctgtcacccaggctggagtgcagtggcgcaatatcagctccctgcaacctccgcctcccaggttcaagcaatgcttctgcctcagcctcccgagtagctgggattacaggcacgtgccaccacgcccggctagtttttttgtatttttagtagagatggtgtttcaccattgttggccaggatggtctcaatctcttgacctcgtgatctgcccacctcggcctcccaaagtgctgagattacaggcgtgagccaccactcccagccaaccccgtccctaa

SEQ ID NO: 70354 - DNA, 3388 bp, Homo sapiens
ataacgtgattgtaaatctgtaaaacaccatcatgaaataaattctatttgtctgctctgaacgagctttttagccactttcattgaaagagtgaggaagaacttgattatctgatactagaaaccttggttagatgtgcattctatacttatgatctaattctaggagtacattacgattgtgtaaacacaggatcacccagtttgttaatattgctatctgacttttcaatcctaattctaataaggttgacttgactaacaattttaatgtgatttttttcctttttaatccttggaaggtaatgcacaaaaatttgcacaaaggtactttccctttctgttcctaagattttcatttaactgactttcaagagggcagcagaatagacttcatctttttggaatgaaaaggtctgccgtgaattgtggtatgttgccactaatgtaatgcctagaacaagagcctagattatattcatttctaacacttttaagactgttttcttaactgtttgcttttgggtctttactttttctagcccatgtttttaattaatttttttccttttgacaggtctgaagaactgttgcccaattcaacagtgccagcattccaactttgttaaacctaccaacatcttaaatggactttcctgtggtggtaccctttaagaggcggatgaaagctactatatcagtttgcacattctaatcactttccagtatcacaagagagatttttacttatataatagtcctagagtttgcagctggtaaaaccagaggctacatccagtattactgctaagagacattcttcatccaccaatgttgtacatgtatgaaaatggtgtactgtatactttaacatgccccatactttgtattggagagtacaataatgtaaatcctaaaagcaccactattttagcataataaaagaaagtccaaagagctcctatatagactactccagataacttcgcttctttgatacttgtagcttattgtaattttttttaagaaattcaaggtcattattattgtacaaaataagcgctttgattaacacagctatatagtttttttaatttttaaaaaacctgtggagacggtgatcttgtctttaaaacatgatagtcctttcagtataatgtcttagattaaagacgttgcctttaatatctgttgggaaggaaatgtccagacttttcaaatctcttattatatgtttcctttttttgtttacatagggaacaatgtttatagtcgtgtgtacagtgggggtctacaacaagaagtgtatattttcaaacaattttttaatgatttaacaatttttgtaaatcattttcaggcttctgcagctgtagattctcactgtgaatcccttgcttgctcatgcataagtgtatttgcaataccaaatatacaggtttagtatttttgcctgttagtgattgtttcacatgtgtaacgttttggttgagatgttaaatggtggacgagtactgtggatgtgaatgtgggaagtaattttaatcatatgtaattggtcacaaggcctaatttgcagtaactattgctgttttatttaacaatgccttgttgctttgtatgcattaatgtttggatgtaaagattgtgtgtctatccaacagggagccacagtatttaaattgaccaacctaatgttacaactactttgaggtggccaaatgtaaactaaaagccttaattaaagtggtgcaattttgtataacttagcatcagtagttcaataaatttggattgccatgcaagggcttgcattataattacttgccacttgaatgtgttttgtgtaatgttttaacagtgctagtaaataaatacgggtttaccctggttttaattgtaataggtgcattttacacagcatggtttcataatttaacatctgggcaagccagactcattaattacaggaataaggaagtagcgagttttctggtattgtttgaatatccacataaccaccttttgaacttttccttgagaaataattttgtaaatcaagcagtattacttacgaataaatgcctttgggtaatgttcagtagctatttgatgaggtaggtaaaagaggaacgatttaacatactttcatggatgttacactatggattttttaaaatacaggattgaagttagaatattgtggttataaaaatctttgagtgatgtggattaagcacttagagaatcgatatttttcttaaatatgctataattgaattctgtaagaactgaattcttatagaattattttaaaactttttaaaaattgtaaagctcttaaaaaactttttgaaagtatttgccagctactggagcaattaatcagtgataatatctaatagaggggtatctgctaatcccctaaatacacgctgtttgaatgatacatttttaaaggctttcatgttaagaaaaagtctgattctttacaaaagggacttgttttggcagaactggttttatttataatcatttgggaaaaaaattaagcccaaaaaactgggactgtgaaacactaaaattacttcaatttactatgtcctgttacatccattgataccgccattattcaataattacttttaataaatgtttgctgcctaccagctatgtaccaggcccagttctaggctcaaacagctaaatattcattcattggacaaattaagtacttaagtataaaaattgttctaggcctaaggatgtagcagcaaccaagatcaactataaaatgctgccctcctagaatttatattctattgaagagtttctcagcctcagcactattgatgttttatgtttgataatgtattctggcgactctcctgtgcattataggaattttaatatctgcccactagatgccagtcacaccaccccagcccccaagttgtggcaaccaaaaatgtttccagacattgccagatgttccccagttggattgttgggggacaagggaggtgaacttggagggcaaaatcaccctggtgaagaactactgctctggtgggaaacaacacattagttacagatgagtgttagggttacaagatggatggtttactatatagtgaataagaatataaagtttggagccagacttcctgggtttttaatcccagctcttccagttcctactatatgcctttggttgggtgccttggtttcctcatctgtaaaatgagaatgataatacctacttcataggagagtgaaatgaatgccagtgctatcctctaggtctatatatatatatatatatatatattatatatagtacatatatagagagagtatatatatatatgtagtacagtggaggtct

SEQ ID NO: 70355 - DNA, 1049 bp, Homo sapiens
tttttttctttttcttttttttttttgagactgagtttcgctcttgttgcccaggctggcgtacagtggtgcgatcttggctcaccccaacctctgcctcccaggttcaagcaattcttctgcctcagcctcctgaatagctgggattacaagcatgcaccaccacgcctggctaattttgtattttttggtagagatgaggtttctccatgttggttaggctggtttcgaactcccgacccaggtgatccgcctgcgtcagcctcccaaagtgctgggattacaggtgtgagccaccgcacccagcctaatcaatacatttgatatttcaagaatacatgagagaagagaggtagattgagaacagaactaaactttatatatgtttccttaactattgggaggaaaatggatgagtctgtgttgggatacctgttgaaacaagactactaaacagattaatcaactaattccataggcttgacattagtttatctttgaaaagtaaaagtaaagtgcttattgctaaataggtctgtattctaaatgctgccattttttaaaaaaagtattccatgttacacacattttaaacttgcttcttaaaacatccctgttggtggcctgtaggttactgaccttaggaattacaggctttatccaaaattaggcatatctacctgatttttgtatctgagaatcaataaatgcattcagtattctctaccgtgtttcaggcgctgtttacaatatcggaggtacagcagggattttctgcccacgtggggaaaacacacagcaaatgaacaaagctctattggtaacagtctgttaaactttctaagagctttccaactttctaagagaaaattgtaatgattttagaaaagtgagctgtcatttttcatatatataaatttttttattcataggtaatctaatttttctcatttctccaaaagggtacgaagacagtttttactatgttgttttactatgaacctagtttaacctgactttccttacagacccacataaatgagacaatc

SEQ ID NO: 70356 - DNA, 1035 bp, Homo sapiens
tagtttcctagggctgctgtaacaaattatcacaaatttggtggcttaaagcaacagaaatgtactctttcacagttctgaaggtcgaagtccaaaatcaaagtgttaggatgtactcctagaggctctcggagagaacctgttcccatggcattatgccacatcacatgtgcctctatctttgtatctcctcctctctataatctttcttttaaaaggacaattgttttgacatttagggcttacccacatacttcaggataatctcatctcaaaatgcttaatcacatctgcaaagacacttttttcaaataaagttaacagacagaagtttgggggttgggatgtggacatgcctttgggagccattaacaacctaccaaaacattttaacaatttttcagtaccaaagactagtatgggtctgctccaagataactcaaaacattctgaactgaatcagcagaccctcaggtctccctagagagatcctgagcacctaggaaagccccagaattaagctactctacaaggattctgagggaagtctgggattaggtgagactttaatgagtccatcagaggtttagtatggactagttctacagttccagaagcaacatactgggtatggaatattgttaaccattgtcatcccacagaattaccttctacttgtgtcagtatatatcctgcctaccctacatattttatatttatcaatgatgacagaaacttccccccttttacttagatctaatagtaatataacaaacttttctttttcattttcagacatatccagagggttttctcttcatctcacgcatcccacctttaatcagacatatgtgattcatatgagagaaaattagtgtttctgagaccaaatggtggtgtttataagattttgcttctgcactgaattcaatgttttatttactgcttggttattttgtttttgttttttaagaaatgggaggagtgtaatatctagaggtacatgaaaaaaagaaatggaaggaatggacaggc

SEQ ID NO: 70357 - DNA, 1050 bp, Homo sapiens
aaaaatagcaaaagaaatgttatgtaagctgtgatgcagaatgacttcacctaagtattaaaaatacactatagtagccgggcatggtggctcacatctgtaatcccagcattttgggaggctgaggcaggtggatcacatgaggccaggaatttgagaccagcctggccaacatggtgaaaccccatacctaccaaaaatacaaaaattagccaggcgtggtggcacgtgcctgtagtcccagctacttgggaggctgaagtgggaagatggcttgagcctgagaggcaaaggttgcgttgagccatgatcgtgccactgaactccagcctgggcaacagatccagaccttatctcaagaagggaaaaaaaaaaaaaaagacgcatacatacatataatttttagaaaccttatttgtttttaaagtatccactcagtgacaataactccatcacttttctgtatttttacttttttgtttttttttaaggttactaatctggatgacagtaactgggcagctgcattttcatcacagcgttccgggctgttcacaaacacagagccccacagtataacagaagatgtaactatcagtgctgttatgttacgtgaggatgatcctggagaagctggtaaaatggcattgagctttgtgacaagtagcttttcactttagcaagatgaaggaaaccatttcttcctgtttctgaacgtcattatgtttttcttttctttctttctgtctttttttcttgagagagtagcttaaacaacagatttttgtgtgtgtgttttttgagacaagagtctcactctgttgccgggcgcggtggctcatgcctataatcctagcactttgagaggccgaggcgggcagatcacgaggtcaggagttcaagaccagcctggccaacatggtgaaacctcgtctctactaaaaatacaaaaattagttgggtatggtggtgcacacctgtaatcccagctacttgagaggctgaggcaggagaatcgcttgaacccgggaggcagagtttgcagtgagc

SEQ ID NO: 70358 - DNA, 1048 bp, Homo sapiens
gtatttgatacagtatcactagaaggttgagaacctcaccttggttctcagtctgagcagcatcttgccattttatcttttaatgtaaatagcagcctgttacgttattagacaagtctcatattgtaatttttttcttatttgtgctgttgaaagagcatctctttctttaggtttagttcttaatctaacattgttgatgtgttttgttttctcctggaccgtaatgctgttattttttttcagatagtgttatgaccactgtacaagcattaactcatgtaatccttatggtggtccattaaatagttacaataattattcccattttagagaaaaggaaactactgctcaaagtggttaagtaacttacctcaaaccacctggctaggaagtagtggtaccaggatttgaaactaagcagtttagctccagagccctgctcttaacactttggtaactactactttcttgtagtatctgtcaaaaacaggtactcgtattaagtgactcaaaatactttctacttaggccaagtgcctgtattttcccagagtggaacatgccatttagtatgtattataactttctccactactttgtaatggtgtgcttaaaatataattcagatatttttaaatctggctcaatttcttaagtaattgtttataaaataactagtatatctttgagatcttaaaagacctttaggtatcaaaagaaaaaatagataaattgggctacatcaaaattttaaacttttgtgcacgaaagaatacaatcagcaaagtgaaaaggcaacccacagaatgagagaaaatatttgcaaatcatatatctgcttaggggttaatatccaaaatgtataaaaactgctacaactcaacaacaaaaaaacaacccaatttaaaaatgagcaaagaaatagaatagacagaggctggacgcagtggctgatgcctgtaatcccagcaatttgggaggctgacgcgggtggatcacctgaggttgggagttcgagaccagcctgaccaatgtggagaaaccc

SEQ ID NO: 70359 - DNA, 1036 bp, Homo sapiens
tataaaagacttgtagccatttaaattttcaaacaggctgggtgcggtggctcacgcctgtaatgccagcactttgggaggctgaggcgagcagatcacctgaggtcaggagtttgagaccagcctggccaatatggtgaaaccccatctctactaaaaatacaaaaattagctgggcatggtggtacatgcctgtaatcccagctagttgggagggtgaggcaggaggatcacttgaacctgggaggtggaggttgcagtgagctgagaccgtgccattgcactccaccctggacaacaagagtgaaactccatctcaaaaaataaataaacaaataaatacattttcaaacaaacggaattacctagaagtacgtcacttaacttttctttattcctttttttttttttgatgtgttctagcatccatgagtatgttttctgatttcctgcagtcttttctgaagcactcttcgagtacagtttttgatcttgtggaagagtatgaaaacatctgtggtagtcaggtaagctaatttcactccgtcgttagtcaaacttcagtatttttagttttcataaacagcattaacctaattttcatagtgtttaagggaggtgtcttaggggaacagtggcaggagtggagggaaagtcaactagagcatccctgcgtcttacatattgagggcccatacaagatttctttgggagaaaaaaggattctgctgctttaaaaaaggaaaatccagccagatgcaatggctcacacctgtaatcccaatgctttgggaggccaaagcagaaggatcacttaaacccagcagttcaagaccagcctgggcaacatgggaaggccttgtctctacaagaaatacatttgccaagcatggtgctatgtacctgtgattctagctccttgggaggctcaggtgggaggattgcatgagccgcagagtttgaggctacagtgagccatggtcacaccactgcactccagccagggtgacagagtagaccctgtctgaaggaaaat

SEQ ID NO: 70360 - DNA, 1069 bp, Homo sapiens
attttggaatgaggaaggactttggtgatgttttgtttagaaatgataatgtttttggtgccaatcttaggaaaatatctttcttgattagttacctgatataaattttcaaacacaattttaagataactttttaaattttaattgctaaaatgttggcttatgttatgatttttccaggtataggtttgatttaacttatcctctgggtagatatacagggagaaaaaaatatatccatcactgccactgttggatctgaaatcaagagtatgttagacttatatatatactcagataaacacaccttgttccaaattagatccatttctagtgggaacattacattacatttaatttaaaaagacaaaatagagaaggcaattttataatatatacttattaaatacaattattttagcactctattcaaatacaaacttatcagtgactcaaaattgtagaaaattaacctctttacatctgtgttttttattcaggtgaatatactgagtaaaatagtgagtcgagcaacacctggacttcaaaaattttcaaaaacagccagtatgctctggcttcttcaacaggagatggtcacatggaggctgctggcttctttgtataggtaatggcgtctagaattcataagtgaaataaacataaggtaataaaccaacaggcaaattaatttaaaagttagggtaggtcgtgcttggaaataggttttgctatttttgatgcttatcatttcgaataccttagttgtcaagagtgagtcaagagggaagaggaagatatcagatcataaggctggtagttaccaaaattggatgtgtgtaaagacttaaggaaagtactaaaaatagtgcaatacttaggctaaattaagaaaagagctgaaagttagacttcatgtaatatggaagtttgaaagaagttaaccaaattttccagaaggcgaagattataccatgtacatatccttgaatctaggaattttatgcctagaaatttaacctaagaaaataatgagaaatatatacaaccacatatgaataaaactttt

SEQ ID NO: 70361 - DNA, 1050 bp, Homo sapiens
cgattattcctatagaaaattttattcttttgccataatatttatttatcttaaagtaaaaatagtgtttggaaaaattgttacttgatatttttaaaatcagaaacttcacgcctgtaatcccagcactttgggaggccagggcaggcagatctcgaggtcaggagatcgagaccatctggctaacagtgaaaccccgtctctactaaaaataaaaaaaaaattagctgggtgtggtggtgggcgcctgtagtcccagctacttgggaggctgaggcaggagaatgacgtgaacccaggaggcagagcttgcagtgagccgagattatgccactgcactccagcctgcacgacagagtgagactctttctcaaaaaaaaaaataaaaaatctgaaactgtttgaattaagggtagtagtaccactacaaataaaacacaaatagatttggtagttaacactaatttatttttttctttctttcttagctggtggtagattggttagagagtattgccaaagatgaaattggagaattttctgataatattgagttttatgcaaaatcagtatattggtaagttaccaaactttaattcttaaggtcactcaatgttgatattgttcattcatctttcaataagtattattcagtttttactttgttcacactactttgttcacactactttgtttggtgtgtgagcaaaacaaataaaggctttgcctttatggaatttataattgtttaagagagttagatagctgatttgcaaatatacagttggccctctgagtttgtgggtttcgcatccatggattgaacaaactgcagatcagaaataattggaataaaacaagccgggtgtgatggctcacgcctgtaatcccagcactttgggaggccaaggtgggggatcacgaggtcaggagttccagaccagcctgaccaacatggtaaaaccctgtctctgctaaaaatacaaaaattagccgggtttggtgacgcacacctgtaatcccagctacttgggaggctgaggcaggaga

SEQ ID NO: 70362 - DNA, 1096 bp, Homo sapiens
aagcaaaaaaagtagttagagggtacttgccttactcaataataacacttaatatgaagatacaacaaaacagtatagaactgacatgaaaataaatagatgagtggaacacaaagtccaaactagatccaagtatatatgagaacttaacagatgtcagaggtgacatttcatttcagagggaaagggatggtttatttaaataaatggcgctggcataattggctttccatccagaagaaaacaaagctagatcctacttcatgccatgtaactaaaataaattccatatagagcaaaggtttgaatgtaaaaattaataaatgctgaaagaaaatttagacagccaactaaataaaaattaaaatacgtttgacaacaaaaaatgaactatattcttcaaaaaatcaagctgcaaataagttagaaaaggttttctctactctgtacctgatcactatttttttttttcacccttggtgccatgtacagaagagaatactcaaagaatgctttcatgtactgctgctcatgttgaaagaaatcttaatagtttattttgcttaggtcacatgagttcttcctttctcgtccaccatgtgtagtgccaaggtaaataggaataaaatataagaataaaagtttaataccattgagagattaaattgttataacataggtctctactttcaaagatgcttttcagttctggatttgtaagctgtgagtatattccaaaggcagtatcctttccatgttttattttgttttgatctttctaaggcccttcatttccagctttttctttctatatgttccttcaaaagtttaacatttttagtttaacagtgaatatatactacagaatgactgctagaagatttatggaaaattaaaaacttttttttcagagagttctggaagagaatcaagaacattatcatatagttcaaaagtttcttatcctgggagacattgatggtaagatatggttttattttactttgtgttttttgtgtgtgtttttttttttttttttgagacaaagtctcaccctgttgcccagactggagtgcagtggctcagtctcagctca

SEQ ID NO: 70363 - DNA, 1005 bp, Homo sapiens
gctttatgactcaccttattttgtttttccgtactctgggactacagaccaaggtatataaaaatgaacgatttcttcttctctgtaatgttgatgctatatacctattgtcaagaaaacactactttttttattattgttttctagaaatggtgataaggaatcaaaagtcttccatatagtcttgtatagtcactcaatgataactcactgagagtggccctttagggttctagtctgtggccacagaatgctgttggttaactggtttttaataaattcataactttatccttgtctgtacccagctttaaatcaaccagctaagctaactaaacaaagtgagtgctatgtgagattttaaaactttgttggttgttgttttgttgctttttttctaaaaaagaagataacattttggtcagagtgcatgtagaaagtgaatgatacagtagttgaaagcttgggctttggagtaggagtcctgagtatatacccttattcagcagcttctatctgtgtaactctgggtaaataaaacttcccttggtcctaatttcatcctctgtaaaatgtgaacaataatagtaactacccaaaaagagttatggtaaggttaaatcaggcagtagatgaactttggtaagcacttagcttggtgtatagttactgctcagtggtaaacattacaattattaaattatttaataatggaatttgtatcaaaaattttgttactttcatataagcagtgtatttataattatgtctttttttcctatgaaggaggaagtttctattgaagttttaaagacatacatacaggtaaactttgagaacctacaacctgattgttttttactattttaatgaaaacaaaactcagaatgatgctattttaattctcagtggtaagaaagcatcagaatccataagagatcttttaattatcagcacagttgacctttgaataatgcagggattaggaaaacaacccccaccgcc

SEQ ID NO: 70364 - DNA, 1050 bp, Homo sapiens
gtatacttttaattttattattgacatactttgatctttttctattttttagcttttaataagagagaaacatacaaatcttatagcattttatacctgtcatttgcctcaagacctagctgttgcccagtatgcattatttttggaaagtgttacagaatttgaacagcgccaccattgcctggagttggctaaagaagcaggtaaaaatggttgaaaactttgtcttttggcctttctaggcaaatgttcattttggctgtagtaacatttgtccttatagttttaaatcttatttctgttgaggggaaaagaggaataaaattttcagggaatttctgttttaggactaaagttacttatgctgtaactcatatgtaaaatatcttttaattctggcattttcttttatataaatatctttcatattttacatattttatttttaaggaattactgttccaaatttactgaatcattatgactatttagagaatattagtatcaatgattaatctttgttttttgtcgcttcaaaaaattatttagatttggatgttgcaacaataacaaaaactgtagttgagaatattcgaaagaaagataatggtgaatttagtcatcatgacctggccccagccctagatactggcactactgaggtaatttgggatgggggggcagaggtttctataacttctaataatcttttatgttattccttggtgaacttctcccttcgtaaaagaagttctattaggttttcttttttaagaatgtgtctttgtcagcccagaccttttaaatttaaagtcttatgtaaaggattacttatagtagtatgttaaaggagcttctttaatagaaaaaaatctcagctttggcttgttgctcatcaggttattttaaatacttgattaatcactaacttatgtagcttgcttactcatattttcagaaaggaatagaaagttatatctaagaaaactattttagagtaacatttaaaggaatcacgtggttaagttggtaaggcatacaatatataat

SEQ ID NO: 70365 - DNA, 1035 bp, Homo sapiens
atacttttaggtattccattaggcttttcaaaggagcagttattattttagcttgtcctgttttttttttctacactattagtgctattgatttccttcctatttttaagattatttcagaaattgtagtgtgtaatttctgtaatcccagcactttgggaggctgaggcaggaggatcacttgagcccaagagttcgatactagcttgggcaacatagggagacctcatctctacaaataataaaattatttttttttttaaatagaaaaattagccgggcatggtggcacatgcctgtggttcttagctacttgggaggctgaggtaggaggattgcttgagcccggagatcaaggcttcagagagccatgattgtaccactgcattccagactgggcgacagagtgagatgctgtctcagaaaagaagaaaaaggttaaaaaagaaaagaaaaaaaaaagaaattatgtggttggttactttctaattattttaattttcaaattttttgtaagtaaatgtagtgggcataagaggtttactcttttttctgtacttttactgttcacatcgattttaagaaagatccatgtatgtataaaggaatgccaattgttttttctgcttgttttccttatatatctgttctgactcattaattgtattattcaaatctataggttctgtttttctgtttttaaaaattatataaagaaattataaattccattttccatgtgtataagcaaagtagtctgcaatgaagttgaccctccctgtgtgcccctccccacatcgtctttttcccagcaacagtcattgctgtcagtctgttgtgtcctctcaggcctccttagagctatctttatttatatgtataaacatccaaaggagtggtgattgttttctgttctgatttttgctctaatgatattcagtttccaactcattctttttatgcatgtttttattcaggacatagtaagtttattagaaatacaaatgcagaagcattttattttcactgtcatac

SEQ ID NO: 70366 - DNA, 1023 bp, Homo sapiens
ctaaatttttgtctcttgaatttaatctgaacaacatttacctctttttcgttacagattcctataactttaggtgtaatcctaaattcttattacgatgtgaagtttaatttccttggaatggtgtttgctgctcttggtgttttagttacatccctttatcaagtggttggtaatttttttttctttatgtgcctttttagcagatttcataaattttgaagctgtattccaaggtttagaaaatacagtatagagacaatagactgttgggaagaaagcataattgcataagttgtctgactcaaggtgaagagaagaaaggagacagagaaacttgggtgtgtgatgctcaccaaatacctacctgtttgtaagtgtataatatccatgcttaacagtctcagcttggggtgaagttattttctgggaaatctttacaaaatacctagtaagactttttacttcctaagtttgttatgttttctgtttactctttacttttaacattgttgtgaaggagtgagtatacttccagaaatctgaacagtaatgaaaaatttcagatttttagatgtttttgcctcaaaaattatactgctgttacaacttgtttattggcttttaataatgtgtctaatatagattattacaatattatactctatattaataaatatagagtaatttatattaatgaatatttttccatttgtgcaagcgcagtgccttgcctatagcagatattcattaaaaatatgttcatggattcacttacttcattaccataaaatcctaacaagtatggtttttgattcttatttagtggagaaaaaataacttgctgtaggggacagtgaaacggtattctctctatactgaaaaccttggtctggaaattctgggtgtgcctgcatggggaatcaaagccaaaatgtgtaaccaattttatttttttcacaaacatccactggttattaaactaaggcattcttgtttgaaattttaggagttcagtaatag

SEQ ID NO: 70367 - DNA, 3074 bp, Homo sapiens
ttaaacagctgttaattttggtttctttttggtaacagcgacacggagatccgcatttgtcgcagtttccaccgcgggcgggaagtgtaaacacaagaaatacaaacatagcgcaacggctaaaggagtgtcacagcgccaaaccttgctggctccgcgccaggccgagccccaccctctcagctcgcggccaacacccccaccccgcctcacagcccgccgcgcccgcggggcgacaccccccactccatcatcccggaggtggtgcggccgagccccggacccaattggcggaagcggggccggttgtgtgcgcgcgcacaaatgcccggatgcgccgcgacgacccgcgcgctcccctcgggcggtagggggcgcgcaccgaggcaccgcggcgagcttggctgcttctggggcctgtgtggccctgtgtgtcggaaagatggagcaagaagccgagcccgaggggcggccgcgacccctctgaccgagatcctgctgctttcgcagccaggagcaccgtccctccccggattagtgcgtacgagcgcccagtgccctggcccggagagtggaatgatccccgaggcccagggcgtcgtgcttccgcgcgccccgtgaaggaaactggggagtcttgagggacccccgactccaagcgcgaaaaccccggatggtgaggagcaggtactggcccggcagcgagcggtcacttttgggtctgggctctgacggtgtcccctctatcgctggttcccagcctctgcccgttcgcagcctttgtgcggttcgtggctgggggctcggggcgcggggcgcggggcatggggcacgtggctttgcggaggttttgttggactggggctaggcagtcgccgccagggaggagggcgggatttcggacggctctcgcggcggtgggggtgggggtggttcggaggtctccgcgggagttcagggtaaaggtcacgggggccgggggctgcggggccgcttcggcgcgggaggtccggatgatcgcaggtgcctgtcgggtcactagtgtgaacgctgcgcgtagtctgggcgggattgggccggttcagtgggcaggttgactcagcttttcctcttgagctggtcaagttcagacacgttccgaaactgcagtaaaaggagttaagtcctgacttgtctccagctggggctatttaaaccatgcattttcccagctgtgttcagtggcgattggagggtagacctgtgggcacggacgcacgccactttttctctgctgatccaggtaagcaccgacttgcttgtagctttagttttaactgttgtttatgttctttatatatgatgtattttccacagatgtttcatgatttccagttttcatcgtgtcttttttttccttgtaggcaaatgtgcaataccaacatgtctgtacctactgatggtgctgtaaccacctcacagattccagcttcggaacaagagaccctggttagtatttttgtctcgtgtaacttttaagaataatttattttatgaagtgataaactaaatttcgtatacctcaattgtagcatggctctgtaaataaaattgtatgtgcatagcttaaagtgtgctacctctggcgtaactgcgtggagttaaaaactgttaagaactggtcagtatttttttagccatttgccacatttgctttaaaaattagttccattacattgttaagcgtggttgaagttacgtttgttacgtgactgatttttttttcctttttgacctcccagtatttaatttttaaaaatggtttctaaaagtcaaaaaagttattcgtgcttgttttaaagatttttgtcattagagaaattttaaagtaaaacctgaaaattccaggctttttgctccatgtttccttttagattttttgtgtgcgtacccacatatatttacatttgaatttaaatctatgttattgtcctgtttgttgtactaacaagatgaaactgtagttgttctgtgacttgcatccttgtcaataaataaagtctacagaattctttttaatggctgcatagtattccacagcatgagtataccattttaaaaattatttatgcctttactgataggtttttaaaaattgcctcctgtttttgagtattacagatagtgccgctttgtacatgcatcccgtgtgactatttctgtaagaaagattttatagaattataggctggcctcggtggctcacccctgtaatcccatcactttgggaggccaaggcggaccgatcacctgagatgaggagttcaagactagcctggccaacatggtgaaaacctgtctctactaaaaatacaaaaattagtcgggcatggtggcgcgcgcctataatcccctgctgaggaggctggggcaggagaatcgcttgaacccaggaggcagaggttgcggtgagccaagattgcgccatttcactccagcctgggcgataagagcgaaactccgtctaaaaaaaaaaaaaagaaaagaaaaagattttagagaattagaactcctgagttctcaattttactatttgattgctactggtaacttgctcaccaaaaggctctaacagtttcactcctgccaatactgaatatcaccaatctttaattattattattattattttttttgaggcggagtcttgctctgtctcccaggctggagtgcagtggcacaatctcggctcactgcaatctccgttccccgggttcacgccattcccctgcctcagcctcccgagtagctgggactacaggcgcccaccaccacgcccggctaattttttgtatttttagtagagacggggtttcaccatgttagccaggatgatcttgatcccctgacctggtgatccgcccgcctcggcctcccaaagtgctgggattacaggcgtgagtcactgcgcctggcctcttttattattattactatttttttgataaaaggtactgtaccattgtttaaattcatttttctctagtttcttggtgaggctgggcacctttcctttttgtttttgtttttgtttt

SEQ ID NO: 70368 - DNA, 3794 bp, Homo sapiens
tctagcactgtctcccaaagtgctggggttataggcaagagccacctctcccagccagctgcctttctttctgtaaggaaaattttactggaatgcaaccatgcccgttggtttacatagtagccatgctttttacttggatagaaccatttgtatgaaaagcttaaaatacttacagtctggctctttacagaaaaaaattgacccctaatctagttggcaggctccttgcatacaggtcatatgtcttatttgtaatttcttttgcagtacctaccactgtccagtgcatagtagaagctcaataaatgtttgtcaagtagatatttgaaatgtagactaactaagaggcagcatgatatagtaggaagaaaatgctgagttgtagttgagggacctgggttgttatctctgatctgttcttaattacccttgtcagcttgggttagttagttaggttctctagccttcaggaacctaatctttagaaagagaagattgataacaggacccactctaaagatttattcatttctctttgattctctaagttagcttgcaataagctcgttggatcagtacggtaagctcattggatctcagtaatttatggttgtttgtaaggcagtaagcaggtaatataaatagctgaaggaaaaagtaatctttgctcttttggattggatactgtctgtgatcacaactgatacttgatgattccatgatacttgcataatgattagatcctccccagcattttttccaaatcccctttattgaacttgatggatatgtttgctgcagggcctatagttctgggataattttggaagtataatagcagttcttttctctttataggttagaccaaagccattgcttttgaagttattaaagtctgttggtgcacaaaaagacacttatactatgaaagaggtaagctgaatcaagagataagtagtatctcactagttacatgtagccatacttaaagttttcaagaccatgtggagaaattggccatatagaaggatttttcattaagcagcaacatttaattttgtggtcgtttggactatattttaaagctgaaaattctaattatactcgagtttcatttctcagctaggaactcagataaatggaagccccgtaagggtgcttgaccattttatgctgtcaaccctttggtagactccttcccagaatcatgtttttaaatgtatgaaataaaatgtatagaattacaaaggaaacatactaaaatacggttaccaaaatagtaaactagtttgtgatatgtgtgcttttgttattaacataataaatactaagatttagaagaagatataataaatataatgtttttttgttttttgagacgaagtctcgctctgtcacccaagctggagtgcagtggcacgatctcagctcactgcaacctccgcctcctagattcaagcccttcttctgccttacccttccaagtagctgggattataggcacctgccaccacgcctggctaattttttgtctttttagtagagatggggtttctccatgttggccaggctggtcttgaactcctagtctcaggtgatccacttgccttggcctcccaaaatgctgggattataggcatgagccaccatgcctggccaataaatattatcttgatatagtgaggaatataagtcatattttgaaatgtttgccataagtacagtatgataggaaaacacctctgatttttgttggtgatgaaatcacaggtattaatactgttgtgatttgttgcctacatttataatcgaaggaaaagctaaattctagttagaagtttgtgaaaataagaatagaattttttttttcccatccaaattaatggaccccctgaattctatccaaggacttcttgggcatccctggatcccaggttaagaacttctgcactagagatacatgagtacagtatactgatctttctgggatagaggtgagctgattcatgaccatatattctatctaatggttccagcattttaatgcattccccacctttaaatttgtgcacagaagcatgattttcagtgacagattgagcaaccttaggcagaatttcagtgtgattgaaatatgcctgttctctgtctctcccacttagtttatgggactcagattacttaaaacatttaagtttctttcttacaacggtatagtggggcaggaagagcttccatttttctttttcctctccagctatacttttagaaacttccttaaaggatgtttggtagaataaatctaagttctcttcctttttcctttcccactgctggacagcaatctgtccaatccacagtcacataagaatattcctttaaggccgatgcctgcttagccagttaaatccaaagacagtgtttgtaggaaagggccaggttaaatggtatttttaaggctaatttgggattgaccttattatcattggataatcagttaaggaaacaaaaaagtatggatttagcagtagatagaaatgagaaaattggccaaggccatcataaagacttagaatgcttatgctaaactatgtaacagtagtgtatgtattgtctgatatagttctcagttataggatctttgttctggggcacacaggaaggtagtgaaagctagtatgggtagtaaaaagagcgttggattaagagtcagaagagctggggccagtttcttcttcttttttttttttttttttttttttatgtgacagtttctcactctcttgcccaggctggagtgcagtggcatgatcactgctcgctgcagcctggacctcgtgggctcaggtgatcctcccacctcagtgtctgcagtagctaggactacaggcttgtaccactatgcctggctaatttttgtatttttttgtagagatggagtttcactatgttgcccaggctggtctggaactcctgggctcaagggatctgcttacctcggcctcctaaagtgctagatttacaggtgtgagccactgtgcccaacgcaatttcttcatttctaatacagtgataataatcttatgaaatatcagaatgagataatacttataaaagtacattgtaaactgtaaaatgccatatgtatttaggtagttgttaataggtttatatctggatatcttaaaaatgtattgccaacttcttgtcttaatgcagcacagggaatataatttaacttttattaatggttcaaagtcattattttgattatttatcataatatggagtaaattgataccttagagggtttatttcattctcagaattctctcaaactgttttgtagctgtcattgattgattgtttttctgtcttcctcctctggtgacctcagaggctattgaggtttatagtatttatgactatttactaagtggctccagaccactgccatattttagttgatttttgtttctgcaacttttttggctatcagttttttattttgctgccttttcccttcctaatatgttagtatctaagtatctgggcagagttaaagtctacaaggaaaaaaacctcacattttaaggtttgcttaagtaaatagagaagcagttatttctgcttctgtcaaattaaatggaaaaggcttaaaagtagcttttttttttttttttttttttttttttgagatgaagtctcactctgttgcttaagccggagtgcagtggcgcaatctcggctcactgcagcctccacctcctgggttcaagcaattctcctgc

SEQ ID NO: 70369 - DNA, 1035 bp, Homo sapiens
catgtatatatacatgggtaagtcaataagtgttttacaacctactttccatgagaaaagccctgatttatgtgcttgctgacttccatagtataatactctcatttgaaggctaaaaacatggagttgggaagagatgtacacagtttgctttttttttttttttttttttgagaaggaatcttgctctgtcactcaggctggagtgtagtggcatgatttcgactcactgcaacctccgcctcccaggttcaagcaattcttctgcctcagcctcccgagtagatgggactacaggcgtatgccaccacgcccggctaatttttgtatttttagtagagagggggtttcagcatgttggccaggctggtctcgaactcctgaccttgtgatctgcctgcctcggccttccaaagtcctgggattacaggtatgagccactgcacccggtctcacagtttgcttttgagtgctgcttagagctgtctctaatacactacactgctcctaaagcccatcctcgaactacagttaagaaatgctcttaggccaggtgtgatggctcatgcctataattccagcactttaggaggctaaggcaggaggatcacttgagccgaggagttcaagaccagcctgggcagcatggcaaaatcctaactctgcaaaaactacaaaaatcagcttggtatagtggtgcatgcctgtagtcctagctactcaggaggctgaggcaggaggattttttgaggctgggaggtcaggactgtagtgaactgtgatcatgccatccagtccaggtgacagagcaagacctcatctcttaaaaaagacaaaaacaaaacaaaacaaaaaaacacctctcaggagcttgtttagttcctagaatgaattgaccactcccttgtacttcctctattccatattcagattttattgtaaaattgctttgttttacttgtgggtttttttgtttgtttttgagatgggctctcactctgtcaccctgcttgaagtgcagtggtaatcttggct

SEQ ID NO: 70370 - DNA, 2167 bp, Homo sapiens
ccacgtccggttaatttttgtatttttagtagagaaagggtttcaccatgttgaccaggctggtctcaaactcctgacctcaggtgatcctcccaccttggcctcccaaagtgctgggattacaagtgtgagccactgcacccacccagcctagggcttcctttttattacatcttttttgtagcatctgtttatactaatccaaaattcctggacaatataacctattatgtacaacttaagaaaattagtgtaatgccttacccatagtataaagagaaaattaatctatgataatgcataatttcaaaatgttaatgtccaggcatgagttcactgttaagatgaaaatgtttccaaggggggtagtaaagggtatttgatgataattgtctgtatatcccaactctgaaactttgacttttgagctcaaagtctgtatatccaactacaaatgaaacctatgtgcctgaataactcagtttgttatcttcccatccaatctgtttatctttctaaagtttctcttttagtgaatggtaccactcatttattcacccaagttggaatcttggaatcatcttaactcctttcttccttgccttctatatcaaataccaggtcttgttggtttttacctatttaatttctctggaatttgttttccatgccttagtttaggctttaatagtttttagtttgtattattgcaattgtctaatactggttttcctgcctctgccctctttttcttatgttttgctagagtgatttgtcactcttctgcttaaaattaccatttaggggttcattattgctctctggatgtaatattttctgtgagctagaaatcagtttcatttcttggacaaaaatcctttttaatggtgagtggctgcaacatcgcattaaggaagattctgaagtatctgcggggaagaatgcagtgataagggaatgacagcatgagtcctgctttggctagaccacaggatcctttacagtctgaacctgcctacattccagtaataatgaactgcttgtggtgtcctgcaacaggaactgttgttagtttgcttttggatactttttcacatggcgttttcttggtctggaatggcctttcctagccctattttcatattgtcctacaaaatatttcctgattctttgtttctcagacactccctgtccctaccaaaataatgactctcctgtctctctgctaatttatctaacagtcttttaatgtcttgattatactttactcttctacattaaagttgaattattttatttacatctgcaacatttagtatgaggatgccacctggaaaatacatgtttaatgtttattgaaaggttaaattgcataagggtttgtgttagactgatagcatatctactgagtagcgccccgccgccccccgcccaccaccaagtttctgatcctttttcttttctctcagaatcatcggactcaggtacatctgtgagtgagaacaggtgtcaccttgaaggtgggagtgatcaaaaggtaatctaagtaaatttctcattctaatgtaatattatttgcaaattggaaaggttatttacaacaagttagcttactggttatgttaagtttgttgtattttatttttttcctaaatgcttaggaccttgtacaagagcttcaggaagagaaaccttcatcttcacatttggtttctagaccatctacctcatctagaaggagagcaattagtgagacaggtatatatgaatatttatttgacgcattcacacagctttttgatattctttctctaatgaaattagtgcttttagacttaattaaattgttccctttttttggttgagatgaattaacctctgagtttttttcattcgtgattttatttgatttacaaattgcttatttagcaatatttttctggctgactacagcaggcacagtttactgtgccccactggagtttatagttagccaactctctgttaagatagtaggaggtggctggggtgtggtggctcacgcctggctcacgcctgtaatcccggcactttgggaggccgaggctggcggatcacgaggtcaggagttcgagaccagcctgaccaacgtggtgaaaccccatctctactaaaaaaaatacaaaaa

SEQ ID NO: 70371 - DNA, 2054 bp, Homo sapiens
aaaacataagtatctatgactcgagacatttttctaagaaaaaaaacccataagtattacaagtgttgtgtcttgttacgtgtattctaccaatttggacatagaaagatgagtgacaggttttagctcaaagtatatataattcagatgagaaacatgcctgcaaaattatgttttgcataatttatgtgtgagactatataattcattattatacaagtagtaaggataattaaaggtggaagagccttttcagttatggtattgacaaaggcttagtcaaagaaggatgaataggattttgaaactgaaattattctagttagagggggaaagtgtggaagttgaaatgccaagattagttgaggaagcaatctagatctggcgggattatccatatttagtaagggaggaggggtgtctagttgaagacagacgaagatgttaatacagtcacactgtaggtactttcgatgccaagaggctttggtgtttttcctttatgcagtggggttttgaacagggaaaataatgtagtaataaccttgaaaccttaatctagtttcagtatgcaggatggatctgaggaggaaatgtgcgtggcaaccggctccgggatggctggctggggggcctagtcttctgcccgccgatctccctcgggaagtcccggatcagagcagcaggcccatcccccaactgttacaccctgctggcagcagcagaggcacagggatgagttaggaaacagatacagaggtcaagaggtgatgtttattaagttatatatttttttcttgttttaggatcttgatgctggtgtaagtgaacattcaggtgattggttggatcaggattcagtttcagatcagtttagtgtagaatttgaagttgaatctctcgactcagaagattatagccttagtgaagaaggacaagaactctcagatgaagatgatgaggtagtattttttttcccctctaattatattggaaaattattaaatattttctatgttcattgactttgagattgaaataatattattcagatttcacttgaaatctttacctcttgatttgtttaaactaacacattggtttgtggacttgaggatttcatagttctttatcatctgatttatattattatattactactaattgccaagaagtcaatagacctcaatgaacatgcttattataatggtctgttcacttttaaaaacatataattcaactactgttttaatattaacttactttctataaaagtaaaacatgcatacagttaaagtcaagtagtacccttagagatctgtttcccagaagtgactgcctttaacatttctagctatttccctattatttaatatctccatattagttatttatgaagtaaaaccacctagctgaatgttttgttttattcatcctaaacatcctttgtattgacttttaccattgtgggtaaggatttctctctcctccattttttccccctttacactcacttactctatttgatattgtctaaggctttctcatatattgtagtacatgatatttgtttaggacttattactaggaagccttctgattgaaggaaatagggcgatgaattgatgctaatgaatgtgttttattaggtatatcaagttactgtgtatcaggcaggggagagtgatacagattcatttgaagaagatcctgaaatttccttagctgtaagtatacatctacttttttaagaaataaaaatttcattaaggtcaagattaggagactatatctagcttctttctgaaatgaactgatttttataaagttaaaatgtttttgtaaagtctgaataatttaaagcatttttcttttatttgttgtgatgagacctgtagctataatttttatttttaggtgctggaatttgaacttttttttttttttttttaaacagggtcttacccttctcccaagctggagtgcagtggtgcaatctcagtgcactgcagcctccacctcccaggttcaagtgattctcgtgcctcagtctc

SEQ ID NO: 70372 - DNA, 1755 bp, Homo sapiens
gaaaaaaatgggtgtacttactctactttaggagagactgttacatattgacctttaaaaatctgttttgtgtataattgagacatataacgtgatgttttgacacacatgtaaatagtgaaatgatcactacagtcaagcaaattaatgtaatccattatcttgaatagttaacctttcttgtgtgtatggttaaaatacctaaaatctattcttttagtaaatttccagtataccaatatataactaactatagtcctcatgctgtttacagtgactattttatataaaacatgaaacactgaatattgagccctatgatatactttaccttagacatagcaaagttgctagcattcctgtgactgagcagttaaagggttacagaaactgactgtgtgtcttatttcattgaaggactattggaaatgcacttcatgcaatgaaatgaatcccccccttccatcacattgcaacagatgttgggcccttcgtgagaattggcttcctgaagataaagggaaagataaaggggaaatctctgagaaagccaaactggaaaactcaacacaagctgaagagggctttgatgttcctgattgtaaaaaaactatagtgaatgattccagagagtcatgtgttgaggaaaatgatgataaaattacacaagcttcacaatcacaagaaagtgaagactattctcagccatcaacttctagtagcattatttatagcagccaagaagatgtgaaagagtttgaaagggaagaaacccaagacaaagaagagagtgtggaatctagtttgccccttaatgccattgaaccttgtgtgatttgtcaaggtcgacctaaaaatggttgcattgtccatggcaaaacaggacatcttatggcctgctttacatgtgcaaagaagctaaagaaaaggaataagccctgcccagtatgtagacaaccaattcaaatgattgtgctaacttatttcccctagttgacctgtctataagagaattatatatttctaactatataaccctaggaatttagacaacctgaaatttattcacatatatcaaagtgagaaaatgcctcaattcacatagatttcttctctttagtataattgacctactttggtagtggaatagtgaatacttactataatttgacttgaatatgtagctcatcctttacaccaactcctaattttaaataatttctactctgtcttaaatgagaagtacttggtttttttttttcttaaatatgtatatgacatttaaatgtaacttattattttttttgagaccgagtcttgctctgttacccaggctggagtgcagtggcgtgatcttggctcactgcaagctctgcctcccgggttcgcaccattctcctgcctcagcctcccaattagcttggcctacagtcatctgccaccacacctggctaattttttgtacttttagtagagacagggtttcaccgtgttagccaggatggtctcgatctcctgacctcgtgatccgcccacctcggcctcccaaagtgctgggattacaggcatgagccaccgcgtccggcctaaatgtcacttagtacctttgatataaagagaaaatgtgtgaaagatttagttttttgtttttttgtttgtttgtttgtttgtttgttttgagatgagtctctctgtcgcccaggctggagtgcagtgtcatgatctagcagtctccgcttcccgggttcaagccat

SEQ ID NO: 70373 - DNA, 1133 bp, Homo sapiens
ctgacctcctcagagaaggtttggaaacctgggttatgggggtggggagaatgagctaccctcctcaaattcacaaatatttccttaaacacagataatacaaatttttcataatgccatcagaaatataattagtatacttgtcaaagtgctacaagaatgttgtacaagtgtaatatgtcaaacatttaaacccaaactcttctccccacattgggaacccagattcagactttaggtcaatgcttagcttaacatttaatgtcttatcatgggcctcttatttagtatgccctaaaaagcacatcaaaaagagaacaaatgtttatgaaggcaggtggagctcttttcttttaatggatcataaagcaatgagcttccctgggtttcattggcgttagctaatgtgacagggtgtagattaataatttaaaatagaaatatacttggaactagttcactgttggatcagagtcatcaatgaaataaggaaaggtgattttctcctttaccctcccaggaaggcaggcagactggcttttatgttctggagttctggactctctcacctcttgccccactccagatcactgggtggctgaggctatagccccttgaagactggaggtttatcttctagagagggcaaaatagagtctctggagtgagagataccagacataggtgaaggaatggtaccctctgtggaaagcataggtgtagcggctgcttgcattttaatgcccatgatgcaggtactccagacctgtctcccactcagctcccagaatctgacagtttcccagaccttaccctccaggcaagaggctggaagactcttctctgggaaatttccaaccagcccaaagggaaatacttttaaatactgacatggaggttaagggtggggatgaggggagtcaaaaaatagtctacccaaagcaccttggacctagagtaaaggtcaaaattaataagcctcagctttgaacttccaatcagtctttactcccccatcctcaatctggagctttagtaaggaaaataggcaaaattactatactccatcagcttatattctaatggccgtgggaatgggttgggggcagaaaataacgaaataaaatatatag

SEQ ID NO: 70374 - DNA, 2981 bp, Homo sapiens
ttttttaatgagtgaaaaagaaattaagaatggaggggaaagtttcaaactggagagacatctttgagtaaagtatcgtggctgaatgttcctacctttattgaccatgtgacctggttaaatcacttaggttctattaggcctcagtcttctcttctgtaaaatgagatgtttagacctaaggacacctttccagttcccttcccgttgggacattctaggattctgagagagaagcccccctggcctcaagatacctccactctcttgggtgtgctctaagatgactgcattcatgttagaagcatctgaactacgccagagacaacctactgtagatctaaggaagaaaaaatgaatggcaatgaatgcgagaggaaggtgggggggaaagaagcccacgaagattagagatggaaatggcaacataaacagcatgcaaagataaccactgacgggtatctagcgtttacgatgcaaataaaactctgctggtctctgaggatgcagaaacaagacattgtttttggtcttaagccgttcacagaatgcccgggggttacactttgcatttaagcacggacatataacttccacctttaaaagtcctggatgtgagaaagataagaacaacggataaatgaaaatattaacaaaacgtctgagtatgccagaggccacgtgaaaagacggtgtgtggaaacaggtgggacccactgctaagctggatgcgcgagtaggacaaaaaaattggcccccactcccgggcctcacccagacacaaaagaaacgtcctctgccctcagaggcgcagcctttcctcagccagcagagcggctgggctgcagagtccccgcccccggccggcccctgtcgcccgcgcctccctccctcgggcctcggaagtgacgcaagcgcccccccaccgccgctagatccgctgctgctgccgcggcgggcagacctgcaggaggcggcggcggcggcggcggccgaggctgaaggaagatggcggacggcgtggaccacatagacatttacgcggatgtcggcgaagagttcaaccaggtacgtgagagcccaggtccccgccgccgacgcgggcggcgctgcggccgggaagctgacccggggcccgctgcggccgcgagccgaagcgactgcagagtgtgcgcccttgccgcctctgggccgcgccgccgacccctggcgtggcgcccccccgcccctcgttctaccgcgtcgtttcacgggccgcgggcgcggcgagtcgccgcggggcccggagcgcggacgcgggccgctgtgcagctgccgccggctcctccctcgccggcgctgcctcgctccctattgttggcggcacccggctggcgcttcccgccgcgctaggcccgggcggtggggccgcgtgtaagcggcggagagaactggccgccgccgcgccccctcccccgtcgctggtcggaggaggaagccctggcggggcgcgtgcccgccgccgccgccccttccccgccgctgccgctcgggctccgattcctcccatcgctccattttgtctccctgcccgcgcactgtcgcctcatggaaggccgcgttcacggccctttgtatcccgcgcgcccagtccccggggctctccttctcgggtttgcgacaggtttcggcgtggcgccttcctcctcccctcacactttctgaaggcgactgaggtgcgggctcatttgcaacaagtcctttgacttttggagccacagataaaagtcggtgcgctggtcctgcctcattaatccagggcttgcagtgctttgaagcccagtcgttgttggcctttgtgatgaaaatacctgtgaagatgagtggccggggaccaaaaggaagaattggaagcgcgatggttggatggaacaaaaagatgttagctcacccacagatctcatagtgattaaaatgaaagaacgttcaccccaaatccttatgatgtggtttaaaaataaagagttatagataagaccctattttcgaaaacaaagtgttaaatccccccacccccacccccgggccccgtgttaccttttgaaaggttgagcgaaagtgagaatgcaaggttttcctgaacgacgttgcttagaggtaacgcggggctgtgatgtctgttaatgggcatccttgcaaaagatgtcgtttgttgctagtgacgtttaaggtttgaacctgctgttcgtatctactgcattttatgtagtaacacatttaaaacaattaaattgtgcttaactgcaatgttcctaaaagccttatttttttgtatttcccaggtccctatgagaagtttaatgaaatattactggctaatgtggttttcccacctccattaaccatcatattcgtgactagttgctcaggctttttaaaaaacaaggaaactcaagagatctttactgttttatttttcaggaatgactttgtgcctctggtttaaatattagaaaacagaaaaataccagttggctttaaatgtttgctattcagttaaagactggatttgtttaaatgtaatacattgtaatcaaaggttaagtttttaaatctttgtgtttttaaaattgtgcttatgttttaaataataatacttgagttgtgtccattacaaatcagatacattcctcgagtgcaacacaggttctaacgcttataagacctctaggaaatttttttccttttatttatcaaatgaatataactgcgtttaaaagagggctgtaactgcaaggaacaacgattgagtgttcaagactgcctttattagctttacttacaagataatacattggttcacctttctatgcacaataaaagaagaattgggtctcaattttagaagttaagcttttttcagtacctcttaatgaaatatttttaggcttttgcatacttaatttgagagggacatctcccttatccggatagctgggtgg

SEQ ID NO: 70375 - DNA, 1067 bp, Homo sapiens
agaggcaaccacaaaataatttacaactgatttaatctttactagctggcgaccttatttctactagttgctatagtagactagaactcttgttttattgtcgttgagtaaaatactaaatagtagccagttttgacttactttggcttcaaagctgttgtaaacattaaaaaaaaaatctttgttttccagtgtaaactgcagttctcattggatttgtatactttgaaattcgggatagtctttatttccattttctactattttttgtctgtatcctgctgagtcttctattttaaatgtcatacttttatgaagcttttttgtattttggtaaggcacagtattatttcaaaaagtgatttgcatctattgaagtagaaaaaagtgaggcattcaacagtcttagcagaaactaatttggggatagattgagaataataaattagtgaagctctaatagagtgcctttcttcaccaggtgaacttaagaatggagaatgaaggggggaggaggcacaagggactggctactccttatgggttctctttagttcttagaggtctttggatgtcaccaagctgagaacagctggaaggggaatttgaacatcttccaaacctctctattacttgaagttgagaagaaagtgattctgtctcacagtagcatatcaattcagtttaaactgcatttatactcaagtgtagtaattactagcccaatatttagtaattgtagattttaaaattctggccaaaactaaataatttaaaagttgaattgtttagcgcgagtgtggtggctcatgcctgtaatcccagcactttgggaggccaaggtgggcagatcgcttgaggtcaggagttgcagaccagcctggccaacatggtgaaaccccatctctatcaaaatacaaaaattggccgagtatggtggtgcctgcctgtaatcccagctaatcagtaagctaagcaggagaatcgcttgaacctgggaggcagaggttgcagtgagccaagatcgggccactgcactccagcaagaccctgtctcaaaaaaaaaa

SEQ ID NO: 70376 - DNA, 1264 bp, Homo sapiens
taatgaaaataaatttcttggacaaatatcagagaaacattgtttatgatttatttatgtttactagaaaaccatctgaaataaagctgtcaggttgagaatgagctaggtagaattgattcagaaaaatggatagaaatgttcagggaagctagaactcttctctattttgttatttatgggtgcagttaatttagttgcctgtgaattgtccactatggtttatgtggcatatttttagtaccaaattccttaccattatataaggaagggatttttacagggattactagccagttttaataactactgagaacataattagataaaaccagaaaatgatatattttctttaaaaatgtatgcattaggttatctgctattggattttgcatactagtatttcttttccgaggtataggatatattttgtaaatgcaaaatgtaacttccccccttcatatatttctctaaatggaaataatttaaaataggctttgaaacaagtggcctttgctgtgcatttactgatagtatcatataatgcacgaattttgtatgtatttatgtatttttatggtagagatgggatcttcctaagttgcccaggctggtcttagactcctgggctcaagggatcctcttgccttggcctcccaaagtggtgggattaacaggcatgaaccaccatgcctagcctcgaatgatattactgtaattttagaaccatcaaaaaaatatcaggcctgtcagggagaatgatgaatattttgacagccaacaagttcatcccaatagtggtatacagtatgtatcgtatatctgtgatattaaaattgtaagaggggtaattagggaaaaaatgtctaaaagtaacttcttgaagggagggaggagacagggataatgaaaaggttgagaagccatactttaagggaactaataggattttggtcattttgccatccattttctctggcttggcaacagatatttgtatatcatgtggagcataatcttgttgtgtaaaatgttgagagaataccttgtctaaagaatgattgtagtgatttagaatggtagggaatgaaaaaaattagtgagttttttttttttttaaacaaaccctaagagctgttgtttattccaagctttatgtaacatagctggctagctactatgaacagcagataagattgggcaacatttggtatcaaagataattagaggaatgatgttgatattttcttgttttttgaatgcc

SEQ ID NO: 70377 - DNA, 1815 bp, Homo sapiens
ttcagtaggctcacagagctttatttatatatgacctgtgatatacattttgcataatttctcatgcaaacatcatgcatattttctcactttatgaagtaagaacaaagttcagtatgttctgtatttttttttacgctggaggattgatgtgatatgaagctgattaaaaggaaggttactgataactacaaaagagtgtgctttgagtttcatttttagtaatggcagcaaatgtattcagattcattatgttttttcacaaagtttaaatgtataccattggggctaagtgtacaggctgtggccttggaacagagagaagctaactagtccacatggagatcaaaccccaggaccatggtcttaattaggatcgtactacaaccacttggaagcagtacaactaccagacaaaatggctgatcctaaatattggtagaatcatatcaatgtggaaaattggtttgtgtcaacataggaattcatggatggacaaaaatagtaagtgattgtgatataccaggttagtgtagctgcaattatgcttgtaaattttttgtctacttatgtaaacattttcacaggtttgtagctaatagaagaaaacaaagaatctgttcacctatttatgtaagtgaaagtgtaaatttaaaaatacatttagtcctgctgttaataacccttccattcttttttactttccctcagaccatatattgtgattatagtttctgctgaggaggatggaaactcaactccctttgaataatattagtaattctacttgatgttcagaaccggattgcaagagagtttaaagtgcccaacaccccttgtgggaaactttttagtatcttaagtgcatggaactactgctgcagccacaccgcctgaagcttcagccacactgaaacttcataacaaaacttaccctcttttttcctaatttctgtggtcattgcaatttgagcatgttactttgtttaacaaaaactcatttcttaaagattattttagtattgctgtacaaacagaataaaattatggcattattcagtgacttgtggtcttagtttctgccctttgttaaatttagctttgttctctgatttaaccttgagatcccagaccccttattaaataagtcttatagacattctacctcgtaacaagtaaaattggtatgtaaagattctgtaactagtaaattggataagtcattaattacataaacgattacctgatgattacttgaggtccctttatttaggaatataaatgatatttcccctactaggcttttttctttttcttttaaaaagatcttattctcggccgggtgtggtggctcacacctgtaatcccagcactttgggaggccgaggcgggcggatcacgaggtcaggagatcaagaccatcctggctaacccatcctgcctaacacggtgaaaccccatctctacaaaaaatacaagaaattagctgggcaaggtagcgggcgcctgtagtcccagctactcgggggggggggggggggctgaggcaggagaatggcgtgaacccaggaggcggagcttgcagtgagccgagattgcgccactgcactccagcctgggcgacagagcaagactccgtctcaaaaaaataaataaataaaaattaaaattaaaaaaatacaaaataaataaaagatcttattctggctctcctttaaatagcaaaacagtagcctgggcccataatatcttgttgctctgtttaccatcatataacaaatgcttttctctgggtcattctatccatttagggac

SEQ ID NO: 70378 - DNA, 2925 bp, Homo sapiens
aataaaatggttcacaccaatacaagtacttagttgtggaaagggagagtagaagataaaaatggagattttcctgtgctacaggcttagtcaagcttatggtctatttaatggttatcaaaggcaattaaatagtgttgagtgttctgcttttacctacatttcatttttcatgtacttagttacaaattgaaccctcttctatttttttcctgctcctgtttctgtttcattttagttttccttttccctgattatcatttaggcatgtaagtgacacccagtagcattgctttaattctgctggtgacagtgccaaagctttactatactctttttgttgtctgttgcttttctcttgctaatttgcttgactagataactaagaattcaggtaagcattagctctttgttcactgagaataatacaacttgcaagataattaatttggattgttctacatgtatttcgtttatttctctttaccttgttcatttattacgacattttgaattatttacatacccatatttcttctttcttttatggctcagctcactatgcttttttttaatactggtagcttcctcaaggttggaaaacaagatctgaatactatagaaaataataactatttttctgtggtcatattaaagatataatggctttggattttggggtgatttttctactgtcagtttaaaaaaaacttgtctatttgcatttgtgtgttattacttctagttaagagtatttccaaggaaagtttcatgttacttattttgtttccatgtctttttccaaaagaacttattttttatattataataaatatcagtggaaaagtaggtttcgttatatagaaattaactttaggctgggtgcagtggctcaagcctatatttgggaggccgaggcaggaggattgcttgaactcaggagttcgaaactagcgtgggcaatgtagcgagacctggtctctacaaaaaaaaaaaaaaaaagaaaaaaaagaaaagaaataaaggaaaccccctttttttgtttttttgtttttttttgagatgaagtcttgctctgtcgcccaggctggagtgcaatggcacgatcttggctcactacaacctccgcctcccaggttcaagcgattctcctgcctcagcctcctgagtaactgggattacaggcgtgtgccaccatgcctggctaatttttgtatgtttagtagagacagggcttcatcatgttggctaggctggtctcgaactcctgacctcaagtgatccacctgcctcggcctcccaagtgctgggattacaggtgtgagccaccactcccggcaagaaattcactttttagacctgttcaagaatacatctattgcataaagtggaaaaagatttgtactgaaatccttggcctttttccatcagatttttaaaacaaaaagttgaatttgtattcaagtctattttagtagtattttgacttttgtataatctagagcattatttctgtatctcaggaagctgaatatggtgggcatgatcagatagatttgtatgacgatgtcatatctccatctgcaaataatggagatgccccagaagaccgagattacatggatactctcccaccaactgttggtgatgatgtgggtaaaggagcagcaccaaatgttgtctatacatatactggaaagagaattgcattatatattggaaatctaacatgggtaagtgaagttaatataagaattaaattattggtaattgattttgaactgctctagtaattaatgtttttctccagatttttataagtttgaagttactgtgtttttctatatgtgtttgcttgtccaatgaggagggaaatacaaatatctttgcaacatcgttaattcgaattcttctagttttgagttttgtggtcattcaacttttcttggtggagatactagttaaatatagttaaattagttttgtcttcagttaccttttttatgctaccactttaccttgcttccgatagcccagtttcactaaaaataatgctcacatggggtctcaaaccaggattcaagtgtaaaaggaaagagacatagtatcactcctggtttaaaaatagtgtccattatttaatttgtgttacaaatttgagttttatttctgcccttaaatttgaaatctgatttatagaagcacttctgtgcgtattatattttaatttgggttgtcatgagactaagattattgatttagagcttcattaaatgcacatatgtatatttattttttattaatattacatcttaagtatcattaaaatagtcctatagaatgtttgtatttctacttagttatatgtatacttgaaagttaaaaacttgtatatgcaaaaatcaataaaacttggcacccttgcatttccttaataacactgtatttttaaacgttttatttacatttctttttttcagggggagacagaatttgcaaaactctgtcacccaggctggagtgcagtggtgtaatcatagctcactgaagcctcaaactcctgggctgaagtgattctcctgtgtcagcctccaagtagctaggaccacaggcatgtgtcactctgcctggctaattaaaaacaaaacaaacacttttgtagagctgacttcttgctatattgcttcaggctggcctcaaattcctggcctcaagtgatcctcctaaccaagctctcaaagtgctaggattatggtgcccagcctatttacatttcttttaaaactaaatgtaacagatctcccaccacccagtctgagtattctataaaattggagacagtagcagtgtagttatgaaagtatggttgctaagtaagtatttggatcttagctccaccatctattattagttttgtgaccttgt

SEQ ID NO: 70379 - DNA, 1490 bp, Homo sapiens
aatgaagttaggttcccagatggtttttgtgctgtttaaaaattggagtctgactggccataactagacttagatttgcactcagcatttattttctcttttatgtctcaaatttccccttaaaaactagactgggataataaaaatcttggttttattttaatggttaatgagggggaaaatatcttgcagtggacaacagatgaagacttaactgaagcagttcattctttgggagtaaatgatattttggagataaaattttttgaaaatcgggcaaatggccagtcaaaggggtaagttttttttttctttctttttgatttagtagctagtgatacagtttttacaagttaactttcctttaagttaatgttaattacacatgtatacacatgtatacaaacaacacatgattgtttacattggaaggaggttcttgggcaaagattgatacttttcattttacgtaccctattacctaacacactaaaaccagtagagtggaaatgtggacagatttattttctatttttcccaagttttctctatctgtggttgaaatggttgttgaaatgacagtttaagaaccattactctccctgtgattaagagatgggagaagatgggcaactgaataatgtgttacatggatattttgctttatttcactactaaactatacaagtgggatagcctcagcatgagaacattataaatacagatatctaaaagtaagaaaataaaataccactgtcctaccattcattgatgtttacttttaacattttagtgaagattcttttgggctttttcctaaaaataaataaataaataaataatggaattataattcatgtgttttatatgtttgatataaggaataaaaataaatacacatcctctctaatgtctaattcttttgcatcatacctggtatgctactgtaatttacctttcttatttttggttatcgtggtggtttccacttttgcctattgtaaataatgttgcagcagacatcattttatataagtcttttggtacagattttggattttcttttaaggataaattgttagatgcacaatgataaagaattttcttatttcttatattgcttacttatcttagaagattataccaatttatactaaactgagaatattttcaaaatatatgcagagtctgaatacttctcactaactttacttataccacttggtcaaagccactatcatctctcacttaaactttggcagtagcttcctaactggaagtatagactgccccctacagtctgtactccacataacagaagttctaaaaaaaaaatgacattctgctcaatcttctcatggtttcctgtctgtctcattctttaccattgtctacaaggtactttctggtctgttttcccaccacctttctaaccctatcctaccactctttttcagccacattagtctctttgctgttggccagaccaa

SEQ ID NO: 70380 - DNA, 3188 bp, Homo sapiens
tcagcctcccagcgtgggactacaggcacacgccaccatgcctggctaatttttgaatttttagtagagacggggtttcaccatgttggtcaggctggtcttgaactcctgacctcatgatcctcctgccttggcctcccaaagtgctgagattataggcgtgagccactgcacccggcctctccacatctttaatacttgtctttttgattatagccaccctagtgggtatggggtggtatcttgtggttttgatttgcacttccccaatagttaatgatattgtacatctttttattgtagcaaaaagtggaagcaacccaaatgtccatgaactgatggatacatttcttttaatgttgtatatttataatggaaaattattcacccataaaagtaagtggtgatgcatgctgtaacagtggatgaagcttgaaaacatgctagttaaagaaggctggtcacaagggacctcctattgtatgattccatttagatgaaatgtctaggataggccagtccagagacagaaattaggtttagtggttccatagggtacagggatgggaaggaatgggagcgatggctaatggatatggagtttctttttggggtgatgaaaatgttttaaaattgattatggtggtggttataacactgtgaaatactaaaaaccactgaattatatattttgaatgactgaattctatggtatgttatacaagatgaacaaaaatgtgtactcgtatagttaagaaatatttttagtttttaaaattatttatttttagagacaggatctcactgtgttgcccaggctggagtgcagtagtgtgattataggttactgtagcctcaaactcctgggctcaagcaatcctcgtgcctcaaccttctaagcagctgggattacaggcatgagccactgtgcccagctgttgttttagataaaagcagattaagacctttttacagaagaataacagtaataatattgatctctttttactttgtatcctcaccccttaaacactttttaggtttgcccttgttggtgttggatctgaagcatcttcaaaaaagttaatggatctgttacctaaaagagaacttcatggtcagaatcctgttgtaactccatgcaataaacagttcctgagtcaatttgaaatgcagtccaggaaaagtaagcagtcctcagaggcttttattaaaatatgtacattttaaccagtgcatttgttaggtgttatactagagaagtcatcttaatactagctcactaggaactccatttcacaaagtccatgctttgaattagatttaatcactggttatgactgtgggcctgtgtacgagaaacctactcctgttccatttttctccagatgtaacagacccaatactatacaacaatgtgcaagttctatagccctgccattcttgtcctattatttccatcttagatacagaaagaaactacattctaattcttagattaaaggagagctatgtggatgtgtattatggtgggggagagatcactgataaccagaaaatgttcattgatttttctgcttggcaacaagacctttcaccacttggtaaactgaatatagaaaagatttgtcattatacatttaagtacattatctttaaagagatgagatggatgattatgtaattaacagaaattcaagtggttccttttcttttaatgttttagcacttaagacttaactgaagaagtgtgttacaaaatttaaatgatgtaatactgaaattaagatatctgttgaagaatttcggtcttggctgctgcagagtgctggtattttgaaagtaactcacgattacctatggaaaatatatttaaacctggatattttgagtctttaaaagtacccaaatagatgtgaatgttttcctaaaccatactttcttatgtagtttgcataggcacaaggcatttgcaagttaatatattagaaatagagttgtttttaataatagtggttacatttcagaaaactatttttaataagtgctatttatgagtatttggatatttgcagctacacaatcaggacaaatgtctggggaaggtaaagctggtcctccaggaggcagttcccgtgcagcatttccacaaggtggtagaggacggggccgttttccaggggctgttcctggtggggacagatttcctgggccagcaggaccaggagggccacccccaccttttccaggtaaaacttttcttaaattaccatggataaaacatgtctacctaatacctcttttccttttctctctttttcaagtaatgcattattaatgtgacttactctccttgttatgctatttttggaatccaggaaatttgatcaagcatcttgttaaaggaactcggcctttgttcctggaaactaggattccatggcatatggggcacagcatagaggaaatacccatttttggcctaaaaggtctttatttttctccaaacttgcttgacttatatatagaatatttacatccgtcttactttcttacctcttaaaaaaatcctttcaagatcatttttccttgtttcactttctagcttggcatcagagtagaatataaggtgggtgatttcactgtaagaagtgtgtgtacacggaaagatggaaaatatctctaggcattgtaatatttttttattaaagttttcgtttcaataatttttcttaagcataaattgagctagttaaatttgtaaggatatacttcattgtagttggtagtgtaacatttaccatacgggtttaatttaaagacaaagacttggtgtatgctctatgcgtttaaagtataatcttggcatataaaagttaaaatatcttattagtgaagtgtttttttttctctctttctcctttgttttttagctggacagactccaccacgtccacccttaggtcctccaggcccacctggtccaccaggtcctccacctcctggtcaggttctgcctcctcctctagctgggcctcctaatcgaggagatcgccctccaccaccagttctttttcctggacaaccttttgggcagcctccattgggtccacttcctcctggccctccacctccagttccaggctacggcccccctcctggcccaccacctccacaacagggaccac

SEQ ID NO: 70381 - DNA, 2144 bp, Homo sapiens
ggtccaccaccaacagatccatatgggcgacctccaccatatgataggggtgactatggcccccctggaaggtaagttagtgtgtatctgtgaaagtacttgatgataaaagataggaacaatgactgtaaatattagattgtaggtatataaatatgttatttctgccttccaagaagatgaggtgtttaagctgctaccctgttttagctgaaagatactggtataggagaatttttagatttgttctctttgttggaaaagtagcatgcttcaatatggaaaagtaactactatctctaaagcacatgtcagaagcagctagtatgaattgctatacactgttgtgactaactgaggaaatctgttgagtatgagttaaggtttatgtttttgttttacagggaaatggatactgcaagaacgccattgagtgaagctgaatttgaagaaatcatgaatagaaatagggcaatctcaagcagtgctatttcgagagctgtgtctgatgccagtgctggtttgtgtatttcttgtattaatatttcttatttatgttattaggaatgacctaaaaatgtaagtacaatctagaagataggtcatttacatgtagtagttctttttatattcccaaatcattacctacgatttatttaaaaagcattgaaaaaagttgtgtgtcacagtgtagtggggaaaatccaaattttaagttatttggtatagatttaagtcttacccttgacatttaatggttcaggggcctcatgacaccttatttattcttatatttgcaaaatgataatgtgcttcacacacgtataataagttgagtcaatatcatgagcatgaaaggcttttgcaaatggtgaaacactgaaagaagacattgtcttgcatagttattttatagcacagtacttttgtaaaatgccttatcactcttatcccaagtggtttgatggtgttttgaaaacaaaatttgtttgacttcaaaccctttcctttccctcacaggtgattatgggagtgctattgagacactggtaactgcaatttctttaattaaacaatccaaagtatctgctgatgatcgttgcaaagttcttattagttctttgcaagattgccttcatggaattgagtccaagtcttatggttctggatcaaggtaaaactttcctgtctcatttccatttaaaaaaactgttagtttacaaatggaaaaaatactgtgagactttaaaaggaggactttgcttttacttactgattatttagcagctggagtggtttttttttttaactctaaatgttagttgcttgcttaaaaccctttaaaggctcctactcagtcttaaagcaagactgtaaagattgagggactgtgtgataaagcccctgcctatctttttagcctcattttgtacctctccccttactcactgttctccagtgagtatttctccatatttctccttttctttaggtacaccaaatgtttgaccacctcactttatattccttctgctgggagcagttttccctgtctcttcacatagctggctccttattcttcacgtctcattctaacttcttagggtggggcttctcccaagttagtctgtcgtattgttctttttatttcttccatagtacttaccataatcaattcttacttgttataaggcatatttttcctcattagaacacatgttgaatgatggcaggggatttatctatcctgcttactatatttcttttcttttaagagatgggtcttgttaagttacccaggctggtcctgaactcctgggctcaagtaatcctctcagcttggcctcccaaagtgttgggatgataggcatgagccagtgtgctcagccatgctcgttataatatttctaatgcctacagagtgtgtggtacagaatgagtgctaaataaaaatttctcgaatgagggagtgactgaatgaatgaatgatctatcttttaggtagttcctttttttttctttttagcattgctgctaactttgaaattttatatatttttgaaaggcagacctaatcttcacttggtattcttagatatgtctttagtgtactctatctggtagtaatctgtaagagaaaagag

SEQ ID NO: 70382 - DNA, 6298 bp, Homo sapiens
ttagccctctcccatgcctcttctcctcccctgaatataacatgcgtattagaaggtttctttgtgttggatgctgctcatgaaccatatgttaagaggttgtcatattcatgtatttaagccccattgtgtgttgtgatttcatgacttttatatctaaaaaaaccatattgtagatgttctttagcttgaaacacgagtgctttgaaattttccctttacctttctatttgtgcattcagtaaatactacacatctgttttaggctactagtttaatagatgatgtgatgcatttctgtgatgtgtctggttgctgatttttttgttaatgtttttaatagtgaaatttctggttcatgcttacctggtgagttggtaagtcgttattggcagctcaggatagtaagtttaaaccagatttacaaagaatttttgctgcctaagtttttttagacatcaaaaaattgaatatttttaggctatctaattatggagagcattaatccagtaatttcttttagaagacgtgaacgatcaagagagagggaccatagtagatcacgagaaaagagtcgacgtcataaatcccgtagtagagaccgtcatgacgattattacagagagagaagcagagaacgagagaggcaccgggatcgtgaccgagaccgtgaccgagagcgtgaccgagagcgcgaatatcgtcatcgttagaaggtgggtattccttgttccctgttaaatgtgtgtgtattcttaacagtaactataactccaaggctactgtttatacagtatatacctacattttaaatggtccaactacttgtgaatttaatcttctggaaacatctgaaacaaattataggtaagtaatgacaggtaaaaattttgaccctttatcttatgaatattttattgctgagttatcactttcaggtttcaaatagttaatggtcttaacaaagcaaggaaataatcaagaggactcattgtgtacttctaaaatctaaaaattggggttcttgtatcacatacataggttgcatgcaatttaaaatacaaaacacagggagttatttcacatatatgttatgtgtttggatttttaaaaataaatggaaagttactatttttgaactagttttatttgtccctaaaaatttatgagaaaatctaacacaataatagtttataatacaggagggtgttttctcaacattcaaagagaattttcctttaaaaaaaaaatttttttttttagaagagacactatcctgacatctgctttttgtttttaaaagaaacagtatcctttaatttgcaaagaagatgtaaaagttaatcaattaaaatgggtttagggtgcactgatttatatctaaaaattttaaattgtgtcaagccatatacccaagtttagaataccttgaaataattttctttgatgtttcattcataaatcataatcattgtctttttttctgtattttaaaactttcttgtgtacatttttcatgaagtgggaagagttgtctgtttatgcttcattttcacatgtaattttattttttatatttgttaatagcatttattcatgtgaagagctgggggagggcactataaggcttatgcatgtgacacaaaggttattctgtaaattaaaatattttttctttatatgttggttggcatattcaaattaaattaaggctaaacaaacccctcataggtaaatactctttatgtgattattttcagtaatcatgggaaacttactgaaaattcagtcatggtaattgttagtatttaaattgttatgggcaaaattaaaggttttatcaagtgtatgtaattctgtgacagaataccaatttctttaaccataacagatacgcaaatgaagtccttaaatgcctagaaaataagcatgctatttttatggaacacagatataagctcctacactatttacaattttaagggctttttgagttaaaaggctggttttgatactttgcattttgaatatgcagattgaatatcaaaactttaatttgtagttttccatgtattacaaaatttaatataaatctcaaaacattcttttaatatgaggcaaaaaaaccttttacttttaaaactaagcttattgaaattgatattgtttttgaatgtaaaaattgaatgttgtattatgtaaatctaaacactaaattttaaagatgtagcacttttttcccctgagttaaatacatctgatcccatcttaatgaaaaaattctcaatatccatcagttgcttaaactggattgtgactgggttattagttgaaatgcttacctatgtcagtcatttccattatagaagggtacaggttctgtaagttacctatttttttggactttataagttatcagcaagcttcttgttagtaaaggcatgataatgaaacttgaattcatctacaaaattggatgtgcccatcaaggggcctctaaaccaatttaagcccaaagttaactaattacaatttctactggttttagtaaaactagcatagtcaaccaagtaaacaaagtccattgttaatcttatttgagttagctaacattacattctagtaatgggtacacctaaatatatcatgacttgagtttcattacattcagacataaactacaaattcctaatgtgcaaactattgttgacatttttcttaatcactgatgtaccataccagaatttccatgttttgtttgtacattaatcagaattgagttgtaatactgtatgtgccttcatccaagaaaaattttacataagcatttctagtgcaaaaaattctgttatcctggattattgtacgtttgctatatcaaacagtattgtggatgtagacttgaataaaggggtggggactgggattaaatatattcaagtaaatctttaaaacaaaagctatctgcaaatttgatcaccatcataataaggtctgttgacctttttagaagttttaaaatatgagtccttttgagctttcatgtaaatcttaaatggaccaaatggactgagtgatttgaaagctaaagtgaatgtcactagtaaggctgtatacaaataaaatactaatgtaatctattaaagtgatgatgaatggctaaaagggcaagttcttaactttttaactggaaacgtaatgatcttggcaagctgttaatgtctgtcccatcttaatttttttttgtgtttgaactgttggtaatgttaattgcattctctcattttaaaatgtattggtttttctaaaagtattcaatatctaagttcaaatagataatattttaatgagaaaataccaatattgtaaatttcagtatgtaaatacgttgtgcttcatattctgtaatttctacctctattctcagaccactctgagcaaaataaaagtagttcagtgctttacgattgtacattttttactgaaataattttagtttcatagttgagttacttaaaaggttacgttcctcttgtcacttctttggaacatccctactcagcaaatttgtgttaacaattcagcttttctttgtttactgaaaccaaattatgtttttttaaaatactctttattcaggcttttcctctctctattttatgaggttttacaattctcaaatcatccatgacaatttttaagcattgggtatggggtctggattaaataacttgcctttgctatctgattactttttttttttttttttttttgagatggagtcttgctcttgttgcccagtctagagtgcagtggcacaatctcagctcaccacaaccttcacctcctgggttcaagcaattctcctgccttagcctccggagtagctaggattacaggcatgtggcaccacgcccggctaattttgtagttttagtagagatggggtttctccatgttggtcaggctggtctcaaactcccgacgtcaggtgatccacccatctctgcctcccaaagtgctgggattgattacaggcgtgagccaccgcgcccagtctagtctgattacttttttcctaccttaaatatcatgatcttaggatcttagattttgttattgcccaagatttaggatgctttgcattgtgtattcagcttattagctttgtgttaattttgaaaaaaaaaaaaaaagccaaaagaataaaaaaaattcttacatgttaaagatgtttcattttcttcttagtgttgctttgaggcttatgtgaaaattaaattctcttaattacctggtgaatgatactggttataataagattttaaaattgtttctgcagctcttaggttatctgaggtctgcgttatagctcccagccctgtttccttgttttcccatgtatcctaactgctctgcttcatctggatatgtatgctagctttcattgctttagctctgatttttctttgagtattcacaaaacctgtctcactacacagctgacttaattgaagttacaagagggagtaggaagtgatcccttgaatggatgtatagtgtgttttgctcactgtggtttaagaatatagttttgtttacaaatgattaatgttccctgttgaaaaaaaattcaatgccagtgtgagtcatcttgctctctcaccgtcatctcagtgttaaatttactaccattgttttagtttgtaaaatagattgttttgagtaaattctgtcttgaatgaatatttagttaacgttgtttaaagaaacctaataaccaaaaaggggtaagggtgccatttatgctatccaaattttatgaatttgtggtagcatgttttgactctccatgaattataaataacaggttattttgagatgttcattttgtaaatcttttgggaacaaacctcatttttctttgaatgtgattaagtttatttctattttactgggttgtaagagcaattatgtatgtgttttatagagtaataaaatgctttacttaaaatgaggtaagtactatgtacagaggtagaagaaaatatgaaatgttttggtagcaagaacttcttgtaaatatctacaataactagaattgtttttatgtaatatgttctagtcaacacaagaaggaattttgattttagagttaactcatatgtagataattatttctcttgcccacctcatttccattcctcttattaaggagaaattttcagatagagaaaagtgaattttatttcgttgagttagtagtgcatctctaaaattatgagaatccttttaattcagtatattaatgtgaaaatctataaaagtgccctgtcaagtatttatttaaatcttaaaagatgaatttaccatgaatttaaaatactaattctaacaaatgtgcatagataaatttctaacagaaacagttataatttgagttgttaataatggcttgatatagtatcttaaaatacaagtacttctctgtgtgttgaaattttacttagtgctcactttagtttacagactttattaaaaaggtgtagattccatttatcatcttagttgttttaacatctgtttacataggcctttcttttataattaatagctaaagcaagtaattgtgtggctttgacattacagattttaccaaatgatacattgaaaacatggacgttgaatgtatttgtcacttttaagcttctttttgatatctttgttgatgtagttgcctacttagacatttgagagtataatatggaattggattattggaaatgggttgtattgccttcaaattcactttcgtttaagactgtaaaatttgtatttccaagtgcataaaatgtaaagtgtttagaaatagaaataaaaactgctagactatcccccatattttatgtctgtatggtgaaaattagatttattaatagaaaagatctatctataaagtataatcaaacaaaagagtgcattagtcctgggaaaagatgtgtgttgcaattttacaaatgggattctctatataaaaatagtataattctccactggagtgataatgacacaaagatgcagtgtatgtgatatgttttatggaagagttgaatatttttgttttgctatgactttaaatagtttttccctcttaatgactttttatcccttccagcgcaacagaaaatttagggagatagcattcttttgcagttagatttattaatttcccagtaattattatttcaggttagaacatatgccttgtctctctctaatacataaacctgttttttaa

SEQ ID NO: 70383 - DNA, 5986 bp, Homo sapiens
ctgctaggcagtgtgaatgcatatatgtactgatgctcttaagatacaacctaggaaaggacataatagaaaaatttatagcagtggcagaagtaactcttaattgtagagcaaaaagtatttttcagttatttttatttcaaaatatcactaaactgtgccctatgaacatgttcaaactgaaaaaaaattttaaaaaaccttctgccctcttgactcttaaatcactttattattgaagtggtttcttgtcatttatactttcattaccgactgtttcagtggttacttatatccaagttaattgaatgtttcttgtgaacctctacctgaagtttgcatatatatgtattctttaaattttagtttatcaactttattctattttttttcttttatgtgagttttaaatgaactttatcattgtagattcccacttagcttgttttggttagtttataatactacgttaggtatttctatataggtggaatagactaaaagtaaagtaaatgttttaaatttgtattacgtctaaagatttgtacgtggatgtcattaatttaaatgtccatactctatttataaatcttacttacaaattttgtaacatggaacaccatttgatttataatacttgcagaagttcctgtatgctgttaaataaattaatttgtaaaataattttgcattttatatttagttcagcatttaattgttaaatgagtttatagacttgatatgtgggtgaatgaaaaatatttacataaaaatcatccaagcattttccatttatttttgtagtatgcatattttagaaaatgacttatgaatgtttccatcatcacagaaacagtagctgctatgttttcattactgcttcagtcattaaatttataaggcaataatatttaagaagaatgaaatcagaatgtctcagtttaatcatcaggtaaattggaacatttcaccaccacaaaggcagctactgtttcagttaattcttattttgtgttagaatacataacagtgaagtagatgcacgacttgtgtatgtatagttaagccagcgtttttctgtgtattttggggaatagcaaaatctacatcacaaattttgacacattacagctgaaggaagaggatcaccttccaagacaaaacagtcttcatgggggaaaaatgacgcttgtccagcagtttgcttcttgtgattgaactgaacctgtaaggattcatggataaaatgaacaggaatagatctgaataaagcaaatctgcataaatggtaaccagtagctctacttttattttttatgttgcttaactgttttatttgaaggaaacctgtgtgatttaaaaagttatagcttttgcaactttattactggttatatacatttggccattatgatgtgcaagcaattggaaaaaaagtcaagtaaatgcttgtttttgtagtagtttgttcttgttaaaaatgtttatatgataatgtctgtaaacagcatcactttgattacaatagatgtagtgttgtaataaactgtttaatggggctgatgtgtaaagctgttcaagttatttgatgtttacacctcagggaaagtcttgtgttcagcaatatctaaagataatgttactatgacaacatttttactgtcctttaaagcattgcaatagcgtttttggatatgcctcaatctaatcttgcgttcagtgaattaaacatagtaattaagtgtcttttgcccttgattttgatattagaataggtgattacatggatatttaatatttctatattctgcttttctagctgtttttacctagttagcttgtgactttgctgaatggtatgtaaacttgtaaaaatagagatttgacagacatagcaatctagtcaatgtgtaaggggtcaaaaaaacagaggttttaacacataagtaaaaacccgtacatatttgatgtgtaatgcaggttaattacaacacagatgtaccgaaacacttaattgtgaaccgctaacattgaagaaattttgacaattccgatttgatgctgcaattacttgctgtttttattgatcttatggtttatttcttaagccatagtcagtgtaaatacagccctgcagcaggtaaatgtgagtaaagagagccttatattttccaattggtataaatttttgaaggatgtgatgttcattaacattcggttgtattccccagtatttgtaatgggaaattacagataaaccgtgtctgcacagtttaaggaatactatgtatattcatgcaccgtattgattcatgctatagttacttaatcaaagatttttttcaaacctgccttacatataggcccactttaaaagcacctgactagcatgtgttcttgattgcaaaattggcagaggcagggtgtcaacttgattaggtgtttttatgggaatgtaatttgaaatcactacttcagaaatttgacttaaaattcttgagcacgttaatatgtttttaagatctgattatctttgagagatcttctgttaatacacattggttgttaaagagtacccaaattctaggacaatgcttaaagtgttaaaataccctagatactgtgttatgtgcaactgtagaaaccctccagaaatttccactgctgttcttcactttcatcttgtctgctatcaaaccacttctgacaaaattagctgttttgaattacccatatcactgccagttttattttaaaatattttgtgtttgaagtatctgtgcatgggatcgttgatgtttatcagaactgttcactttcagaaatgattttttaaagcattttgttgaaaatgcggttgcttttttaacattattttagagttgtatcaaaattttcctgttttctgtatattgttgtgtcatttcttggctttttaatattttgactacaatgccctaatgcgaagaagtatggacatataaatattacaagagaaattagttaatagtaaagggttaaaaggtaagtaaaatgtccatgaaaataaaattttctttgaacagtttaaaaatggaatcacaaaaatctaactgcacttgaaatgaaactggaaattttatactaattaaatcctttatttaccttttcatattttatcaatggaaccttttaattgctccttctatatcactcttctccttgcttggctgatctcattacatgactttcgttacagacagtgtgagtgtactagatttgtttgctgctaatccgttattttaagtgttgtcagaaggaaataacttcttggtttgaccaagtaattttgcaaagtccttctctacctgataacacgtgaatgtatagcagtaaaggtgaaaattgcaggccttgttttgttcttcatacccccttcagttgtttatgggttaatgttatttgaaaactcttcctttttttaatgtgtaaaaacaatccaaagagataaatccttgcatagacaccaaaaacagtgtctcagagaccttttcattttttccttagttaataactgtagtggatgtgaaaacaaacgagttgaattttaaaacatagcatttattagtgctatacagtcacattcctttcagccagtagtaaagttaaacagatgagtgatacagtacctgaatggtactgcttctgaggcaacactttggattgaaagtgctgcttttggttaaaggaactatgttgtggaaagcatattccagtgtaaatttgcagatgtgtgttttttttttttgtcacttttcataaggtttggagtaagttgcagtggcttttgatcatagtttagcccatttaatggtccttttacctagaatgttcttaagcagttaatgacaatttggaatacacagataacttgtagcttaagatactattttcatttaattctcctgtggagaatattgctttattttttactagtttcaggtcagttattaaaataaacatggaggttttaatgaatgttgtataatattttatagtgaaggaaaattgtggaaagggcaaagactttctctttcccttatgtatttaactgtgccaatctaaatacatactgttttatacaatgagatgcattacaagacttttctgttggagtgctctcgacattttggttttcatacctgaatgatcattgcattttctgtattttctaaaatggctccaattttgtgttttaagcttcagcttaagaggaagtttatgttctaattcttgactgagaatacagtattgagattctctgttttacagataacaactggtttttattactcattaagttcatttgcatcccgtagccctctgtaaatgtttcccctagttgtatgtacgtaaatgcacgcttatccagtgtatattagacatttttgtgctaaaatatattaagtgggatttttgtagcaaagcattctatttttctgttcttacagtgtgtgtgtgtgtgtgtgtgtgtgtgtatgcgtttttttaaccttaacttcagtttaaacactggtgtatttatttttttaagcaacttgactcttagaagccttagactgattttttcaataaatattcaaccaaaaattataaatttattaagatgtggccttacatatggcattccttgtgttcgtaatgtgagatttttgatttagataaatcaagattcaggattaaagtttcattgtaagttgaaatagaaaatgtattaaaatgtctaggcttctgggaggaagttcttatactcttctttcttggcattagaaagaagcaatatgaatttttgtgaatattctaaatattcaggcaacactgttcagattgatttaggtttgtcttaaccaatgttctttttttagaatttcaggttgtggcattcactgagtatgcagctactatggtttttgtatgggacgtataaatacttgattatatacgacagattttaatgtctttaaagacttcctgctgtattaacatattgtaatggagtcttttaaatactaggttgaatttaattgaagtcacacacatcttgaagtggtaactgcatagtaaatactaccaagagtttttttcacgtgggagtatcctaaaactctgccatgggtgtaaatgttttacattaatttcataattggacagaccctgcatttagcgaaaacattttgttttgaaagtgtgttctttttgtcgcactgttactgcgtaacacttctcaacattctgtaagttaaattattttaaaataactatggtgaattcatgtttatttttttactttgaaaattgtagtactcaggtggtatttaatgggaaaggatcctttgggtataaatcataatgtattttaaggaatgcatctataacattgataactttagccttaaaaaaaaggtctattattccttcctctgcatcccatggtatattagcaaagtagtttacagccctgtacagccttacaaagttgttttacaatttttaatggaaagcccttaacaacaacaacaaaaaattgtatcattttaccaatatccacgaattactgatcacagtttgtaaataatttgtttaatatcagaaggccaaagaaagtcttaaaattttagctattgactctatggtgacttcacaataagatttctgtgcaaaaaggtaaggtgataattgatctaatagacttttttttttttttttttgctgtccatgagaattagacttcatattagcttcaattaaaaagctcattccattttattaaaatgtttgtaattgcaattttgtgtttaatgtttactttgtctttcctttctttagcatttaggtgactgttcggcagtttgatatatggccattgtcggccttaaactgcactagtaacaagcatggtatttatcttgtattgaaaataaaacaaacttttgataagactttgcag

SEQ ID NO: 70384 - DNA, 1063 bp, Homo sapiens
tctaatctatcaaaccagaattaacctaatatattctattatggtggagttagctaatcaaatcaaaccctttttatttccattcttatactgaaaatgtttctaagtttacttagtgcacacaatgagagtcatttaaaaggaagttatttagtatttagattgttaccttagagaatccttagataatacttttatttttatgtagggtctcactctgtcacccaggctggcgtgcagtggcatgatcatggttcatcatagcctcaacctcctgggctcaagcctcccgcatagcggggactacagatgtgcaccaccacacccagctgatttttgtattttttgtagaggcggattttgccatgttgcccaggctggtctcagatcctgggctcaagtgatccaccctcctcggcctcccaaaagtgctgggattgcaggcgtgagccactgcacctggcctgagaatacatttacttttttttttttttttttaaggaaatttatagtatcctaacattctgaatagaattctcatggtaggtgtaagaaagtggtcttaattttacttagctatgtaatgctgctttttgtttttgtttttagccctaggtgaaagcctattataggctatatatataaatatatatataatatatatattacatattatatatattatatatataatatattacatattatatataatatattacatattatatataatatattacatattatatataatatattacatattatatataatatattacatattatatataatatattacatattatatataatatattacatattatatataatatattacatattatatataaaatatattacatttatatatataatatattacatattatatataatatattacatattatatataatatattacatattatatataatatattacatattatatgatatattacatattatatatattatatatataatatatatatgtagcatttgaatgtctatgtatgtggtattcaggaaggagatacaaagacagtg

SEQ ID NO: 70385 - DNA, 1012 bp, Homo sapiens
agccaagatcatgccactgcactccagcctgggcaacaaagcgagactccatctcaggaaaaaaaaaaaaaaagcaaaataacttcccaggtgtagttcatgttttttagaaaattagattccataaaatttgaagggaagtatgttttttataaaactaagtatatacgctcagtgtattttttttcctagttttcatttgtagatcataaaactaactaattccttatattttaggatatgtcagcatatgtgaagaaaatccagtttaaattacatgaaagctatggcaatcctttaagaggtacaatatagtcttttgattcacaatatccaaagttaaaaatggctaggaaactaaaccgataatttactattttttttctgtctttagttgttactaaacctccatatgaaattactgaaacaggatggggtgaattcgaaataatcatcaaaatatttttcattgaccctaatgaaagacctgtgagtagcattaatctttgtaaatataaaatagatttcttagtaaatgtgaacatgtaataatacttaatgaatagtgttcattcagatgtgttttatgtaaatttatggcacagtgtatcttgccatgagttaagtttttcatttttaaatgtagcgcctttcaaaatccttttttttttcaagtatggaaaaaaacatataatatgaacatgtattggaaagaaaccatggaaatcagatgactactgcagcaaaaaaacttaaaactattattatcattcggttattagtaataaataagttgagcccatatgctgtgtaaaatagtttttatagtttttggtagttaaaccctaagaaacagtgtttttgcttttttaagctgtcatcagtactagcgcttcattttatatcttatttatgagtctttatttttatagccactggctttttcatcttttgatctcttcttatcagattgttgcttgataatgtaaaaaaaaaatccctccaggctttt

SEQ ID NO: 70386 - DNA, 1854 bp, Homo sapiens
gtgcatctcatatatttaaatccctaatactggatttctcagcttcagatagtatctttcagtgcctaatgattgattataggtgatcctttttcgtcctctttccaagtttctttttttcattttgccaaaggaattttttcagaaaggatgcctgagaaataaactttcagagatattgcccatctgaaatgtccttattttttcttcatagttcattgttggggagaaaaattctaggcactaaaggtagatatgctttcttgtctatgaatggagagagaagagaaagtcaagaggcctagctaccccatagcattcttgactttgatacttgccagttctgagcttggagcactgtagggctcctgggagctctggctcacacctcttaggcagttttcttaagttttcaggttgtggtttttctctggtgtcattgtttattatccttcttggtagactcatctgctttctgtctgttccagaaatttgttaaattatttgctttaaataatttgatatgtaattcatgctctcttattttgctgttattttagtagaattctgtgcatttccctcctcccctttctacattcttagtgcatcatcttgagcctggaagatgtcctttaagtaggatatttccacttgctgagccatgtccagggaaatctgacattctgttaattgagctagattgtctttagggggagttgatggtgcttgtttaaattcagttgcaaggaattttatattttctgactttttcagtgtacccttccttgctccctatttcatgacttttttgaagagtaccattctcttacaattatgctagctaactttttagaaaattatttggggtctggttttcagaacttcaacatgaagtctgatgttttccgaactagattttattttgctgaaataatcacacattgtgctacaaagcttttcctttgatgtcttactatacctgtttttaggtatttgaagacatgttgctcttgccaaagtgaattattactgaccaactttttatttatttattatgtcatttatgtaataatcttatagatccccaaagaaattatcttgccctcactgaactttttcattccccacagtaaatttgtaaactctaatcttcaaagcagtcacaattaatccacttgtgtaagtaaaagaattcatgttttagtgatttctcagtttaatttctatagctttatcttgtgttatttttagtttcctctctagagattcttgaacagattcttaattaccctctaaagagtattcatgttaggtagatatgaatggatctaataggaaaataaaggtacagaaaatttgggtgatttgctgcaataagttgcagttgaaacaagatcatgaatttgacatgtatatacttattccagtctctatttcagttaaaaaaatgccagtatcttatgatgataaaaaccattgcacagatttgacatctgtttctatttcacaggtaaccctgtatcatttgctaaagctgtttcaatcagacaccaatgcaatgctggggaaaaagacagtggtttcagagttctatgatgaaatggtaagaagattttataatgatagttttaaaagcatttgaagttggagaactttgaagttattgggtttttgttcattttatcccattagatatttcaagacccaacagcaatgatgcaacaattattgacaacatctcgtcagctaacattaggagcctataagcatgaaacagaatgtaagtgccatgcattcataattctgaaaaataacgtattctgtaatagtgaaagggttgtatgattcgtgcct

SEQ ID NO: 70387 - DNA, 1008 bp, Homo sapiens
gggtttgtgtgcccccttatttcaatcttaatatgtgtatggaaaaaaggacattatgtcttaaaattttaactgtgagttggtgaccagaattttatttttagttgtaggaaacatcttagatcctctcttgggaattcagacattcttcccctcccccaacctgcacccatgtttaatgttgtaattcttaagttatccacatttcatcatggaaacattgtcgtcaggaaatgccatatttattaccctgtcatatatcttaaacatgtgagaaaaatactttagtaaaagtatttgttttctttagttgcagagcttgaagtgaaaaccagagaaaaattagaagctgctaagaaaaaaacaagctttgagattgcagagcttaaggagagattaaaagcaagtcgtgaaactataaattgtttaaaaaatgaaatcagaaaacttgaagaagatgaccaagcaaaagacatataaacagttctcatgagaacttggtagtaagctaaactgaaaataaggtgggcttcactggagaaatggacttactgcaaatgctgtgatgtttcttagaggaacttcatatacagctgttgaccatgaatttcttagcaataggaatttgtactatttaagcaatctttaatggaaaatatgtgtgtaagaatggatgctatataggtattttaccaacccattttaagaaaattctatgatattaagcacagtttttaaaaatgtttattgtagtatatgtatagcttattacccttttgacaggcatcaaaatttcattataaagtattacttgtacaaattttgtacttctttagtggctagaattagtgaagaaacttaatgtgtatatttaatttcttcaagttcttacctgcccccatccttttttgtatatgatgtgtccagtaagtattcaataaatgtagtttacagatcctatttctccctcctgatgtgtttcttcctctttgaagactttctggaact

SEQ ID NO: 70388 - DNA, 1048 bp, Homo sapiens
tttcatttgagtgaaagagaataaaaatagtttaaaaattaaatgaaaaggaaaaacagatgtcttgattaacagaacattgcctcctatgatgaagtatcatgtgacagttcaaagaaattaaacatgacctgtaaatgatgtaagggaccagggccaggactccttcaggaactttactgaagggacttacgggtaaggtccttgctcttcagtgcattgtccggtgaactcggataaataacattatggtcctaatgtaaaaataggcagttaaaggtatgagtttcatctatctcctgccccagcctggactctctgatctggcttttaaattatttttagttatttttacttaagataaattttaaccaattgaccacctagatttcagtaaccttatgtaatacgcctcatgtcaatccccaactctaggtagccctcctggatctccaccctaatctgtttactctttctcactttcactggctatcctgagttaactgttctctaccctcaacacggcttcattgctctttagtaattccttagtctacccttagtaaattctttattgttgctgtctgaaaatttccagtctactgaatcaccagtctgcttattcactaaatgaatagagtcataaagctgggagctaatcatctaacttaattccctcatttgataagggagtagagccatgaagaaattaaatgactttcagagtcacacaatctgttgggacagagattcaattttaattcagcatttcctgactgaacagtcatggtacagctcccccaaagcttagaggagagtgtgcaaactggaaatcaactgggaaacaaactttccaagaaagaagaaatctgtaagctgaggtttactgttactgttatagtccaatccctattattaaaattttggctcattctggttaaatcatgttctcatgattaatgagttaaatctggttaactcatgttctcaaaattaatgagaacatgagttaatctggttaagtcatgttctcaaaattaatgagaat

SEQ ID NO: 70389 - DNA, 2963 bp, Homo sapiens
cctgggcggacggtgagtggctagggaaacggactgggacggccgcgggcccgcgtcggagctggcgttctcgtgcccccgctgcccgcttcgggatccgggctgagggctcggctgccggcgtccggggaaggggattgtcgaccgccgcggacttctccgggccagcgggacgggaagagctggctgtgggtccatggggtgggcggggcggagccagggagggggttcccagagctgttgttgctgttgggactcgagagtggggatgggctgggcctctgttcgtccgtccgacccccctcatgtgtgctgccccaaacctcgccgctccctagtttggtattctgtgtccggcctggggtagtagctggacaccagactcaatcttgggctccagttcccgacttttcgcctcctctgggtctgtcctggggtcagtaattaacccgggtcccaggggtgtcgtcttttccctccagggtggggcgctgcctgtacatgccagggatcttttgcagggcttttcatccagatttgcttcagggttgtccgggatcgatttggactgggctcggaaccggtcctggatacgtaggtcgctgtggcaccagcatgctctgtatcatctttactcacttgaaagcttgctgaagctgttgttgaagtaaacttaaagaaaaaacttgcttaaggaaaatcagtagtttagacaccccctcccccgcctttttttgcagacatactaaaaaaaaaaagatgcttttctctaatctacactcttaattcttttggctatctgatgtcacagttgtatgatgagttcattcagaggctgtacgaattgattttaaagagttggacagttatatcctttctcccaaagtttgtttaccttcatatttggaactgtcatttttcttaaggaaaaattgttcttggattttcttgagagattccttacactgttaaaattgttgctgcaatgcagagtttcacacaggtgggcagagatgttttgtttaaacttattccatgaagtgtttacttcggataaactgaggatttcctaggggagaaagtgatgtaggtaggtttagtgaacagattttaggtagtaaactttactgctgaaaggtttgtaggaaatatgggttttccacaataaatggtgatttaaaaactttttataagggaatgcagttactgcagattattgctattagcagatggccactgtttttgcagcgtaaagtattcacaaatcaccttcttgaaaccagtgacgctatctgcaactctcatcttgtgtgtagattagggtttattctgtagttttttgggtacttatgtcattctctttcctcccacccctgaaaggggaggtggtatcatgaatcaggaaaaatagactgaagtgacaagttcagtgagcttttcctatgcaaaggaaaatttatttcaaggttgttgattttgaacaggcaaagggtagatgatttttaaagtccttggaaaaaattgtggagagattagctgcacaacttttctttttcctcttcctttcttttcttttttctttcttttcgagacagcctcattctgctgcccaggctgcagcacagtggccccatcatagctcactgcagcctccaactcctggactcaagcagtccttctgtctcagactcctgagtggctaggactataggcaccaaccaccacacctggctaattttttttttttttttttttgtagagccgaggtttcactatgttgcccaggctggtcttgaactcctgggctcaagtgatcctcccatctcggccttccaaagtgctgggattacagttgtgagccaccatccccagcatatttgcacaacttttaaatttagatagaaactgtagcttcttccacatgtgaagtacttaattatttagagcataagattggaatattggaattgagagaatctggaaaaatagttaagttagatgtagttacagatttgcaggtatgacaatgtatttttaagggaaatacttcaagagttttaagagcagagaaaggtgattggggaaaatcagatactgattgtatttttatattatacaagtcaattcaacaaacactgagcatttgctatgcatgttatgctatgttatgcatagcatgctatttgctatgctatgttaggtaactatgtaaggagcaaataaaggtatagccataacagttgagtttcatgttttggtaataatttctgaaatcatgaagagttgagttgtattctttaggcatactaacaattttttttgtaattgggacttaacattggcgatgggtgttgagtgcttcatgaaaagcgctatactaggcattttaggatataaagattaaacttttggtttttaggaatttgaaatctagaaggggatataagatttgtgtaaacatttacaacataaacatttgtaaatacttatgggtggtttgaggtaaagtttggagtaaattatacaaaagaagaaagggttcatttttagcttaagtaatggaaatttgtggagatagctcagaagctactgtttattgagcatttactgaacagacttaatgctagttgctgtttacagcattttcttagcttcacagcaatatgtaagtaccttaataatgaggacagtgaggctcaaatatgttaagttacttgcctgggctatgtggctagcatgtaacagccccaatttgaatccaaatctgtctggtgccaaagcctgtgtgtttctactgcatcatgttgctccccaataaactggtaacctgagtttaatgttacagagaataagacttttctaagacaaagatttatggattgggagtaggtgggtgaagaaggcctttcaaataaagagaatgatgtgagcagaagtgtggaggtgggaaagttcattgtgta

SEQ ID NO: 70390 - DNA, 1023 bp, Homo sapiens
atagagtagtgtgcagaatgatttgatgtggaaagctgactttcaatgtagtataaatactgggcaagggcagtggtaatggaattagagtgaaggctctgcaggacctcaatgtcgtaggtgggtggcgaggaggaggggtttttggagcaggtttggaggagatggaaggtgaagattacacttttgtttttgagacagagtctagctttgttgccaggctggagtgcggtggcgtgatcttggctcactgcaacctccgcctcctgggttcaagtgattgtcctgcttcatcttcccgaatagctgggactacaggtgctcaccaccacgcccagctaacttttgtatttttagtagagacggggtttcaccatgttgaccaggatggtctcgatctcttgacctcgtgatccgcctgcctcagcctcccaaagtgctgggattacaggtgtgagccactgcgcccagctgaagattacactttttaagtgtcggagatgttgacggtggtactcttactagaaatacgggcaaggaggtacgtaatgagatcagttttggatttgttgacttttttgtatacttgccaaacgctggaaatgtccaaaggcttttggaaatgtggatttgtggttaaggggagaggtcaggactaggcatatattaaacatgggtttagtgaataatacaaataggtgtactggttgaatctgtgtaagaagatgaaagtgccaagggagaatgtagaggggaaagaaaaaaaaaacttctgttttaaatggcatctgtttaaaacagaaggaaatatgctaagtgatttattttatgcagtgggtaaagaatttgatagtatgtccactgcttcttcacactgtaggttcacacggagtagaaagaatctgatcattaaaaatccaattgggaaatacagttttcttgccctgggtagcaagaatactatgctatctttaccctgtttcagggaggacaaactacttcagactcatttcatccagagtg

SEQ ID NO: 70391 - DNA, 1050 bp, Homo sapiens
caggaaagatagagcaagaaaagcctttttattaatacagcaagtaaaccttgtacaaatatcagtattcaaaatgctttctagagaaagaatagtgcagcactgtgcgtaatgggttatgtaagtggagtcacagaagtcctcctggggacacaaaccaattatgaacataagtgcttattgaaattgcatcagttgtctagatgaggagcttattgactccctggttcacttgggtgggcaggcggctgtgggggagggacgggggggggtgtgggggtggggaacttaaggtgcaaacctagcctaggtgactgttaaattaaggcttaacatttgtttcttttgagtgtttttggttgcgtaattttaaaagttgggaatgctatagaaatatttaaattctattagaatgtccaaggcaaaatgttcaggttaagtagaaatagcttggaccctctgttaattttaaagaaaactgtgggtttgctgctttagatattaaaatgatatgggtttatagagttatgttgtgtatcattgttgctggtaaataaaaaatgtttaattcatttattttaacagtgcttaaatttttctcttaaagtactcccaatggcagaaatgtggatgaatagtaccctcagaagtctaggaatgcagcccaaagtgtgcctgctataaattgaagtttttgatgcctgtagggttttatattttaaaatttatataaatgttgcattttgctatcttacatgcatgtcgacagtattttaaaatactttttttttttttttttttttggtttgagacggagtctcgctgtgtcccccaggttggagtgcagtggcgcgatctcagctcactgcaagctccgcctctcctgggttcacgccattctcctgcctcagcctcaccagtagctgggactacaggcgcccgccaacacgcctggctaattttttgtatttttagtagaaacggggtttcaccgtgttagccaagatggtctcaatctcctgacctcgtgatctgcctgcctcggcctcc

SEQ ID NO: 70392 - DNA, 1002 bp, Homo sapiens
cgaaactccgcctcaaaaacaaaacaaaacaaaaaagaaatttagctaaatattgctaaaatggcaaatgatagcacttgtcattttgatgtttgtgcgttaagtgtactttcattccctttagaaaatactagctgcatatacataggatttaatcaggaaaatatgctttttccctgattaaatatctttaatactatttcatctgcattccattaatattcaatcgtggcctcagctatttacgtgaattttacccatcaatccatgagcttttttgagtgcctactgtgtgttaaatctatctgtatgttttgttttcttgttaggcttcttttcagaatttttccagggcaagaattatgttttcttatatttggcaattttgcacaatgcaatttataccttattgtaatgggtaggtgcttagaatttattcgtccatttgtgctagacgctgaggctacaaagtccaataaggtaaggactcttatcttcaagttccttaaattttgataggcgataaaataattatagtaccataataatttaaaaatacatctttgagtgggccagagctctgtctgtgatggagattttactctgaagaatggtaactaacatttgtagagtgtctactctctgcctagggcttctgtttcagtttttcctcctagcaatctttcagtataagcatgatatccaatttatacatgaggaaactctctcagagaggttatataatttgctgcagctcatttagctaatgagttgtggagctggaattctaactcagttctttcttttaaactggggcttctaaatgttagcattattgacatcttgagccagatacttctttgttgtgggagactgtcctatgcattgtagaatgtttaataacatccctggctctacctaaggccagagtgagtcaaggaggcacgtaggacttaaaatttaaggaggcagtcactctcaggatcttgtaagtgctgaccc

SEQ ID NO: 70393 - DNA, 1045 bp, Homo sapiens
tttggctgatctcaaacttctggcctctagtgatcctcccaccttggcctcccaaagtgctgggataacaggtgtgagccaatgtacctggcctcttctaatttccagtttttgtttctaaaaactgaatatcacatggtacctaatattagcaaatgaggaaatggaagcaaaggaagtgtgaactttcttttgtagtagtcaacttttggcttaatgttttgggaatatagttctgtggaacatttctctgcttttacagtggtggaatagtaggattcactgtgtagctaaccttgaaatactaattccataaaataaaggatatacataataagaatctgtttagcaatagggtaaataagcactaaggtggtattctcatactagggaaaatgtttgctttattacatcagcaaataatgtgttccacaagttttgatttattattttaactgtataggtggtcttacatctaaaaaagaataccgcttaaaagacttgtagtacagcatataagttatattagacatggaactatgtttctgccaataactcgacattttgaggacagatagcatctcatttccaatttgagattgggtacaaaaatatcctagggctgagaataggcatagtaaattgcaccaacacaaaccttttgtgtatttgtagtggaggaaaagtctacattgagtttgcgtggaaaaatgtcataaaagctctttatgcttttaaccagtagattggacctcattttgtgatgattactttgtatgattagtttccaatgcagattccaagaatgtttctgcacatgagttccttgtcttttttctgttattttcacctttggttgattgcaatccacccccgaccaccatttcttgttcaagaagtgtttcattagtttttcttctcttatttttattttcatgttttctttaatgtttttatactaacctaaaaatttctcctagtgctttaaaaaattatgagacagtaaagttgtctttggatgttttttatttttacccgaacacta

SEQ ID NO: 70394 - DNA, 1022 bp, Homo sapiens
caatattgagaggaaaagcctttaagaagtggttaggtcatgagggctctgccctcatgaatagattaatacattcatggattaatggattaatgggttatcacgggaataggactggtagctttataagaagaggaagagagacctgagctagcatgctcagccccaccacgtgatgccctctgctgcctcaggactctgcagagagaccccaccagccaagaaggctctcaccaaatgcggtccctcgaccttgggcttccctgcttccataactgtaagaaataaatttcatatcttataaattgctcagttttaggtattctgtaataagcaacaaaaaacacactaagacacagccctactacaacatacttcttaccccctctcctacactagtcaatttcaaactccttgagtgcaggaggagtatgcctttctttctgtcatgttccgacacataataggcactcagtgataaatacttggcattttttttggttgttatatctctgactatgtttctgtcctgttatatgggtgtgcaatgtaaataataagacaaatattattttaatctttttaagcttttataatacttgtttaattgtttgcaaatttgttttatagttgacacatgaaatccagcaactctgtgttgtagatcaacagagcccattagtactgctgggaaaggaaaccaaggcctcatagcttttctcttcatatgaaaagaacttcattaatttttaaaaaatttaatagactgtgatgtagttttaatctcatggttttaatcttgtgtttttaagcattttccttttctggatgaggttcttggttttgactgtgtagaagtatgttaattcgattatatttagttgatgaatttgtgcccctaagtatggtacttaaaaagttgcagccgggcccggtggctcacgcctgtaatcccagcactttgggaggcccaggcgggcggatcaccttaggtcgaaagttcaagaccagcctgaccaaca

SEQ ID NO: 70395 - DNA, 1120 bp, Homo sapiens
gtacattaacaacaatatacctttccaaattcttctttcttttttcctaaattttaatctgaaaagatttgcttttttaaactctctttttttttaggttggcagtcaacaatcacctttttaaaaactatgcttgattttgttcatatatatatattttattcattaaaacatagtttcaaccccatatggtaactggctcctgagaatagggaaactagtccccaagcttcagcctccccacaaaccttgtatcaacatttttactgatgagtaataaaattaacagatttgagctgtaacattctgaacactggaaaaagcattactgaactgtaaaatagacctgcagagaaatctggcagaggaggaggagtgtgcgttagcctgtgacaatgaggcactgacttactatgcactattttaacagagaattgaatagttttgctatttagatattttactgagttatttttttaaacaaaagaggaatatatatggttttctgataataattaaaaattttttgacctaaaaatgacccttgggggtggggctcctcaagtgtaaagctcctgctgggaagaaaattgttgggaatacataggttggttttaggcatggtggaatcatttgttacctcaatgaaagctactccttggatagagttgttttcctgtgatatcacttctccttgacagtgttcctttgaaataaatctaaatctgcctagatatttctcactttctaaattaagaaaataattatctataatttataaaaataaaattcgaagtcttcccaggataaatccattggttaaaagcaaacaatactttttgagtttctttggagagatggaaaattgcttttttttttctgtgtgggtgaggcaggtgagaatagatttcgcccctgcatgatgtcaatcagaatttttggttagtaaaaaccaaatcaaatatgttttaaaaggaaattgggtagagctcagtggcttatcaaattgttgtgagggttggagaaccagattcagggctaagcaaccagaaacaatgctccaaatcacattgcataattcccatgaggatgccagtaccatctagagacagacggatgg

SEQ ID NO: 70396 - DNA, 1052 bp, Homo sapiens
attaagctggagtatttattcgtaaaccacctctcgttaattattactttagtacaagtctgtcctacagatttttctatacttcccaaacagtatttcataataatgttattttattcacttgtgcctttaagactaaatgggcagatatatttttgtaaaagtgagtagattattattattattattattactattttttttttttttgagacggagtttcgctcttgttgcccaggctggcgtgcaatggcgcgatctcggctcacagcaacctccgcctccctggttcaagccattctcccgcctcagcctccggagtagctgggattacaggcgtgtgccaccacgcctggctaattttgtatttttagtagagacggggtttctccatgttggtcaggctggtcttgaactccggacctcaggtgatccacccacctcagcctcccaaagtgctgggattacaggcgtgagccactgcgcccggccaaaagtgagtagattaagtgcccttccacacacatgctcttgtagaccgtctgaatgtgggctgggtgctagagatgtgcttgatgtaaggtaaatatccatgaaattaaaagtgatttgtgttctgtttaaatattaaattgtcaacattgagtatactataccttttgtccttatctccatctgatctttcctagcatataacttttaatatgagaaatgttatttctttataatttttttgttttaatccagtactagctgtataaaatggatttttgcataaaagcagttgatgttatatattcttctattctgccacttttaagatttatgcttcttatacaaactttttagtgaatcagttttgaaatgagcagtagtccatttttgaaaacagtgttggcatatatagacttaggatccctaatccaaaaatttgaaatctgaaatgctccaaaattcaaaactttttgagcaccaacatgatgctacagtgaaaatttcacatctgacctcgtgtcatgggctacagtgaaaacacaggcacacaacacaca

SEQ ID NO: 70397 - DNA, 1144 bp, Homo sapiens
gaatctttcttcatttgtcctcttgtctgaagcaagaatggagcaaagtttttttttttttaatgatttttttttttttttttttttaaagagacaaggtctaggtacatcgtccaagctggactctaactcgtgggctcaaagaatcctcctgcctcagcctcccaagtaactgggattcttgttgcgggtcaccatgcctggctttaagcaaatttttacataaacagcctggatttacatgttattcctatggcacaaatatgggatttgtcgttaataactgtattccagtttactgcagattataatagtgaacaagacaaactgggatttggaatcctgaggctatctctgatttagacaagttagtaaccaccgtgtgctttaacctttttgattgggaaattctgagaattaactaatgtaaatatggggcacatagaagttgctcaataaaagtttttaatattactagctttctttcaagtggttgaacttgctaaaattctgatttctaaatgagtgggagcatttcggtacaaaaatattcaagggttctctccaactttccaaacaaagcagatttgaacattaaatttcatcatccaacttttggaacccctgctaattgttttctttgtactcttggtttatttttatacctaaggtctgatagacacataacaaatgctttatgtaccttaaagtaagtgaaaatagattgttcagatgaaaggtatgtggataagtcagttttgcagcaattctagagaactcttgccagaactgtatctttgttttggttttcagggactgttaaatgtgatcactgagtcagacttgctgttttctctgtcccctggctatctctcttaagaccctgaagtttgccagccatagaatgtttaaaaggcagaggagggcttagcctagggggagtttgtttatttaaagaaaaaataattaagtttaaacatcctaccatgtcatagctagtttagtcatgttaagagttagtgagttcttttgattgtttcctggtggtcttgatatctaaaggtaacagataaatttgaagcagttaaacttcctgagattacctggaaccttataatataatcccaaacagaaatccctaaca

SEQ ID NO: 70398 - DNA, 1440 bp, Homo sapiens
tcttaaacactcaatgtcaggtatataaccacttacctctaaccttctatgggaaaggagtattaaatagacatgctatatcagttttgccagtattctgtgtgttactttactgcttaattttgagttgtctttctctcttaccaatgcgctattcgaaatttgattttgttttaattaccaatgaactcttgtcttgtggagacataaaagatactacaatgagtaacaacagtcaaaatacctgccaagccagaagttcaccatccctttggtgattttttatttaaagaacaagccaggtctggtagtcctgtagtcccagctactcaggaggctgaggcaggaggatcacttgagcccaggagtttgagcccagccttgggcaacataatgtctgcctgcctgcctgcctgcctgcctgtctctgtgtctctggctgtctctctctctctctctctgtctctctctctctgtccctctctgtctctctctctctctttaaagaaggacatgaaattcctgataagccacaaagggttaatttcattattaactcttgaacaaaaattaattatttaggtaatattatatatgagaccttaagttggttttttttttagatgattttagaataggtgacctttgcaaatttaactagaaatttgagatttgtttgacattattaatgcctcacaaaatttattctcattattactgagtaaaatcaactagctagttgtataaaatctagctgcagccatataccttgttggacttaattttctgcatcagaataatgtttgtgttagatgatttctaaagtctttttctgtttacagtttttgtatccttcatctaataaatttttccaaattatttttcatgtagtgcacacatggtcttctgaagaagccatgggtagctgttgtagctgtccagataaagacactgtcccagataaccatcggaacaagtttaaggtcagtaaaactggttgagttatatatcttactgcctagttgggtgttcttcttttatttcacttaacatatcttatttctggcttttatcaccaaacctttctatttccctttctttccaccctgtctttcttgatttaataaatgatgacaacattttcttacagtatggaattttttttagttttccttcggtcctctgtatctaattagccataccgttctggtaatactgtttttaaaatgccattttacggggtgccttttcaatctcatcactatctgtctttcagttattattttcatgtgtgcctgtgtgatttcttaactggactctacctcaagtcaccctctgattcatcctgtagtcaccatcaaattaatcttcttctctcatcattcactaacctctttgctaaaattgtgtggtgttattttacctgtaggctaaatgctg

SEQ ID NO: 70399 - DNA, 1014 bp, Homo sapiens
cctcatttggagatgcttcatcccatccgtcaagcagacatccttctgtgggaagtgctcgcctgccttcagtaggggaagaatctacacatcctttgcttgtggctgaggaacaagtaagcatgtgctactgtgtaacagcaataatgattgttcagagttagggtatcactgtgctaatactggaagattttattcagcttgaagtttaactttatctgtttgtaaattacttttgtagtgaacaatcagaggagatagcatatatttgctggtttatgctcaaatatatgcgggtattcaggggaacttaccattacagtagcttgtgggttcacagaagaggtacatctatagattaagaaaggcataactaatggtcagttcccattataagaatgtccaatggattaagagtttatgctgcttttcatattttagccattatagtcagtgaactacgagtaggaaggtagattttgctgttaatgttatggagttatttagtgttcccgagtatgctagttttcatgtgtggaatgaagtatctggttggaacctctgtattaattagttatacttatgttttgtaaaccatatgtcacattaaaaagtttttagtgtttttaaaatcagtttctttgtgttctttacataatgagttgttatattatttactgtaattacatgagtcttggtctgtcgcccaggctggagtgcagtggcatgatctcagctcactgcaacctccacctcccgggttcaagcagctctcctgcctcagcctcccaggtagctgggattacaggcgcaggccaccacatccagctaattgtttcatatttttagtagagaccgggtttcaccatgttggccaggctggttttgaactcctgacctcaagtgatctgcctgccccggcctcccaaagtgttgggattacaggcgtgagccactgtgcccgacccttgtaaatatttttatattatctccccaaaatactattaagctttt

SEQ ID NO: 70400 - DNA, 2664 bp, Homo sapiens
tgaagtcgttattcttttatcaaattaggaagacatttctacatttctccttctctttccacctttttattaataaaaaaacaggtgcaaaagttttgaagtaagagtacatttggagagaaagttaatacagttaactgttgtcaataaaattaactgatgtggtcaggctttttttcagttttgtttttttaagtaagttaactaattcactttctgttttgttttaggtacatacctatgtcaacactacaggtgtgcaagaagagcggaaaaaccgcacaagtgtgcatgttccattggaggcgagggtttctaacgctgaaagcagcacaccaaaagaagaaccaagtagtattgaggacagggatcctcagattcttcttgaacctgaaggagtcaaatttgttttagggccaacccctgttcaaaagcagttaatggaaaaagagaaactggagcaacttggaagagatcaagttagtggaagtggagcaaataacacagaatgggacactggctatgacagtgatgaacgaagagatgcaccctctgttaacaaactggtgtatgaaaatataaatgggctatctatccctagtgcctcaggggtcaggagaggtcgtctgacatccaccagtacctcagatacccagaatatcaacaactcagctcagagaagaactgcattattaaactatgaaaatctaccatctttgcctcctgtttgggaagcccgcaagctaagtagggatgaagatgacaatttaggaccaaagaccccatctctaaatggctaccataataatctagatccaatgcataactatgtaaatacagagaatgtaacagtgccagcaagtgctcacaaaatagaatattcaaggcgtcgggactgtacaccaacagtctttaactttgatatcagacgcccaagtttagaacacaggcagcttaattacatacaggttgacttggaaggtggcagtgactctgacaaccctcagactccaaaaacgcctacaactccccttccacaaacccctaccaggcgcacagagctgtatgccgtgatagacatcgagagaactgctgctatgtcaaatttgcagaaagcactgccacgagatgatggtacatctaggaaaactagacacaatagtactgatctgcccatgtgagcctggaaagcattgtgttgtttgcacctttgtgaagtttttaaaaatgaagatgcaagtgcttcattttcatttctaaacactaactccttttatagactgataaaatttttttctgaatatttcatgtgcatctttaactaaagggaattaatgtagagcaggtactccttaaagaacactaatttcattatatactactcgttgtacagcagcattcccgttttcacagtgcctatttaaaatgagagttgaagtaaatgacatgctggttgatttttatcaatattctggacttaacgcatacctttcatgtctaagtcatggttggcttttaaaactttttataaagcctcttgacaatgtacattgctaacaggtaactataggctttgaaagtaatgctcgtagattcagtgttcacagtatgtggcctccagcatgtaacatgaggaatcctttatttcattaattaatggctttttgacttgagccaaaacatatgtaaaggaaacagaagtaccgcacctcctcttacaccagtcagctcctttgccttcagtgttactagaaagcggcctgtgtccatgagtgtgctttgctgttggtgcactgaaaggcaggaaggagacaagattttctatttactcatctcatgatgtcatttgaagggcatgtccagatatcttaaaattataataggctcaagaatcagtctcaggtcactttacccaaaaacatttgaaaatctgaaccacaatctcctgaaagtttttctcctatagattgttgacaacacattgttttctggaggcatttgtgccattaggtttccatttatcttcagtttttttctttggtgtttgggatgtcttattttgttgccttatgtccttttcaatttaaaatgtttgagtttgtatatagttttgaaattggattatgtgttcattgttgtttagtttgcatttttgtcaaattatggttttgaaggttcatttggaacttactgttagtctgtaacagggttgcccttgtccagtatttatttataagctgtttacttttcaagttgataaaaacattctccaattctaaatttgcttgtgtccataggtgatctctttagcaaactgagaaaaaaaggaagctacttttaacatgcaaagttccctcaaggtgtaccgtgttgtctctgtgggcactcttccccagcactttagcagtaattcccccagctacacgctgcagttgtactctgcccactctagtgttcctcagctctgctgtccttttacttgtagctggatctttgattatccttcgatttccatgaaatattaatattgttgccagcatagcaggtacagtggaagtcttgtagcagtgagattgtatcataatttaggatttaaaatgaattaaagtttatataaactgaagagtctccatatgtcaaactcttggaaaatcaaagatgttc

SEQ ID NO: 70401 - DNA, 1030 bp, Homo sapiens
ttccatttttaatatattgttccacttatcctttcttctgagtaaattgctaattgtgccaaatttatgtaatagtttttgtaatgtggaataagaattatgatggaaccattgcacatttttttctgaaacagccagtcaaggcagaacattaatctccaaatgcaagggctgatctatttattcattttggaggttgggtactttattctttctttccgtcatccttttcattgtttcccccggattctaattagtttttattttttttagataactccaatataatcattacagtttatgctttaaatactatgtgctttaaaaaggaaaatgggaccaatttgtctgctaagaatttgattttaggtactataagagtattaggaaaatatatacaactggtgttaatttctagatattttctagaaatcacttgtgttcctatttaataaaaggtaatttagaatactacttgtcctttgcagtagtttagtaatgggcattaagctgtgtcctcgaaggatgtacctattactaggtgcattttagaatgaaatattgatattttattagcatataattgtggccatatatctcagattttctgaggcagatctaattttagataattctgttggtagaccatgtgatccttctttttggttttggaaatataatcattgttaatgttttccctccaaatagaatactgttttatccatacaaatcataacagcatctatcccatgctagggttggaaactgatattggtattacttgtgttttttcttagtgtgttttatttcccagtttcatcttcttctaaaaatgaaaatatggtgccttccctccctccaggaagactggcaaatatttccttttatttactgctgctgtggagtgatgagatatgcactttactctttaagattcagcaaaaagcttttcacttctcagtatatccagaatacatcatatctgggacttaggaaaatttgccaagcaatctttgtttttatagatact

SEQ ID NO: 70402 - DNA, 1239 bp, Homo sapiens
tatattcttgaaatagacataccatcagagacatcattcacaagtaactgatgtattggcatctcattcatatttctgatgtgtgaggtatatggtactaattaccttttccttgatgtttgccaaatttgaataaaggcattggtacgaaattacagaatgtaaagaaaatgtttttggcttgaaaaattaacatattttatgacgtaccacagtatactctgcccaaaccagcaccctatctatctttcctgttctttacatccctgttccccatccctacttcctcatttttggtataacacagttcttttgtagcatcattataattgcagttctatggcaattggacagttatagcatggaaacagactggtataagtagtacagtagtcaccagtgtgccacatttgcattagtaatgcaaaatatacattttataaaggacaaactttgtgttatgttttattttcattacattgtataatattgtaagactattgtatgtcctaatttgcattataaatgtttttttcctacgtaaaggcataaatatagcaactttgtataaaggtagcttattagatttttaattttttcttttataaaaaattgtccaacagtgggactaccattgccaaattgtatatgaaatatgaattttacccccatggttaatttcttttataaacattccatatttctctaataaaaagacataagtgatactgtactatgcatacattgtatcttaatgctgtttcagatcagcattttaaattttggtttgcatttttaatattggcaaaacgtaaccactgttaattaaaataaaaccttgttgtatatgtaacaacataattttccctctatcccttcccaccctttgttctctatttctccctatcagtgccaacttcatacattttgtagcatggcaataaaatataacttttacactgaggccgagtgtggctttttggaggaagtggggatgggacgattgccctctagttgtcctttgcatatgactgttttttgccatataagccatgtcatcaggcatgaaaagttttctcatatatgatgtaaacttgcttttaaggacaagtgtgaatgtgctttttaagcttaatttttgtcatgacaactaattttttttatctttggagaagtcagagttctttacaatcaaacgtttattaactggagtacttagaataagctagtaattgaatt

SEQ ID NO: 70403 - DNA, 1060 bp, Homo sapiens
atcatttgcacgtacatcttctaatattctgtttatgtagaagtatgtgtacttcattatgtattttatactcatgtaacatactgttttataaaacagatactatttatcaatacttttttgtagcttgctcttttaaattcctttcagtgtaagtagataacactgcccctttaactgtcaaatattatcctgtaccttaattattttataatttaattatggctgtattgatagtttctttccattgtttttgcagttacggtgttgaaacaaaaactagtgtctacctgtgcttctagtgtttctaggggtagatacatggtttggttacgtggtgtatgtattgaaaacatttgatgaatggataccacaaaatagctatccagagtgtttatacactagcactgtgtgagaatactgattgatccatgcattcttcaagatgtgcttatgtcttaacttgaaccaattatgttccctttaggacaaaattcttctaagcagtggacgagatgcctctcttatggtaaccaatgatggtgccactattctaaaaaacattggtgttgacaatccagcagctaaagttttagttggtaagtctgaatatactttttcaccaacctaataatactgtttgttaacatttttgaaataactttataaataggctgtgttgaccaatcgtactgtcaattgatgtccactagttgttaattatcgttgttaaaatacaagcttcaggagtgcccgtatgttggtggtaaaactgttgcatttcagacctcagagttccaaataatttgttgaatgaggaaccctggtaagtttagattggtagtgaatatttttggagaatttagtaagcaaagaagcaattttgagttaataactaatttctttttctagatatgtcaagggttcaagatgatgaagttggtgatggcactacctctgttaccgttttagcagcagaattattaagggtaagagcaactaagcaactcttttttcctactgtgtttttgagtatcagaggtaatctagtccttacttc

SEQ ID NO: 70404 - DNA, 1050 bp, Homo sapiens
tatttttagtgtagatggggtttcaccatgttgctcaggctggtcttgaactgacctcaagtgatccatcctcctcagtctcccaaagtgctaggattacaggcgtgagccactgtgcccggccatttctcacattcttgccaacattagacttttgcatgcttgtgtggcccccacccctcttttttttttggcattttgccagtttggtggggaaaataacatctttaatttgtgtttcttgattactgctgaggtttaattcttttcatatagcttacagacttgatcagttagggtaaaattatctattgacatgaatatctagataaattttgaaaagtaaagtagggttaatatgtatatttggttggttttatttagttccgatgaagttaaattccgtcaagatttaatgaatattgcgggcacaacattatcctcaaaacttcttactcatcacaaagaccactttacaaagttagctgtagaagcagttctcagactgaaaggctctggcaacctggaggcaattcatattatcaagaagctaggaggaagtttggcagattcctatttagatgaaggtatgtatgaatgtcagatacaagaagctttgattagatgctgagggctgaatactgagtgaattctgttttgagaccagtgaccctttacaaagccagtgaacttgaatttaaggacatatcatatgtgcaaccatttttgtcattttattgacagtgtactcctcttcccgcgctattccagcattgttgatgatctctagagtttacttaactaccatgaagttatttgcagtctctgataaagaggaaatgttttcttttactagaaatcatctattctcaaatggtacttttaccaggattatatgtattctccaggaagggtctgggtcagtcaaatcattgtgttagctggttgttgaggatgtacagttgaccattgaacaacatgggtttgaattatgtaggttcacaatgcaggttttttcaataaatatagtcagccctttgtgtccgtggt

SEQ ID NO: 70405 - DNA, 2007 bp, Homo sapiens
gcgtatatctgaaacaaaagtttcaaaatactgtttaattttattgtctgtactgtgctcttatattttctgtttcatattttttaagtaacccattaaattgattttgtaataactcttctagtgggatgctttataccagaagtgtccaaggaagagaatacagtcatgggttcctagtttctgtttctggttgggtcggtaaagccccttcctcctccctcttttctgcttatcactagagacagaaactaaaatccatggctttcaggcgctaaaagcctaaaagcaaaacaacaacagaataaggcaggttggacaagcttgcttttatgccttctaagagcttggtaaattggacttaaatagcttctttgaaacagtgatatgataaagcagacagctttttataagatttactaaggctgctttgaagtattaaatatgatactgttcttatatttattgtaggcttcctgttggataaaaaaattggagtaaatcaaccaaaacgaattgaaaatgctaaaattcttattgcaaatactggtatggatacagacaaaataaaggtatgtaactctactttttaaaaattaaaattactgcccaggcagagtggctcatgcctgtaatcctagcaatttgggaggccaaggtggtggatcatctgagatcagaagtttgagaccagcctgaccaacatggagaaaccctgtctctactaaaaaaaaaaaaatacaaaattagctgggcatggtggcgcatgcctgtaatcccagctattcgggaggctgaggcaggagaatcacttgaacccaggaggcggaggttgcactgagccgagattgtgctactgcactcgagcctgggcaacaagagtgaaactccgtctcaaaagtctcaaaaaaaaaaaaattgctggattctataaactcaggaatcaattgcactaaaaagcttggaataggtatgaatctattgtgtatatacacatatatatacgttggtaaaaatgttgaaatatgctatgggactctttaaaaagagtaatgaggcctggcgtggtggttcacgcctgtaatcccagtactttgggaggccaggcgggcggatcacaaggtcaggagttcaaggccagactgaccaatgtgagatggtgaaaccctgtctttactaaaaatacaaaaattagctgggtgtggtggcgcacacctgtaatcccagctgcttggaaggctgaggcaggagaatcacttgaacccagcgggtggaggttgcagtgagccgagattgccccactgcactccagcctgggcaacagagcgagactcaatctcaaaaaaaataatgaaactgatgctctctttatgcttcgtttgtcttagatatttggttcccgggtaagagttgactctacagcaaaggttgcagaaatagaacatgcggaaaaggaaaaaatgaaggagaaagttgaacgtattcttaagcatggaataaattgctttattaacaggtctgtgtttgcttttaagaaaggatttttttccatgaaagtttatggaatacttcatatttacttatattgaattagattttttacctaggaactgtcttagataacttcacttaaattatggatttttgtaatcagtaaattgtgatttatgcacacttacagtgaccagaattacgggattgatttatacagttactataataaagaacacttcttttcaatactagtaatggatgcattagtactatagttgataaactctaattatataggtaagaaatgcaatcttgttctaatttgcatttcttttacttgtggtaaaaatgtttacatgttttttagtctaatgtagtttatcttgtaacagttgtgagcataatgttttcatgtattttatttacaggcaattaatttataattatcctgaacagctctttggtgctgctggtgtcatggctattgagcatgcagattttgcaggtgtggaa

SEQ ID NO: 70406 - DNA, 1568 bp, Homo sapiens
aaatattttcatgtcttgtgctgggaattgtatcatgaggtcttagtcttataggttggattcagaagagaatctgaatttaaactcaaaagtaactgctttaagactcagtttaaccttgggaaggtagtattgtatagtgtgtgcttataggtctgaagccagactgcttgagtttgaaccccagctttttatattcatcctagttaggtctttggataggaaggtaaacctcttggcctcatttttatcatgtgtaaaatgggataataatggagcctatccaagaggattattttaaagattaaataattagtcgatatgaagtatttaaaaagagtgccaggaatataatcagcaatcaatttttaaaatgtgaaacacattacctatcattatctatccattactgcttattagaaaacaggaattttaagcctgctgtgcatttaactaatacatgtttatgtttataggtggtgaaattgcctctacctttgatcacccagaactggtgaagcttggaagttgcaaacttatcgaggaagtcatgattggagaagacaaactcattcacttttctggggttgcccttggtgagtgattatgtagatcctggttagggtgtctaaattcttgctaggctctgttgaagtaaaggttattgtagttactagaatagcatatcttacaagtcttaactcttcagaagcatgatacatactttgtttcagtctcttgagtcaacctcatatttaccgtgtctttgtgaacagtgcatgttcaacagttttttttccttgataacttagaaccattatgagccttgattgttggagaatgtataatacaggaagacaggtcagctttcagaacccagtaatataaccaacaccggcataaataatagaaggcaaactttttatccctaagtggtcactgtgtcttttaattttaggtgaggcttgtaccattgttttgcgtggtgccactcaacaaattttagatgaagcagaaagatcattgcatgatgctctttgtgttcttgcgcaaactgtaaaggactctagaacagtttatggaggaggtaagcatttagaaaatgttgaatatatttttaatttcttaaagtacaatataagtcataagtggttttaatggttcttacagaaatcttatattgcttttgcactaaattttaaaatgcttggcatatcttaaagtcagtaattcagtatcttggagacaactaagcattgcaatattttattggaattttaatctttaggctgttctgagatgttgatggctcatgctgtgacacagcttgccaatagaacaccaggcaaagaagctgttgcaatggagtcttatgctaaagcactgagaatggtaagttaatcaaaatgagagatccgaacttaagttttgtggttattgatagttttaaaatgagtagaaaatgaactggttaatactgcttttaaatttgattctggagtttctcctcttcgtgagcagtaactgaagcagattttacattgttcctaaatgtataattttaaaaa

SEQ ID NO: 70407 - DNA, 1028 bp, Homo sapiens
gggtttcaccatgtttgccaggctggtctccaactcctgaccttaggtgatctacctgcctcagcctcccaaagtgctgggagtacagatgtgagccgctgcacccggccccttttaatttttttaaaggctttctttgagctcatttgtaggcttatctacctactgagtaaagtagttgggtgtcctaattttattaataggattaatttttattataaatcattagagatgttttgatactttagttaaaactgctttttagtaaatttgtttttctttgcagatatgagggaaggcaccattggagatatggctatcctgggtataacagaaagttttcaagtgaagcgacaggttcttctgagtgcagctgaagcagcagaggtgattctgcgtgtggacaacatcatcaaagcggcacccaggtaccctaacacttttctcagaaaaaattactaacagcaaaacaaaatagggagctgtatttattttataattagagttaatgaaaagcagagacagttttgcctggataaaagtatgtaagttatttaaaatatcacaactcttaacacttaagccagaaaaacttaaggggaaagagggatgggcagctgaggtagctcttaggattgaaaaggcacagaaagagccatgcttggaaaggtcaagtactgaggacagtagatgctgtgatgctttctattgtctttaaacagaatgatagcaaaaggaaactgagttctgtaactaaagtgttctagggcaaggtcatatagccacacctactcccagaaatcttcacaagaagtcagtgccctcacccacagttgaaataacgcttaaaaaatgtataataccttgtttggtctgatactgttttagagatcaggtatcttttattagcaaattctgagtaatttgcaataaagaaactgaattttaactcagccttccagacctaccagaccatgggcttctttttcatattccttattaatctccagaagactttttttttcaga

SEQ ID NO: 70408 - DNA, 1297 bp, Homo sapiens
agtacaaatttactagtacccttatcccatctttccaaaagattgttctatgcccccttattgtatggtcatcaaagaataaaagatgagaatagaaggtgcttcttgttggtgggggtgtctgcagagtcccaaggcagaacagtcctgatgtggtgcagggcatcacacagaggagggggctgagtggctagctcaggtctgtcttcctcctcacctaaagccagcagtcccatcctatataacccattagtccatgacataacttggtcacctcttaaaagcccaacttccaatactgccacattggggattcagtttcaatgtgagtgttataggggacacacatgcaaaccattgcagagttataacagttttaatacaggattctagttgtgtttgtatttagtataatactttggataaaatcatgctcttcatttttcactattgacttttttcttactctcataggaaacgtgtccctgatcaccacccctgttaagcattcccacgtgctgtcgatctttggaccagtttctagcaaagttgtgtttgaaagatactctattaaagaagactgtggaatctgtttatcggtgcccattatatccttaagtttggatatttagctgaccttcgctttaacataggtctaatttatttgccgtgtcattttccatacaaatcagttgatttaaaaaagttcatttctcatactgtgcattaaaataaaaatttgaacaattacttggttcttatgtcttatatgtgtgtattctgtttgaactctacttaatggaaattaatgattattttcaatatggcattttccagcttaatgattggccatctacatttttgaaataattatcttgattaatataagtccaagtcaaatgtgataaacacgccatatattaatcttttggttttgttgctgggccataagaacactcaatcatggctgggtgcggtggctcatgcctgtaatcctaatattgggaggccaaggcaggtggatcacttgaggtcaggagttcaagaccagcctgggcaacatggtgaaaccccatctctactaaaaatacaaaaattagctgggcatagtggtgggcgcctataatcccagttgcttgggatttaatttacccatttaattttgtttagtgaaaatgccataaactagtactcatttaatttggtgtagtctaagtgctgtctcttgcattgaaaaaaattacgatgctttctgtgatgtgttttttttttttttgagatggagcctcactctgtc

SEQ ID NO: 70409 - DNA, 1001 bp, Homo sapiens
tgggtgacaacatccagccagtagatggggaaggagagtgtggagaagggcaaaaggtttgttttacaatgaaccaagtctagaggtgacatctaacacttctgcccacattactttggccagaacttgaagagtttcccctgtagaccagcactaggaaattgtcctggctggacagctgcttgtctggaacaactggacactgtggaagggaaacacaaacctttaatgggtggtcaaacatacctgacaaaggtgcactgtaggaatacatccgaatttatttaacatgcagaaggctagcttgcttctctttcttctgcttttctacttatcttttgtcaaaggcaagtttttaaactgtggaaagatatcatctgataagaatgaagacatgagaaattagaaacctgtaaccattgctggtgggtgtgtgtactggctcagatttggtggggtacagaggagccatcaatgaaaaacctgtaaatgatgcatatctatgatccagcaacactttttttttttttttttttgagatggagtcttgctctgtcgcccaggctggagtgcagtagcgcaatctcggctcactgcaagctccgcctcctgggttcacgccattctcctgcctcagcctcccaagtacttgggattataggtgtgtgccaccacacccagctaatttttgttttttttagtagagatggggttttaccatgtagcctaagctgacctcaaactcctgggcttaagtgattggctcaccttggcctcccaaagtgctgggattacaggcgtgagccaccacacctggcctgctccagcaacacttctaaggacggtttctaaagaaatgagtggattgctgctcacatctgtatgcacatggatgtttataatagtcatgctttgtaaacaacctagatgcctaaccacagaaaactgtttaaattactgcacatccatgtaatggaatactatgcaggggtttaaaataa

SEQ ID NO: 70410 - DNA, 1091 bp, Homo sapiens
ggccaaggtctttgcctggccagacaccgtggctcaagtctgtaatcccagcactttggaaggctgaggcaggtggatcacttgagcccaggagttcaaaacctgccatgggcaacatggcaaaaccctgtctctacaaagaatacaaaaattgcctggacatggtggtgcatgcctgtagtcccagctactcaggaggctgaggcaggagggttgcttgagcctggaaagctaagactgcagtatgctgagatcacaccactgcactccagcctgggcgatagagtgaaaccctgtctaaaaaaacaaaaagaaaggtctttgccaattttagttttgtggcccagcatttaactaaaattaaaacaatgtttttctcaagcatgatcccacctcacttgccccaccgttaacctacatttgcagcagagcgatacacatgttcagtgacatcagagtcacccagtgggaagtccgtgctgccaagcctgttatgatcctttggggtgatctggtctgactctcttgtttccagatgatgggaggagatcatgagaagttaaactacttgctcaaggttacgcagcaatttaaaaaattcaaatgcagatcttcagagcgcaagtccaggaccctccccgcaataccactcccagtcccatcagtaggactccaacagggcaggattcagcaaagctccacactgaaccctactgtctgaaagtcacctgagacagaccatattgaaccaatgccacttctccctccacatgcaaataggaaaaactctccaacaaaagaaaagcacagctcaccctgagccccttggggagtccaggttggtttgtggcgtttcagagccagatgtccacagatctccagtcaactcacagaatccactcacataattatgtaagtgctcttatatcatctgggcacataaatacactttcagaggaaacagtctcagatagctagctcaaagagaaacgtccagctggtggtctgtcctgaactcctccagggtccctgcttctcagacatgatgcctgctggacatgagttggatcaaagaaatcctaaaaggagag

SEQ ID NO: 70411 - DNA, 1080 bp, Homo sapiens
gtggaagtcgcagcatgtgaagagttgccggttgttatgggattaaaaaagatgaaagggtaaggtcttgaaagacacgagcgctgagttagttagtactgattactgagaggcaatttagtttcatggaaatgttgcctgttcggaggctacctgttatacactctcctgtttcaccccaactccttccgttcagtgtcgggttaaaagccttgtaatctcttgcagtggaatgattgcataattggaggaggggcccataagaggattacaacaaaactgttccattgtaaatcagttgaaagacccagttcttgttcattatcctttttctcattttgttgttcatgaaggtttttttttcttccagtgctgaatgacaaatcaaggagaaaagaggcagaatagggttgtagaccaatcgtagtaaatatttgatactgttaaatatttcaccagttttatggggccttgttctgttatcatttgttatttatttactagtactgtgcattttgataggacttttcatgtttggacagacagtgtattccagatgcggcttatgtgatctaatcctaaagcccttgtggaatttatagaaataaacagttatacaattaagtagtccattttttaactattaaatgaaaagccattgcatttttttccattacagtaatgttacatattaatgtatacctttgtgaaccaaagtgtttgatacaactcttccttctgtgtttggtaaacaactcatctgtggtactgaatacttgtaatctttcaccaggatggccatttaatgtttagctgctttgtgggatttctgaatagatcctattgtactttttgaattagtgcagttatccatatgtttcctttaatattctttacctttgattttgtctaaactctcatcctcccccaacacacacatcctctacaaataatttttaaaatggaaaggttcttagaaatgtttcaccccctcattttttaaatatggcacgaaaaaatactttgtagattacagtagttttatatgcattatagtagttactatacttttttcctcct

SEQ ID NO: 70412 - DNA, 1992 bp, Homo sapiens
tttagcaactgatcctgccccagtctagtgctcatctttccttttggggctccaattatatgtatgttataccttttcactgtaacccttatgtctgtagtggaaaagtcacctaaaatttcacattactctaagtttacttcactattttgttctcagataccttcaaacatattttaaaaacaaacaaaaaacttttctagcttttctaatcgttctccgttggaggtttggtacaaattgcataatccactattaatgaaaacagagtccatttccaaaaatttagtcaactattctctccatagtatgaattactttttcatttaaagttaaaatgttacttatcttgaagggtcagattagctgtgtttattatttttaaaacattgccagatagttttgtgttgacagccacttgtcccagaaaaattcagcaaatctgaaacatttgttatttttaaaaggagaatatttaactcattaaatttgacagctcttaaggactttgccaagatagccagaataatagtgcatggaatatcttcatggttaatatcattttgctataaatcattgatagtaaagattctcctatttaaactagtataagctgcaaattcacattcatgggcacacacaaactgcagtgttacaatactgtaaaagctaatgaacaaacgggaaacaaacagtcaaactctgatgtaaagaacttccacctttccattctaccactgtgcattttgacagatctagtgagggtgccattgtcaaactattcattaaatatctttgaagctcatttccttccttcctctgataaattgtaaactaaagttctaaaatgtaagttcttaaatctcggggcactatctcaagcaccctatatatgcttccagtccattcttaatcccttacagggattattctatacaagggcataatcttttaaaaataaaatgatcatgtcttccttaaaaaaactgtaaggcttcatattgcatttagaataaaacccacaattcttattccgatgttttatttggttaatacatataaacagaatgtaagctccttaagagcagggactttgtcctttcccagtacgtaatcagcatctggagcagtacctcacaaggagatgacatgagtaaatgtctcatgaataaacattatatgaataaaaaggaattaaatacctagagtttcatatttgtggtactagaagattaaaactctattaaagggtaaactgatttgcctttttaggttgctcttcacaaaattgtcacataataaaattttgggaatgtttttattgaaagctctaaggcttcttagctgtcattactataaactgcaacattattggtgtgttaatgtttttacttgtccctcctgtatgtctttgctttgactaataagaacatatatagtgaccacattataaaaagctgactgcaaaggagttggctttgacacattggtcattgtttgccttcgtcacattcacagtccttacgcaagtatctatccggatgattgatctcaacttggctgcctcagtggtaataggtcctaaaagaaggcacctattcctaatgtctcatagtttgtctctgttgtcaactgctgcttccatagttgacattgaatacttaacttcaggctaacttttggtagtatatctttgcttcaattgtaaacatttggcaagaactttttgaaaacaaatgctactttgtttctaaaatttgagatgttaactttttcaggaagctcataaaatggtgagagaagcaaatatcaagcaggcaacagcagaaaaacagctaaaagaagcacaaggaaaagtgagtttttgcagctcttaatagtataaaataaatttgtgataactgttttaaagataccttaacatctgttggattttgttctgatcgtaaagtagtgcttgttttcaatttggaaactacagaaaaatagaag

SEQ ID NO: 70413 - DNA, 1317 bp, Homo sapiens
atatgtgtagccatgtgtcctgggtttctgtataaaatacttctctctgagggtgaccatcaaaaatagtttgggaaggtactgagttagactaagtcttatcgatcatgaaaactgtgtaccaaaaagacttgatgagatctctcttttcatattgtgtttataaaggattctcacttaaataaataatcagttttgtctttcatatgtgagtcttacttgagaattacaaatcttcagagataagactcccacatttcatagcagggcagacttgttttccatccagtcctataaggaggaatgactgaaaccaacagtgcttaaaacatctagcaaagacgaaaggttttgcctaaaaccgtggcataattgtgtcttggcttctgtttaaaaaatgacttggaaagcttttgagaaagatgcttattaagtgcttagagccagatcaatataggggactggaaagactgagagagctcatagaaagcataactgactgctgtcagggttattttgaagccagaagaggaaaagactggttgagatgaactaataggtctgtgttaaagctgttgtaggaattgtgtgcttgtttctattccctgttacgcacgttacggtctcagcaagattacagaatgttgttgtttaggtgaccatttgttggagggttcctagtcatatgtttgctctgtgagccacacgtccacctcgctccctcaagccacacgtgtagcacggtggcctctgaattttagggaaagaatttacattcttaaattctacaaatacccaagtatttttgttctgatccttccaccccaaatatggagagttaaatttaatcatagcagttttcttatttttaaggtctgtgtcatgcctcattttaaatatagcatataactgtttttattgtagaatttaaaatttgtgcttgcattatatatcacatatatatgtgcagatatcatcaaatgataacaaatggggatatcaaattaaagtggatttatagtatctttagtaaaataattatagtttagatttagagaacagtttacaaagtttaaggatattgtgcttgtgggaatggggccagaaaccaaggtgatgcatatcgtggaaaaaactaaaggaagatactgtcttcctttatgaaatgtgaagtgtggctttggccgtggttcttgtgagctagagtgtgaagataatgactaagtgagtggcacagcactgtaggaattttgaggaagacaagatcattcaaactatgattaggtactcttcttgaaggaagagagatttggttta

SEQ ID NO: 70414 - DNA, 1727 bp, Homo sapiens
ttttataaggtggcttattcctttgtacttctccctaggtcccacattaaatgcatatagagcaaccaaccaaccaaataaacaaataccccatctggaaactattaccctgcaagctatcaataacatgctttgagacttgaacagtcatcatgaggatattttcagctgagaagctgaaatcctgatggaaagctgagagctgtcctgcagctgattactgatttgtaaatttgttccaagatgggacatacatggaaaacacctagtttctgtttctagaatcatggttaatgttatggcattaaacttatactactaatagaatgtaagtctcacaagggcagagactttgtccttttcatcactttagcccagcatctagaacggtgcctggtacacagtaggttctcaaatatttgttatctaactgaatgaataggcaacttgtacagaaggtaggggcaaatgcttttcatttcaaaaaactgaaatttatcattatttcacagaaaatgtgctctcactggccagagtaagtcctgtaaacacagaattaaattaggggactcaagcaactattattatatttctcctttttgcagatacagggtaagtgacttaaccatgaattttaataaagcttgctttgatatgggacatttgaccattcatgacattttctccatttggcctagatcacttctgtatgtaacttttttacatacattcgatacattcagcagggactcgtgaaacagcaggatggtgagtgttcttgattcaatataagtctttacataaaagttcagcaaaaagtataagtaaagttcaacaaaaagtatagaatagtagtaatgctcatatcagctttattgttggtacatttatattgaatcccttctatagttctaataaaatttgtggagaatttgggaacaaatgtcttttagaaaaatattgtgtttaattattttatttgcctcattttactcttaattttgaattttaagcagggtcagttttaactcataaggggtatatgataaaccagatggtaaatgagaagagagttctaagctcattgaattgactctttaagagatgaaaatgagtaggccagcaaagtggtcagatttattttaattgatggaaaccatcatggagctcaaaattaagttttccctgtattttctactttttgcgtgtgaattaataaagcagtcatgaggataattctgaatggaataaagattgccatattctaaatcagcagaaatgtgcaggtgatatatccaggagaaccaacctcatgaaagtgtgttaatatttttaatacaattttatagctaaatatcttaaatatcaggcatgaaaactaatatggcctgacagctccaaagcagtatctctcgagcacaaatgatagtttaaaaaaaaaaatagcagatactaggctagggacaagtctgtgccagttagtatttaaagttttacaaaatttccctgtttatattttttaggcactgaaaatattatcttgcttaaacactggtagaagcctaccatctttcaatcatgtaaagcagtgaatcttaattctatggagaagttagtcacgctgataaaaacttagtttagcctttctcaaggtctggtatgttgaaaaatgtcatatttctttaaaatcccatatagttggattttaatgcctaaaacattagaga

SEQ ID NO: 70415 - DNA, 1053 bp, Homo sapiens
tgttgcttaatttagctttataaatagactttaaaatcactgttgtacaaattttctttttgaaacttaaatttggcattttacatttgcccttccaaacccattctctttaacctactctattgcaccaatctctgctcaccttcaagtgcaagcccaaagccctcccaaccacacaaatccatagcacacattaagataggaagagacagtcaataataattgaacacttaccatgtggcaggcagtacaccaaagtctttatttatatatatgtgtgtgtgtatacacacacacacacacacacacacactaggttgatcttcaaatccaaaggctttttatgtgccatcttgtttaatccttacaaaaccttatgaaatagatattattcacatgcttacattactgatgaagaaactacatttcaaaaatattaagtgacttgcttaagatggtcataaactagttactggtaaagctgacacttcagctcaggtctacctgattccaaagccactatgctactgcaacatataaggacaaagaaaaggcagtggccatgcctagacaaaattatgaagaagacaaaagtctgtgttttgtgctctcaattcccagccaatagaaacccattttaaaagtatagtgtttgatgagaaggagaatattcaccaaaggctttaagtattaagtattcaggtgggtgggatgctcttaacattatgatgttcattaggaacattgacgtctaggacattagagctcacaggatacttagtacaatctaatttaattccttcaatttacatattaaaaaactgaggcctggagatataaggttacaattcttgtcaataacagagcatcgtaattgtgattctacagcctagaatctgggtccctttttctttcaatctacagattcctgaaaacaccaaggccttgttgtttcataatgtagatgaatctgatgaagcaaaatgactttgaatgaactttagagggtattgcttgtatatctgctagctgatttttttctaggttcagtta

SEQ ID NO: 70416 - DNA, 1505 bp, Homo sapiens
ggcggaggaaccacagacgcttctgtctgtgaagttgcaagtcctgggtttctacttccgcaggggcctctccaccttttgctgtcgtaggtctcgcttaaaagtttaacagaagaaaagagtagggttaaaagaggcctttgtagttcttcattgaagcactgttgtctgtccgggtgaaagctgataactcttggtaactgtggtccttagcaaaagagaattggagttttcttttatacaaagtatttccaaggttttagaccttatatttattccaggcctgtaggtacggtattactaccacaaaagtcttacattaagggtaccaccctctcagagggaacctaaacatcaacttccttcgaatccttggagacatcttcacttttcaacatccggaagactgagtgcaacatattttgtttcattttcataaaagtcttggtcagagaatcccactccttttaaaatcgtttgggcaattcctcataattaagtacactgctttgaacccttagttcttggcgaaatggtaaaaagtactcagttaaaatcagttcacgagggaggccaacttgaatttaaggttcaaagttgaacatatttagtgtcatgcttaatattaggaatttttagagctcggaatcataagtgtgactgttgatttcccttttgaagcaatataaatggaaagaataaagtatggggtgagggatgagatagaaattttaaagtatccatttacatgcaaggttgatgttgagtttgggaatgcttggcataattgacaacagttctttccaaacgtcaatgaataaatctcacaattttgtaaggtaactattgcagattgaaagggttaagaatcatagttggctgaaatggttaagtgtctatattcacatcccagttcattgaaatgttttataatggaccaagataattagtaagctctgtatgttgaatttgtttagtttgtagttctattataatgttaaatctaaagaaaaaaatacaaaatacacttaaagacaaaacatgttccactctactcacttatttcttgactttgtaagatccttactgtaaaaaaggtacttttctctcatattttctgagagcttgaattgtaataatttttgtgaatactttgtattttagagaggaagtgagaaactgctgaagttttttttgcatcttgattagtgctttatcaatacaaataagttaatgtaaacatttgttggcaggaatctttttctaagtatacaatgtagagatatctgtaacctaatctgatctcagggaatgagaattgcctgtttaaccaagcaacaaatacagcctatacaatttttcaatttctataatactttaatttacatggtggaaaaatgagggcaaaatgcttgtgtatgagtgatttatatccccaagtacctgctcttgaagataaaactcagattgtggcttatcttctgatgctgggcaaaaaacaaaaa

SEQ ID NO: 70417 - DNA, 3633 bp, Homo sapiens
aaagtacctgtattttgaaagaccattacagaattttttacaacctgtataagttatagttttatcttttctagtgacagacttacttcataagattttctgataatatgaataaaatgtatgcttcacatgtatatatgaaataatgagtaagcattaatagaccaatgaaaagaacttagcttacaatttattttcttgctctttaaaagcagtggtaaataatagcttttttttgttgttaaaatttgtaactgtagaaagttcattctgttgggatcacatatttgaaggcaaactaacaatgccatgtgcttgcttgaataggcatttgaggacaggttattttcctgagatttcaggaaaatataccaccaaacatttatgatgttatttgttacctggatctgtagtggattttgtaacacaaagaggcagaatatccagggtaccaggtagggcagtttaggggcagagttaatatgaggtgtactgtaatgtttgagtggaattacatacagtgttaatcaagagatctagtgctatggtagaacttattctgcttgatgatacaggtgactgttcttccttactaagagcagtttctacctgtgatacttaaagggattgaatttcactgtgacttatatcagatattttgaaaagagctgtgctaaagttgatgtcattgtagaaagtttgccttgaagtggaatgaaagttaggtttttatttctttggtttttctgtttgacatcctttgatttctattttagaattcaactcttatgactaatcatgctgatgtggtttgttcatttattttctttgtctatactattaggaatgtcctggaaatagaatttgtactgtgttttctgagagcttgttctctgaaatacagatgcaaatctgttggtatctgttggtatatcccttgggggtgtgctgcattataaagtaataaaacagtttacaatgtttgctttttgtcaagagcttatgacatataatatggaaatacaaaaaagtgaattatttaggaaaaaatgggaaatttttccttttctgggcacttcagggttttgtatatgcgtagactcaggatctaagtccacttagatatatagttagatattttggactatttgccacttaaccctgcacattttcttttccttattcttttttttttttctttgagacgaagttttgctcgtcgctgaggctggagtgcaatggcgtgatcttggctcgctaccacctccgcctcccgggttcaagcggttctcctgcctcagcctcctgagtagctgggattacaggcatgcacccagctaattttgtattttcagtagagacagggtttcaccatgttggtcaggcatgtctcaaactcctgacctcagacgatccgcctgcctcaccctcccaaagtgctgggattacaggcatgagccaccacgcccgtcctattctttttattcatgtgtatgttattgcatgtatgtgtgtggggggcaggtggtagtgcatattttatgtatctttcacttctctgttgtttgatgaacttcttccatactcctctttggtatcactttcttcataaatctttcctgactccccaaatcctttgctgtattgctttttactcttcaaacttctattatagaatgtcacactgtattgtaatttactgtccatctggactgggagcacctgagaggtatggccttgacttgtttatgtttatgttttgaatgcctctatagtgcataatacttaataggttctcaatacgtatctattaaactgaactgttgctagattgtcatttgacagtgctgtttcacaatccacagatctgaagcaacagattggaaaagtggtggggagaatagcttcctgtattccttcacttccttgaatcctttcttacagttttgcttcttaattacatatggaaaaatagataactagcttcttagggaagtgtgtgtaaagttagtatggaattagggaaggatgttagtaatagagtgattaataccctgttttgcttctggcaggatgtttagatctgtatttcttgcatttctcgctgtattttgtatggttatggctattatgtgaaggagatattttgtatttgtctttacaaggtatcatgtttaccagtacttacccatgagctcatattagatttggggcttctgaagatagattctgtttttctcacctttttcctcctaatgcctggcccattggttagtagaaagcaggatttctctagtttgaataaaattgcccttatggaaataaggtgagatgtgtcttattggaggtccaaaatttaaaaagctctgaaagttgatcatttcttttgttttgttttgaataagcaaggtgagaaaatatcaactggaattatacctgtgaatttgattattattatctttcttaatctgattttcctacattttcatatggaaatgttcacgtgtttgactgcaggtgttgccattggcagatgttacatcatatatgatacatacaacattttacctttctcaaatctgaaactgtgttttgagaaacatctggcctttataggtttgtttaagagattgtgagccaattttctgcccattttagagatgtagaaatcaaaacaggatagatgactctcagaattgcattttagtagatatgctaatattgataatgattttaggaatattatgtcttaattgcctgtatatgttccagagaccttttagtgactaagagctgccaaagatacagagtgtatatttttaaaaagggagtatgatccagtactcaggacaccagtcctttctctgccttttctgaatggaaatgtctttccttatacgtgagtagatgaaaatgcacatttagtaagtttttactaaaacttagtaaaaactaatgataaaatgagtgagggaaaattatgtatcctggcaatttaggtaacagtgagtagacttgcttgtttttcaaacatattgatatactatttttccatttgtgtattcagatgttgaaacagctccagtttgtattagcatctggacaaaatgtaatgactgattatgtaatacaatgtgtttgagagaggagcatttggttttgtgtcatatctggcaagaatgtgcttttgtattactttctacattgtaaattataatgcctatcctgcatacaaattttgtatttagttttctgcttgtaagaatctttcataggtcagtaaaataaaatattaagtttactatgccattccaagcacctgactacttttggctttgctacttaatatttttaaaatgttttacagcttgcagagaggacttttatatacattatcttaattttatatatattaaaataagtttaaaacttagcatttatgtttataaacaagctattttggtcaataagaaaattagaagttgggaattatgaaggccgttttcatcttcagactggactcagagtctaatttctttctcatttattttagcgctactttatagagaaaatcgtgatttattaaatcaaatagatgttaatggaagacttgtttttgtttgcatctgatca

SEQ ID NO: 70418 - DNA, 1016 bp, Homo sapiens
gattattttttattaaggtgccttgaaattgttttctacatcagatgaattgcaggggttgaggggtggtctgtctggagtactggaaaatgacataggaaagcaaactgaaaactttccttaattcatgtgtttatgtagaataataaaacctatacttttcttagaaattagtaataagtttcatatttaattagattttcttgtacagtccaataaatgttactttgtgctgtgcactattatagttgcactgcgtaattcctcaagttaaatttttgtcatactgtagaaacatcctagagtagagtaactttgtttcagggagttaatgagttggcttcaaggaggtgataagtgagctctgggttctgaagggtgatttgtagttaactaggtgggggagggtagggaatcagcattgtaaatgcacaaatcctaggaaaatgttctagatttggagaatggtgaggtaatcctccatagcccttgatggaattctgggacctcataggagaagttagttgaaggaatgaagtagccacagtatgaggtcttatcttttatgtgatgagggaaccattaaccattaggaggggaaaaaaaagccagtgagattgataagcagattcgtgtttcaggggaaagtttagattccacagtcgatttacaattaaaattataagcttaatggtgtatgtttatgacatttttgaaagattattttctctccattaaacaaattgagtactttgcattcatataagcaggatttttatttgttaagaactgtatgactttgaaactctgtagtctatcttttagagaacttgttatatatgtaaatgaatgccaactgttcaagatttttccgttactggggtggaatttttgtatacgttttggggcaggcaaagtttgagtattatcatctgatgtaatgtgttaggcatgagatttaacattcttggataaattgaaataataccaagaaaatctaaatcagtgataaaatc

SEQ ID NO: 70419 - DNA, 1101 bp, Homo sapiens
aggtcctgatgctttctctatgtatctatagcaggaaatttacttcatcttaactcctgcttcattagggtaaaatatcatgataatctttggggtattcccatttttgtaactgtatttgtgtcctttctctttatcattgttagccaagtgtattttttgtgaacatcgtgtctgtttttttgaaattcatttttaatttatagttagagcattgagaatgtcagtgcagtagtttgaaactcttgtgtattcttgtgcatatgtgtatgaataacttacgctgttctttgtcccttaaatctgtaagatctcttgggtactgagccttttgaagcattaaaagtaaataccatataaggcaagcagaatagtactaaatagctgcagtagcaaagcaaggaaagtgaatcacagagtaatgaatttggaaaatgactgtcgtgcattgtaggaaaaggcattgcttttactatcatccttgtaaaatctagttgctgacattaagtatttgttgtatgtgctgattatttaatcgtgtactgtaacaaaggcacttacaagcaaaatactttttcttctaaaaacatatactgaaactctagaaattggagtacagctaccctaaatcctcagttagtttgctattcaattctttcatattaactaaggcaaataatttaaaattgagcaaataactcatatctaaaacttatttataaaacatatttgtaatataaaacatgaacttctagaagatctacagattctggtcaagatatgcccctttataatttcaatagtttaaataatgattgtcaggcacagcaaaatactcaggcatcagatactcagttaactctgttatgtttgctattcttagaagattattaccacactttagaacagttttcaatatccaaggctgtttgcttatttcactggaattaactaaaagtaattagggaattcattcctcagaataatttatatcctaagctttatgatgaagaaggcttttatttctaattgtatattccagccttggaccaaaaatgtacatgctaaaatatcaagacaaggcaaagatatatttttgct

SEQ ID NO: 70420 - DNA, 1475 bp, Homo sapiens
agctagccagtaagatccagagtcaggtctttgacttcaaaacctcctgaatttttgtttgtactgttcttgttcaagcatacttacagagcctttcacttttacagtgaaattcagaccgggcttagtttttagtgttgatctagggtgagttttcatgcagggcttatttttttttaatatccataggaactaataccattcttatttttaaatcaactttgtcaaggaagtttacatataatacaaggtacccgtttaagtgtccttttttaaattagttttcacaaatttatacacccgtttaaccatcaccatcattcagatacagaatattcccatcaaccctcaagttcactgattccatggagaccccaatcatggccctggcaaccacagatctgctttctgtcagtatatttgagattttttctagagattcgaacaaacgggtttgtaggtactgcattgttttgtgccttcttttgctcaacataatttcatgacttatttatgttgcatgtatcagttgttcacttctgttggatattgttttgttggctagtactcttctaactggtgcctgaaacgtttgttgaatgaatgcatataataaatatcctcttcccccagttttgccgctttcctttatcatgagactgctaaaacctcttctagattttgtatgttgctagacttaaatttgtgtatagagtatttgaagagataatagtgaaaaatgtgcatgatttggagctcagtatttgttaaaaagactgttttctctatttatttatcttagtacccttctctaaaatgagctgactgtatatgtgaagctttatttctggactctcaattctgtttcattgattggtatgcctatccttatgccagtatcccttgattacgatctgcaattttgaaaacaggaatttttgagaatcctccaactctgttctttttcgagattgttttattagtatctgctccatgaatttccatatgaattttagaactagcttgctaatttctccaaagaaaccaggtggaattttgatagaattgtgttgaaactgaacatgggatgtctttctatttatatagttatttaatttctttttttttaatcaattgagtaccaaaatagactttaatttcttttaagaatgttttgtagtttttatggtatgttttgtattacttttgttaaacttacacctaagtgttttattctcttggatgcttcagaaatggagttattttcttaatttcatttttggattgttcattgttattgtatagaaatgcaattaattttggcgtattgattttgtaccctgcaaccttgttgcacttgtttacttaattattataaaacattactattaataaaatcttaagtattaaactgctatgtaaactgttgtatattttcaagtctcctgttgacttatcttgtatctagttgttgt

SEQ ID NO: 70421 - DNA, 1037 bp, Homo sapiens
tatttgttaaatttcagaaagattctgctatttatttgcctttaaggtcttgttcaactttaaacaaaattgaaactggacatcttaaaagatgcattatagatgtgcattatacaaaaaatgatgtgaaaagttaattactaatcctacactcaaaagcttgtcctacgtcagactatcaagggggaataaatgtccatttgtattttaaaagtatttgatttggcaggaactaacttttaaaattaaccttccggttgctggtctttttcttactagacaaggtgcttctgctgcagtccttgtaaggaaaatgatgtttccataaaattaaagttagtaaaggatttagtatatttcttgtgcttcatttattcagtaaaatgtatctgttatgtatcacttattgtaggtacttgtgataacagtgataagcttaatagacaaggttcttctgcttaaggaacttcagggatacagacagaaaacaaatgagaacaaaattcagactgttgggtgttcagtgaaggcctttctgaaaagagatagtcaagcagacatgttaacgtcaagaagcagtttggcatttggagatttggggtaagatcgttgaaaaggagcagcaaatataaaggccctaaattgagaactgactggatgtgtttgagaaacacaaagaaaggcaatatggctagtacttactgagatattctcacttcttttcttactctttgttttcttacctatcattagtaatcactatattgcttataccgttaagtctgttgcttctctcatgcttcttaatactcacaacttttggttaagtctgcttctacctatactgttcctgcatccctgcagttgtgtgtggctagagaacaccagcctcccatgggtccttagtactacttggcaattctacctactgtcgttcctctaatcccttcactctccctttcttagaagaccttttcctccctcctcagacctgtaacacttcctcccatattcttatgctcacccgataacttcat

SEQ ID NO: 70422 - DNA, 1057 bp, Homo sapiens
acttgtgtaaacagatgtacttttcgggcagcaggaagactagaaacagcccctgttgtctgaatttcagaccccagttttatttaagcccatatcaaatgaagagcttttaattttcaagcctgtggttcagaaattattgaacttttgtcgtttaagatcagtaggattccctttataagtattcacttcatttgaaacttttaagccacagtagaagaaaatttctgtctcgagatggtgggccttttagatagacctgactctctacttatagtaaattttgtgtatcagatgtgtagaatcctccttggagtatggatgtgagacaactgtacagttgagttaaaagtagtaccactgtggaaaatggaagacacatacaacattgttataaaacattatgacaaccagagagcaaattcatttcaatagattattgttaagttgtatttgtttttctttgtagatataggcaacttttcattttacatgctaattataggtctgtgaaacccatattactaaaatactcagagaaactgttcttagttaatatggcaattttcccagaccaggtatggtattcttgagttttatttatttttatttcactgaaattcttgagttttatttatatttatttcatctgtccatcaactcagaatttttaaaacatccatgtgatcaagcaaaaaattagttcataagggcaaggaaatatttatgtgactgcagtctacctattaagaaaacattgcttgatgtagttctagaatttgaggaacccttattttaaagataatggctaaatgcatttactgcatgttttattgagctccagtgaaatcggtcacatcttgtagtttgtcctaattaatagccaccccagaatgtaatgtcttctgttaaaaaaagagaaaacctgttcagctggttcagctgtcttaacctaaccaaattcatattttaactttgagtatggtaatgactaccaaattacagatattttagatactattttcagcttctaaaaggtttgggcattgtttaaata

SEQ ID NO: 70423 - DNA, 2604 bp, Homo sapiens
ccataattcttcaaagtgaacttgtatctggtaaattcttacagattaaatattaatacgtattgttgtggtgttagcctataaatttcagtcattattttttgtatataattaggttgtattaaagatgtatacagcattagggtattgaaaattatcttacctgattatagatttccaacattcttttgctgacattaatataattggaggtaattcgtagaccctaaatattatataagaaggaaaacattttattctataagtactgactgaaattttgcatttattatccactgaattcagagtcaccatgtatgtattaatggtaaggcatgtactactttacaatttaatattatacaacactaatattaaaacggttaatatttaggggatgcataataaaataatcttgctttctttttgtgacaatcgtgaaaatttgagttggagccaaatgtgcgtcatttaacaattcctgaatatccaattcatttgtaactttccttatgaataacctcattgcttgctaaatgataaagattacatttataatagtaaatatgctttaaaactttactcctttgttatttttgaaagagatatttaattccaaaggtatttataaatttggtaatcaataattacaattttgtcatacagcctgactgaagtattttggctaaacgtacactgtaagatagtcagacttaagtaaaaatacaactcccactacctttgtgatgaaacataaaagaggagccagaagataggtttttgtcacctgggttctttttaaaacttaaatttagtaatattcatttttaatttttttttaaatgttctgcccgtatagattgctttttagaggtactccatatatatgtgtacatgtgtgtttgttggttttaataattctaattcactctccttataaattatagattagatgttatctcctcacaaaatgtttgttgatattaaataatagctctgaatttgaataccaatgtttagtggctagcaagattattagttcagtaggtatgcatactacttccttagggagaatgcttaacaaaacttaggtaagagatatctgtcttgaaaatgcatatttacaaattctttgtagacccacctttgaatatttgaactctcattttcaatattcattttaaagacagcatttcttgtgactgtcacctcagcttcagtgctttttttatttttattttttattttttggtgggaggtggtacctggagtgcaagtcattttgacttatttatatctctgcagtttaagaaatcatccccattattttttcgcccaatgtaaaaaagtgaattccctattggagtatgcatgaaattggatgactgaaagacaaaagcatcaaaggaagttgacattttttgctcttctttttggagtaaagtttaatagattattgagttatgtttgtatctcttaatcgtgttaagaatatatgttgcattctcattttgttgcatgggaataaacctacacagaatgaatcggtagctgtgtgaataacttgtatttctatctatcatatataatcatttggaggggaaggatttatagttaaatgattgaatgtgaattgtatatttttgagataactggagaagattcatgtaaaagaaaaaaatatgtcagttgtgggaggggtaaacttttttgtccacttcattttttattcactgtaaatttctcccttgtgtgtgatgtctggcagacagtcttaattgaagaaagtagaagtgggtaggaagaatgtttcatatttaataatttctgttgcaaataaagtatgccagtctagcccgcgaaaatggttacgaggaagactagagtatagaacaattactttttgttttttgttttctgtgtatcatattgaatatttttgctgctgttgatatatttacatgttagtaattttgatggcttttggataattccactctagagggagacgtggtgggcggtccttcctgtgacacgacccttgagtgacagttctatttgattgcctccggtactgtgaggaaaggacacgactctatggtgaggactgatggacatacattatctgagaaaagaaactaccaggtaagaccagtctttcttcttttttctctattggtcttatagctacattgaaactgttcaaatgtgttatatgtaattggaaccagcaaattggttacacctcaatttgaaaatttgggtttataattttaaattaagtactggatttgatagttgaaatagttgggaacacttttcaaaataaagcatattcataatgtatattttttagtgtcaaatcaggttttctgagatatttgtcaaaacttagattatttgatatacaagttatgacttcatgactgaattcaaaatggtaaaaacaaaagtgttgattgcttttacgtatattattcctggaagactaaacccgaagtcttgtgctatattttggataacaaagtatatatcacagaaatgtagacaaaattgagtagagtatagaagaaatagaaatgagaaacccagggtgcttagaga

SEQ ID NO: 70424 - DNA, 1037 bp, Homo sapiens
tctaaaacattgtatttttgtggaatatagtatgtcagagaactgtaaaaatgattgtattgccattttcttccccaacattaaatatcttacttccttttaattaactttaaaaatcacagatgcctattaccaaaacgttgaagaaaaatacggaatataaaatacagtgtgaaagtttgccttgacaactttactcttaacagtttggtgtgtacctcttcagatctttactagtgactatatagtgtagatgtgattcattgtctttgtctctaacaaatgtgtatttttctgcattgtacttaatggagctatttccgtttcccattctttcctctgccctcttccccagaagtaatcaatagttttaattttgtgtttcattctttatatttttataacttattacatatatgtttttcagtatattgaggtacatcttttttatgtattgtgtggcaattttttggaaagtggtgccccatattttattattttgagtaggaaaaatcataatttccagcccacttaagaccctaaacaatttcctagatatagctaaagtactcaacacctacttgataattcaccaaggatttctgcataatacagagtatttaaaatacaaactacttaatataaacagaaacaaatgaatcactaagtatatttccatttagtatgtactgtattcagataatactttttcttttatactgcaataaaattgtaattgtaaataaacagttaagtgtatttcctttcttttattgttaagtggcacattattgaacatgtttctctctctgaagtcaggatgcatcttacagctgatggtgacttcaagtcatagttgtgacaaacagtaccagcaccaaagcatcttagaatctatgatatatagtatgttaaagatatataatgaatataaagaacacttaataaaataaaatcatagctgagtgtagtgctgtgcacctgtagtcctagctactggagaggctgaggcgggagattagcttgagccccagagt

SEQ ID NO: 70425 - DNA, 1037 bp, Homo sapiens
taatttcagaattaaaatttttttccatctattgaggttgtgtttgagatatattgagatattcttcatagtcttttaaaaaagattttttgttttgtcttccatatttaatctacctgaaattgatttttgtacatggtgttagaagtacagtttcctttcccctgcacctaaattatcatattagcattgtgtaccaatttattctaacctccttaactattcagtagtgctagctctattgtaaatcaagtttctctttatatgcatggatttcttatgtctctgttaccttgatgtgtttgtctgtgcctataccaatatcatgttttcttaaatactaaagctttgtgttaaatcttcatgtctgtctgtcaacctttttcttcataagagtcttgacttggccttttgctctgtgacaaatttagaatattcatgagaatgctcccctccaacacaaaaagaagtattgagtttgtaagtggaattgcattgactttagttttctttgtggaagaatcgataagtttatgtattctttcatgttttctctcaaagttttatatttttttcataagggacttagaaatctttagtccaatttatgactacttttgttgcttttcttggttgtaaattaaaaaaaaatttttagttataggtgttattgaaatatagttgacttttaaaattgatttttgtatctcaatgttgctaaactttttaatttttataatttatctgtaggctttttggggggttcatataagtaaacacatcctttggaaatgacagttttgaaattgtcaccagttttgaagttgtcatcattaaataatatttgatacaggattttttttatagatatactttatcagggtaaagaaattgttcataatgctaccttatatatttttttcctctgtagcatctttttcttcttaaggttgtttactatgtgcgttttccccttatttggtcagacttactagtgattcgtcagttttactaggggtcaaattttagcctttatt

SEQ ID NO: 70426 - DNA, 2486 bp, Homo sapiens
ttacacgtgggatttgttgagcttcttgaatttgtatgtttatacaaatttaggaatttttttcatccattatttatttgaatatattctctgtcttcactgtcctttgaggactccaattacgcatatacctaattgcctggagttgtcccatagcttactgatgctttgttcatttttttctttctttttttctcaccatgctttagttaggatagtttttattactgtttttttaagtttgctaatcttttcttcagcatgccaattattctgccttcttttacatacaaaatgtaattataactccttgcatatcattgtctactaattctgttactcatgtttactaatagaaactatgtctgtttctattgagtgttggtttttttttcctcctcattatctgttctcttttagggcttctttgcatggctggtgatttttgcttggatgccagtctttggaaactttatcttgttgagtgctatataatgtttgtatttctgttaatattctttagatttcttgtggttgcagttaagttacttataatagaagccatttgatctttgagacatccttttcttttttttcttttttttaggtcttgtttaacagaaccagagtaatctttagggttaattttcttccaactacttaagcaattcttttctgaattatgtaaattatgtttttctactctggctcataggaaaataaatgattcccagccctgtctgggccctggggattgttttctctgtttctttcaggtggccttttttttttgttttttttagcttctggtagtttccttccatgcatgtgctaatcagtacttagctgaaatctcagaggaaccctctgcatattttcagagatctttctctgtgccagtcattcttgtttagtatcccagcctattctggctgcctttaattgccctcttctccacttcctcaattcacaaagattgctgggctccaccaatctggaatccctctccctcactgcacactgaaaattctttcagtcttataagcaagggtagttgttgagccctcaatgattctttctctggtctcaaggattattgtcctgcacggcctgatatcctgtgtctgaaatcaattgtttaatatattttgtccattttcaagttgttttaggtgggctgctgctacaactaatactaccacactactctctcggttggaagtgaaagtcttaatgtttcattttttaaaattattttttcttattaaaattttttttatagagacagggtctcactatgttgcccaggcttgtcaagtgatcctcccacctcagcctctcaagatgctgggattacaggtgtgagccactgcacccttatttcatttttaaaaactatattttggttgagaagatgaatgaaaaccatccctgataaagagaataagcttttgtgtcaatattcagataaggcttggatgctttctcttgtataaaatactatacagtgtgcaatatacacaaatttcagaccatttctcagcatttaaggtcatttagaatgaaaaataaaacagtacaggtcagtaaatgaattccagttcttatgtagaattgtcatagtcctgattcaatttaacttaaaaattggactgtttcctctgaatttcctgattcccttaagattccctagaatccagtaggcccatagatacagtggtcattcattttctcagctgtcaggtaaaaattttaccaataagcatttcttactttaaaaaaatctgtgttgtatagcataaaatagtatattatctctgtattgttttatctggatcagtaaattaaagacattataataaatgtgctaatgaaaatataagatgttttcaaggaaaaaggaaagacccttattagggccaaaaatgctaccggcacatgaaattttacacctattcttttctaccaaggcacttttctaaaggcactgtgataaaactaaaacaaatgtgcttggtagagtgaagagcctttagtttgagccactagtcttcacattctacctgaatcacttgggtccatttatgtaaagtctttgacaccgtgttcatagttaacagtgaaacctttaaaagatttggtttgctttgttaaagcatttccattaaatagagaaggaaagtagaaaattaccattaaaacaccatggtaggccaggcgtggtggctcacgcctctaatcccagcactttgggaggctgaggcgggcagatcaccaggtcaggagatcgagaccagcctggctaacacggtgaaaccccatctctactaaaaatacaaaaaattagccaggcgtggtggcgggcacctgtagtcccagctacttgggaggctgaggcaggagaatggcgtgaaccagggaggcggagtttgcagtgagccgagatcgtgccactgcactccagtctgggcgacagagtgagactc

SEQ ID NO: 70427 - DNA, 2591 bp, Homo sapiens
gtggctttcagaatgcataacttcagtctaatgagaaaacatctgacaaaccccaactgtgggacattctgcagtgtgtatgatataacatcaatattatgaaagaagaaagactaggataagtctcggattggagaagactaaggaaatgtaaaactaaatgtaaggggtgggggacaaagtgttgtaattttaaatacacaaggaattccttactgagatgacttcacacctgaagtaggtgaagtaggaagccatctggatgtctagaggaagagcattcctggaggataacaaaggcaagggcttggagacaggagtatgtccgatgtgtttgaggaatagcaaggaggccagtatggcaggagcacatgaagagaaggggagaatgctaacaggggagattagagataacaaagagtaaggtcatgaaggccttggaggccttggtaatggtgcaggagtccattgtaaatgtgtttcacctctattccgtttgatttctgatgttcttttattctgagcctgaaggggataaagtgtataagtataaaatgtaatacctaacatctagcactgtgtgtagtagatgctaactcagtgattattgaattagtgtacatggtgagatgtttagaaacattttaaagatcatgtcttcccttgctaaaggaatacttttcatttttaattacttcctgtaacataaattaggattctgatacctctgtatatttttaaaatgtaaaggttttaaaataatttgtcaccttcaataatatctatttatgctattgaacagatgtcttaaataagcttctatttttattagttttagtatttgtaatagagtttatttttctttgaaaataactcactttttatattttcaaggattcaacatttttgtaaaagtgaattgatttcatatcttttttttttttttttgagatagagttttgctcttatcacccaggctggagtgcagtggcacgatctaaactcaatgcaccctctacctcctgggttcaagagattctcctgcctccgcctcccgagtagctggggttacaggcatgtgccaccatgcccggctaattttgtatttttaatagagaagggtttctccatgttggtcaggctggtctcaaactcccgacctcaggtgatctgcccgcctcagcctcccaaagtgctgggattacaggcatgagccactgtgtctggcctggatttcatatcttatttaaatcctatattcagattgttttgttttaaaatcttaaaatttttctctttattatcttgtttggttaaagtgccaggttttttttgatggaggggtccttatttgtttttatcagcatggagcagttaagaaattcactttttcccaaggattgtacttatatcagagttatgtgtaggttttaaaagttcactggtccacctttacgaattttaagtacatccatatagtacaactttaattctgcttgttgatggtgttaatgtgtatgagagccttagatttaatgttgagtactcaagagagcaagagagtgtacaaggagtggataggcacaaagtatttgaacacactgtcttacatgttttcataatggccaggtaagctctgtctttgcattttctggaaaagtgtgcaagtttgtggtgagcactgcttttttttttttttttttttttttttaaacttagtactttgaattagtctgaaagatgaatctgggtttggccagtaatgaagaggtgaacagggagtcataatgttgaaactggacattcagatctttatagcatgatttccttatttttcaaagagcggaagaatcccatcgtttatcatgttctggttggactttcttactgtttgctggagttgaacttcagagctatggcgtcaaccctgctgtaatatctcaggggagctcctagggtggggctggtgccatggctcaccctccaacctttccttcttcacttcagcctccagctctgagctttccaatccccagagtagcaaatgttgaaagaagttgcacaggtaagtatgtggtggggaaagccgggggaaaaatggtactgtcatcagtattttgagggtggatgttgggccattttatcaatgagtcattttgttagtttagaaatataatgtttgttatcaattatttttctcataaaactcataaattatttaaaaaatagtgaagaaataattttaattcttgttagatgtgaaataagaaaaaaaccttaataaactattaatattataatgcaaaggaaggttcttacatttttttaaactttatattctccacagtgtatatagcaggtccagaaaacccatgttcaaaaaagaagctaaaaaaaaagttggggaaggcctaagtccatagactataattttgccatatgtaacttggtctcaggaggaggcaagttttagttttcttccactagctttagatgtgctattttttcctgaggtattaggcaggtagctatgttttaatctttacagaaatagaaatttcaaacatctttttccttgaagtcttgacagg

SEQ ID NO: 70428 - DNA, 2447 bp, Homo sapiens
aagtatgtgagggttaaaagagattggggttctagtgtatttggtatttcaggtctcaaaacaagtcatcaaaatacagacttcccagcagtttgtctccctttttttcttgagttttttagataactggacgctctatataaacacatctccctcagcaaagtacatcccgtttttttctcaatatgtattcatattcccttccttcctccctctttatcagacccatctttgcctaccgtcttttaaggatttaaaatattctcattagaagattttccttctgtatgcatagaggatttgtttttattctaaatgtagagattttctactgttatatgtccttccatttgtattttatagttttacatcctaatatttaaagataaagtactactttaattttaggctctattatgtgagttctcaactccaacttcttactgctcataagaggtactaattatatttagttctttagtatatgtgtacttttttcctatggattagcactttttgaataattagaattttggttttaggatgatgcacttagcttttaaagcttatatattaattgttcaaatgtgaatctatataaagcatattggtgcagcacattttaagattctagaaaaccacaaaatctgtttattcatgttgaaacatacagaacatattctccctagatcagagtcaaacttgtggaggtatttgtagcattttggtaacactccctagagaatttgtagactttgggggtgcatattaagggataacatacatggcttttcagaatattttctgaataaagcagcttcagacaccagattttagtttttggattaggaaagagtgatgtgtttttccaccctcccctcccccaccaacacacacacacataccctccccatctttcagatataggccatcttgttttattggatgagccccccaaaaatacacagaaatatgctaaatatttctgtaaaccttggaaaggactctgccaggatatttatctactctccaaaatagtgattgtggaagtgtttgtataggtccctagctttctactaaagcctatttccaaccagtcatagatttttgtgtgtgtgtgtatctacatgttaactatctttggtattcattgaggccttttttgcttatttatggttattctgcattggctaaaacaatgagttgctcttatttgtttccatgctatcgatttgatgatttgtaattctagactttaaaatttatctatatcttcacttttcttagatccatcctaagcagattcatgaacttttcattatacctatatcatattaaaaatatgaaaccatagtattctagaactcggaggacttgaatttgtttctcacatgaagagtttttttttttttggtaaagatttccaggtattaatatctttgttctttaagaagctagaatttttttgtgcagtgtaggtgcctttctgtcctttatttaagcccccccccctttttaaattgtttttcaagaattaaataaaattagaattatttatagtagttgcgaagcaggataagcagtttaaaatcctatcacaaaaaatactactgaaacaaaaatatctttgttaacaaatatttccaggttgtaacaatataatatttgatatacgaatattctacttccatagaatttgggcagtctgtgagatttttacctatcatgttttccctctaaagggcaattataaaaacgctagattatcttcaggtattaggactcctcatcattggtttcagatgttaattggctacaccttgataaaaggcagataagtgttaatggcagttggctgtgattttatattaagtttctgcctattttatagccaagaacttgtgcatatttgtatattgtttgttgatattgaatatggaattcagagagaaaataagaactcaaattctaaattactcagatctccattaggaaaacagtgcctgagaaacactttttcccccttctcaggtactgtatatcttgcagttagcagtcttcatcttgtataatgcaagcagactacaaactctgtagctgggagtgaaaatttgttactcagtatgaagcagtgaatgagacaattgattttatcgtgtgacacctgtaccaacatgttagcagtaaaactcctccctacattagagaatctacaataaaaagttgctactagggaattgtttttgttttaacacaagttctagatgtgccctacatatgtaatgctataatgtctacattagagctattataatgaaattaagagtttggttataattatcctaattccttgaaaggttaaattgtgttcactatacttaagtacctaaaaatgttagttctttgggaacatggaaaccaggtatatatagcttttagtagttatt

SEQ ID NO: 70429 - DNA, 7633 bp, Homo sapiens
ggttcaaaacccatctccgcatttatcagatatataaccttaggaagttaacctaacttctctggtccttagctacaaaatagggatagttaattgttcttactttctagcgttatcttgataattacataaataaattttaaagcatttagaatattccctggcacaataatttattattattttatagttatgataaagtgttttcagagactgtataaaacaagagtcctaatttagtgtgaaagtttcaaagaatgggagaaagggcattttaagtagccgtatcagcatatgcaaagaccgggacatggaaactaacttctgttctgagtaactgaaggtatggcaagggtttggtggtgtcaggggacttaggagagaagttagaggttacaaaacatcttataagccttattgatttgggagtgctgttgaggaatttttatcagaaagtccatgaagataaataatttttactttaaaaaatcactttgatgtgggagagtagaattgaggggaagaagaatagattaataaagacctgtttggaggctattggagtggcttgttctagtgtattattagtccgttctcatgctaacaaagacgtacccgagactgggtagtttataagggaaagaggtttaattgactcacatggctggggaggtctcacaatcgtggcagaaggcaaatgaggagcagtcacgtctcacatggcggcaggcaagagtgaatgtgtgcaggggaacccccctgtataaaccaccagatctcatgagacttattttttttttaattttattattattatactttaagttttaaggtacatgtgcacaacgtgcaggtttgttacatatgtatacatgggccatgttggtgtgctgcacccattaacttgtcatttagcattaggtatagctgctaatgctgtccctcccccctccccccaccccccaacagtccccggtgtgtgatgttccccttcctgtgtccatgtgttctcattgttcaattcccacctatgagtgagaacatgcggtgtttggttttttgtccttgcgatagtttgctgagaataatggtttccagcttcatccacgtccctacaaaggacatgaactcatccttttttatgactgcatagtattccatggtgtatatgtgccacattttcttaatccagtctatcattgttggacctttcggttggttccaagtctttgctattgtgaatagtgctgcagtaaacataagtgtgcatgtgtctttatagtagcatgatttataatcctttgggtatatacccagtaatgggatggctgggtcaaatggtatttctagttctagatccctgaggaatcgccacactgacttccacaatggttgaactagtttacagtcccaccagcagtgtaaaagtgttcctatttctccacatcctctctagcacctgttgtttcctgactttttaatgattgccattctaactgttgtgagatggtatctcattgtggttttgatttgcatttctctaatggccagtgatgatgagcattttttcatgtgtttttttggctgcataaatgtcttcttttgagaagtgtctgttcatgtcctttgcccactttttgatggggttgttttttcttgtaaatttgttggagttcattgtagattctggatattagccctttgtcagatgagtagattgcagaaattttctcccattctgtagaagcctgttcactctgatggtcgtttcttttgctgtgcagaagctctttagtttaattagatcccatttgtcaattttggcttttgttgccattgcttttggtgttttagacatgaagtccttgcccatgcctatgtcctgaatggtattgcctaggttttcttctagagtttttatggttttaggtctaacatttaagtctttaatctatcttgaattaatttttgtataaggtgtaaggaagtgatccagtttcagctttctacatatggctagccagttttcccagcaccatttattaaataggcaatcctttccccattgcttgtttttgtcaggtttgtcaaagatcagatggttgtagatatgtggcgttatttctgagggctctgttctgttccattggtctgtatctctgttttgataccagtaccatgctgttttggttactgtagccttgtagtatagtttgaagtcaggtagcgtgatgcctccagctttgttcttttggcttaggattgacttggcaatgagggcccttttttggtgccatatgaactttaaagtagttttttccaattctgtgaagaaagtcgttggtagcttgatggggatggcattgaatctataaattaccttgggcagtatggccattttcacgatattgattcttcctacgtatgagcatggaatgttcttccatttgtttgtatcctcttttatttcattgagcagtggtttgtagttctccttgaagaggtccttcacatcccttgtaagttggattcctaggtattttattctctttgaagcaattgtgaatgggagttctttcatgatttggctctctgtttgtctgttattggtgtataagaatgcttgtgatttttgcacattgatcttgtatcccgagactttgctgaagttgattatcagcttaaggagattttgggctgagatgctggagttttctagatatacagtcatgtcacctgcaaacagggtcaatttgacttcctcttttcctaattgaatgccctttatttccttctcctgcctgattgccctggccagaacttccaacactgtgttgaataggagtggtgagagagggcatccttctcttgtgccagttttcaaagggaatgcttccagtttttgtacattcactgtgatactggctgtgggtttgtcatagatagctcttattattttgagatatgtcccatcaatacctaatttattgagagtttttagcatgaagagctgttgaattttgtcaaaggccttttctgcatctattgagataatcatgccgttttttttctttggttctgtttatatgctggactacgtttattgattttcttatgttgaaccagccttgcatcccagggatgaagcccacttgatcatggtggataagctttttgatgtgctgctggattcggtttgcctgtattttattgaggatttttgcatcaatgtttatcaaggatattggtctaaaattctttttttgttgtgtctctgccaggctttggtatcaggatgatgctggcctcataaaatgaattagggaggattccctctttttctatttattggaatagtttcagaaggaatggtaccagctcctccttgtacctctggtagaattcggctgtgaatccatctggtcctggatttttttggttggtaagctattaattattgcctccatttcagagcctgttattggtctattcagagattcaatttcttcctggtttagtcttgggagggtgtatgtgtcaaggaatttatccatttcctctagattttctagtttatttgtgtagaggtgtttatagtattctctgatggtggtatgtatttctgtgggatcagtggtgatatcccctttggcattttttattgcatctatttgattcttctctcttctttattaatcttgctagcggtctatcaattttgttgatcctttcaaaaaaccagctcctggattcattaatttttttgaagggttttttgtgtctctatttccttcagttctgctctgattttagttatttcttgccttctgctagcttttgaatgtgtttgctcttgcttctctagttcttttaattgtgatgttagggtgtcaattttagatctttcctgctttctcttgtgggcatttagtgctataaatttccctctacacactgctttgaatgtgtcccagagattctggtatgttgtgtctttgttctcgttggtttcaaagaacatctttatttctgccttcatttcgttatgtacccagtagtcattcaggagcaggttgttcagtttccatgtagttgagaggttttgagtgagtttcttaatcccgagttctagtttgattgcactgtggtctgagagacagtttgttataatttctgatcttttacatttgctgaggagtgctttacttccaactatgtggtcaactttggaataggtgtggtgtggtgctgaaaagaatgtatattctgttgatttggggtggagagttctgtagatgtctattaggtccacttggtgcagagctgagttcaattcctggatatccttgttaactttctgtctcgttgatctgtctaatgttgacagtggggtgttaaagtctcccattattattgtgtgggagtctaagtctctttgtaggtcactaaggacttgctttatgaatttgggtgctcctgtattgggtgtatatatatttaggatagttagttcttcttgttgaattgatccctttaccattgtgtaatggccttctttgtctcttttgatctttgttggtttaaagtctgttttatcagagactaggattgcaacccctgcctttttttgttttccatttgcttggtagatcttcctccatccctttattttgagcctatgtgtgtctctgcacatgagatgggtttcctgaatacagcacactgatgggtcttgactctttatccaatttgccagtctgtgccttttaattggagcatatagcccgttcacatttaaggttagtattgttatgtgtgaatttgatcctgtcattatgatgttagctggtgattttgctcgttagttgatgcagtttcttcctagccttgatggtctttacaatttggcatgtttttgcagtggctggtaccggttgttcctttccgtgtttagtgcttccttcatgagctattttagggcaggcctggtggtgacaaaatgtctcagcatttgcttgtctgtaaagtattttatttctccttcacttacgaagcttagtttggctggatatgaaattctgggttgaaaattcttttctttaagaatgttgaatattggtccccactctcttctggcttgtagagtttctgccgagagatcagcttttagtccgatgggcttccctttgtgggtaacccgacctttctctctggatgcccttaacattttttccttcatttcaactttggtgaatctgacaattatgtgtcttggcgttgctcttctcgaggagtatctttgtggagtcctctctatttcctgaatgtgaatgttggcctgccttgccagactggggaagttctcctggataatatcctccagagtgttttccaacttggttccattctccccgtcactttcaggtacaccaagtagatttggtcttttcacatagtcccatatttcttggagactttgtttatttctttttattcttttttctctaaacttctcgctgcatttcattcatttcgtcttccatcgctgataccctttcttccagctgatctcattggctactgaggcttgtgcattcgtcacgttctcgtgccgtggttttcagctccatcaggtcctttaaggacttctctgcattggttattctagttatccattcgtctaattttttttcaaggtttttaacttctttgccattggttcgaacttcctccttagttcggagtagtttgatcttctgaagccttcttgtctcaactcatcaaagtcattctcggtccagctttgttccgttgctggtgaggagctacattcctttggaggaggagaggcgctctgctttttagagtttccagtttttctgctctgttttttccccatctttgtggttttatctacctttggtctttgatgatggtgacgtacaggtgggtttttggtgtggatgtcctttctgtttgttagttttccttctaacagccaggaccctcagctgcaggtctgttggagtttgctggaggtccactccagaccctgtttgcctgggtatcagcagcggtggctgcagaagagcagatattggtgaaccacaaatgctgctgcctgatcattcctctggaagttttgtctcaggagtatctggccgtgtggggtgtcagtccgcccctactggggggtcagggacccacttgtggaggcagtctgcccgttctcacatctcaagctgtgtgctggtagaaccactactctcttcatagcagtcagacagggacatttaagtctgcagaggttactgctgccttttgtttgtctgtgccctgcccccagaggtggagcctacagaggcaggcaggcctccttgagctgtggtgggctccacccagttcgagcttcctggctgctttgtttacctactcaagccttggcaatggcgggcacccctcccccagcctggctgctgccttgcagtttgatctcagactgctgtgctagcaatgagccgggctccgtgggcgtaggaccctctgagccaggtgcgggatataatctggtgtgccttttgttaaacctgttggaaaagtgcagtattagggtgggagtgacccgattttccaggtgccattcgtcacccctttctttgactaggaaagggaattccctgaccccttgggcttcccgggtgaggcgatgccccgccctgtttcggctcacgcatggtgcgccgcacccactgtcccgcacccactgtccggcactgcccagtgagatgaacccggtacctcagttggaaatgcagaaatcacccatcttctgcgacactcatgctgggagctatagactggagctgttcctattcggccatcttggctccaccctcatgagacttattcacaatcatgagaacagcacaggaaatacccgccttcatgattcagtcacctcccacggggttccttctgcgacacgtggggattattacagttcaaggtgatatttgggttcagacacagagccaaaccatatcagctaggaaatgaccgtagagatgaaaagatattgatgatataaataatttcaataaatatatagggttggtttgatcagcttgaattttaattgttgaagatcacaaaggttacagacagcatttttgagagttaaagtgacatttttcagagattaccatgaacagtaacaactgtgaatagccaaaattaagctgaaacataagatttgtgttgggttctaagatagttagtgctgcaaagtcatgttgaggtgatgatctcagggatttttaggtgtatcctctgtgtatcttcaggcctgcctcttacttcgttggttccctaattgccattcatcctgcctgtatcagggaccactttacccgtcttctctgaagttcttggttattttatctgaagtttgtttttttttttttttttttttggtaaatttctgtgattattctgatttaccacatttggctttgaaatactgtatttaaatgttgagaatgtcatgccttaggaattcatagctagtctaaactaaataatgaaggaggaatatactgggaaaatccagccaacttaagtggctccattacgt

SEQ ID NO: 70430 - DNA, 1026 bp, Homo sapiens
gggcttttttcaactaatgtgtgttgtggctttgttgataattagtgtgtagtttaatagcttatggaataatgtcatctaattttctgttatcttattgcgcttttagctatgtgctatgtaacttataattgaattattatttacacaggtttctatttaagtattgaccttgtaaataaagaatttgggatatatttttggtagtatcgccgcagaaacgaaaacctacaatttgtgtgtattgctgtgattatataatgaaagttaagtttgcttggaaaatgttaatgaaatatttattactgatgaaatgcatttattctaattaggaagataggaagctttcagactgaaatctaaaagtatataaagagaatgaatgacaaagagatatatgtcttctcaaaagcagaaatactatatgtctacattttaaaatcagaattagtatatatacttacacacatactcacaaatgttggccaccattctgatccagctggttggcacagaagtaacagaatggtttgattcacaaaaccttttttaaaaaaacattaattaagaacatagtatggcataggaattaagaacttggactctaaagcaatacaaatatgtgtgtttggatcctgactttgcctgttagcaagaacttctccaagtctcagtttccttttctgtaaaaataggagtaataatatattggctaccttatacattggctgctgttgctgttacttttttaaaattacaaaatagcacaggtaaattatacaaatttttaaaaatacacttgaagaaaaattacctataatgctatcagaaataattgctaaaattctaattttatgctttaaatatttttattgaaaaatacacaattatttaaatcttctaggtcatacagacatattttccatcaaaaagtttgtaccagtttttactgtaatcaccactctccatgccaacaagaataccagcaattacatttaagtctttgctaatagacaagcttattgt

SEQ ID NO: 70431 - DNA, 1056 bp, Homo sapiens
ccctggaaatcctactatgtaagtttttatgtcagctacctgatttgctagctgtgtgtcttaggacatcagtctctgtgtgtctcagttttctcatctgtaaaataggaacaatagtacctagctcatgaaggattttttttttttaagtgggagaatagttagtgtttgtgaggggggcactgaagtgactgctgtaattaagacagactgtagaaaataggttagcaatgaatattgaaaacctttaaaatgtaaacattccttgagtcagtcatatgtctttccgtaaatttgtacttcagctgtaacctgacattcagacaatataatataatgccatacttgtttttaacaaaaaatttgaggctcaagtgtttaaggaattaagtacattgagtattacactatttttcaaatgttccttatgtaagcttaagaatattttaatgaaaattatttgaaatacctagtagatgcatatcatcagttacctgatttgtaagctaccctgttctgtgacttaatgactattttattttactgtctgcctcctcccttgccccttttctcttttgttcttgtttgtttgtttgtttgtttgtttgttttgggggatattttgagacagaatttcgctcttgttgcccaggctggagtgtaatggcacgatcttggctcacagcaacctccgcctcctgggttcaagtgattctcctgcttcagccttctgagtagctgggattacaggcatgcatcaccacgcccggctaatttttgtatttttagtagaaacggggtttctccttgttggtcaggccggtcacgaactcctgacctcaggggatctgccctcctcagcctcccaaagtgctgggattacaggtgtgagccaccgtgcctggccttgttctttttaatgtattaccttctcatagttttctttttttgtgcctgtttgctagatttcattagtttcatgttttaagttatccgttttccaattttaaaggttctttagcttctgtctagatctggaactcttatgtgtgtgca

SEQ ID NO: 70432 - DNA, 3035 bp, Homo sapiens
gtataatgaaaagcaaagttttgacaggtatcagaatagtttgtcataacactttaccttccaaattgattcgaagtgggaggatgaaactaattttgtatacaagcatggtttccatttacttttttctgtctatcttttgtggcttttctcttttttgctatggaacacaattttgttaatatagaattagtagataaaagttattctgtattaacagtttctccaattaaaccaagaaacgtatttccaaagcttattacataaaaaaattgtttatctacaaatatttatcctagttgttgaaggactattattagctagtaatttattctgcttaccctgtgttttagtgtggctttcacccttctggtaacccttactatagaaatatctagctattttaaagctaccttttatttcttcagagcaactgcaaagaacttactttaccttttggaagaccaccgtttatcacagcagaaagtagatatggattggagaaaaattgtatttgagaaactaaggttattttgtaaaggataatggcaattactatacttataatcagctatctggattttttaaaattctggtctaatttttttagcctacaaatctgaaattctaactgggctaagatatggaatgggttatgtttaaaatgcagttatatcattggtatgacagacatttatgtttttgtttttaaggacatacaaagattaatacatgagaaaatttattttcattagaaaaagaatttttaaggtacttactagtttaaaaagaagccatgtatggcaaacattttccattggagttcagtatattaaataactatattcctgtaacattggtgaagcaacattttgaatgtatggcttactcttttaaaatgacattttaagtgttagatagagtacagaaaaattgaatcttagatcaactggaactgtaatgtttcaggtcagggtgtaattatgtttttccaagatatcgatctagaagctataactagtggaaaaagaaagagtctaggttgccaatttctatctgttaggacagacccgagaaggccaaataggtcattcagctggtaggtaatctgaacaaacaccttgtcagacagcagaacacaagctaccatgtgggtcttgagggttaaggttttaataatttaagtcagaatgacaaaacttaaggaactgagttaaatgaaggatggagagataaggaattagtaggtgagtgtagattagagatattattcttatggcaacttactgtaattgcacattgagattggtgtaactaaaagttcgtttcccaagtgcattgagtaccactattaattctgttcagttggcaaacttttattgtaatttgtgccattaaaaatgtgagatctactatctattgtatgttcttgatggttagaaaggttagaggtggaagagatatagaaggaagagtgccctctctagaagtaagagtcactgagattaaacaagaaagggagtttgtcttggaatagatacagaagtgcttaaacttagatttggctagatttgggtggaagtgattatgcagtgccatgaggtagccagaaaatgctggaacagagacctgtatggtcttcagttctagtatagtatgattgtatccaaatatgtaaataattggacttttcatccaataattcacgtgaatactgtacatggaatgataactatagaaaccaatgaacatactcttgtattcaagttgcataatgtttcctatttgttatatttgagtgtgtgataagctttcaggtgaattaagtcctcacttaacataagttttttgaaactgcgacttgaagcaaaactacatataacaaaaccaattttttgttctcatcaacattacaatggaatgaagttgaatgaaacaacactattcaaggacctgctgtatgtatttttgcctgaaatcacagtttccaagaatgatcagtggcattaagtgaagacttactgtacaccttataagcttcaagacccatgagctcccttaagctgtctcctagattagaatcaacagggaaccaggaattaatttctcctggatagtcaaagcattggaattaagtggttgatagttgcatttaccttttcttagttaccaacaggatctaggaccttgtaagattggagaaaaaggaaactgtcatttactgagtgctttctgtgtgcatattatcttataggcacctagcttagcaaaatatctgggtgaattcattatacaaatttgtgtctgaattctcagaggacccaggcatctagatggaagaagagctaaatctgtcagaatttctaagttctggactcctagcttgagaacaatgacatagtctcatgcttccagcagacatttctttggcctcctgctttaagaacacctatgtgaaagctacttgtttcatagagaacccagagcacaggtggggtggttcagaagtgatgctatcagctatgtaaataggtgcatgacatattttggttgctttcggaaattgtaggaccattgaacagatactaaatgcttagtaataagtacagagtgctctaggatttcttgctcttttgaacacatgttttatagttggggaagataggacatatttatatgtaaaatattaaataacagcctgtgatgctaacacatagattaaaagataccatgtgcagaatggtgtagacagacttttagggagcaaattctgtctataccattctccttgaggagaaccaaaaaaaaagggaagctatagtggtatggaaaaacttcaaaaagcaggtaggaattaaagttgacaaatacttatgggtccctaccatacatgttgtgccattctagatactgcagatgtgtggtagaagagatcatcctcatttatgccatctctgcatagtgtacctactgctatggtgttgctgcattatttattgcatgtcctcattgcctttgtatcctctgtacctcgc

SEQ ID NO: 70433 - DNA, 1384 bp, Homo sapiens
agctggctgctttgcaaatggaaaaggggacactttaaggcatcagttaaggactactctctcctgcccctataaagattttaggggactttatttaagtatgaatattcagggatttggttgctatgattttattttttcatgtaacttaatattttttatttctagcaaaaaattgaataaagaatgacgtattttgccataagtgtttaagtgatgtgctgttaatcagtttgtgcagtggaaataattaatggaataatttcttagatcatattctttaagggtttctgaaaaatgatcaataaggaatttgactaacaccctgccagataagaggtaggaatctatttagaatgtgttcgtatagtcctcctaatattgtgttgttattatcaattgttagattgaaagaaaaatttgactcaaaattataaccttttaaactttttttaaaatttgtttttattctttgtaaaaaggtgataaccttttttataagatgattataagaaggaattgagaggaagtagtatagtgctttgttgataagtgcccaataaattttaattttactgtccttccagtcacctgctcatatacaagctcatttatacatatttatatttttgcctgttttagtttttttatgccaagaaaaactccttgagttcttcccatttttctttttttttctttttttcagctgtatgtcctattcttggcataatattttagagatgatttttctgtgattgtttctaattatactagtgagagattagatttttttccccttgaccctattcagttgtgttagtttgactcaagcaactcaaagttaatgacttagtatatttagtttccaaaaaacaaatctttatatatacctttccagtgccattctttatgttttaaagaaattcagtttttaaaataaatttaaagtaacaattattaagtattcaggggttgatgatccaatttgaagtgatatattcttttttgatctttttatactacttcaacaaaattaaacttagactttttgaatttattagctgtttttgtgaagattaattttagaaagctaaaattaaacactgaaagtaagttactttattccatacggtctctgtccagttttagcactaaaatcagttcaaggatgccaatccctaattggccaaatagccttaccattcttgttttcttctccaaatttgtttttttgctggtcagataacttccaatttctaaaatattcctgaaatgataaatttttatgatacagcatagaataatatgtatgtggagacttgaaggagtcaaatctcaatgagccttttgtagggcttaacgattgttaaaagggggccaaaag

SEQ ID NO: 70434 - DNA, 1106 bp, Homo sapiens
ttgattttggaaagcacattaaaacattttgttgttgtggttgttagaaaaggattgttcttggattcgccaccaggcaaattttggttgatatgtcctctctttataaaataagttgattacctgtgtggtaagagttctaggtttatgaatagaactggagacatgtttgactattactactttgctttagttatactttgagtaccttctcaagtaagatttggttttgtgcattggagacttaccaacaaaagactttttaagatcacatctatagtatttgaaaaccgtatcatgtttagggattcaaaacaaaaaaacgggtttttgtactttttcacttctctttgtactgtctgttgcatatactttgcgaataagaggagttactcattttgttaggattttcaagctgtttgggtaatttgtatgagaattatgtctgaaatataacactttcttgcaaaagtagtatttaagcttgattgcctacatgtatatatatgtattttttaaatggagaaatgtaggggcaaaactaccttgatctagttgttatcatcatacctgtttgattcactttattctgtctagtaaaatctgaattaaaataggtttagcacatttactgtttaatcctcattccataaactccaggttttgcttttatttagatatctataattttactgctcttttaaattttaaaaaacttatttgtgaagggttatcaaaattctcatctccttgatacctttctaaccttatatctttatcataactttatcatatctttgtgcgttctcatagtattgggcattgaatgtataaatttttacctttccatagtttttcacattttgtttttaaaatacactttgcttaaattgtcaatgtaacatggatctctaaaaccctgcttatttctactattgacagattgtatttattataaattgttttcatctctgagcacttattccatgtttgatggtacctgtaatagcatcagcaattctaatatgctattaaacaaaaatttccattgactttctggctcttctctagagtgtttgttgttttgtcagctgcatgttttatca

SEQ ID NO: 70435 - DNA, 1369 bp, Homo sapiens
ttacgaaataccagttgtgtattaatttaaaattggggacaccatagactgtgttttcttttaagtatatgaaaggtaaactatatttagataagaatgatgtatttttgagcactgaattcaattttaaaacgcaccattcaattcaggtcactacatatttattgaatgtctattatgtcttcctgaacactaaagggcagaagacacagagaggagtttaacatgggaggagtatgacataaactcctgtgtccatgaggagtttatattctagttgggaagatgaatactgtaagagagaagatctattatgaaaagtaatatttgcaagctttaccagtaaagaagaaaaacaactatttagcaagaataatcttaacactaacctgcatatttttgaggttaggtaattcaggtatccaggaagttggctcttcaagtacacaaaatggtgccctgaatctgttttcctcaaggttcatatataaatttttgagtttttgttttttaactaatctgcctaaaatgttctggttctcatttgttcatggaaggactttagagaagttttcaagtaaagataaagaatagattcagaaaaataatattagtgttggttttgaaacatattgttattttatatggagaccaaaaatacacacttctgtttttcttcatctgaaagttagtgttcttactgtatatctaaaactattttctatgtacccagtatgtctggatttggaatgaacaggaatcaggcatttggaatgaataactccttatcaagtaacatttttaatggaacaggtaagcttattctggagctagtaccctacaaaaagtatgatagatttatgaaatataaagcaattcaacatactggtctttaaatacggtaggattttttattatgttagatggtagattttaattcagtgaaaaataggaataggattcaatacagtgaatagttgagagagatgtaaattttttttacttagcatggtaacgtagtaatttgtgttataacatcaggattatttccttaacacctggagagagcctacacattaacttagttagtatttatgcctcaaaatattttgcttcatagcttttactgtcctcagccctgtcactgtgagaactatagcttagactaggttgggtggtatgacattctggctatggagatccagattgaagagaacctttaaaattgtatggaacacttacgttttttcttaatagttttaataatactaatgttggcatttaacctttatgaattgttgattcagttttatgtataaaatttagttacatggaaaaccaactctgattttgacagtaaaaaattcct

SEQ ID NO: 70436 - DNA, 1697 bp, Homo sapiens
gccaggtataaatgatttatcctttacccttgtaatttgaaattgtcacctgtctttgaatgttaataaattaatggtgtctattgtttttctgtcaacaaagtaatcttgagataacagttactgtttgagattcttacagttgtgaaatttggagaaaactaaaaattaattgggaagtggcaaaataaattgaaaatggtaaaacaaaaattaaaagctatagcgcaggctaaaaggacggtagaaagttttcttcaaaaattaagaacccaaggttataagaatactaaaaagttaagaaattgagatgattaaaatagacaaagtagagaagttgggttaaattttaatttttaaaggaagccagctgattgttttaacttaaaatgaacaaaaatacatttaatttattctatatatatttattgagcgcctactgtgtaataggtaatataaacttctgggctttgtatcatatttctatatttcctatccatttaccatatatgggaaccctactgccaccctgttgtaccccaccctcaaaatgcgcacatgcgcacgcacacacgtttgtatatgaaagcggtcaattacaggtggaagtcctcagggcttctgcttcactgcctgtgcctcagctatatctttctggccatttgcaggaggcactatcattgtcaccatttgtgtgtaaccgaagcttcaagcattctagatataacctccatctgagcataatgaaaagacaagttatatcgtaacaatctccctcttgttagctcacaagctataattttaggttaccatcttccatgggggaaatatatgctttttattctctttgttacatctctaggatttggggtttctattatgctggttgcgtattcctttgctaaattgttcatggaattctttgacatgaaatcaatctgcaagtatcttttgagcacctacatacacctagtacagtgccgtgcattatttaggaagaaggcgcaatcatttcgaattatattatggttggtttttataatctcttaaaaaatatttgtagaatcaataaccagtgtcctttcttattatttagacggaagtgaaaatgtgacaggattggacctttcagatttcccagcattagcagaccgaaacaggagggaaggaagtggtaacccaactccattaataaaccccttggctggaagagctccttatggtaattaagctttttaatgatggccagtagaaagtttccattgtatgtgcacacacatatacatttacatgtacgtatacatatgcttgtgtgtgtacacatgtatgtttgcattttctaatcaggttagtgtaattttttcagaattgatatattagaagtgatttttcttcccagaataccatgatagcaaagttaaatgggaaaactttgtacaaaaacccaagaggaagtcctcattggtattcagaagttattttcttctgttatccctgccttagtttaccttaagtgttttattttgtggtctgccttttctctccttaattgatcacacattttttcaaaataatatattcctggtgattaataatgactgactatacattgaagatgtttttctgagccaaggtttttctcaacctccacactgttgacatttgggccaggtaattctttgtagagaggagatgtg

SEQ ID NO: 70437 - DNA, 1481 bp, Homo sapiens
cctcataggtccattttttcatccctttaatcattcccgttgctctccttggaccatctctagtttctccatatcgttcttgaattgtggagccccaaactggatattgttctccaataagggcccgactaatgccaagtatagtgggaggattatttcccagttcttgcatgttttacatctataacatggagtccaagaaaatctgaaataatatggagttgttttataattgattgcaatttgctcactctgtaagtcgctttcaagtagaatactgacatattcttttaaattttattttgttcatttgtatttgagagttaactggtatttataatatctagtcaaatatttaaataaaacaagcttttaaaccaaaattgttaataattaatccaatatcaaattaaatttttaagcacctacgcatgacatggattactgttgatttcccttgtattattttgtatgttgagttattaatcagtaaatgaaaatttagttcttcattgttaccctggatactaattttttgaagtacgctttcatagcattaaaaaaaagaaaccttttggtgtattatcatgaggaaagttaactttataatctgtagcaaaatatcataaatatcaattgcaattctccggattattttcattacatagttggaatggtaacaaaaccagcaaatgaacaatcccaggacttctcaatacacaatgaagattttccagcattaccaggctccagctataaagatccaacatcaagtaatgatgacagtaaatctgtaagtaactgagaagtgtgtatgtgagtgatgtagtttttcccttcagatttctcttatattaacaattacttactaaatactattacaaaactgttttatcttgatatctgtaataacctaacttctgaagaatgtggaaaagctttataacttagaagatagcctatttttttcctatttcatataggtttgcaaatttctgttgaacttctcagagttaatttagacttttattgtagtccctgtcagctggatcccatgaagtttgataatatagccttctaaggagctgtgtttttcttgagtaagttttctccttgaagaatttatacacatttttatacctgtgttgattcaaccaactcagcttcttctttctgacttaacaaatatgtttatttcttccacatttcactgaaaatagcttttctctgtgtgtgatgggagtttatatattattaaaataattgataaagaagatcggtaagaattaaaataagtacaaagttttaaagcttgtatgtctaacttatcttcaaggtagctttggtgattttaggtaatatactatatttagtttctcttttacatgaaagcattgaggagtgtaacttcaagtgtatcccaaagcataaagacctgagaaagagatagatttttttttttctgtgactgaagatctgag

SEQ ID NO: 70438 - DNA, 1032 bp, Homo sapiens
ttacaacacattttcacactttgttgggtcattttcatcaacatagaaatacattgttacttctctcatcttagaagaaaatcttcctttgatccaacctcctccgtaagttactttcccatttctttatttccctttgaagcgaaacttttcaaagagtcatctccatttctccgacttggtcttctcccattctctggtaagcccatttcagtcaggattttgtccctgccacttcactaaagctgcttttatcaaggtcaccaaatgaccttcatgttattaaattcagtggtcacttggaggaactcttgctccttgatacacattcttgtacttgaatttgagagcaccatttttacctcatcttcactggttggtctttttcagtttcctttgctggtacctcctccttttcttcttgacctcagtgtcattcctcttctctgcatttacatccttgatgatctttttctagtcttattgttttaaataccatatatattgaggaatcccaaacatatgtttccattccacacttctgagtttgagatttctacattcaattgccaattaaatatttcttgaatgatcaccccccaacttattctgtctacagcctttccaatctcagttagtggtaactctgtacttccagaaacttggcattattcttaactcctctttcttttataccccataatcaggcttttcccaaaatatatacagaatctaaccaaagctcactacttttaactgctaccacccttgtttgaatcattctctcttgcctgaatactccattagccagtcactgggggtccctgattgtccttataccccttcccgtacaatctcttcatataacagccaagacaatccttttttaatacattactcctctgctcaacacccagtaaatgtttgtggtttcattatgattaaaaaccccaaatctttttttttttttttttttttttgagacagagtattgctcttgtcgcccaggctggagtgcagtgatgcaatctc

SEQ ID NO: 70439 - DNA, 2688 bp, Homo sapiens
atgtgtatgtgtatatatacaacagcattctgagtgtgccttacagttctgtggtcaagtggatgttgatgtggacaggcaagtaaagggatacctttctcaatgtcttctaatacttgagtagataaaaggcaagaaatacaagatggagaggtctcctattttctatttgcggattgtgtgatttgctcccaccaccactgtagagctctttcgctccaattaccaaagtgttccagaaccttttcttattaccaatttgagaaatactaatttaggagaatttgtcacattggggctgctgcctgaatagggataacatgaatggagagaaaaattacattcagagaatgtgtaataaccaaataagtatttcgatataggatcaaataacgagataaaaatgttgttttgggacacttttaaggtttatttaaatgtgaaaatttgagactattgaacctatgttttacagtttggtaagcagttatgtttctaccttggggagagaaatgtaaagcaatcatctttcagacatctatttaaacaaactgaaaagccatttctttatgatttttgtattcatcatctgtgatttgctgaaagcatacaactgacttgtgaatcattcactgtcagatatagattcagtttaacattttttataagccgtctatatatttggcactctacaaggtgctttcatataccttcactcattttatttactttcttagtaaccctcataggtgtcattgtccacatttgacaagtaaagctaagagattttaaataactaggacacagtcatattaatgagtaataaaaccaggacttgaatacaagtcctagatctctgagcacaatgctattgttaggttcttttccccattgggtattaaatccttttagtggatcttgcttggaagtctttattgagcttttcttccagtcagcatatcaattagatgtatcagaaataattgtttaaatgacttcagtcatttaaatgaggaaattcccttttagaatcttaactacctatctgtgtaatcatgtaataacagttatctactacaaagtggggagtttctgtttatctctccattttttctttagtagtagcaactatatattaggatttgcagatttgttttatatttcagaataagttatttttctttttcagctggctgcaataaaacttggccgatatggtgaagaccttctcttctatctctattacatgaatggaggagacgtattacaacttttagctgcagtggagctgtatgttcaaagtattttaatcacttttgtattatagtggatcttgactatgctgaaaacatctttaagtgatgatggctatctttaaatggaactatttctccatcaagaaatttatttttacattattaaagtgaatttaatttagattaaaaccgtatcttaaccatggcttcataatctatatacctaaaaagaatttcaaacttaatgctgaagctgggtgcagtggctcacacttgtaatcccagcactttggtgaggtggacagatcacttgaggccagaagttagggacagcctgggcaacacagcaaaccacatttctacaaaaaataaaggaaaatattagctaggtgtggtggcacacatctatatagtcctagctacttgggaggctacagcaggaggatcgcttgagcccaggagtttgaggtgtcagtgagctatgattgtgccattgcactctagtgtggctgacagtgcaagaccctgtctctaaaaataactaataagtgccaaatttgtaagaagacagaattgacataactcatggatttggtgaatctaatttttgtaaatatgtgaattatatgatattcatgactatgttttttattccttgtggaaccatatgtataaataattcgatactgaatttaatcatttcataaacattattacttataagcaaggcagtgtgcatatttgttgtacgttttgaagtgctgattaaagtccacattttcattatcagcagtctattggccagtttaaacaaatattaatgtaaagaaattggttcattgatattttttccctgagcagttctgtatttacctgatgctctaaaattaagttttctgtcgttactcaaatgtacagttggcaacacattttgttatcaatagacaattatgtttactatagagtaaactattagtaattatttatgaccttatgattgggagaccttttcacaaatttaagtatttcataacatttctaataacatttctataaatggctttggatcaaatagtttaaagtatataattcagtatgttgataatgaattgtttcgtttcatttcacaactgagaggatttttcccttatgtttttccttcatttttgtgagaatagagattattacctgttgttccttttaattgttcataagtaaataaatacattcaggcactcattcatctatcactggcagttctgttttcatattttatttatgtcttaaaaactacctcatgacgttggtaggaaagcatttctttacatggaggtttattttgtgggacattacctcctctggatgttacttcctcagtttacaagtagtgtaaattctcattgattcttttatgaattgtaatggattttct

SEQ ID NO: 70440 - DNA, 1014 bp, Homo sapiens
gatcagtgattacattaatgtttttgtaatattatttgactatatgaatccattgcattcagttttgcttgaattgaacaagtaacctttggagaatacatagcctaattttattaatagaagaactaaggtatgaaaaagttgtctaaaaagtatttggaactctttctagcctttgcaatcatattataatctagaaatccttttttttccactaaaagcaaatatatacatagaccctctaatgtatcatttgataatattagaaaaattaaatgttttgttcctaaaacaaaggaagaaagcttgtgtttattcatcatatattaattacacatccattaggggcttggcactattccaagttgtaggtagtagtatacaaagtagatagacacttgctcctacagaatgtatgaggttgtgcatgtgtgtagtatgtgtgtgtatatataacaaacatgtaaatggtgttaccagtaatcaaagtaacttatgtattttaagaagaataaaagtacgtggaaaacaagattttaaaacgtggaaggcaaaattttacctatgtaatttctaaatctctgatctctatatcaaaatttctaaatctctatatcaaaattatttacgctgcttaggtttaaactatatttttctgggggaaaatgtacattgataaagttaatctagtttgaattcctagtcatacattgtagttcatcaatgtgaaaaattttagttaacttactcagtataacttaccactttgtggaagttacaattagactttttttccctgtaactacacattttgaaaacaaaaatgccaattttaatttcagaagaatgataacaaattttcttcacgaattcagatagtcaacttgaaccaagcaataaaattattttaattcctagctagggctgggagagggggagtagtgctacacagtgtattagggcaggatgtcatggttgtggtggtgattctggtgtttgctaatttttactgat

SEQ ID NO: 70441 - DNA, 2528 bp, Homo sapiens
tatctaaattcttgaatttgtttttataggagttccatctggaatatgacaaattagaagaacggcctcacctgccatccaccttcaactacaaccctgctcagcaagccttctaaaaaaaaaaaaaaaaaaaaaaaaagacttcccttttcttggggtatggctgtctcagcacaatactcaacataactgcagaactgatgtggctcaggcaccctggttttaattccttgaggatctggcaattggcttacgcaaaaggtcaccatttgaggtcctgccttactaattatgtgctgcccaacaactaaatttgtaatttgtttttctctagtttgagcagggtctgaattttttcatttatttccttttttgccagcagacagacttgagtctgtaaagacaagcaaatacactgacagaagtttaccatagtttctaaaatgtaaaaaagaaaacccccaaaagactcaagaaaattagaccacaaattttgcattgttcattgtagcactattggtaataaaataacaaatgtttgtgcatttttatgtgaagatccttctcgtatttcatttggaaagatgagcaagaggtctgcttccttcattttacttccccttctgtttttgaaaggcagtttcgccaagcttaatgcaagaatatctgactgtttagaagaaagatattgccacaatctctggatggttttccagggttgtgttattactgagcttcatctttccagaatgagcaaaacactgtccagtctttgttacgattttgtaataaatgtgtacattttttttaaatttttggacatcacatgaataaaggtatgtatgtacgaatgtgtatatattatatatatgacatctattttggaaaatgtttgccctgctgtacctcatttttaggaggtgtgcatggatgcaatatatgaaaatgggacattctggaactgctggtcaggggactttgtcgccctgtgcactaaaagggccagattttcagcagccaaggacatccatacccaagtgaatgtgatgggacttaaaagaagtgaactgagacaattcactctggctgtttgaacagcagcgtttcataggaagagaaaaaaagatcaatcttgtattttctgaccacataaaggcttcttctctttgtaataaagtagaaaagctctcctcactgcagtgttggctttgatttgaaattgcgaaattatttcttcaacatgaaaaatagaggaaacaaactgaagttttacagatatcaaactgaatggtgtgactcaaatgtctttttcagcttccaacaagtaatttaatggaaatatagtgaaccgtttcacttgtaggttaaaaatgtagacagtattaatcagagaaaacttttttaaatgggttgtggcagcattagaaataaaacattctgaatactcttggaacccaaccaaagtacttctgtgaaaaatttatgagaaatttcttgatagacctttaaatttatctttaagaagtaatgtgcaaatgaaggtaagccataaggtgggaatgggtagactttaccttcagtttgctggcctagatatctcatatttacaagttagtggattcttttcccatctaaatacaaatactgtattttaaaaatcagaagattgaagcttccaaagcagaactagagagtagaaaaaaggcaatgagttttgatcctttaaattttcatttttaacctatttttctatgaagagtaaaagtctgttggcattaaccaaatcttttgaaaatgaaacatttatgacattgctgtgtttgtgtaccaggaatataaagtggcttaaaatttacctttttctatgcattttgagatatgagaaacactataaaaaacaggattttctatctttcataattaaaccaaagcatctcctcagtaagaaagatagcactatataaatcattttatctattgtgcacaaaccttcacagaacactataccttatttgacataaaccagagtcaaagcatagaaatcaatctagaaaaaaaaagattacatttttcctagtaattcactttgtaaaataaaatgtaatttttcctacataaccacaaaaaacaagtaggaagaaaaatgtggaaggggatctttattctcatgaatataaacaacaatatagattgaagtctcagctgaagcgtgatcatgactggtactgatgaatgactccgaaaaataagatagctcataccaagtggtttgttgtcttggctgtaatctttttttctctttttttgttaactgccatatacagagttttaaatgcacacttttccatttttttgagttctttttatcctgaatcatcaaaatgaagaaactcttgcatgttagccaactttttataacttgttaatatcagaaattaccatgctatggacttcaaaatacaaattactctatttgaaatatttaaaacactactttgaactttttaaatgtaacagttataatacgc

SEQ ID NO: 70442 - DNA, 1026 bp, Homo sapiens
cagcgggcgatggagacagagagacacccgacgagaggaggcggggtgggggaggcggggagagtgcgggggcggaggctggcagggggcgctggaagctggagcggtccgtgcgctccccgcgcccgagggtgcaggaggctctgaagcggctgctgcaccgcggggcccaggcggcggctggggggctggggggcgctgccgccgccgccgccgggggcgtcgctggcctcggcccctttgttctcgcgcgctccccctcgccgcccactcccctgctgtcgcgcggcggcggcggtggcggcggcggctcctcccgcccgaggcagtcgggctcggcgccgggggcgggagggggcggggggagcacgccagccgccgagagtggggggcgatggcgaagctccgggtggcttacgagtacacggaagccgaggacaagagcatccggctcggcttgtttctcatcatctccggcgtcgtgtcgctcttcatcttcggcttctgctggctgagtcccgcgctgcaggatctgcaagccacggaggccaattgcacggtgctgtcggtgcagcagatcggcgaggtgttcgagtgcaccttcacctgtggcgccgactgcaggggcacctcgcagtacccctgcgtccaggtctacgtgaacaactctgagtccaactctagggcgctgctgcacagcgacgagcaccagctcctgaccaaccccaaggtaagaacgccccgcgcacccaggggctccccgcgagggaggtttggaggcagcgtcggtgttagactccgcgcggggagggttcggcgtgtgctcgcattgctaggaggagaccaggtggcgcaggctgtgctcaaaccaggaatgactacatcagggagccccagggctccggtcttttcaggtgggtttacgcgcggcgaccagtggtgcccagaggcttactttaaaacctgtcttgcctggtctcagattttgaggcctcgacccagtccgggtcctgcgcctaccggact

SEQ ID NO: 70443 - DNA, 1024 bp, Homo sapiens
agagagaggaagtctcagaaaactgttcccaatggagaaaaataacttataaaaagcagtgtccttagcctgtgaactaattgagctttgtagtgcacctggttctggttccgtttctacttcccttgatcttttctgctctccttgttgcttaactatcaaaggtatgtatctttttaaaagttactgacatttttcctttttttgagggatcaagcagaaaaacagtccaaaagggaatgcatcttgtgttcacaggaaaactttctgttaactctaacaagatatatttatattaatccaaaagaaaaaaattctacattaatattataatagtatttaaaacagcttaccgtcactctgcaataaaacttgtggtcttacctcctgaacagtaaattcttgaatttgagacatttagaaaatatttctttttaaaaatatgaatgactcctctcaaaaaaaaaatgctcctgtcgacaaatgaatattgatttaccttaaaaaatatcaataatacataagcagtaaatataggactaagaatatagaatttggagtataatgttaaagatcttgaagaggtgataacgtctcaaagacaaatgttgtaacttgatcctcttaatgctcaggaatttaaaaagaaatctcagggttttagaaacatttttttttttagaattaaatcaataatgtcaaagatgagtgccaaccagtagtaatgatttagaaattatatggcagttcatcatttagaagttgttatagttggtgaaacgttgctaattattttaagatagtggttcaagcactaataaatttcatatctatatatacatatatatgcacacacacattaataaatggctaatatctaatcaagacaaggacaaattataatttattacaaaaagactgcttcacaattttcaggcagtttgaagtatctggcagaaaaagtaaattgaaatcattgggacgttgatttttaaattacctagaagcaatcccaatgctttat

SEQ ID NO: 70444 - DNA, 1096 bp, Homo sapiens
gccaacaagtcctgcttcagccctgtaaatcccaactttatgttttagtgagtcaaaatagcccagcatacagtgggtaaaatggtaaattgatgttgcatgttcaggcattcagaccctactgggacccagtaacaaaccacttgtttctcaaaaggagaatagtcacttgccaaagaaagcatgggtttgctttataccatcagggctctctctgggctccatatatccgctgatctgtcatagactcttgtttgttattgaagccactgagccatagagatgaattgagacagcttcctgctctgtagccttgagcaggttttcctgctctgattgctactgaaagctggcaggttctgggttactcagtatattgatcagagaagcaatcccaaatgtcagtatatgtttcctccaaaatgtgaagacgctatactttcaggatctgtaggaacaatcgtgaagagagttcatggactccctgggcctattgtgacactaacttggaccaaaacttcattttcccctgacccccatgagctctcattctaagcacaggtgtacttagagtccccagggattagcattagcgtagagccagtgttcaatactattctgaatatctgccctttctgctctatactactctgctacatgtcggcatgttctgctgggaaaggctagattttcagtaggtaggacttgaggttctaccacaagggctttaagtataaaccagccccctcacccttcctctaaggagctttgggcctgggattggctgaggagtcctaccttacatcacagtgactcatagacttcatttcatcaaacctcaagtgtttttatactttcaggtatgtaaataaagaagaaccttagaaggttatctatttattttaatcttagatgtcctgtgatctcagccactgtcaaagatccctgtggctcaagtcatttttcatatgttcacacattcttttattttttatttattattatttttttttagagaaagggtcttgctctgtcacccaggctggagtgcagtggcacaatcatagctcactgtaacctcaaactccagggctca

SEQ ID NO: 70445 - DNA, 1054 bp, Homo sapiens
ctctttggatcagaagggacctcctgggacaaggatggctgctcatgtgcttttcctcatggtgctaagtttatcctgaggtagaaaaaagggtcttcatgagacacttcagcagaaagttctgtcatttccctgacatccttcttttctgtgtttatgctcatgtttttccttccaaaacagctacctctgttttttcactaacaaaaaattcagctctttgctctgtcttgattctttgtcactggcttgagaaaaatataaaccaagccaattttatataagtcaagctggttaatgttgtcctggcagacactggcttttgttcagtgtgagaggctgatgaagcgtgagtcaaaacgtaactaaagatgctgtctagctctattaattcattcttatccccagatgtggaggagcaccctctcaaggacaacagttcccctttaatacattcaatatgtgcaattttttaacagactaaacaccaaatttgtttaccagaagcactgggagggaaagaaaataccaacaggaagtaaaattaaaataaaataaattgcaggctacacacacatcttgaagaggccacagcaccctgtaagtaggtgactgttaatctctgtgcttaattatgagtcccaaagtcagacttcagattctacaggatggtaattctgcacatcttcaaatgcacttcttgggctcacacaccagagctccaggccatcaggaagtcacagttatggttatcagtagaaaacaataagtgaaatcctgatggactaggatgttactaaaaagctgccacacccatctcccacccaatttcttcaccatggtgaggcacagaatgtggaagccgctaattgccactgtgatcctctgggctccctaagggcagaaagcaattttaaaaggaaaagaacaacaggagagagagagaggaaaaaaacaaaaaaaaaaaaaacagagatagagtgagaaagaaattttcagaaaagccacccactgcagcgaagaaaacagagcagacattaattcccttttcatc

SEQ ID NO: 70446 - DNA, 1037 bp, Homo sapiens
gccaattagtgagcccggttcagttgaagagctccatccgccagccgtcaacacctggccaaagagacatctctcctacttagaagttaatactcctgcacactccctttcttttttagacgccccagtgccattgagtcctgactctcaaatttctcatgattagtcaaatgaccattttaacgcagatacttatagaatgttggtagtcagcaagccaagaaaatctctttccataaagaaaagcagtgagaacttccattagtcatatgggttccttggaatagcatgttaactttccttgtaaatagagtatatatgaagttttaaataaaaaactgaaaatactatgtactcattttcagagatttaaattacaataaccttgatgaattccccactgcaattaggacactctccaaccttaaagaactgtaagtatttaggacaattttaatgggagaactttatccttttgtgaatttatttaaaaatacatgtgattgttttacataatatgacttgctagaaaattttaagtttatataaataatgataaagtacacttgaaatatattttaattgattctatctctagcaaataccagataatattttttatttatgcggggtttttctaacatatatattaaaaaaacatatatttctgtaagtcatattcttttctctttttctaagccatacatactctcccaccatttatgtactttatagatttgtagatttttagtagtagaactaaaatggaatttaattgctgagcatttctgagaacttgaacatttctgggttgcataagtctagaaataaatgaatcaaactgtctgtgcctagtaaagtatgagatgcattcacatacattgcagctgacccttgaacaactaggggttagggacaacaacccttgcacagtagaaaatccatgtataacttttgacttcttaaaaacttaactactaatagtctaatgttggccagaagccttatcaataatataaacagtctattaacacata

SEQ ID NO: 70447 - DNA, 1047 bp, Homo sapiens
gagggatagaatgatgattcatggaagggttagtgggttcctgctgtatttcccctgtggcaatggaaactgtacctgagctgggaaagagaggctaagaagatcttacccagacgtttaggaaagacaatacagctatacttacaaacgttttggacagtcgggggtgggtattttgttggagagtggtttttttgtgaggcacaataacaactatagaaagttcttcaaactagttcaagtataaaagaggtttcttgaaataacacaacaggcaaattcctagacacctaaaaataggaccaaaaaacatgaccaagccacccagggaatggaactgtctagaaactttatcattcatggagctgcttggcattttcaactccctttttcttgctaccccagccttttgtttttctcactatagtggccatttctgcttctcaaaacttaaatttacacataattttggcttctcatggtgtcattgccagccaaaattctgtttggtctttcagttcaagcaccttcccctcatgatctgactgagttagtgtctcccagtgtccctaattttcaattcttggaaaaaagaatctgattgctctggcttaggtcaattccacagaggatgtgttaggggttgtggctggaaaacaactgcaaatatggggtcatgggctggattagtacccccaatctgcctcccttagtaagggaaatcaaaattagtctgtcttggtcccttgggttgctataacagaatggcatcaattggatggcttataaacaacagaaatttatttctcacagttttggaggtttggaagtccaagatccaggagtcagcagattcagtattcagtgaaggcttacttcttcattcatagacaccatcttttaaatgtgtgctcacatggtagaagggctgagggtgctctctggggtccctttttataagggaactaatcccattcttgaggtttctgtccttacaacctaatcaccctccaaaagccccatctttaaatgccattgcactgggga

SEQ ID NO: 70448 - DNA, 1089 bp, Homo sapiens
tcagcagtaactattttgtctctgtcttttttttaatgagttctttgcattggtgtatgtagaactccactcagtgcatgcagtcacagggtccgtccatggaggctgtacactaacaactctagggatggccattcacatgttccgcacagtcatgtaggaataggccctgtttcctctttgatccattgtcatattgctatttaaaggtaccttatacaaatgatattgccttaaagataaattctgatatcttttcctgtcagtttataaactcaactttaaccttcatgtaaaaaaaaatcacacacactgcttaagggtgaggtatatgttcctgtcatccttccattgtcagttttacttttttttttttaatgaagtactttcagtacatgataattaaagtattaaacaaatttgggttaaagtttttatggttattgtagaaacatgaatataaaaagatttcacatactgtgtgactaaagtctttcttttggacagagaaaagactagtcattgagaactgcagtcccttgtattcgccacccctgctgggggacaaaacatgcacacaaaagaggcctttttaggctgtgggattttatctctgataaaggaaatggagtggtagattatgatgtatttttatgtgtttttgttcattttagagaacagcctaatatttctatttgccttttaacggaaagtggaccttgtaacattgtttttcactctattatctaaggcggtttgctttcaattaaagggtgtataaacctacatcataaagtaagcaagaatctccaggtgcaacatctaagagctaaaggcactaagcagacaagaaaaaagtgattaagactgacaacaaatgtagagggactttattgaagattgtagttcaaatatttatttttcaaggttgttgaaaaagtaggaacatgtggctagaatacaaagcagggccaatattcttggttaaagctgtcatgtgttcacagataagtcgtaatttcctcaagtctgctttcatgtctatgttaacattaatgtgagggaagaatggggaaatacaattttaat

SEQ ID NO: 70449 - DNA, 1039 bp, Homo sapiens
ttttttattttctcccccattcctttattttgtgttattcctgactcacttgacactctctgatgcctgagagattcctgtttgggatttaatatccagggctgtgtttacagtaaaaaaagcaggcagtcccttttagtttttcctttttaaatttttttgagattcttcatttcaggatttaaaactatagcagtccatcttaaggaaagtgtaactgccatggccacaagtctgctagttgcacttgaatgctctatcagggttgtttattaccctttctacgttctggactccttgccgagactgtttaacttgaagattaaagaaactattgcaaatgccagtgcatcagaacctaagagtggtcaaatattatgtgcaatttttttgtaaagaaattttaatttataataaagtttaacagtttaaagaacagttaatatttgaactgctttgtattgaaatactactttgtagtattgaaattgtttatatacttttttaatataagttaactttctaaaaactcttgctgtctttattcacttttcacactggtgggaaagggttgaagtcggagatacggatattcaccataacttatagcaatacttttttatcttgaaactgctttcccattaaaaaaaaaaaaattaatgactttttaattcatgagaagatggatactgttgtgaggacagtgaacagagaggtttgcactaccattaaattccttgttctcaaattctcagtgtttagaaagtgcctcccaaccgtagtttgaatgatttgcctagtgacatgccatcttatgttgaatatcagtgtgattgaatgcaaaggagaccttgctttttattttgttttcagtttatatttggttgttttaaccttggcaggaaaaatgttaatgacacaacgcacactggcacaaatctgatcttagaactacatgtgcttgaactgttagaggcagagcagcaaccccatgaaatactaggaaacttgtacatgtttacatttgtataatgctcac

SEQ ID NO: 70450 - DNA, 1013 bp, Homo sapiens
aagtaaaggtagactcaggaatgaaaacccagactcctggcttcttgtcagtgttctgcccatggctctcatcactagaccatatttcctaattcatatttggaaagtcactaataaaattaatggtaggaactgtaactcacaacatcatacattattataatttatacattcatatcttaaagaccattttggttttcgtgttaaaacacataggtaattggatttcacattttggttgcattcatttttcgcccccctcaacctttacaggttattttcttttatttgagctgtgttccaaagacccagcattccaaaaccttggaacggttttgttcagttatgccagctaattctggacttgcattgaggtaagaaaaacttaacattcttttggtcctctgcctaatggaataggctctttatataagattattcttgaaaacttgataaaaatagtctgttgttccactatgtcctcatgaatatatactgcttaatttcagagttgttaagccaatatttagctattcattcaaaagtcagtgtaaaaattctggtcgcttcagaaaacttcaggttacaaaggggcaaataattccattcaagtaaagttcatctgtgttccctaaacacacaccatctgtccttagcatgtgcattataagcagtaagcttgttttccacggcaagggaatattatttaagatgttttcatattttcacctaggtcagttgctctcaaatattggcaaacattagaatctcctgggatgctcatttaaaatgtagattcctgaccttgagccctcacactacatttttgaagcactgattagggatttcatatattcgatcagaacgagatttctcagcctttctttgtagtttctctgctctgatacagcaaatccactttcatccgcaagaattatgctttttaattcaaaaaggtaccctgcatgctaatgcactggcttccacgtttgcagtcattcccactgcatcag

SEQ ID NO: 70451 - DNA, 1057 bp, Homo sapiens
tcaaaatacttttaaaatttcatgagtagaaattgttaagcaaaatgcttagcactataatttttacctggagttgaattctgtcaactctctatgtgacatttagtataaagatggcaggcagaaagaactagatagggtaattttcatgtgtttcaagtcaatttgaagattaagtagatagccagaaaaattaatttggggatttcatttactttagtaaagttaaactagggattatagtcttaagtagattagatttgaagtcatctcttctgaccatctcagttttcagtgaggaagttaagggattaactcatggtgatgtagcttgtcttggcaaagtcaggatgataacctaacttctagatgttctatttcttctctttcttgtgtttgccccccatacagcccgtctaattcattaagacttgttcccttgcaattatttaaaaatttaagataaatagttatactagattgtcatttttgcgatcaatgtatttcctttaaaaacattgttcttaaagatggtggtaagtatcatacacacaaattaaaatacattggaaggaagatggacttagtcaagtagaattctatactgattgacttcttagagtcactgggattgacctataatcctagtaagtattgtggcttttcaagatggggctataatttgtagtatttcccaaccttatttgatcatagatcttttgacaggtaccttacaggctaatgtgttatagaatacactttgatatcatgtctaaaattaaacttaaatgggttgtatgtgtgtatggctgtatgtgagagagattactttcagatataaggtttagtaaatctttttttttaagaaagggtctcactttataacatgggctggagcacaatggtgtgatctcagctcactgtaacctctgcctcctgagttcaagctattctcccacctcagcccgggagtagctgggactgtaggtgtgcatcaccacacctgactaatttttgtatttttttgtagagatcttggggtttcacccaagttgtt

SEQ ID NO: 70452 - DNA, 1874 bp, Homo sapiens
tttgcagtggtcagggaaagatgaaaagataatttattctgtaattttttttttgttgagatggattttaaagaatttaggataattgcagagatacttgtttaaatgaaaacactgatagatgcaaaagctcatatgggatggctttattcttaccaggaaagttgagggtaaggaattgaattttaggattttggagattacttgaattacttcctttgagtaaaagccagctcagtaaaggtgaataagatgatggatgggtaatcaaagggaggggtcatcttttcccattggtctctcagagttgaagtaacacagtcaaatatttcatttttatgattgacgtgattcatgttgttgtgatgtttttgggtagatgcagtgaaagcttgcacagatgagagccttgctgttgaggaaagaatagaggcctgccttccactttacacaaacatgattgctctgcaccaactcctggagaggtacaacttaattgccaagcagctaaccttatattaaaaagtgatcttttcatgtctttagcctttttttttcttttttgttaaggtatgaggctgcaatggagctttgtaaatctttattggaatcatgtcctattaactgccagttgctggaagctcttgttgcattatatttgcaaacaaatcagcatgacaaagccagagcagtgtggcttactgcatttgaaaaaaatcctcagaatgcagaggttttttatcatatgtgcaaattcttcatcttacaggtaaaaatgatgcataattcttaaatatgatgcttttatgtttcaaattttgctattggcctcaccaggaagtgtttcctggtccttttaccctttgcaagcagtgttaggtgttccttctctctttgccatagcacttagtacagtgctttgtaattttattcctagctgctttaatatatactatactaaacttcttgaaggcaaggaacatgtttactcatatttgcagcccaacgcctaccatggtgctagatggctaatacataattggtggatgaaatatgagcctgtggtaatactagaagttaagctgtttaatcattagttgaacttaattcagagagtaaaatataaaagttttctgagtatgtctcaaacttatcccctccgccccttacccactcaagaaacttaatctaatgagtacttttttaaggctttttttctccctcgtgacattttaattaaacattgtaagcctgatatatatccccctccctctttttaaaatagaatcgaggcgataatcttcttccatttttgcggaaatttattgcatccttctttaaaccggggtttgagaagtataataacttggatctgtttcggtaagttgtagaattcttagtttgtagaggaatgagagagagcacagttcagtagaaagattacagtttttttcttatatgatgacattttagactgactttttagtacttgaatacccacttaacagaatacttgaaacagaataaatagaacaataaaaatggaggcaagatggaaaattctttaacattctgtggattaaacacactgtacaaagtaaggcatatactaacaccatagtaactcattcttttactttatcgttattgttgttaattttagtacttaatattatagcacttaattatcccaaggcaatctcagtgattttttacaaaatgtattttcatttatttgataggtcatcaaagtgactataaataatacgcctttttctttttttaattctgaagagaactgctctagcctctgaaatgttatagagtaagacgtttcagaggattcttttctcaaccattaatttcttaatagc

SEQ ID NO: 70453 - DNA, 1377 bp, Homo sapiens
atttgcctgatgggtgtaatatctttagagtttttataagttttcaatgaaaatattttatgttaagtatccacaggtaaacttcaagatttaagccataaaggaaaaaaatcagtctgatgaaaataatctatatgggtgtggtttaaaagattttttttctttttactgttttgtctttgtcttattagattttaagtatcaggacacttaaaatgtacaaataaatgtgacctttttattatttcataaactttagcatagtaaaaattatgttaatctggtactgacatctctaatttttttatcaaaaaattttaaattttgcctagaatgcattgaaatctgctaatgatggaatagtagctgaataccttaaaaccagtgatcgatgtttggcatggttggcctacatacatcttattgaattcaacattctcccttcaaaattttatgatccatctaatgataatccttcaagaattgttaacactgaatcatttgtaatgccatggcaagctgttcaagatgtaaagactaatcctgacatgttgttagcagtttttgaaggtaagtataaagtttataaattgtaatatcaactgttataacatcagtgtttagaacattaactacccattattgtgattctctgtaattaagtggaacaaatttatatctctatattgcaagttttagtttcacaatttattaggcaaattaagtcttgaatcagagaagatggacactggcatctttgaaaaccaataactgcacgatattacattgtttatctttctgattgtggcaaaggatatctgttaaatgcgtagagaaaataaattatgtaagtttgatgaattgattaaatcagagaactaggtacttttttttttttttagcagtccattaaggtggaagtttaaagatttctatcttttcaaccaattaatattttctccatcagtcagtgagtttggttgcttctctatattaaatgatacgactattgtggaacacattacaagatataaagcctcttcctgaaggaagtatatagcctagtcagaagataaaatctatacatttgtcataattattaaacatacaaggccatataactgtgtgttagtatatagtctaaattgtatgctacgtaaaagagactagggccgggcacagtggctcacgcctgtaatcccagccaaggaggccaaggtgcgcggattgcctgaggtcaggagttcgagaccagtctggccaacatgatgaatccctatctctactaaaaatacaaaatttagccgggcgtggtgattcacgcctgtattcccagctactcgggaggctgaggcatgagaatcgcttgagcccagg

SEQ ID NO: 70454 - DNA, 1044 bp, Homo sapiens
accaatagtttgtattgcaaatggcatcttctaacttcttggtagtagaaataagccaagaataatcttttcataattataactttatagttacaataattcaagggttttttttttttacacgtttctttgaaatatttgactatcttaaagcttttaaataaggcagtgctgcagagtgctaataaacccacacatgcctggatgtgttgcttatttaactttcctgtgtgtcatttccatgttaatgggataagttacagtgttttcttttctgactcatttactgagtgaaggccaaaagaaccatacattattttatgaataggatcatgagaaagaattatcttctccaagagatagcaagcccttgaccgttgaaaagaactattatactgaaagctttgatattttgtacttgcagtagctggccttgagagagagttgtttaacttttcgcattcccaaatggtgtaaatcataaaaggtattgctgaatatggacataaagcacatttgaagttgataatcttagtggttttataacactgtacttttatctgtggtaaatgcttactgaacattcacttaaaaaaattgttgggtctgtggaaaatcagaaacttttaggcatgtgatttaaaatctgaaatctagtaccccttttcataagtgatcctgacttcttggtaaattctagtagaaaatggaattttaaaattgactcattggattagccctatttaaattttcaagcaggttctaaaaagcacttccaccttttcttttatatatacagggagtgctcagaatccttggattctgctttaaatgttctggcgcgagcattggaaaataacaaagacaatccagaaatttggtgccattacctcagattgttctcaaaaagaggaaccaaggacgaggtgcaggaaatgtgtgaaacagctgttgaatatgctccagattatcaaagcttttggactgtgagtagaaaagataacgtacgtgtgtgtgtgtgtgtgtgtgtgtgtgtataattat

SEQ ID NO: 70455 - DNA, 3434 bp, Homo sapiens
caaattccagtttctggctattggtagaagtgtggagaattttggatttctgtttgttaggaattttaggaaaaataattggaatcttagaggttttttttaatttttgatttttaattttactgttattcagtctaagaagtgcattggccagccttcataaaatttatttagacattttcatatgattaactttgtgggtcccccatttagacttttaaaagttgtgagaatgttaaagggttgcatgtttttatcttaaaattgtaaagcaccttccaggtaatatagactttttccagattttcttgtcttggctggtaatgtgtgtaagaaataccggtattatatagtattttattatgtggtgagaaactacttttagaatacaaggttttttttctgtttaaactattttatgttcttggtataaaagcaacttgtttctatcccttgatattctaggtcttttctcgaattaattttggcattaatttaattagataaatagctcataaatagtaagcatggaaattttaacttgagaaagaaaaactaaagttttcttagttttctgaggaatgtttgttgggcataatatacctgttcactctcttcaccttagatttagtccatattatcgaaccaaggaaaaacttcccctgagctcagtatcatacagtaatatgattgaaccggatcagtgtttctgccgttttgatttaacaggaacatgtaatgatgatgattgtcaatggtgagtagtttttgtgaacattttgtaatttgaaaaatggtcttgtttgcttaactttgatatgtacatgattatcttttctgtgtttttttttatcttaggcagcatatacaagactatacacttagccgaaaacagttattccaggacattctgtcatataatctgtctttgattggttgtgcagagacaagtactaatgaagaaattactgcttcagcaggtttttaaagacttcctattctctcccaaatgaaaattgaatttaggcaacttaaaaattctatattagttgttgacattgtaaaatacttactataattcagtgtatttacccataatactttatctagatttgctgtatccagtataattacggtaaaaatttacttcctctgttacactagccacatttcaagtacccaatggccacatgtggcaagtgcatgccagtaggacagcacagatttaagacatttccaacatttcagaaagttctttggacagagctcatttaaatatttagttccatttatttaaaagaaaatattaagctatttgtatagaaactttactattgattttaacataggagcctatttttacttattgttttcaaaaaatagaggaaggctggaaattacgatggctgttgtttccaattctataatgaaataagacttgatacacttgtgagcaaatattattaagctttttctcagatttggtgccaagtaataaacctcaagctacaaatcttttggaagtaaagaaaataataattactaaatttggtgttatcacagcccagagtgattgtaatgtcactgaatctattttatcgctcccaatttgggactttaacttaattacttagttcattttaggaactacttttttttttttttaatcccaaatggggtatatgatgtggtaggatttgccatagtagttaagataatacaggctttgccctttcaaatgccataggtgttattgactagtaccatataatcgcctttaattcttaaactagttcacgtcatacattttaattatcctagtctctgtaattgatatttatcatgaagattgcattgctcttatttcagaaaaatatgttgagaaactttttggagtaaacaaagatcgaatgtcaatggaccagatggctgttctccttgttagcaatatcaatgaaagtaaaggtcatagtaagtacatatataagtgtgtgtgtgtgtgtgtgtgtgtgtgtgtgtgtgtactgtatctctttctgaaaaggactttttagtttctgtatgacagaaattttgttggtattatgttcttaatgtaatacatatcattccaggctgggtgcgctggctcacgcctgtaatcccagcactttgggaggctgaggtgggctgatcacttgaggttaggagttcgagaccagcctggccaacatggtgaaaccccgtctctactaaaaatagaaaaattagccgggtggtggtggcgtgtgcctgcagcctcagctacttgggaggctgaggcaggaaaatcacttgaacccgagaggcggaggttgcagtgagctgagatcgcgccactgcactcactgcactccagcctgggtgacagagtgagacttccatctcaaaaaaaaaaaaaaaatacgtatcatttctaagatggagtgaatgtagttcttctcaaatattatttgagtatccttcaaaatgttaaaaaaaaaactagttatatcaattaacaatcttctcctatctactttagctcctccatttacaacctacaaagataaaagaaagtggaagccaaagttttggagaaaacctatttcagataatagcttcagtagtgatgaggaacagtctacaggaccaattaagtatggtaagaagttatgtaatttaagatccagaattattaaattgtggtgttccatctttatttaacactttgctaatcctttggtgtatcagcctgcctggttaaaaaaaaattttttttaaaaacgatgccattgggtttttagacaatacagttaattcactgtgcaggattgcctctgaaattgcgggatatttgtgttcatggctcctctccagtaaatgcaaggagcactgcttagttaataattatgactgcttcagatatttccaaacatacattagttggtggggaaggtagctcccgtttgagaaccactgcctagcctgtgtcctccttaagggcaggtgttctattttacttcatctttgaatatgttttctgacatgcagaaggctcaaaagatgagaatgaacaaatgatgaatgaactaatgaacaaaataatgtatgaatgagtgcctgtatgttaggcacattttactttctaatttcaagtttgcattatttgtgaattagcaagtatccaagagatgtatgctattatgtacttatttacactaacgtaacactgtttttctagtttagatatagtagaataatctttataaattatgacttttaatttcttaattataatttgcagtttaacaaatgtgaattcatttgataataatgaaaaagcagttgaatcatagttactgttaagtggactgaaaaggtaatgtcacttagccttaaaatagcagagttctaattactccttttgttctggt

SEQ ID NO: 70456 - DNA, 2286 bp, Homo sapiens
ggtaagccagttttggcaatttaccctctatatgtaaccacaaagtacagaattttgataattattatgtaaaattaacaaaatttttctttggttttaaaagagttaatttaaattgcattgtggttctttataatagaaagttagtgaaaataaaattttaatgagagtaattatagaatagaaagtcttaaagaatatacaacattttatgtctcagtcatataaccagtattggtcgactcagtggattatgtaatacaaccctagaaggagccatagactgtctacttggagcccattatttttgtggattgaaattgaacaaggttaaatgacatccttttgttatcacgagtaataaatatattgtctttgcagcttccaaagcataaatcagtggttgtaacactaaatgattcagatgatagtgaatctgatggagaggcttccaagtcaacaaatagtgtttttggtggattagagtccatgattaaagaagcaagacgaactgctgaggtaagtgcaataattaaaggtggaaagaaagatgaccttttgatgatcagtaaagtttattttttcctgaaaattaaaccataaagttatagatttttaataacattgatttgtggaaatattttaagtatttgtgctattaggactttatataatgaagcatgtatcaatgtagattgattttactattaaaagtttccattatttgtgtttcctattaagtatttcctttttcaaaatagtaaaattggttggataattgttctgtgtagtaaggagactgttgttttagagttgtgttgtgttaccagaaaacagtttttattaaaatgtattctctaagtacaacttttatcgttttttccctatttcagtagttgtttagctgtgatttaattcaatgattttcagactgtagatcttcactacttggtggcgtatacaatttagtagttatcaaccaacattgttttagaaaaaagaatagaaaatgatgacattcaggtatttctaaataaattcagtatacactgggttgcaatgtaaaatataaatcttagtatggaattttggaaagctgatgatctagttgacttcaaatgtttttttttttttagcaagcttcaaaaccgaaagtacctccaaaatctgaaaaagaaaatgatcctctgcgaacaccggaggctttgcctgaagaaaagaagattgaatatagattgttaaaggaagagattgccaagtaagtgtaattttatgtaattaacattaaaagtatgtgatgttttcaaaacttctcttatagagtttcttggcactggggaatgagtgatgatagttttatccaagatacagagttaatgttttataactcacacagaagatggtgctggatggtcatacatacacttgaatagagtgatgtgctaggacataaccagcttagaaaaaagatgaaaacactcaaagagaaggactccactatcaactttgaatgctgacttgggtcttgcatattggtcatcatctttattattagtcggtgtgattaatattgttactgcatgaaatagaatacattttaaaaatagtttaagtttattcttgggtgtaatgcatatatcctttttgataattttagccgtgagaaacagcgtttgattaaatcagatcagctgaagacaagttcatcatccccagcaaactctgatgtggaaattgatggtattggcaggatagcaatggttactaagcaggttacagatgcagaatcaaaactgaaaaaacataggtgagccttgttatcttcacatatctaattgttcctgtggtagagaaatacatttttgtggtgtatgttattaataagcgtactataagattatacattttctcacttaaactttgtagaatgtagaagtctgtcattttgttgaatgacactacatttacataaagtaatgaaattaatgtttaaataaaaataccggccaggcgcggtggctcacgcctataatcatagcaatttgagaggccgaggtgggtggatcacttgagatcaggagtttgagactagcctggccaacacggtgaaaccctgtctctactaaaaatacaaaaaaattagctgggcatggtggtgcatgccttgtaatcccagctacttgggaggctgaggcgggagaatcgcttgaactagggaaatgcattcccactgtgcctggcccaacgttgaatatttactacaagttttcaacagtaattcacgtt

SEQ ID NO: 70457 - DNA, 1035 bp, Homo sapiens
tattcacagaatcccttggtttctaatttttattttttactgaaatattatgtcttgggtttcagtacctctacttgctttcaggtagtcatctagaaggaaggaccctgtatagtttgatatctatatcttctagaatgctaaatggatataagaattggaacagagaagtttctataattttccttgaagttaataaatgtttcaaatattgttgattttttttaaaattgtaaaaataacactttttcgtggttggctattgatttctggtttgttttgaggttaacatatacttagcttactatatttacagctaaaataataatgtaaagtttatttttttctagtttaatattgctgcagagagaagcatttgagttgataaaatttgcgttgtaattctttctttttttaaaaaatagtctctgccacctttgagccagccttatgtggaaggcttgtgtgtttctcttgaacctctacctcctctaccaccattaccacctctcccacctgaagatccagaacagcctccaaaaccaccttttgcagatgaggaagaggaggaagaaatgctgcttcgagaagaactacttaaatctctagcaaataaaagagcttttaagccagaggtaatttaggtacctaaacctctaggtggtgctcttgagcttagctttacggtagtcctacttttttctggttacttgggcatcattgggcttttcagcaaagtggggataattctaacatgctcaagatttttaaaggtggcagaaatttatttttatttaggaatgtttaatgtctttctcttccttatgtaggaaacatccagtaatagtgacccaccttcacctccagttctgaacaattcacatcctgtgccaagaagcaatctatcaatagtcagtattaacacagtgtctcagcctaggatacagaatccaaagtttcacagaggaccccgtcttccacgaactgtgatctcggtaaaaacaaaaatttaatgctacttttattcaaacagtt

SEQ ID NO: 70458 - DNA, 2636 bp, Homo sapiens
tgagccaccacacccagcctattgtatttatttttaaggtagcaatgtagtcataaggtacctgctatgttaatagatacttgcctctatgctacgttaaagggaggtgctgccattttttatagacaagtgagatcctaatcaaccagtagatttctcatgacttaatgaaactcataagtttctcatgtaggagaataatttagtgtttaatgtttccctgtttatttttgtataatagttattactattctgttgtttttaaaagcgtgatcattttttctacagtgggacatatgcatttcccaaaattaccacactgcaaaattatgcaataaaaacaatagggtgtgtggagaaaatggggttagaggaacaacactcaaaaactttgtccgtggcatataaaaaaaagataggaataaatgaaaaatgatagcacagctttgcatgtgaaatggagaaaaaaagtgtgaaatattaaagtaaacatgtcagcattccataaaatagacctgaagtacacctgtggaagtggaatatttgctacttatgagttattatgaagtaaaacaaggagtgttacctgaaatcagacagtaaattgtaataccagatgtggatggctgtggcttataacacacgcaatgaacttgggtatttgatagatgtttgaagtatatgttgtttgtgtattcctacatggctcagatcacttgggtgcagttttctgcattcttagtgtttctctgagacaaatcacacataagtaaatataaatttgtgttatgctcaaattcttttcttttcttttctttttttttttttttttttgagacaagagtcttgctctgttacccaggatggagtacagtggtacaatctcagctcactgcaacctccacctcccgggtccaagcgattctcctgcctcagccttccgagtagctgggactacaggcgtgcaccaccatgcctggctaattttttgtattttcagtagagacagagttttgccatgttgcccaggctggtcttgaactcctgacctcaggtgatccacccgcctcggcctcccaaagcactgggattgcaggcataagccactgtgcctggctgctcgaattattttctaatgtatcagtcatgttgcaacaaattcacatttatagactaagcctttcaacagaactcatttgtcttgaaatttggtcattgccttctatttacattgatttagatgctagattagtcatttatttattgaataagtcacgtattctttggttcacttgagcagtcaaattaggatgtttggaacattgacaggtgtggtgttatggtaaaaacaccagacttaaaattaagatctagtttaaatcctagctttgcaatttcagttttgtcatcttaaggaaagatttctgagtttttaacataatctgttttagctacaaaagtatctcaacaggattgtagatattctgtaactttatcatgtgatgtttaaagctgttgtagattaggtaatatataaatgtaagattttgtacattatttcatcagtcatctgggcccaaggctagatatctggaaaaaatgtatggatggacttaattttattgatacttaagctgcctctactgatgcttttctaggtaaatgaccaattctctaatgcacaaatccaatacagtctgtaaacattgcattcattccaatttagaggactggattaatttagtcatcattatattctatcagtgtggataatccacttggtaattaagtgttgctgcttgtttctatgctttataaattctcttctcatttgaagtgactatttctagttcagaagtcattttattaaaagtgtggctttattttaatattttgaatcattttgccttataactttgaggaatgaggctgataagagtttgttcagattttcattctctttaatggtatttccttttggttgagagattgagaaaatgagaccctttaatgatctcttttaaaataattaccagatattatataggattattttattttagattgtggctatcttttggattattcaaaagatattattttattttaaaggattacaagataaagaacaaaatttaacaagaagaattagtacctcagatattctgtctgaaaaggtaagatactgctttgtgagactatcatctctgtaagacccatttttgcattgctttattttgttcttttgtaagggaagtctatcttactttcacttattttctttcatcattcctataactccatttggacataagccttaaagaaattctggatcgacatcttgcagtctcttttccctgggttctgcaaattatgtttaattaaagtgttatatatattcatacgggatcttttttttaatcatttgttttttgaaacctttaattttgatccagatattttctccattttttgtgtgttatcctgtgtgggtaagcttttggagtaaggtagaccttcacctggtgtcaaattctacctccacttcttgttaactgagtgactttgtataaactatttagcctttgcttgcttctatattcttttctacaaactgaacttaatgtcttctgtta

SEQ ID NO: 70459 - DNA, 1338 bp, Homo sapiens
agggtgttcttaatatatttgacttttccatccaaaaatggaaatcctcttccacctcatcctacattctctcttaaattatgtcaagtattcttcctcttttcaataagacttctgagaggtctagtcggtaccagcttttgactttacttctcattgccttattagcccaatacagtttgcttttctacccccatcacaatactgaaactactcatggtagttttctgtgacctaattgcaaattttagtggatgttttttatttcattcttccatttattcaaaaattagttgagcactttattccaggctcttggaaataaattggtgaacaaaatagtcacttatgttttcatgggcttacattttagaaggcaaaacagtaaacatgatgtgtaaattaactgttatgaaagagaaaaagtatagcagggtaggtaggaaagggttattgaggatacaggttgcagcactaatagggtggtcagcatggtgtctatttgaaggtgagatttaaagaaagactttgaagacagtaaaggaatagccaaatggatatctggtggaagaggctcctatgcaaaaggaataactagagcagtgattttcaaagtgtggttcctggggactgcgttatctgggaacttgacagaacacaaattctcagtctctaccttagatctattgaactgggagctctgcaaatggggcctagcaatctgtatttaaccagcccttctgttgattctgctacatgctgaagtttgggcatcgctgaactagagaaatgaccataatacagaaagatgcctgacatgtttggggaataacaaggagtcctgtgctaatacaggagagtgaggggaatgaataatgggagagaagggattagagatggcaggagggggcagatcttatagacagagccttgtaagaactttgtttttttattcctaatgaaatggggagctcttacagggttttgagcaaaggactgacataatctgttttatatttttaaggcatcactctggctgcattgctgagaatattctattgggggtagacatctctactatattcagtgatatgtttcttcccttgaaattttgggatttctgcaatggattttaaaaataactttctgatttttgttttctgtcttttgtttgttttaaataattacttttcctgtgtaatttcttaattcgtcatgtcctcagtgtcccattttctagggatattctcattattatggttttaactactacctgtgtgctggtgactttggctcacattagactttcagttggtaatattttaaatactgtgtgac

SEQ ID NO: 70460 - DNA, 1490 bp, Homo sapiens
cttcagattattttcataacattttcccttgtctgtaggagaaaaatagatatattttgagtactattttaaagtgtttttttttttcttttttttgagatgaggtctccctctgttgcccaggctggagtgcagtggtgtgatcttggctccctgcaacctccgcctcctgagttcaagcaattctcttgcctcagcgtctcaagtacctgggactacaggcctgcaccaccacgcctggctaattttttaatttttagtagagatggggtttcactgtgttggccaggctggtctcaaactcctgacctcaagtgatcctcctgcctcggcctcccaaagtgctgggattacaggcgtgagccaccgcgcctggccccctgaagtgtaaactatccgcatctgtgacaaagcattcagtttctcccctcttccttcagaaaataatctctaacatacagctaattatggactttcctggcacagaaggaatgatgctataacctaactaggtggactgtctgtggatactactggtaattatgacactagtgattttgtaagtggactgtttatatggtacttactaaattcaaatatgggcacgtaatgaaagtgggcattagctgcacatacattaaatggaatttagtaatttaaaaatatcgattcatttttcttgaaaaattaaaaagggagaaaattcatctataatctaagtttttttgttaaatttaactgtggaaaatttttggaaactggtttccttaatatgctgttcagccaaaagttttggaaggtctccatcaagaaaacaaaattattcatcaaaaaatgaaaactgtgtggaagaaacttttgaagatttgcttttaaagtataaacaaatacagttggaactagaatgcatcaataaggatgaaaaactagcattgagtagcaaagaagagaatgtgcaggaagatcctaaaacattgaacttcgaggaccaaactagcactgataatgtcagtattacaaaggattcaagtaaagaagtagctcctgaggagaaaacacaagtcaaaacttttcaggcatttgaattaaaaccactcaggcaaaaattgactttaccaggagataagaaccgtttgaaaaaagttaaagatggagcaaaaccactttccctgaaatccgacactactgattctagtcaaggtaatggaattaaatatttcagttagtaatgactcttcttcctctaaagtagtaactacttgttttggcagtgtacttcattgaaatgattgtaattatctgtaaattcttttgtactttctatgtagacattcatatcattgaataattactaattttgtttacttttagtctttatttatttatttattttttgcctgacattctggcctctataatagaatgttatacataagtgataatagtggacacctttgtttcctaatttaaagaaaatggttttgacattt

SEQ ID NO: 70461 - DNA, 2002 bp, Homo sapiens
ttttatataatgtgagcaaacaaaatatttgttacaacacttcattcaaatttatttaatatcaaggttgtactcagtttaattcatatttccactatgtgattataataataccttttttattttacaaatactgtataaagaaagaatgcaggttactctgtggcatatttctgtaatttagaagtaaagtagcctgagtatagggtttatttctatttttgccataactcctttcactgtaataactaagatatgctagttgcaactttaaagaaatagaataaactagattcaattgcagttcttattttcacccttaatttttcttaatgatagacactttgtcagtacatcttagcatgtctcccttgaatgactactcttttaaactttcaaatctgaggagagctaacataattaggctagtgtctctcatcagtaaaaagtcattccattttcagctgcagctgaaaaggttgaatagcacttctttttgtttaaaccaaggttcagttagaaattgtatcttgacaagcttaaaattaaatctggtaagtgttggtttgatcttaggcttctgtatagatagggatagattttctttagccttgaaggagattagtcagttatagttgtaactcaattgcttttccttatttttctatttagcatttttgttagtgtatttaatcatttccctttcttttcttttttttttaattgcagttgtgcctttaaatggctccagtgaaaagtaagatgtaaatgcagataattacagaacttacatacaaagagtgtgtaagaggggaagggagagtgagaaactcaggcttcacagaggtgacacttgaattggggttaagttgaagaacagacaaacttagacacaaagctatgcaaaaattgtgatgaacaaggaaaaagtaagtttggaaaggaaagcacaggtcagattatatttattctcaggattttggacttttttattagggaaatttaaacaaggggaatgatcttatatttgtattctagaaagattactctggcagcagcagtatgaaggatggcttgtaggagataagagaaatatcttatcaccagggtaaactctcctgtggtaggtaaaactgtggaggtgcattagaatgctcaaaatgagaaagaggctaagtagtgctccctgaagagcaccattatttcacaagttagagagaaaagactcaatggagacttaaaagacaaaacacaaatagggaaacaaagggagatgcggagttatggaagccaagagagaagtggtttatggtgtcagattctcagaggggtcaggtaaaaaaaaataaagtttgaaaacattgatagggaaacttagccacagcagtctctctagattaatgggacagaaaccagattccatttggtaagaagggtacagagaaactagttttctttcaggatacttggctttgaagagatcagagaaccagagatttactagaacagttttgctgtagaactgttaagattttcagatgtacttattgcttatttttgtttcttagatgatggtaattctcatttttagaactggtcatcaggagagtttaaaaaccttttctgctgcttgccctgtgaggtgtttaaacagaagaaccgtatttggggtactgtattttacatcctagccaactgaaaataatctataggctgggtgcagtggctcacacctgtaatcccggcactttgggaggtcaaggtgggcggattacctgaggtcaggatttcaagaccagccttgtcaacatggtgaaactccatctctactaaaaatacaaaaattagctgggcatggtggcacgcacctgtaatccaagctactcaggaggctgagacaggagaattgcttgagcctgggagacggaggttgcagtgagccgagatcgcaccactgcactccagactggctgacagtgcgagactctgtctcaaaaaaaaa

SEQ ID NO: 70462 - DNA, 1007 bp, Homo sapiens
aaaaaaaaaaggaaaattatatagatatttaactttttaaaagccagcaaatggttcttccaagaaggttagaaaacctctgcccacggtgtttcttaatccatggatttgtggtctattttgaatccaaaagccagaaaggctatttaagcatatatatgtgtatggtttttatttatttatttatttatttttgagacagagtctcgctctgtcgcccaggctggagtgcagtggtgtgatctcggctcactgcaagctccgcctcccgggttcacgccattcggcctcagtctcccgagtagctgggactacaggcgcccgccaccacgcccggctaattttttatatttttagtagagacagggtttcatcatgttagccaggatggtctcgatctcctgactccgtgatccgcccacctcggcctcccaaagtgctgggattacaggcatgagccaccgtgcccagccaatgtggatggtttttaaatttttttaattaaaaaaaatttttattaaatttatttaaaaaaatttttttttggggagacgaagtcttgctatgttgcccaggctgatcttgaacttgtagcttcaagagatcctccttccttagactcccaaagtgctgggatttataggcgagagccaccagtttatatgtgttttttaaaggtacaaagatgaaacctgtagtttgtattagggaaacaaatgaaaataagtagttgcagtttagtataaaaagttgaaactgaagtatgtatataaaaaagtactatgggagctcaaaggtttttcttaaaatttttattctgtattagaaaagggggaggtgagtgggctttctgcttttgtcctctttctgcgtgtttattcaatactattttgggcctctaccatagacctttattaattggtaagcttgcatgtttttattagtaaactggcatatgatgttgcaaaaaaaaaaaagtaccagaaaatatccagtctgcttgtgtg

SEQ ID NO: 70463 - DNA, 1156 bp, Homo sapiens
catccgccttctgtacggatgccttcgagctcactgtccgaaagcagtccccggccgtctttctgggagcggagccacctcgccttggaccgtttccgctttcgaggcaggccttaccggggtgggagtcgctggagtcgggggcgaggagtgggtgagcgaggaggcaagccggggtgcagacctcctctgggaggaggagcaggatccgggttcagcagcagtcagagctggcgagagccctctccacctcggaagagctgtatccttaacgtggcggtcggcgctgggtgtgtcactaaagttccctttagcgtcattactaggtctgtgagacgagtgtaactttgaatcatcagaaccgcttatttctccctgtgtcagtatactttaagttgttctttggtaattccccatgtgtcacactatagcgttattcttaagactgcttcattgggtatattaacgtgctgtggattgggttaagcttatgaaatctaagacagttaagtctgatttgtaataataccttagaagcccaagtttcattagcatttgtatttttgctggtacagaaactttgtgttttatatgaagttgacttggattgttagagaaaaaatattcataaacagtttaagtaatattgttgctttatcatattgcagtttgacgttgaaaattgtaaagttttaatctgcacagtcctgcactatttttgtgattctgtttttatcttgatttattccggttgctgccttttaaagtgggggggggaggggtaaaaaaaaaacaactctggtgtctttaccaagtctgtttcagagctttttgattcatttgatctttttggaacactttacctcctttacgtttctatctgtgttcacttttgcacattgtgtaacttcgtgctgactaaatgagggccagagagagaaagataaacttatcagcatttttattttaatacgttagagtggaggaatgtgtatgcgagggtggagattacgggtaagttgagaaaggaaatagtaacattccagatttttcctacttctaaccttattctcagttttaaacattactgagtttactcagcatttatacagaggaatcaatcatccgaaggtttcctgttttataatgggtttgt

SEQ ID NO: 70464 - DNA, 1038 bp, Homo sapiens
ttcggacagtgagctcgaaggcatccgtacagaaggcggatgagaccggaacggttctttgggtcggtagctgctgggtcccctgaggtggccccgctcagacgcgtgccgcgagcgtgagaaattcctcagctgctgctgagaagaggacgatgacgaggaagagccaccgcctccgccagatccaccgccccgggccgagtgaggaggccttcgccgcggatagggtaacagcccgccgccgctgctgctgctgctgctccgactccgtatctggctgttattatcgtcgtcactgatttccccatcttcaagctccccttcttccttcggcgagaggccactggaggccggggccggagtatctgcggtcgccatccggggagcagcgccttccacacaaccttagccctccgtccggggatccgcccgacaattgcctcgtttcccttctttcctaacggactgggtcggtgcggtcttaccctactcggacaccaagcggcctctgctccccaacttccccgcaccccagcaccccagctctctctcgccggaccgtcgcaacccagttccctttcctagcgcccccttgctcctcagcgatcggggttcttccgcctcgcgagaaagggactctggtagcggctgtacccgaaacgtcacttcctgcgacacgcaggaaacaaaggctcccagttcacgcgataataagaccaactcgatactcactaggatttgtagtctttcgtctttcttcgggtttactcttccggtcctagggtcacacccaccgcagggtctggcttggtacagttgggtgcatgcagaagtaggtggagctgctgttgcagccttgagagagttttattgtaaaactcttgtaatttatagtaatcggaggggaaaacacctcttccttttaattgctctgaggaccgctgccaaagaaacgcagtagatccgctccctcttgggggcggggagaaagaacgggttgtgtccgccatgttggtgaagtcaagcgaaggcgactag

SEQ ID NO: 70465 - DNA, 1040 bp, Homo sapiens
attttctaaaagaaatccaagtactgtttggtcattaccccttagtaaaaaaaagtaacaggaggatatcgtaattttctactgttttattcctctgttagaccgggccttgacatgaatgacgccgtaagggagaaagagatcttcccaatcagcaatcaccgtaaaagcctgctgtgttcccgttaaaattaggaaattctcactagatgaattgacatgggaggcatttagatttctaatagtcacatagtaattctgcggaggaattgagtcatctttgatagccatggaattaagcgatgttaattaaagtgcaaaagataacctttctgttcttactagaatagagtaataaaaagaacctaggttttcttttgtttgctggaagaaaaatcaaaattctttagttctgtcaaaccagaactcttgaaagcactttgaacaatgcctggaaaataacaggtactctgtaaatgtttaccttctctgcaagtgcctgccacgtgcccgaagaaaagacacattaaaaagttaagtgacaccagtcctgattttatatattttatatacctaacaacgtatatgttagtatgtagaaattatatccttgacctttttccctacctattacgaactgtacttttattaaaagctgccacttaaaaaaaatcttgtgatgtttctgtttttaaactagttcatgcatatgtagtgctttgttcattcatccatcaaatatgtacggagttcctaattacctgacattgtgctaaggatccagaaagttctaaccctcctggaatttagaatttaatggtggagaaagacataaataattaagtgccacagaagaaacattcagagacctaacttagtcttggaaagtcaaagaacactttttcaaaggatgtgacatttcaaatgagaccaaaggatgacagattgggtcctgtgtgctacttaagtattttctgttttatcctaagagtacttgagaaaccatggagggtttaaaaaagaatggcacgattagattt

SEQ ID NO: 70466 - DNA, 1014 bp, Homo sapiens
tttgagttgcatttttttttttttaaggtttcctttggatcctaaaagaagaaaagaatgggttcgcctggttaggcgcaaaaattttgtgccaggaaaacacacttttctttgttcaaagcactttgaagcctcctgttttgacctaacaggacaaactcgacgacttaaaatggatgctgttccaaccatttttgatttttgtacccatataaagtctatggtaggtaatgttactctccttttgttaaaaccatttttagaactcattcctttttgtttatgcagttattaactgaaattcatttatagtgatatgcctcaaaaaagttgcagaccttcctcttgtacagtaaaggtacaggctagaatcagagtttgggtctcctgactccaatattctttccccaatccaaattgttttactatattggaattttacattattacccattattattaataattgcaccattggtaaaactgaaaaatcatatgagtaatgaaacctccagcatcactgtgctctgattttaaaatgacatacaaataacatgtgcaaagtactttaagagcacacagccagaattaaaccaaagaatgtaagttcagagggaggcaggcatgacagaaatcttcagagagcttgggcattcagggtgggcttttgaagccttgggagtttaaaatagaggaaagggaacttggctttgcacagaataattacagttgcataatgagaacaaaaacgagtgggttgaggcgtgagtaggaaatgttagcaagtgatatttaaaggaaagaatgaagaaaaaatgaagcaaaaaaaagtaaattaaaaaaaacgaaagaataaaggtataagatgaatgaattaaaacaatgttttatctagttagggaagatctgaccagagaggaaaacctagctgggaaagacagggtcaccaagagtaagaaagggtaaaatgaacacaaatagtttagctttgaaagggaggacaaacatgttttc

SEQ ID NO: 70467 - DNA, 1079 bp, Homo sapiens
ccggccaggatgccagcagtgcctgcccacgtgagctaggcgacatccccctaagcggctgcggcgcatgcccacagcgggcgaggcgctagaggcgggggcgccgggaggcgcgggctttgctcctggggtctcggccttggccggctggacctgaccctagggcggcttgcgcagctgtcgggacgtgactgcgttcagccgcgtcgggcgtgcttcccagacttgcccaagttcgggtgccctagctgcccctttgcagccgctggcctacccggcccgcgggtgagaaggttgcgacgggaggtgggtggaactcgccagcgccgggaccgcggattggctgcctcggctttctcttttccccgtgggctccggcgtgaggcgctgaagcggccggcagccggcgaccggccctcaccgtccgccgggttgcgctctgcttttgcggtgaggcgttgaccacgcccatatgaattggagctctccgccagtaggagtttccggaaggagtttgaatttttgtgatttttatgcttgtttggtcggtggaatatgttgggatttatgtttgcctctgaacaagtgtcttgctcacatcgtaaatgactttctctccgaaacgctaaatattctttcccgcaggagctcatatccttattttccatgacagatcttaacgacaatatatgcaaaagatatataaagatgataactaatatagttatactgagcctgatcatttgcatttcgttagctttctggattatatcaatgactgcaagcacctattatggtaagtctgagtgttctaagttgtttctctgtaatctagtcagaggaaattaaaaccataccattgtgaaatccaaaactcatatcctctgaatggttatgaatggttgtgtttacttaacttccatagcctgatttaacttactaacatgatagtataaacaatgcctttaataaatgcttgttgtgataattcgagttatacctatttctttttttttttaatttttattttgtataagataggggtccctctgtgttgctaggctggtctcaaaccccta

SEQ ID NO: 70468 - DNA, 1030 bp, Homo sapiens
taataccatatttttactctactttttctatgtttagatacacaaatacgttataattgcctgtagtattcagtacagtaacatgctttacaggtttgtagcctaggaccaataggctatagcatatagcttaagtgtgtagtaggctctaccatctaggtgtgtgtaagtacagtctgacgtttgcataaccatgaaatcacctaaggatgcatttctcagaacatatccctatctttaagtgatgcatgactatatatttctttggtgacttcatcttggtgtttgtacttatgacagtattttagtctaaaagcagtaacggaagtttactgccaaaactaacctgtgcaaacttcacacaatttgtgctccacctttataatttttcaggtaacttacgacctatttctccgtggcgttggctgttttctgttgttgttcctgttctgatcgtctctaatggccttaaaaagaaaagtctagatcacagtggggctctaggaggtatgtttttattttgaatgtttacagtaactactaagtgcttgcttatataatttaaatttatgttttctaaattctgaatatatgagactgactacaaatcacagttatatattttagacaatgataaagttacatcttgctcagcattcctattgtcaaaatttcagaaactaacgtacacttttagtgtaacatacaaattaaactctgtgattgatacaaagtagattaataggatagatgaaccttgactattctgctcctttagtttgattagtcttctaccagcagaaacactggagcactcctcctatatgtaaaatagagcatttggagagaataacttttggaaattgctgttagtaatctcaaaacagagcagtccaaacttagtgttctggattaattttccaaaactgagttgagaacaggatatgcattcattcttttagcaattttttttttcccgagacagtcttgctctgttgcccaggctggagtgcagtggcatgatcggctc

SEQ ID NO: 70469 - DNA, 1096 bp, Homo sapiens
tggcttaagagtagcagaattgggcctggcaaggtggctcatgcctgtcatcccaactactagagaggctgagatgggaggatcacttgagcctggagttggaggctgcagtaggctatgatcacaccattgtactctagcctggttgatagagcaaaaccttgtctctgaaaagagagagagagagagagagagagagagagagagagagagagagagagagagaagcagaaccaagattgaaaccaggcagtctggcttcattgaaccattctgcttcattgcttaaaatgtcaagagttaccgaggagaaaatactgttttctaaaaagctacagtctttagattgcattaaagagaatgctttctttaaattagtcttgattagataggtaccttgctgtccttgcctttatgtgtttgctgattattaaccggatgattttctgcatgtttcttcttcaggtaccaatggaggagttacagtggtgggccttgtctccagtctccttggtggtacctttgtgggcattgcatacttcctcacacagctgatttttgtgaatgatttagacatttctgccccgcagtggccaattattgcatttggtggtttagctggattactaggatcaattgtggactcatacttaggggctacaatgcagtatactggtaagaacattccttcattcttgcaacttattggtatgttaaagaaatagggaaaagaaagaaaaaaatgttaacaatgaaaacaaatccaaagacacagggtgttgagggactagaaatgatagggcaaagtctctttcacaattttggttttcttattcttttgtattaaattaattgaaagagaattagtcccgcgcagcaatgattagaagccatgtggggaagatacaatagtgcagagaacagacgtttttgtgtgagccattacctaatcccagaaaagcaagacgtttgggatcagatcattttaatacaattccttccattcattttcctattccatttgaggagtaattgtacaaatctgactatacacacgacctactttcttactgtggtatcatgcttgctattcttg

SEQ ID NO: 70470 - DNA, 1087 bp, Homo sapiens
tgtaaaatatttcactcaaaactactaaaaaaaagtctgggatggcagctcattatcaaatatactcctatttttgtggtgatttatgaacatccccactaagtataactaaagatcataaagagcctcagatcaagtttggtcaggttttgtcaccaagctttgtaaataaactggttttcatagctttttggagatgagaattgaggataagaaattgtgtctctgtcctttttttttttttttgttaagtcttacatgtattttactgtaacatcttttgaattggatatttaactaattcaacatatttttcctctttgcagaatgggcagttcatgttaaaatcacttttcatggaaagagctctatgtaacagcataataaaactgcctacctagcagcataaaggtgtactgtttcttatcatactgttccatgatagaagagagcagatatatgtggcttggggcagctcctgaagaagacttgcaggagtagcatgttgaaaactcattaaatggagccaccaagagaccaaagaattgatacagcaggtcattctattattagcttttctcattacttgagttatctgtttctcacatatatctttcctgtttctagctgctgtacacataggatgctgcctgcagaaatagcagccccgccccaattagataaaggactagtatagagaaaaagcatgtgaaatgatgttttaaactttgccgcatacctgtgatatgaacagctgctgcctgttaggcacagtgggtatactagggcccaatcatctgatcttcctgaagttttatgtaatgttcccagtgctatcacaatgagaatgatctatactagccaccagatctcaggtgaattgtggtgtgctttaaaaatgaaaacacagccggacgaggtggcttatgcctgtaatcctaacactttgggaggccgaggcgggcagatcacgaggtcaggagttcaagaccagcccggccaacacagtgaaaccccatctcttagccgggcatggtggcgcatgcctgtagtcccagctattcaggaggctgaggcgtgagaatca

SEQ ID NO: 70471 - DNA, 1680 bp, Homo sapiens
ttaaggttggctttggtagatttgctccaatagttaagcctgttaatgtcctttttaatttggattctgtaattcacaaaacactgactgggctcctttgggccaggtactgggttgggtcctggacatggcaaagaataaggtgtggaatctactgtctggattagctactttttaactttgtcatctgaaagttaggtaagaatgcctttaatgttctcaacaggtcattattaaagactatgaaagaaagcagagagagagggccaagtgcaaagctctgcagcaagttttactgtagtccagtgatacatgaccagaagtgcaattttctgtagacatatagaatcttaggggcttttttgggccatgcatgggccacaggccatcccctcctccttcccttgagtaagaaacagttgttaatggagtgctatacatattaatgataatggaagactgactgctatgggctactacctagtggacacaaatcccttaataaaatgtaaacatttactccagcattacagttctcctttttgcccaagctacatctgtcttgcccacaaggttatcatgagatgctttgtcaaattcttgcagaagacaagataggctgtgtttctgcagtactcaaatctattaggaggccatataatgtggtgaaaagagaaaggactttgaagttacactggggtttgaattcttactcccacttcatagccatcgtgatcctgacaggatattctaatgcctgtaagcaagctccttttctttaaaatgggagtaccttactcataggactttatgtggattattacatagacagccgtcatatgtaaagctactagcacagagcctggcacatgtttgtttaataaatgtttgctgtttgatgttaaatgaataaatgatgcgggatttatgtttttctttcatggcaattcagtcaaaaagggtaatgggattattttcacatgaattattttgagaactcatgctgtctctgaggggtcattatatttaaaattgcttataggttaaatatttttaaaacaaagcaaatccattctagtgttttcactgagatctacatttccggaattcactttcttttttttgttttttaattgtgacatttgccatactttggtgttttagtgtggctctctttttccagagctgctccaaggttactgatagttacggagtaatcctgtacgtaagctctcttaacttatatagagtccccaagctctcgtgtgatttcctcgctgatttgaggctttgataaacttgggaaaaataagaaagacaattggagtgagggagttactactgtttctctggaatttacgaaggcaatactgttgaatctatgcagttaaattcaagaaacgtttattttatacttggtatatgtcaaacattgtattagctggggaatataacgatgagcaaggtactttaactatcagttacttttcttgactttattcttaaaggattgtgccattttggttttaaccacttcctcaatttggtgtgccttctttatatctgtgctcctgggttatgtacccctttttttttcccttattgaaggtgcttattgaagattaatcaagatcaacagtcccctttctttttagagtcccaactatagaattctgcttg

SEQ ID NO: 70472 - DNA, 1677 bp, Homo sapiens
atggcttttttggcctagtctactacttcttaaaagaaaatttattttattttatttttgagacacttggcttttatttattttttaaacacaccttaacctgagcaacacttggcattcaggttgtagcagtggttttacattttgcatcatagtcttggtctaggaatcttggtttctttgtttgcataaagaatattttgagtgttcaaagtattttgtaagtatccttgaaaaccatattactgttaatttaagtgatttattataatatcttcatacagtataataattgaagttcttttaaaatctttttctgcttagtatttaattagtattttatagaagtttgggtgattttacttaagaaatgagtttttgtgaatgtggccacaaatttctatatctgactgccattttctgctttgtgctttgagttactctttaaacatgattctttgactttccttttgaaagtctttatttggactcctaaactaattataatccttgtttttagaaactaagaagaaatgtgaaaatattcaagcacctagcttaggttttgttttgttttgttttgttttgttttgttttttgagacggagtctcgctctgtcgcccaggctggagtgcagtggcgcgatctcggctcactgcaagctccgcctcccaggttcacgccattctcctgcctcagcctcccgagtagctgggactacaggcgcccgctaccacgcccggctaattttttgtatttttagtagagacggggtttcaccgtgttagccaggatggtctcgatctcctgacctcgtgatccgcccgcctcggcctcccaaagtgctgggataggttttgttttgtttttttcctgagatggtgtatcgccctttcgcctaagctggagaggaatggcacgatctcagttcactgcaacctctgccccgtggattcaagcaattctcctgcctcagcctcctgagtagctgggattacaggcgcccaccatcacgcctggctaattttatatttttagtagagatggggtttcaccttgttggtcaggctggtcccgaactcctgacctcaggtgatcacccacctcagcctcccaaagtgttgggattacaggcgtgagccaccatgcccggcctagcttagttttttgatagctaatttttattgccttgctagagagggctaattttataaattaacctgcctgaattctgtcatctcttaagtatggaagtggtaatgctttactcatttatttttttattttattttaaaaattaacaaatagttgtacattatttaaatacttaagcctgcaccagtgttagcaactagcaagaatatttattttgcacgcacacacacacacacacacacacacacaatcttactatcttactcatacactccccaacggcaggcccccaattaatgaagtctgttgaatttagttgatactagataaagccaggaaagtatttgttcacaatgtagttactatgttgctttcaacagataccttataattatcaaatactactttaggtggtttgctttgacagaacggtagttagcaagcacagcaaatggtcccgctaacagagaaccaaaaaattgattaaacaagttatgaaaagactttaatttggcagatat

SEQ ID NO: 70473 - DNA, 1015 bp, Homo sapiens
ctgtattttttaaaaaaaatcaggttcacagctgtaaagtaaggataaatatctacttcacagagttgttgaaaattaaatgaaaaagcccaagcacagtgcttggcacatagtatgatttttctccccttcctatagtcctagaaccttttgaattggctattgtttaatgttactctccctccttccgtttgtggactgggagttctttactgagatgttgccaggcatttataaatctcttggaagtacgtgggaattgtttttagtatgtgcgtatgagtggtgttctggggagtgagtaggttcatggatttcttcatattcttaaagaagtttataattacttctcccccctcagtaccatgtaagaattaagaaccactgctccagagtaattattataactacagtggtatctcagtagtctggccaaattaaatgtgcctagtagaggtggttaaaaaagaaaagacaaatttcagccttttgattgtttgctgctatctttttttataaatttttatttttatttcaatagtttttggggtataggtgtttttttgctacatggataagttctttagtggtgatttctgagattttggtgcacctgagcagtgtacaccatattcaatatgtagtcttttatcccataccctcctccaaaccttcctccttgagtacccaaattccattatatcatttcttacacctttgcatcctcatagcttagctctcacttataagtgagaacgtacaatatttggttttccattcttgagctacttcacttagaataatggcctccagctccatccaagttgctgtaaaagacattatttcattcctttttatggctgagtagtattctatggcgtatatataccgcatattctttattcacttgttggttgatggacactcaggttggctccatatctttgcagttgtgaattgtgctgcagtaaacatgtgtgcatgtgtctttttcatatgacaacttcttttcctt

SEQ ID NO: 70474 - DNA, 1205 bp, Homo sapiens
agtgtaagtatttggctttatttctgcgttctctattgttccattggtctacgtgcctatttttatacctgtttgttgctatcttgatgtttcagctttcttcttaaatatattcataattttattttttaaaaaagttttctaaagttttttaaaaagagttctcccttgaagaaaatgtctataaaatattaaaaacttaggatttatatcaaatgagatgatttacgaaacagaatctttccatagagcagggcttaagtttttcattatgaaggaaaaaaatatttactagggatcctttgataatatgctttactagtgcatcatatatatgagttaaaataatttgattaagaaggaaacttaggagcatatctcctactaaattgagttatacctgcattgatttacctgggcatattgtagatgtgcttatctataataacagtatttgattgtcaattatgggcagggtactatgacttccacccacttcttccacaagagtggaagtgttagagagctcagatctcagtctgagaagtatcgtagcatagtagttataattaatatctggagccaaactgcctgggatttcaagtggcactgtgtcacttactgtgtgaccttgggcaagatatttaccctccttatgcctcattttccacatctgtaatacatgggtaacaattatctctgactcacagggtgttattggcacctgagaattaagtgaattaatatttgagaagctcttagaacactgcccatttcattgtaagtgctgtagaaacgttaaataaaaatatgtagtctagttaacagaatacttatacccatgaaaagataatttatagtataagacagtataagctgcagtaaatgcagagttgattccctaaaattcttcaggctagaaaaatttgtgtgcattgcgtgcatgagtataagagaacatgaaatttcaaggaaaaagagccatatttggataggtggaattcagatagagaacagagaataggctcaaattagagtggaattttatggacagaagaattgaagaggatgcaaaaaagccatataagttggagaataagtaaagaaatattggaagctgtcctaagaagatagatgtggacacgttgtggaagtctttggatataaagataaggctttgagacttttaattgtaaatgtgggct

SEQ ID NO: 70475 - DNA, 1002 bp, Homo sapiens
aaaaattagctgggtttggtggcacatgcctataatcttagctacttgggaagctgaggcaggagacttgcttaaactggggaggcagaggttgcagtgagcctagatcgcgccactggactccagcctgggtgacagagtgagactccatctcaaaaaaaaaaaaagatcgagtcatttaggttgaaagggaccagttgtctactactgtgtaacaaaacccccaaaatttttgacttaaaacaataatttattatttctcatgattctgtgggttgaccaggcaggtccactgctctttgtgatgtcactggagtcactcatagagctgcactgaactgggagtttggctggagctggaatatccaagaaggcctagttctccatctggcctctcactatatctggtgtgttatcatccagtactctctctatgtgctctctcattattctgtattctaccttaagctttttatatgacaactggatcccaagagttaaaagtagaagctaccaggccttcttaagacttaagtctgagattggcacagcattacttctgccacattctcttgtcaaagcaggttacaaggccagcccaaattcagagggtggggaatttgactctaccacttaatgggaagattagcaaagaatttgtgaccatctctaactcaacaaaaatgtatgggggtaaagaatagatagagtgcttgtggaggggtatctaatttgaaatgactaacaagcttttttttaaaaaaattgatcagattagtaggttgtgatactatatgcacatggaagagagggatacgtaattggattctgctgtgtttcttttgaggtggtgaagatgtatattttatgccaattgtattggcataaaattttaagtcaaatttttcttatgtgaaatcaataaagtggaagttaaatgctttgaaaactttgtacatatatgtgaatgaaacaaaaaggtggggctatactgagaaaact

SEQ ID NO: 70476 - DNA, 1492 bp, Homo sapiens
aaacgagtgtattgggtctgtttttaccaagctgctgagttggttggtggttgtgagcagcaggacgtgtttcctgagagaaatggagatttacaccatcctgtgcttgtctaggaaggcgtccaaatatttatttcctaggcatttcagtaggagtattggtcatgctggtttacggaggtggtcagtgacacgcctaatttcgttggaaactagaattacgtgcggagatttcgtcgaatagtgcctattcgcgttccgagggcacatcttatgcatagttagggctatcagctttatgatatgccaccgatagtatttcccagtgcaggagtatttcataaacagctggaatcaactgaagtgactcatcgaacactaatggttgtttactcattgcagatagcgtcctctgttccttgagtttcactcatgtctccctgttgctttccctaccccattttgaattatttgacagcgtttgtggtttggtgtttggagtattagactaggcggctgaatgacaaatatgggcttggttttgctgttaatctgaagtatgaccttggaaaattgggcaattgtgacttttgtcttttcgcgttctttatctgtagaatggaggagatgccaatcattatttcttgtattggagttgttagggttatataaatttttttttaaaaaaacataaaattacacacttgtacctactggctcttttaaaggataggtgggcatccttttttggattattcgtgctccttggttgtcttgtcagtttttttctttttatattcagggtggatgctgatatactgcttgacttactgcgtatttgaagattatcctgtttgattttccatctaaactgatccaggctgggacttttcaagaggggatcccttccgtttaaacatctccctctttcaggtttggattgattttgaaagaatccttgaggcaatgaagcagagttgtgaaatgaaaaacatttttcactctttgcagccactacctttcatagtctgacttcttaaagtgagacttatatttagtaattctgcttcataacctcatttattctcattcactgcaaattcacatctattgccatcactccactgaaactagttttccatgccaaaagctgctcctctcccaagtaatactatcatgaccaacaaaacccacttgttcttctctcagtaagttcagatctggtttaatggcatcatctttcacctggttgcatgttaaacatacttggaggcattcattcctataacactctctaatcaataaccatgtcctaccagttttaccttaagaggtttcttaaatttactgcatcttctttactatcagcgcatagttcaggcttttagtctgcttctattcttgatttcttggctgattttactccttttctacagtctctgcccttaatcttctctacaccaccactggagttatttttctaatgcgcaaa

SEQ ID NO: 70477 - DNA, 1077 bp, Homo sapiens
actgcagcctggcaacacagcaagactccgtctcaaaaaaaaaaaaaaaaaaaaaaagttaaggaggcattttctaagcccgtgggttcatttctaagcttgagggtttattttgaaccctcaagcttagaaattccagaggttttaaatgtatttcattacgaaactttcttattttctaaaagtttttttccccccaaagaaaaagcttttgtttttcttaccttttacccttctcatttttaactttgtacttttttcttttttgtgtgaggcacaaagccaatttgggacaaacctttaaaaattgactatcagacttatttaattatatttcttaagagcattttgctttatatttcataagagtttctactgctacatcctttgttattatataccagacaagttaaatgttttggaaatattccttccaagaacatcagactgtctcatgtttgttctagagatccatccaaataaaatttgtccttgatgttaattctatttaaggcatatagagacttactgaactgttctgctcttacaagaagagtagagttgtttgttcagttcttctgctattatatttagtattctcatgttagtgtgttggagatagtttttacatgtatttggtaacatagtaaattcattagaactaattaattttctttacctttgctttgagtagaaagatattttgaattcactcttgatttccgttttcctttgtaaccatttctatttctggctagctatttgcagcagaatgctttgcagtttagttttatgttgacttgatactaggttgttaattcacttattcaacagatagttcatctttgactacttactgtatgctagccactcttctagcactgaggatatggctgtgaacaagataaagttcctgttctcatgaagcttttattctagtggagggcctagaatatttgtcagggctttaaatttaaatatttcttcgtcacagctttaaatgtggaaatgtgtgaggcattttcttttgtatgtaatatatgtctcttctgttaatgagggaaaaatctatgtaaa

SEQ ID NO: 70478 - DNA, 1742 bp, Homo sapiens
agtataattatctccattttacaaatgaagtaactgaggctcagagaaattcaattatttgtcccaggtcattcagttagtaagatggtagtgctgcaatatgaatccagtctgcctgcttgcaaagccatgatcagtttttttgggcaaagcttgtattttacataggaataacatttaaaacatttatatgtggtaggataattattttaaaaatcattttttaaaagaacatataagtagccatatctaatacaggtggaagccataataatataagtgctatactgattccctgggttcaactaatttatgttaggcagtcatggagagcactgtcagtaccttttaaaaaggtgaacaaaaatattttgccccactttcttgtttttaagatgctccaagtcatagaaatgggaaaagcaaatggtcattcctgttcagtttgacagacctgaaatcaatcaagcaaaacaaagagggtatgggctggtcctatttggtattctgtctaaaggatgacgtcgttctccctgctctacactttcatcaaggagatagcaaactactgattgaatctcttgaaaaatatgtggtattgtgtgagtaagtatcatattattttctacttattgaaaccagatcattgtattaatcccaaagcaaactatttttacttgaccttgggcatcagtgacctatttgcatatgaggacatgaacagcttagttttttctgggatattgatttctttggaacaatgactgaataatattgtgttattttagtaatttgaatctgagacttaccacctaattactgttacaaagaaaagggtagtttaatattttttatacatttaaatgaatgatgatgcattagtaatttatggcctatgtgtttacctaatttaccctttattatgtattttctattaaatatacagttttacttgtgatgttgcagctttaagtcaggcaagtcctaagtcctttataaaattatttctcagttggaagacagggccttaccactttccaaaaatcttgtctctcatttagttactgtgtgcatctgtacacacacatgcttcctcactgttactctcagcaaatattttttgggtatctgttacatcccaacactggtagttgcttgatatttagtagtgaataaaacaggggtgttcctaggaattagagaattcatagtcttgtgaaggatgtcaacaagtaaaatggcaattaaaactgaaggactaagatgaagaagtgtaagccgctttgggagttcctgggaaggaatgaggggcacttaattcagactgggagtagggatcaaggaagacttcctggaggaagaagcatctaagtagagacctgaaaaatgagtgaccactataaggaacgggaaggagatacttagagggaaggatgttttagatgaagggaagagtacaaacatgatgtaatcacacaacaaattaattcagtattacaggtctgcaaagtatgaggaggggagggtgatacagttaaagatgaggccaaagagctgagtaaagtccaaagcacaaagcatcttttaagtcatgttagcaggttcttccagttatccaggtgagattaaagtggcctgaactgggatagtgacaggaaagatggaagtattggagtctttagaattagattttgtgatggattggatatatggaggtaagaagggagaagttgaggttttgg

SEQ ID NO: 70479 - DNA, 1080 bp, Homo sapiens
agtaagtatcatattattttctacttattgaaaccggatcattgtattaatcccaaagcaaactatttttacttgactactatttttacttgatcaactatcaagttgatcaactactatttttacttgatcaactatcaactatttttacttgattacagaatagaaaatactattctgtattgaagagataaccagtgtaaggaaggggatcaaaatggtcctatgaaaaatatttcattgaaggatgtggtttaacttgaagaagagaaatttcaatgcaacattaaataaaatccaaacttcttcactgtcatcaacaagggcctgccctatcttagctctgtttatctcttaaaactcatctcatgccattgtcttttccattctactcatgcagatttctttcagttcctaaaaccccctaaactctttcttgtcttaaggtcctttatgcatactgttttttctacttggaatattttcctctctttctgatccctgaggtctccatttaatgtcacttcctcagaggggcttatgccctctttccccatctaatgtagttttcctatctctgctcctcactatctaattttcttgtttgcttccttcatggcatctaacagcatacaataatttggtctattcttttgtgttttactctagaatgtatacttctgaaggatagggattgtatctgtcttgtttccatattcttcctagttcctagctacagtttctggtacataataaatgtgcaataaatattagttgaatgaataaatggcatgatgattatcaatttgacaaataatttttgaaaggttattgtgagaaacagattggagatttgctttatgtgactccagaaagaaattagaagacaggttttagctcaggaggtagagtttcctatcctggatgggttcaaggatagtcttgataaccacttaagcagttaataggggtatatgtatcttgaatgtgtgttgttcatgtttcgtgagagtagcaagtgaaagcttgtttccttttctaaatttgtaaacaaatgagaagtatgagaatcagagatgg

SEQ ID NO: 70480 - DNA, 2286 bp, Homo sapiens
gatggcagtgccagcagcactgtgctaggaataaaattttgtttctttattagctacttttcttttctgatgctacatttcaaagtccatcatttaaaaaatgccttgtgagagaatctgtaagtctgcctattaattatgacccctcaaaatattcagaaaagtaaatgttttaaaatgtattttttttccctcctatgtcaaatgactcaacctcagccccttttgaaaggccaaggggcttattagctactattgtatatgcagatcgagtgctgttcctgactgtgtaagaatataagatcctgttttggatttcatatccactctagcattactgttacatcctgttatgttagaattgagaagggataactgttattaaagatcttatctcaaacatttataataaacaggaggtgtatagcagcaaaataacacatttaatttttattttaaacatagaaaatttgtagatttattagaactgactaagtcataaaactcactaaatagaaaaaagactggataatttgtcagatgactagaaattagatgtctgttttggaaacattttgttaaattctgtcattactaagaaatgtgaagagacttgcttctagagtttaataagcaagaactaaaaacatagtattacccaaccattcataataatcttgttaaaatatgttcatatgtgtgtgtttgtaattatggttagcatgattaatgatctttatcaaataactaatatagcttacatttttaacatcttatattgcagtattactaagctgtgaatgaaggtggaaatgatttcaaaataggacatattttctgtatgtaaatattatatactgatgactcctaatgtctgttttggctttctttaatttttatgataataaagccagctatcttgtaatggttttctactataattctagagaagaatttaggttcattccagtttaatccttttggctttacctggaataaaaatacactttatatttgttttatttacgttatatacagtgtatttagtatttgttaattttgtattttatgtttcatgtagttttgaagctcctttaaaatagttactaaatatttgctaatgtattaatggaaaactgttaaaatattttgggttttttttttttttggtaaggaacatttgtgttagtaattgttcatgtagtaattgatacagtgtgttagtattttctacaaatcctcttttttattatagatctccacaggataaaagaacacttcttgtgaattgtcagaataagagtctttcacagtcttttgaaaatcttcttgatgagccagcatatggtttaatacaagtatgttccttaaatctatcctgtattattctgactgcattattttatataccctgtacttctcatcttctcagagagtatgcaaaatgagacaggtacatatatatacatagatatgtgtgtgtgtgtgtgtaatctttttggaactattctctaattttacagaaacaataataagttttcatgttatttgcaagactcagaggcttccttggttcttagttactcataaggaaatttctcagtttattataatactaaaattagacatcagtagatttgtatcataacttttattgattaggccagggatcacagagtaggccagtttgaattcattaatgatcggtttaggcaaaaatctggtttgaatttaagtagattgttttgacgtcatgacaatcttattcccctaagaatatttgagtactgttcttacatttggctaaaaatgtgcacttaataataggcagaagtaaatttaattatcactcagatgactatgtaaagtaatgagatggtttattcatttatttatttattcacttattcatttaacaaatatgtgagtgcttgctgtgtcccagctattcttttcctggttttgaagatgtaaagattaataagatatagagggaactttaggaaagaggatgagagagagaactaaacactgtttaaaatggacaataaaaggataattttacttattgtgaaaagaattatttaataaataactgtttttgctaaatatgaatgagcaaatagtttgggcttcagaagttaccctggcacttaacagtagaaaaaccttttgctgttttccagggtagcactgtcccagaataaattattcttgttggcatgatttactattcatataattagattaaaatgtcaactaatatttaaatatgagtttttaaat

SEQ ID NO: 70481 - DNA, 1080 bp, Homo sapiens
gtactatagaaatagaaacttaattttggtgatatctgcttctttccataatctgttcttaacaactttttgctagtatatctgacaatgagtgcttgtcctgccactaagttcttcatttgttctctatcttatactctttcttgattaatgttggatctctcttctttgattaccttttgataatgaagtttgtttcattgggtgcatagcagagtgaggagcgaacctttcctattacctcttagttctgttccttacttgcatgttttctcataggcatcagagacagctagtcaggatactacttttagggcttttattctcatgtaatacttccttttttaagtaagatgggttttggcctgaattatggcagatctttatatgtgctcagtaagatttaaatttgctacaattctaggcttgtacatagttagaaaactataaatatctaaattttagtgcttaattaaagggtttatcttgcaaatactattttaaaattaccaacatctgttaattgaataaaacactatagaaaatgccgagtgaagctagtgggtcatgaatcaattctgagaaatacaaactttagaagaaaagctaatttttagaatatgattaatggaataattatatattctctctttttaaataatacagcatatcatttggtttgaaggtttcttacagaatttacatgttgaatgttctatacttacataattgaacccaaaatagtaaagagctttcttttaataacaaatatttttagtctgtggggttttctgtttctgaatttataacccagtttgttgtgtgtttagtagaagggaaatacatgtaatgctaactattatagttaaactaaacatgggaaaataaggaacaatcttaaaagtattagaagtcatgtctgaaaaacagtattttaaatttagtttctatatgcctttatttcatttcactggttaaatatgtacttattattgcttaatcttatttttagattgatttgggggaacgccctgttgttcaaaggagagaaccggtatcactggaagaatggactaagaa

SEQ ID NO: 70482 - DNA, 1437 bp, Homo sapiens
acttttacatggcttcagtgcagatagattttggtgaataaaaatgtaaactttggattcgcaaatgaaagactattttccagacttcccaagctaccaataaagaaatttctacatgattttaataaatacacaaaagttaccgaagttgaatgataacgtttaagtaaaaaggcttagtataagttcgtgtcccttcattggttcaagaacctcttaagtctgaaaatttttcaagtcttgaaaattgtaaaacaaggataattgagggttttataagaggaagtaaaaaagaagtttgacatgttcaggtgaaaaagtaaaactaacactttttcttatttttaagtgagggatctgactccttaattttctagtttttcttttaatcaagggctctattactgtcaccattgagaaattgtaataatatcaagagacatgtaggtaagtggtcactttaggtacaaaatattgattgggttaagcccagttgctggcattggttgggtgtagagagtaacaaaaaaagaaagaaggacgtagatatgactatttaaaagaggctcttaattttgtaactcctgttatgtgaatctaaaggtctgattgttaaagcagttgaacccaaagttcttgttttatgtggcttactcatggtagtttggcattgctaaccactctgggcttgcaactttcttgttaatttttgcaacattattctcgcttgatttttttctttacttctctgactggtctttcttaaacctgtctttgagtgtatactcttacatttgatgttcctctggattatctcttcacccctcttctttctcatgatgctcttgcacattatttttaaaaatattacccactcttgatagtgtatctgcactgagacacgtactggaagctatatattgtttgacatctcaatctaaaacaactcatctttcttacttatgactagagttcctcctcttcatttatattcttttcttggtgaacatcagtgtctaccaatttctaaatgcaaaggagaaagatacaattttaagcgaaatggtggtgatatgcacaacttgcagaaggttacataaaacttgggttttcagagatgattttttcttttctttttaggatatgttcaaggaatgagtgatttactttcccctcttttatatgtgatggaaaatgaagtggatgccttttggtgctttgcctcttacatggaccaaatggtaagaacagagattccttccattaaactgatttttaaaattttagttgtataattttatagtataaggttgatttttatatttagccaactatgatggaacttaaaaaaattacctcatgccttttgttactttttctttttagtagcctttcaagggcttagaaatactggtggtatttttaatacaggaaata

SEQ ID NO: 70483 - DNA, 1042 bp, Homo sapiens
tctgccttctataggtaatgtggaccgaactaccatgtacaaatttccatcttcttctctgttgtgctattctggaatcagaaaagcagcaaataatggaaaagcattatggcttcaatgaaatacttaaggtagttattcctttaattcagattttagtgttctggcttttctatttggtggtcctgatatacagaacgtttccttggaacattattaaatctcttgagtaacttaaattgtgtcaataacagtgctaggaatgactatctgagaatgacagttcaaatacatattggccagttatttttacctggctaattaggaagaaaaggaaattcaacaagtgctcttttatgtagtttagtttttcaaaaattaattgtcttttgattataactttgagatatcagacttggaatagctgctggatttaatgttccataagcttattagctagtctttagctttaaaacttgaaataatctaaagaaagatatattgaatttcttacgtatttgtagtatatgaatgtttttattttaaggattttatctgcagtgaaatataactggtaataaattgtttatataatagaatataatagtgtattcagtttcgatatcattttattttgttgatactttttagcatatcaatgaattgtccatgaaaattgatgtggaagatatactctgcaaggcagaagcaatttctctacagatggtaaaatgcaaggtatacagtgtttcaagtaattgcaagatttgtttgtttttggtgggttgagatcaagaaagatttttcttcttggaaataaaatagcaactttagtaagctgagggcaggcacaaagtattggctggctttttgtttgctgttctagatttacagcacttaattgaaaacagttgactatggcagataggaaacagctaataataaggcaaaatggtaaaagtaatgaaaatatttctataacaaagaggctgtagaatttcagcaatgatatattacccagttgagctcatgaatgcagaat

SEQ ID NO: 70484 - DNA, 1188 bp, Homo sapiens
tttcatttggagctgagaaaaatgttgtgagaagggtacatgacatttacactgttaggacaaatgctcagattctggaatcaatgtagtcttaaacagaagtgttactttgtggttatttttcctctgtagtgaaatatggttttgagtttgatttttcatatccaggaattgccacaagcagtctgtgagatccttgggcttcaaggcagtgaagttacaacaccagattcagacgttggtgaagacgaaaatgttgtcatgactccttgtcctacatctgcatttcaaagtaatgccttgcctacactctctgccagtggagccagaaatgacagcccaacacagataccagtgtcctcagatgtctgcagattaacacctgcatgatcactgttcttgcttttttgggaagagacactttgttgcaaccctttttcaagtacttgaaagttgaaaatttgaaatcttggtattgatcatgctttaaggtttatgtaaagaaagtgtactgatgttcttacattaaagctttacaaagatttaaactaattatttttgtagttacttctaccaaatagcctttccttttcgataacattcctcagtatttttatagccaagtacattttattttcttgctgatgaactggaattggataaatattgcaagtggatgagttggaaattatgcactttgaaaaacattcactttgtttaagcttattgggtttcagatttgattaaattaaatgtggaggctttctatagcattctaagctgagaagtagattgttacccagtaatgaaataaaaaataaaaataaaaggatttttttctctattgtttacgacagtactcagcttaaatatttatgctggtcaaatgtgatttaaattggacattttcatcaatgcagtctaatgtgtagataaatatttcaaccataataagtggattggcagtatattttttacattgaacttttcttcacttgtatataaagattatatataagtacttatttatgagtataagaaaggttaggcatattttcattaactgaataaacgacttgatttatataacctggtttatcaaaatttaacatggcttcagtatgagatctttttcaaaactattttcttaaacatttatttcatgagattatgttcaaccctgtacct

SEQ ID NO: 70485 - DNA, 1035 bp, Homo sapiens
agagaaaaaagttgtgcagttctaaaatggtcctagagattgacttttttcccccaagaaagttagggaacaaaacgaacttttttcctggttgagcattaactgacaatcacgacagtagaaccgttagagtttagtttttaatattatgtgtgttatctttcatcagttaataatgagtaagcctattcagaaaaagaacataaactgatcaaaaactcagcatctccagcctttcatttcctgctattcaggaaattgcttagaacatcttgatgtcctccttgttcttcctggacagtgactttttgggagtttgttcctgctgcgtaatgtgatacccacttcagattttttttttatcaatacatttagtaagttgaacttctgtcaagttttattacaaaattacttgttaaaacaatttttactaaactgcatttctatctagcatatttttgatatggaagtgatagtatagtatagttccaggagaagtcttaaatcagtccacagagtccagttagcaaatactctgtgccattaagattgctaaaatacacagttcaggtaaatttactagtgttttttaaaggtttatttgttttcacaagatgctctgtccacacccttataacatgtaaaatattgtgtgctgtattatgtggtaaagttgttaaaattcagtttctaacattaacttaaaagtacagacaatctaacatgatgatttgacttacaaactttcaactaaatttatgatggctttaaagcagtgcactgaatagaaaccatactttgagtacccatacagccatttttcacttttactacaatattctataaatcacatgagatatttaacactttattataaaataggctttgtgttagatgattttgcccaaatgtaaactaatgtagtgttctgagcatgtttaagttagggtaggctaaactatgtttggtaggttagatgtattaaaagcatttttgattaatgatgtcttcaatttatgatgtgtttattggaac

SEQ ID NO: 70486 - DNA, 1041 bp, Homo sapiens
gaattcaaacccaggctgtctggctccaaaatcttgggattcggctgaaatggattccagaaatttaaataattcagagatcaaaatatagcttgccttataaactcgatgatttgattgtcagaggaatgatataacagctatttttgttaattttttactgattttactgatggtctttgtagaaaatttgaaaacttaaaaaagtgcacatgttataactcataattttattaacctgaagacatgtgagtattgcaaatgtgttttaatttaggtgcactatagttaattaggcatcagataaaatgactcaggcttatactgtaatattttgttattcaccctatttagacttcaattaatgacagtgttcagtttccttttactactactctgtaatttgtaaatcaatgtttcaaaaaggagtttgattgctttttttcaagacaccatgcttttatgaagaattcattacctatctggaacagtgctatgattgtagagggagcccaggtgttttgtaactagaatttctgccctcaaggagattgtggttttgtcgaggagagaatgcaatatttacagaaatgaatgaattagagactcgcacaatatggaatataatcaagcaccaacattttgtagagtaaatatttagcactatgttgaaagagggatcattgtacaatgctgtaggaataaaatgcacataaagagaagtcttatttttacttcatgccagaccaaaaaatacatgaatttaattggagaagaaaggagagaagaggccattttgagaattgtatagtaggaaagtccatgaataccctaggatctatgtatcatgctgatggagtcaacatttttctataatagaatagttaaattatgggataaattgccctattgaagttcacaaataagaccccagcttaaatgattcatttttgcttaagatacaataaacatatatattttttattgtggtgatgatgattgtgatgatgatgataatttactacttgcaaatactaaagc

SEQ ID NO: 70487 - DNA, 1043 bp, Homo sapiens
ggaaaatgcaaagtctacctaagaggcaaaggcttttttattctaaaaaatatatgtaccattctcacttttgagaacttttaaagtaatatattttaaaagtttagtaggaagatagaaagtagaaaaaaaaagtgaagaaaatgatttacattgagccaagcatagagattaaatgaaaacacagaactacttaagtccaaatttgtgcaattgtggcctccattttgcacctgcactgtgtgggcataatttaaatgaaataacatctggcatgttgtaagtgtagtcatcaacaattgcagaagcatttaagttgtgactgcacttatggggaaaaaagagagaaaacgcaattaagaagacgtgagtctaagataggattaaactcacaatttctacataactcattctttagactccagaggccaaagccccaagctgaagagaatctcacagagtatcagaagttctgaagcaagtagttcaatcatggagtggtggaaagagagtgggctttggaggtgattagaatgggttacacagctcagcctcaccacttcctaggggtagggagttgaaccaattaaacgttttgcatcatatgtctctcagttgtaaaatgagaataataaaaaccacatgagtttacagtgagaattacagtagagtgtgataaagtaggaggcaccatgaatggcagcatcctttctcaactctcgttatttcttatatttctgtccctatattttatataacaatgatatttttatgtatttaaattgactctatgtgtctcaatttgacttataaattcacctacctcataccccagggattggggaatcatttattcattctaaaccatgtatagaaaacctcttatgtgtaaattaataggccagatcctggaattaaaattgtgagcatgaagagacatgctcccttggttcatataatctactgggtgacacagacattaatcaactgtacataaaaagtaaagtgacattacaaatgtgatatgcaccatggatgaggga

SEQ ID NO: 70488 - DNA, 2395 bp, Homo sapiens
ttccattcaaaaaaagaccgaaagataaactatactgtaatttgtttccttgcaccatctagtggatttaaatgacaactgcagcattgctataaacgattcaccagtcaatcatgtaagtcaaattttcaaacacctccggagaactgttcctaaaatgatgtttcgaatcacaccacaacagtgcatataattattaaaattttccacttttcagaggatatcaattaagcgtggctgctgaattcattagcgaatgtttaaatttacaaataaagtaacataaaatagcatcctcgcaattttttaataatcagagataatggaagtcatacactaagttcatcctgttccttttcataaactcaaacgctctcaaagcagcagcgcgttgagaagccccaagagtctgcgcggaaccagtgcgcaggcgctctgaggggcggaagcggagaggcggggctaggcccgacaggggagcggaagaggcccaggaggctgggtgaggcgctgagacggtttggcggtgagtcctgggccaggcgcagctgaaaggcccgcaacccgggaaacgtcaaaacaaacagaaggacttgggattccggagcagtcgcccctatcgctgctcctgcagttgcggacgccaccgaccccgccgccggaggactgggcactgaaaggcctctaggcctaggcgcggcccgcggagccagacgtgttgctgccgtgagtaaaacgagcgccctctccgcactcgtttacaaattaaaatggaggaaatttcgttggccaacctggatactaacaagctagaggccatcgctcaggagatttacgtagacctgatagaggattcttgtttgggattctgctttgaggtgcaccgggcagtcaagtgtggctacttctacctggagttcgcagagactggtagcgtgaaggattttggcattcagccagtggaagacaaaggagcgtgccgcctcccgctttgctcccttcccggagaacctgggaatgggcctgatcagcagctgcagcgctcacctccggaattccagtagctgcaaaatgagagtctgaaagtggccaggacaataacatagactggtcctgtggcttcgaggagtaagctaagtagaaaaaagtagaaaaatcagacaaaagttttaattcccccttgaagatcctagcatttaaaaacccaaagtggataatttaggaatcctttttttaaagtgtattacctggagcaagctctgaagccctgggcaggaggagctgcacagcctgcgggccatgcagtgcctgttgatctctaaacacaccaggatgtgcgcaagatcctgtagtgcccccagtgcacaggtgagcagttgtgtgcccagcatataaaatttttggttcctcagcctttctgtctgcctgatgtcaagggcttcttggacagtttggacgttacagttcgtcaggccgtgatcagtggcctgcagtgggactgctcctttgatatctgaacctctgttatgggcttctctgagacaagtaaatgtcaggtgcaagatctggatactaacagtttcagtttgggaaatccaagaaaaagaattatcaagtttgatagggaagctctgtagccttgactccagcaagaagaaaaggtcaaaaccacgtgtttcccaaaagtccagactacaatgattcagctgacttgaggacaaggcctagcatttggctgagcagagccctcttccttgccctccaacctggtggcataggcttggcaaatggacaacttggttgtccagacaggttgaggattcggttatgatcccctggggaggtagcagggacctctgcaactatgcatgatttctcaaacttcaagattcatgtctggatgtattatgctgtggatataagtttagtagggcggtcatttcctactctgagttactggttacctagccagtccatgggtgtgacttggtccttaagtcaggtcactatctgcctcccaccctgggggcaggactgaagtatggaagagcatcatggctgtgcaggaggctgtggtttgaaaactgagcccagagggcactttcagctgccctcaataatgtgaatggattagtgctaggagccaaggagcaggactggattatctcatctgactgtgtgcagaatcctgttgaatgtccctgttttctttggttgggcagtcagagctctgctatggtgaacatccagactgtcaccactttctgtctgccgctcgaaagggatagtcctttccactcggtcccctttggatcttcttgacaacaggagcagtccttttattgttagaagtcagagaaagacctccagaatctcctgactttagggaatggta

SEQ ID NO: 70489 - DNA, 1058 bp, Homo sapiens
cctgtgttcctcctgtcccctgctccactgcctatctggtgccccaggtgctgcttgccactccagctgtcacattgaacagtttcaattcagctcttaatgctcctgcttccgaagcctgcccaatttcttttttcttggcctctgttttttttttttctttctttttcccttgtttttgtagaagactcagaggagaatctttcttatggctccctctgttgagattggaattggaagagaacttaattttttgtatttaaaatgcagtgtcatgcctataagcatttctcctatataggactgctttgctagtgtgccctcttgctgtgtcttacttcataaggagttgtatcttcccacctccatttcaatactgccggttaggacctaagtagaagagcagtaaaggctgattgacacacagggggatggagttggtccttgtccattctctcacccttgctgtgcatgtatcaatccttatcccagaaggtactatttagactgtatagactgatttagattacatactttagaggattaaggaaaccatagagtttgggccttggaactgttactgccttgtcctagagttgtcctgatcaggcttggggcctagttacagattagtcttaaagaattgcattaacttaaaaaaaatcaaaccttggcaagagctaaaataatttggagatatctttgcccttgacttgtagacgacatctaagaggatgaagaaaggagagtctaagtgagactctggcctacttcctaacaatgtcttggaagtgggatgatggtaaaggagaaaggccacagtccaatccctctgccttcagatagggaactcaaatcctgaaattactgttttctttctggccttttctcctggttagaggaggaagcggaaagtagttttgagtagtattttgttcatattaccccccttttgttttttgtttctggcccctctaccaatagggcagtagcctcctgccctggatgggtataaggtgggcttggtccaacaggtgcccagagggtacatactcctt

SEQ ID NO: 70490 - DNA, 1021 bp, Homo sapiens
ttcttcatgatagtggccttgtggaattacattattatgaaatgtctgccaaatcagaaaaattttattgggtggggtacagttttagtagaaagcatagtttattattctcaaattcgttgaaaacttataatatgcatagggatataggataattatcaataagtataagctgtacacaaccatttaagattacaaataatgtgttgggtttcctcctgaattgcctacattaaagattgtgaaaaacaaaattcccaatatttttaggatacccctttattcgtgaagctggtatgtctaagaaggagagatgaaacataagatttatcttcaataaataagtaaggctgtcatgtagggttttttttaattgctaccaagccgtctttaatgctacaagagacgctggcattatgtaatgccttttgcatacatcaggtcatttttgagaatcaaagagtaactatataaagagttccattatctctgtccttaatgtgggacacaaatagaccaagtaaattgtccagaattacacatatagcaaatggtgaagatatgcttcaacgccaatcctgcaaaatatactttctactataccaaaaaaagtaataggtacatgaaaataatgagaaaaataaaaataaaaaactgagcaagataaataaaagatttaatgtgaaaaatatgtctgccattaagaatatggactattaattttaaaagaatgtatttttaatgtgcaattttttcttctacatgtatatgtcctatgtgtatgaattaacatcttattctaaaaaatagtttatcgaaatatttgtactctttatttcccacaaatgctgtcctaataaatatttacaatttataaagttagtgtctctaaactaaaaagatataaattttataaagggtgaatataaataaaatatattaataatgcatttatatgtttataaaatatcattttgtagtaaatgtatttgagagtatatatatatttttttaaagttct

SEQ ID NO: 70491 - DNA, 1033 bp, Homo sapiens
ccaacagattttgagagtcattccacttcaaattaaaaatttagttgaataaaattaaagtataaattagattaattaaattttctgagtcttcttttgatttatctgaagctatggtctatgacattaaactttcaataacaatgtgtgtgtgtgtatatatgtgtatgtgtgtttctttgggtaaagatataggcttacaaataaataagccgtaattaagctggattctaattgaagacaaaactcttttttttccctggagagattgaaagtggcctgaaactctgtgtggtagtatcagcacagtattcttacaatccacggctgaaggacagaccaatgccctgtaaaggacatggacaagactgcacttcagaatcaagatacaaaatagataagaggttctactcccctgtttctctacctatattgtgagcttgcaaagatggacttctgagatttaattgacagtttcttatagtgggcagcccatgtgttcttagtctctctaaactccatttgaagagagggtgggtatgacatttggaggtgttggtatggaggctggattgcagaatgggcatgttaacaggccagaattctgacacaggatggtattattcctttataaatataaacctacatgtaagaatattttgaacgatgatactgaagagaattctctattttcattttccttttatttttttctgaaaattacaggaggaaatagtggttttaaagttctaatggtcagaaactacatatttaaatgactgatatatgtgaatcaaggttgagaattcagctttcaagagatagtattgaggtcttttattatgaaacttaagtatgtttaccttactggtccaaatcgcttgatatgaacattgtgattagttagtacattaattttaaagcatttgcatttgtcaaatgatagaccccattatgtatatatcttcactttgaacattccagatgttcaaatgttggcagatatataataacaagcatcagtttctagcct

SEQ ID NO: 70492 - DNA, 1013 bp, Homo sapiens
tggccaagttgggtaattccctctgtaaagcagaagaaggatgtccattagaagtttttcggttttttaaaattgcaatttactatgaatccttaactaaatccagaagaatagtggagtgaagtacaaaggtccagagagttggtaatagaagtgaagacaggaaggcagaaatggaaggctgctaatatttgcatagttcattctatgtacctgtgtctatgcacctgttttaatctgcatcccatttaattgtgacagctctgagaggaagttattcttgttttacagatgagacaaaagatgtaagagatacctttaatcacaatttatacacttcagagtcagaggaaacctggatttaactccagggctgtgctccctctctttacctaccctctggcctatatgattactgccatttaaaaaactgtccatcttagaaaagctatggtgacccacattcaatattctcagttggtcagccctccataattttcactggataggagccatttggctggtgccttccaaaaaaataataaataatggtatgggggaatttctaaagtacaaattgttttcacatacaagatgtgatatgaataatagctgctaattagtgagcactaccatgtgcttgtctttgttctaaacaaccttgaatgaaataatcttcacaaaaaccctatgaggaagttactgttgtctatttatacccattatatagctagaggctgagtcacagagtataagtaattgaccaaggtcacagactagaaagtgaaataatatccaagcattttatatccccataaatatcctcatagtagtaatggggagagggggcacatttatctcaatgaacctgccattgcactaattttttttggaactctgcttttggaaaaagttctaaacttttttgtgtaatcgtaccctttggcagtctggtgaggcctatgggctctttctcaacatagtttgttgttaaatgcataaaatacatagga

SEQ ID NO: 70493 - DNA, 2793 bp, Homo sapiens
gattcttttatgctgtgatcctgtactttgaatggtaagaaaaagttgcattctttttcactgcttcctttctctattttgttcacacttttggcattgattagatagttggcttctattagggggacttccacacactctcaaattattgtctttattaccaaaatgttgttaaatataccaaaatcttgttaaaatactattaattagtcattcattgaattaatattcaatgaattaatctaacattaaatgaattaattcattgaatattcaattaatattgaattaatatttggaaaactttaaattttcgttttgatattagaggaagtagattttgacctctagcttagggttagctgattaaacttattgagaagggatacatgtaattttaaattattttaatgtgcaagatggaaaataatgactcagaagttccaaaatatggaaaagaatgtaggtaaaataatttagtctgaagtaggatttaaggaaatagtcttaatatagttgaatccagtaattggttcaattatgccatttatgccatttttatgtatacttgtactaatatataaagtattttatgatttgttttatcttaatctgaagaaatttctaactgctttaggcaagtgtttttatattttatactgtgatcacctttcaattattcaattataagaatactctgaagttaactgccttaaacatatattctttgttaaacatatattctttgttttacttggtaaaatctaaagtattacatgtgttgtgcttttaatttgtctagcttctactgaaactaaaattgatgtggccagcatcaaggaaaaggttaagaaagcaaagaataagaaactgggagctcttacagctgaagaaattgcacttaagatggaggcagatgaaaagaaaaagaagaaaaaaaagtaacatacccaaaactccttgactagaactatctccttttgtaaaggattttgagatatcaggcattagttgccttatttgtgagaaattttctgagggctttttttttttttggtggtggtggttgttcatagaagagtgttctttataaattatattattattgtattttttgaaaaatttatacgagaaagtggtatataagtctttgtatacattacgaccattgtgattatccattaaatccagtgtctgatgctattggttagtaatgatgtcccagcatttgatgttccctctctaatgataacaagtaaatatttaggtttatcccttttgaaagtttggttttacttttaacagtccatgaacagaaaattaaggcctctaaaatcagatcccctagttactcctctgttctgaatctggggaagtagtaaaccaaaaagacagggaaaaccagatatttagagtcgaagcagcatgcaaaaaataataatgtttttaactaatgaaggctactggagttactaagaatcacctaaaaatgtgctactgtaccttgctcattttgcagatttagaagctgaaacatgggttaggttacttactaaaagtccacctgtggcaacctgcaaataatgcttatttatactaaagatgagtttatctgatagagttaggaaatttcttcttttgagtaagagtattgctataacatatatttttttctgaaatgttttaaaatagaagtacacctaattgttattggttaaaaaaaaagccatatgtgaatgaggttggtttttgggttttttctttcctgaattgtattagtccaaaagaactaaattagggtacttgtgctgtaccaaaatggtaattataacagacagtattagaattactgaattaacaatgagaaagagagaagtgtatctgttacgtggatatatgggccagcctggatatacaacagagtagtaacctgtgaaacaaacatagaatatcctcttagacattgttcctcataatgcactgacagaattcacatagctcttaatgaaacaatttaagattgatgtacgtacgtttgacttggtctcgctgtcggttaactgtaaagttagggggaagaaagaaaaaaaattaaaagggtagacacagttgagagttttattttaaaaagctaagtcttataattatgaccattaacttgctttggctttattgcagtgactttccaagtttaattattcaaaactttttgaactgactgaattaacttggtatttttaagttgactttttacataaactttataaaccttttataaaaaggaaactataccattactataaatggaaaatcattttacacatcatacctagcaggtaataaaatttaaaaaataaaaattaaatattagaatgtgagaaatttattaaaatatagttctaaaaataagtttcttcctgagaagaatgatactgtttatgatgaatccatagtgaaaagacagtgacctctctttcatccagtctagtatatcactaaatcatcattacgatgtttggctatcaagtcattaattactgtcctcctttcactgagctttattcaaattttgacaatcagagcactgggaagaaataaattccacaactgcctttagccttctggatactttcttttataaaatagaaaccttttccacaccagttctgcagcagtcgctattagatgctcgtggtagaacccatcaatcatctggtcctctgggtactggtgagcatccctggtcttcatacctgtgagtgggctttgtggtgaattactgtaaatatgcta

SEQ ID NO: 70494 - DNA, 1074 bp, Homo sapiens
gattttccatttatagtaatggtatagtttcctttttataaaaggtttataaagtttatgtaaaaagtcaacttaaaaataccaagttaattcagtcagttcaaaaagttttgaataattaaacttggaaagtcactgcaataaagccaaagcaagttaatggtcataattataagacttagctttttaaaataaaactctcaactgtgtctacccttttaattttttttctttcttccccctaactttacagttaaccgacagcgagaccaagtcaaacgtacgtacatcaatcttaaattgtttcattaagagctatgtgaattctgtcagtgcattatgaggaacaatgtctaagaggatattctatgtttgtttcacaggttactactctgttgtatatccaggctggcccatatatccacgtaacagatacacttctctctttctcattgttaattcagtaattctaatactgtctgttataattaccattttggtacagcacaagtaccctaatttagttcttttggactaatacaattcaggaaagaaaaaacccaaaaaccaacctcattcacatatggctttttttttaaccaataacaattaggtgtacttctattttaaaacatttcagaaaaaaatatatgttatagcaatactcttactcaaaagaagaaatttcctaactctatcagataaactcatctttagtataaataagcattatttgcaggttgccacaggtggacttttagtaagtaacctaacccatgtttcagcttctaaatctgcaaaatgagcaaggtacagtagcacatttttaggtgattcttagtaactccagtagccttcattagttaaaaacattattattttttgcatgctgcttcgactctaaatatctggttttccctgtctttttggtttactacttccccagattcagaacagaggagtaactaggggatctgattttagaggccttaattttctgttcatggactgttaaaagtaaaaccaaactttcaaaagggataaacctaaatatttacttgttatcattagaga

SEQ ID NO: 70495 - DNA, 1104 bp, Homo sapiens
tattcaagggagattgactgcctttatgaaagatggagaagccactcagagcagttgaaggaactacttaattatttaattacattatttaatttggtacccattacctgatttttgcagtattaatcctcttctccatagctcattaaaatccttgtgactaattcatttttctttgcaaatttcaggttagaaaagtagtccttgatactatgaagaatattcatccaatttataacattaaagtgagtggtaattatatataactgtaccagtgattatcatacttcttttagctacagaaacctttcttgaaattaaatgttttatgaaattctaatgcacaaacagataaagcagagctattttgggtaaattaggggtagacttcagcctacttaattctaccccagttttgtaggtacttcttagaagctctctgtggagcacagtgtgaaaactactgaaggggatactgtaatatgttatatagttgtaatcaatgaaagtaagcttcacagaatctgttgtagatcatatcaatccagttttcttagattatgaacccatgtatttaaggatatgatctttcggaaatctgcctttttctattaaaatctggaacatctcatgttgcgttaaaacctttttatgaatttaacactcaaattgtagctcctttgagagagaactgttatatccctgtgtgcacaaagtttgattattcttggaaatgtaaccatggtatatagaactattttatgatgggtttgttgagcaatccacttaaatttgatgaacttaagttataaagtcactgttagattgggggaaagtgattttgagttacattgggatattgggatattgcagacaaaaacaaaactatgtgtctgatccctggtttgcatcctctgatgttccatggtctgaaatttaaatggaatagggaaatgtgaaaatactggttttctgtaatcgtgagaaagtttacttttgtctttttctgtgatatttcagttgctactgaaaacttcctgcttgcagggaacatcagctaattaagagccctccctgcttttataagtggcattttaaatgttt

SEQ ID NO: 70496 - DNA, 1087 bp, Homo sapiens
tccttaattgtgaaactcctgagtatttcttttgtcagtttttttcctgaggttgtagtggggattttaaaaaaaattatccatagcctttgaagtgtttaaattggatagggacttcgtcaggtaaacattgtaagtaactagttgcagtgactcacacctgtaatcccagcactttggcaagctgaggaggggggattgcttgagcccaggagaccagtctggtcaacatggcaaaaccctttcgctacaaaaaaaaaaaaaaaattagccggacatgatggcacatgcctgtagtaccagctacttgtgaggctgaggcaagagaatagatcgcttgagtccaggaggtccaggctgcagtgagctgggatggagccattgcactccagcctgggtgacagagcgaggccctgtctttaaaaaaaaaaaaaaaaaaagaaatgtgtatagtatataagtaatcacttttgtggaattcgtgttctttaaaggacattggagaatcctttatatgaagactagccaattgtctgtgatttgaaccagaaatagcaacgtggatgtgagtataagcagaaagtttacctgtctgaggctgctaacatagggtaatgacgtgtttttcaaactttaccgtgcttaagagtctcctgttgagcatggtaaaacacagattcttgtccctcgtcgaagagattctcattcagtaggtctgtagtggggcccaataattgcatttctgacagacttacagtttgtgctgatactgcaagtctatggatcatacctttgagtataactgaattagagtatagctattgaaattaaggagttcttcaaattcaagatcaagagttttttaaataaatgattcagaagataatttacggcccttaggaggcattttcttgtagtgaaaggagtcccaggctgagtgagctttgtgttcccttaggcaagtcacttaacctttttagaccatcttctataaaatgagaataataatacagattctaccttttatagttacgatgaaaggcgtatggaaataaggcactcaaaatgcttaggaaaatctagaatt

SEQ ID NO: 70497 - DNA, 4621 bp, Homo sapiens
tttggttagtgctatagatctattatgcccttgccttgacttcacagagctaggactttctttagtgcacaagaaaacatttactgggaggcatagaatttctattcaaggtagtattgaatgatggttaggttaagattaggttgcatatagatgttttgaatatgtttattgctcaacggcaattgttagagtaggctttaggtccttttcgtacagtgcattccacacttaagtgtaggtgagtaatatttacagtaatacttgtctgatcatccactttatccacatgattgtactctgttctttaattttataaattggcagtgagcagagtgattcttgcagctactatgtgttttaatttataatcagccccttgataggaaagtaggttttctctttttagacactagtttatacagtgataaatgttactgatgctactctgaaatgtgtgttacattcactcaacacttaacgctgtttttccttttcagtatgatgaagaaggtgaagaagcggatgaggtaatgtttaccaaatgagcaaataattctctgtggttaacacattgagaagcaaattgaatgacttatgtattcctttgctataatcattctgtgatttgggataaaaacattttggaaaacatgattttagaattctacagccaaacaatgtatgtataaggtttcaataaataaattgcaaaactcagcaacatttttttatttcaaataattttgttctgctgcagggttatcagctctttgaagaagtcaaaagctgcagtaaacttttccaacgttggctgcagtaactattttcaataaaagctgtctggatgtctcaagttgtgttgggaaatttttcatattagaagctttcaaattaaattgtattatcatcaaagtctgtaatcatgaaaatctgttgatccgtagagtaacttgtattaaattttccctacattatgagccagtttacctactatgtacatacttcatggatgcattttgaactttaatataggaaggggaagaagaaggagatgaggaaaatgatccagactatgacccaaaggtgagcaaaattagtgctgctttctattaaatttaagatagctaaagtaagagttggtgtttttgaatatcaagtttctctccgttaaagtctttaataaataaagcctattgactggataactttgttttttcagtcccactggcattgtgaacagtacacataatttcagtggacgtttttctaaaaaacattgttttttgtttggacttcgtgctttttatagtttcaggtacagtgaaccctaggattctattttaatgggacgatttgtaacagtttttaagcattagaaaataaaggtttttaaaagatctggttgtaggagtgttcgggaactggggagcagtgcagtttgttagatccttccaactactcttactcagtccctgagagtcctagtctattattcctgagaatttgttatattaggattagcaaaaacaaagctgattggtaatataactaacataaattgcttggtaactttatttttttaagattatggtttagcgtgtgtcacattttatggagttaattctacagtgtaaagtttgagcttgattttagcatttcagtgacttgctaataaaataaataatttaccaccattgtcctataccatttcttttgacaacagtgagctactgttataattaaggcagtaattactattgagaaattcactgaagcaggtagaagaagatagattgacttgttgttttcctttaacagaaggatcaaaacccagcagagtgcaagcagcagtgaagcaggatgtatgtggccttgaggataacctgcactgtaatagcctaaacacaactcttatttacttacagccttatgtttttgtattttcttggtagactaggtaatttttttttaaaggacaggaaactgatattttaaagaccaatttgttctacctagcattttaactagtttttctgccagctatgttgaatgcacaaattctgtcacgcatgttcattcattgctacataatttggttcttctggaatatttttatgtagctcttggagtacagctatgaaaattaacaactgttaaaggaaataccttttttttttttttgtaattttttccttgaagaaccaaagtattttttcagctggttgttgaatagggttaagtccgcttggattagctgtgcctttcattactttgttacagaaatgcagtgacttatactaagacaatttattgtttaaaaaaaaaattggcaagacaactatatggttaagaatttccagtatgaccacacccaataactgttattagagtgttaatggattattgtgttttaggtgacatagttaactgtaaagtaacctgactcagtatagttactggtaccacagtgaggtgaataaaacgggattttcagaagttagcctgaatttaactgtatttttaaatttaacctccattaactaagcatcttttctttgtggtagggtctaccttctgcttccctggaaaggatgaatttacatcatttgacaagcctattttcaagttatttgttgtttgtttgcttgtttttgtttttgcagctaaaataaaaatttcaaatacaattttagttcttacaagataatgtcttaattttgtaccaattcaggtagaagtagaggcctaccttgaattaagggttatactcagtttttaacacattgttgaagaaaaggtaccagctttggaacgagatgctatactaataagcaagtgtaaaaaaaaaaaaaaaagaggaagaaaatcttaagtgattgatgctgttttcttttaaaaaaaaaaaaaaaaattcattttctttgggttagagctagagagaaggccccaagcttctatggtttcttctaattcttattgcttaaagtatgagtatgtcacttacccgtgcttctgtttactgtgtaattaaaatgggtagtactgtttacctaactacctcatggatgtgttaaggcatattgagttaaatctcatataatgtttctcaatcttgttaaaagctcaaaattttgggcctatttgtaatgccagtgtgacactaagcattttgttcacaccacgctttgataactaaactggaaaacaaaggtgttaagtacctctgttctggatctgggcagtcagcactctttttagatctttgtgtggctcctatttttatagaagtggagggatgcactatttcacaaggtccaagatttgttttcagatatttttgatgactgtattgtaaatactacagggatagcactatagtattgtagtcatgagacttaaagtggaaataagactatttttgacaaaagatgccattaaatttcagactgtagagccacatttacaatacctcaggctaattactgttaattttggggttgaacttttttttgacagtgagggtggattattggattgtcattagaggaaggtctagatttcctgctcttaataaaattacattgaattgatttttagaggtaatgaaaacttcctttctgagaagttagtgttaaggtcttggaatgtgaacacattgtttgtagtgctatccattcctctcctgagattttaacttactactggaaatccttaaccaattataatagctttttttctttattttcaaaatgatttcctttgctttgattagacactatgtgctttttttttttaaccatagttcatcgaaatgcagctttttctgaacttcaaagatagaatcccatttttaatgaactgaagtagcaaaatcatctttttcattctttaggaaatagctattgccaaagtgaaggtgtagataatacctagtcttgttacataaaggggatgtggtttgcagaagaattttctttataaaattgaagttttaagggacgtcagtgtttatgccatttttccagttccaaaatgattccattccattctagaaatttgaagtatgtaacctgaaatccttaataaaatttggatttaattttataaaatgtactggtgatattttgggtgtttttttttaaatgaatgtatatactttttttttgaagagtggagagtagtgatgtctagagggagctattttgtgctgaggccactatgttctgtaaatatataattttaagagcaacctcacaatccctgctaagtggagtttattatttgaagactaaaatggaattccatagttcctgataggttatattctgggttattattctgagttatctacaaacatttttgagatttgtctttacactctgattgtagtttccagcagcccatgcacactgccaagtaagtctcattttttcctgttagaaatggtgaaatatcatataatcacttataaagaaaactgatatgaaaaaattttagagttgtttgctttatggtcactcaagtagggtaagtgttccacaaattccacaagttgatagtttaacatggatgtctgaaagccacatatataatttcttaggattcttaaattagtaaa

SEQ ID NO: 70498 - DNA, 1752 bp, Homo sapiens
ttaaatatttcatggctgggtgcagtggctcacacctgtaatcccagcactttgggaggccgaggtgggtggatcacttgaggtccggaggtcaataccagcctgtccaacgtggtgaaacactgtctgtactaaaaatacaaaaattaactgggtgtggtggcacacacctataatcccagataattggcaggctggcgcaccagaatcacttgaatctgggaggcaaaggttgcagtgagctgaaattgtgcccctgcactccggcctgggcaacaatgcaagactcagtctcaaaaagaagattgtatttcagagtagaaaaaaaaattatcatttagaatatttataaaaacagatgaagctgtgtttactaaagtactgaaatatgtgaggtaggtatttaactgatttttatgcttcctctccccagagttttgtcttagaatttcactttgaacccaatgaatattttacaaatgaagtgctgacaaagacatacaggatgaggtcagaaccagatgattctgatcccttttcttttgatggaccagaaattatgggttgtacagggtgagtttaattttactaccttaacaaaatgttttttctgtttttgttatacttgatttgtatactcggttattttcagttacatatgtacatagtctgtctctgaacattttggtaatatgttttctgaaaagtgcttatcaagtttcctgtaattctccttggacccatgactgtctcacatatatttttgcagaggaatgcttctttaaattatactatgtgtttgtgctaattgtaaatgtgtttattttaaatatttgcttagaaataaaatttttccctttatactgctatagaaaacatttgaagcaattcacccttctaaaatttgaaatctaaatagaacatttacttctaaaagtttagcagttgaaagattgtcaattgtaatagatttttcttctttgttttgcaaggtgccagatagattggaaaaaaggaaagaatgtcactttgaaaactattaagaagaagcagaaacacaagggacgtgggacagttcgtactgtgactaaaacagtttccaatgactctttctttaacttttttgcccctcctgaaggtaaataatgttttagcttgagtattaacggttgttttataaaaagcattgcttagcttcttattcattgtaatttcttttctcaattttgcagttcctgagagtggagatctggtaagttgaattgttatatatttattgaattgttaagtatatttgaaattaaagcactgaatttcaaaaatggagagtgggatggttgttacattgagttctgaggcctacaatgcatggggcagactttttggatatgaaaaataattccattcaaaattatatcagtgcttctgctgagaaacactgagataaaaagcttaaggttttcttttcttttgaaacttcacatattgctgtgagggatttaacttttcaaaactgttgtcttccttagtaaaaccagaatatattaagtcacttatactgttacattcctaactacattatggttcaaattcattcctgaatttgttactccaatgtaaatatggtttcatattgtgactaagtatgttcacatatatggcatatggcaaagaacatgaaatgttcctgccatatagactgaactgaggaacaaccttaaagaaagtctatacacacaaggtagggcaggt

SEQ ID NO: 70499 - DNA, 2628 bp, Homo sapiens
ctctgttgcccaggctggagtgcagtctcggcttattgcaacctccacctcctgggttcaagcaattcttctgcctccttctcccagtaactggataacaggcgtgcgccaccatgcctgactaattttttgtacttttagtaaagatggggtttcgccatgttggccaggctggtctccaactcctgaccttaaatgatccacccacctcacttcccaaagtgctgggattacaagcgtgagccactgcgcctggcttacagtttttagtttgtagattcattatattctttttttttttttaacttcatggtaggctgaggattgttgccattttcaagtgaagacatggaggcttctaagtgacttgcccacaatgaataatggcagagctgtgacacacattcagtgctgtgttaagtgttccacctctctagcattgctattttatgttgtttggtaaagagaatataatgttttgattaagaacaccatggggtgaggcaatggaccaaattagtatttctgttgcttttcttgtttattatgcttaagtcttcatttttaattagtttttacattttttttttactaaaatggtttttcctacacatcttggtcaccttagtggttctctttggaggggtgtggtagcagtaattttgatgggattaaggtttgttatgggcaacggcggtgtttacacagatagactagaactttgaaggtaatatctggtgactgtgctttttggtttttatacctttgctactttatcatgaggtctaatctatgtattaaataatgtttgctgtcacttaatcaaggaggaattgaaagaaaaggccaagattgaagatgagaaaaaagatgaagaaaaagaagaccccaaaggaattcctgaattttggttaactgtttttaagaatgttgacttgctcagtgatatggttcaggtaattttattcataaatgtaccagtttactttgaagggtaaacctttgaagtttaaatggctgtgatcactgttctcttcagtgttgatctttctagaatgattgcttacttttgaaatagctaatatctgtagaagagaaattacagctttgattaatgtaatcaaataaattagtttattttaaaaaatgagataatgaaatggtcccattgataatggctcattatcgactggtgttttcttataaccctgtgccttttgtctttacatacttagtatggaagtatgatgggaaagttaatcttatagctgcaattatgcaattcccttaactcttccaggagaaatttgcattttaaaagaataccataaagatgttaaactcattcacaatggttacattctctggcaaaccataactgttgtcacctttgggaaactgcctcaagcatttcttgagtgagcccctaccgtctacattgtagtagtacatgttgccctgtcttgtcattgttggaagttacatggagaaaaagaaatgatcttcacacaattactgcttattacaattctactttagcaaagtggaaaaggaacgaccaggaggaaggggacaagcagctggaaaaggcagcaattacaatcaggaaacattttaaaagtagatatgccttatttagacttgattttggatttttcaacctatataataattcagttgtctatttggacactttttctctaccagtggcagtagaactacagtataaattagctttagtataagccataacctggagagtaagtcttaaggttcataattgctatacaaaactactttgaaatatattatgtctcagtcagctggtgtttgtgtagtaacagaacacagtcctcgaatgccatgttattcatttttattatttttttaatttgaaggaacacgatgaacctattctgaagcacttgaaagatattaaagtgaagttctcagatgctggccagcctatggtaaaagaactttgaaatatttataattttgtaacatgcttacaggtagataaatagaagcttttaaaaagataacattcaagggtaaggttggtgctctttgttatagtgaataaatatttggatgctgctaattgtgaggcagtatttattccttttcctccttctgatcataaattgtgtttgaaacacagacaatccttgttcctggataagtggataaaaataatgccaagggaacatgaataagtactttttctgcattaaaaggcatgagcttgggaattacacaaaactgatgttagaggatgcccactccctaatgaggaaagatcagccaacaagctgtccaccaaaccaccagaattaatgtcaactaagggcaaaactgctaagaatataggctgtagatgcttaaggttgggctttttctgtgtcaagttcacgtttagtctactatttaaaagcctgattcctccagtagttggggagtaagggaggcaacatggtcactttattcaggaatgcctagcctgttgtgtaaacatgttaattatttaatagatgtaaattgaaactaagttctattcagttcaatttgtacctcattattattttaacgtaatttttttgattttaacataatttggggctcatc

SEQ ID NO: 70500 - DNA, 3425 bp, Homo sapiens
tgagccatagcacctggccctaaagctgttattttaaaaatacatgtctcctctttatagtatgttacacttgtatttaataatgtaattactaattcctaattaaatatggagactaaaaaaataatggtgtgtggaatcttgtcctttttcctgatatgtctatgctcccctcctttttcctaataacttgtatgggtgagatatatgtaaaagaaaaatccaagtaatcattgttctcagaattaagatggtctgtccatgacttcagcaatgacaagtccaacacttaacttgggtaaagatttagggttgacaatatgatttacattttgtttatcaatttacccagttacatttctacttttgaaatatagccagtggatcaatgtatttatatctatttgatttttatttactttgaatctaccttttgcttcagataaaaaacctgtcattcactaactccaatgcttcagtttcagtatgacaaaagaagtgtgacttccattttactctgatgctatataactgatttctaacctttcagcctgcctagggtagttaaaagacgagtgaatgctctcaaaaacctgcaagttaaatgtgcacagatagaagccaaattctatgaggaagttcacgatcttgaaaggaagtatgctgttctctatcagcctctatttgataaggtaatgctttctcctactttgtttaatttaacattctagaagacgaattctagaaacataagcagacttggaagaggttaatctttagaactctcattgaaattgttattagaggcagcacttggaggaactatcaataatagcagttaaagttgtggtatgcatttgttaaatttgtaagacttcttagtgagaaaccactggttttagcttggatgccagtgtttttatacagccttttttttttaaatcattttagcgatttgaaattattaatgcaatttatgaacctacggaagaagaatgtgaatggaaaccagatgaagaagatgagatttcggttagtaccaactttattttggtatgtttttaagatgataaaatcttaggacttgtcagaaatgttagcatttaatgatggagtacaatattatataaccagttgtattttttcattttttaattttacgtctttattacacgtttttctattactttatttttaaaaaacagtcattcaagattgtaatttgcatggcaataagcagcggtttcatgggttctaagtttcttaagtgtccacagcagtttaaaacaccacaagtcttatttccaatttgcagcacctgacttaaagttcgaattcatctgatggagcattaaaactgtcattttctcttgtgaaaagacataattgctatttccaggactgtatattgaacatggttgtacattatttttaattggttagtagaattttactcatgtaatttatatccagaataagaacctctagcatctctgaatggccttcctctcagaacgatgatgattaaatgtctaaaatgtatctggggtgcccccacttgacattaccaaacatgtttccaaataatcttagaaaatatgattctttaaacatatgcataccacatctttaaacataaacataccacacagtgcaccatcacttccttaaccattttccaattgttcacttataacatttgcaattttttattataaatcatattgtgatgaatactttcatccataagttttattgcaaggcttattgtttcttctaatgtcttctaatttcaaagaagtggcttactggttcaaacagtgcacatacgtggttttaaggcttttagtatactttaccaaataatctccagaatagctccaacaactcctaccaacagtatgttattgtgcccatagggtggacttgataacagcaaagcaaattcaaccacagatatattagattctcacccatctcaaaactatcacatcagagaagcaaggagacatattattggtgaggaagccaaattcaaattcttttaaaaaatcactcagctttagatcagtaaaataatcaacaaaaatggtcaccgcaaagtctaccgggtttttcaaaaaataaaaagagagaaagagaaaggccaggcgcagtggctcatgcctgtaatcccagcactttgggaggcctaggtgggccaatcactaggtcaggagttcgagaccagcctggccaacatggtgaaatcccatctctactaaaaatacaaaatattagctgggtgtggaggcgggtgcctctaatcccacctactcgggaggctcaggcaggagaatcacttgaactcgggaagtcgaggttgcagtgagccgagatcgcaccactgcgctccagcccaggcgacagtgtgagactccgtctcaaaaaaaaaaaaaaaaagtaccaaataaccaaaattttttatttgactaaattctgttcatgtatgagcatgacagtctctcctgtttatttgactttggcaataaaaaaataagcagccttgtacagaacagggaaaatgccaagaacgaaggcagtctacagttttactgtagaatacatatatatatatatatatatatatatatatgtaggcctctctccctttggccatatctactgtcagttcaggccattaactacagacaaattttcaaattcacttcttctccaagatcttcgatgctgtcatcatctacttctgtctgtttttcctgaatgacctcaattatgtcatctgtaaagtctccttgaatgataatttcatcctcctctgttactgaggcaccacaggagaatttttgagcaaaaaatctttgtgtgatttaagatcaatttcaaaagttacaaggccacaacccttgtcacatatttctttgctctgggaattttggctatagtaaccttttgtggtaccgtctttgtttttttgttttatttgaccccttccacctctcttctgttttttcttctcctcttcttcccctgctgttccttgaccttgacagattccagcttcttgtttgggtgaattttccacagtaagttttgcatattcatttggaaaattcttctctaatcattgtctacatttagcaacatcaggcatatattcacagtactctattggtaatgaacagactccacaataaaggactcaaagtaggtaatcagcatctaacttggctctgttccttgggtctcctttgcagtcagccctattggaatcggaaacgtcagcagccatttcacaaacccaggcagttgcacaggccccgccagctctgctcccgccactgttgccagctgagccgacaaatgcaactcgtttccccggccagggcctccctagagcatcagttgtatttttatacctagga

SEQ ID NO: 70501 - DNA, 3529 bp, Homo sapiens
attgcactccaggcagcctgggtgacagagcaagacactgtctcccaaaaaaaaaaaagctttcagaaattgtatgtatcatttctgaagactgaattatgctggcagagtacagttgatttttttctgtacttgcatgaaaattaagtcattatttgtccctgtggaaaattaatttttcaaatgctgtttagacacaaaagcaactacatttctaatccaaatgttaaaataaaaaatttacacaggaattatacaatgatgttttacattgacttaggaatccttattttcctttctaatgctagatgtaatctcatgttcaataattagatttttggtgattttttttttttaagatgaaatgggaaggatgctatcttattaatttttaaccttctctttgaatggtgctatcatcttggctttgttctaaacaagagctagactcagaagtcttcactttattctttctcacctccactgtgaagtaaagaaaaggaaactccaaagatagtataggctagtattgttgctccacagccataagggatccaggactcttctgttttcctaactcctttttctttagctggtggctttcattctctaggatgcctcctggtccagtgtggctgctggagcttgagccatcacattcatattctaagtgggagggggagagggattaagataaaggcttcccagctatctaccatcctgttaaggatacttcctcaaagaaatacagcatttctgcttttttatcttgctgtcaaaatagtgtagctaaaggtaggctaggaaatgtagacttttagcttggtgtgttgccatctcatataaaatgagaatgttgttactaagaaggaaaagtaaaatcagtagatattcggttgaatgcacgtacttgttgacatcacattccccaaaaacctgcaaaaccaattttataaagcttcaaaagtataaactttacatttgaccagatgcttttaatgaaagtgtaagcacttccagtgtgtacttgtttacatatgaagttagaaaacggaattaccttttgaatttcctatttcatgtctttgaaagagatactaattttgaaaatgaattttaagtttttctgtaactttttttggtaattggtacatttgaaccttggtgtgatactatgatattatagcaaagaacagtctgaacttgatcaagatttggatgatgttgaagaagtagaagaagaggaaactggtgaagaaacaaaactcaaaggtattactttaaattacttcaggagccagtgattgctggcacatgtctactagagggtagttataagtaccagtctatttttttggacccttgctcattgtcccatttatctactggtccatacttctagtgtgtgtgtgtgtgtgtgtgtgtgtgtgtgtgtgtgtgtgtgtaaggggcgggtaggtatagatacagcaactcaattagaagtcattgtttgcatcctgcactgttggagtgacttggtgtacttgtgtcaaacagctgcccatgagttttgtctgaatttagaaatgttacaggttgtgatgtggtgcttataacagtatgtttagtgtttaatatatggagaacatgtagtgtgtgtctttttaaagatccactccttcaagcagaagagccatttattaaatgtaggtaatattcacaatttattttagcagatatttttaaaaggagtggtggtgggggattgtactacttagggtatgtcttgtagatctgcgccaagaatattaaggtaccagatgactcagcttttcatttttaagccggatggaagttaattgtgaaaagacttcagaacttgtattaatagcttcagcttttgtttagtaacattttcttaacagatacagaactgtatcctcagtgaccaatattgatatttaaaaatctgtattggttatcctggctgtgtgtacatcatctagtaattgaattattatcagaagtaaattgacctcaaaaaaagtaattgggaaaattaagtttatggcactttgtgtaataactgtattgatgatgaagagaaggttagtactgtaatttgttttgtataagtctagtgcatatttggattgagtatgtttttaaaaagccattgaaaaccacattttgtttggctttagttacagtctttgactgtcccaactattaactttattaactttattcatacacatagaaatacattacacaagcatcaaacataaacattcagatcactcacttcatctttctcctgggcctaaaactgtcagtatatttgcagttttctgatatgtgttgtctgcattcagaggactgtcaagagtcatagataggcatctgaatgaagctttgagcttcttaaaatgcaaggtgggtgaaacacaggataccaggaagagaaaggatattgttcatatagttgtggcagtggccttgagaactgtcttgactagagatagattaggaatctgaattattcctgaacattgggttttcctttagtgtattctctttagctttccctgcccgtctctactcattagatataccagcaatttatgggccagttaggaaaacttcatgagattggattgtcctattaaaaaagcataatacattttcataaaatccttctttcgatgcccttttttttttaaagcacgtcagctaactgttcagatgatgcaaaatcctcagattcttgcagcccttcaagaaagacttgatggtctggtagaaacaccaacaggatacattgaaaggtacagcttttccatagtccttatttatctttctataatcaacgttgcaggcgtatctatttttaagaccatctaggatttagatatgcaatagtggaaacctattgtctgttagtatccagtataggattattagaagtttaaaattgtgcttagtaccacctgtttgcattggtcttttaaagtttatttattgtggttcaagtttataggaagtgtactgatcttgagcatttcagagatttgtttagaggtatgttagaaatgcacagaattagaagaaatacagatttcttatttcactgatgacataaatcattattaatagcatgaatatcttactcagcttacacatttaaaaaacttttttgtgattttaagatccattcagttactgtctatatgttaattatagttagtagcttctaaatgttgcctagttctctgtggtatgtgttcgctgtgttttattatctgcttttcctatgatggacttatttatcaacacaaattctattgttatagacatctttgtacatgtcctgtaaaggaactgtgtgagaatttctttgagatgtgtgctcagcagtgggattgccacctacatagagtgtggaagcctttaagtattaaacttctagcatgatttccagaaatactgtactcaatgcaagaagatagattcatcttcatgtctgccaacaattggcaccatccag

SEQ ID NO: 70502 - DNA, 3435 bp, Homo sapiens
taaacatgaattacataaaatgaatattgctaaatacgaaatggataaatggatttaagatgctacgtagtctaaaaatttaagcagaaattgacctttcttgattgttgaaagaatttgaatgaagatccttttgtactgttcctttcctatgattctagcaaatgttagttttgtttttaaccaatggtgctattatcatagtctttatacaacagattctaaaagcttagtggtaacttttttgttttaagtaatatcctctgaaaaattatttttggtactagtaaggaagaatttgcatgttccatgagttttttcttcttaacactgatagtattttaaaggaaatagacatttcttgggatagttttcagtatggtattgatttaaagggttttggtttcttatttttttttaataaatcatatactttttttttaacattgatgtttctctccatagatatttggagttcttacaacatggcagacattgacaagtaagtggcagagagttggttctttttcagagatttggcatcactttgtactctgttcttaacagcaagtagtatgaattatatattatgaaaatgtagttactaatgcttagtacctacttttacaaaagtctagtgcagtgtattcaaggtaaaatatagaatatatgatcattagcatatttatgatcatatattcgaaaccatcgtatatactaaaccatttgtcactatttttaagaaaatgctgagcatgataatggattataaatacttgcagaattcatttttattgtatatatttcccaaagatttactgcttgcattgtaatgtaccaaacacccaaaatgtgtataaaatgtatttatatatagagcttaaggaatattcagacaagttaaaaatagaacattactatcagaagccttgtgtgccccttctcaattgcacctttcccttgcagacatgtaagtgctatcctggcttttgctaattcttttctttgctttccttcagagctttaccacctataaataatcagtgtttaattttgaaaatctgaatagtgatcacaaagttagctatgtaaagcaacattgccactttgccactgttaattgaaggctataagataggataacaaggaagaaagactatctgggtcatagtctggcctcaagttttgtgaggctttataaaagacttattgtggagaagtattgggcaaggtcatgtgtcctgggaagtataggtttaatcaagttggcatgtggcaggattctaatgtggatggatgttttatagaaacagggtcaggaagaatgggatgaggtacacagtgtttgttgcgtgtaattttacagtagcccgtgttaaaatagagcacttgggagtgaggggatgctaaattattttccatagctgttgtaggcatcagcgaatgatagtgggagggctggaaacttcagtacaagatcaacacatagaagtacaaataagaatttgggccactcttacgcattttatcttcagcattaaaaaaaaacagatgagtgacttatgcattctgtcttcagcattaaaaaaaacgagaagagtggaaacggcatttttaataataatggttcccaaagtgattgtctcctgtgtcacacctctaatttggattgcttaaccttggtgacatggctgtcattggatctattttactatcttcctgaggtttcaccttgtttctcctcttgggtttgttgtttgccatatctcacattgctttctcggtttgttagtaccttcttggaagagtacaagggagctaaattattttaagacatgtcatgactgaaaacgactattctacctttatgccggatagtttgggtgtaggatagtaagatgggatcatttttcttcagaattttgaaggcattgctccattgtcaccttgcttccagtgttgctgtgttgaagttcagagtcattgtaactaaccatttgtgtgtgataattaagaaatatgtacatttacactatatatacatttctggaagctactctggcttcagagttctgaaattttcacattattatttttttctcttaatgttacatattcagtggtggaccctttcagtgcagcaattcagtggcttttagttcagggatattcttgattgaactttgtgattgtctcatttgttttctctttctggagctactattagatgttgtgtgttggattgctctcatgaccttttgtcctattttccatctctgtctctttgctcttctttctggacagaactgaagactttcagcttgtgttgagttttaaaatttctgttgttttagtttccaagacctgcttcgttcttcctgtttttttgtttttttttttttttaaatagcatcctcttcttgtttcattgatgataatgtcttttctctggatgtttcttccatctttatagtccatttgctcttacattttctttctctcatttgttttggtctcaatctaggatgctttcctcaaatataaatcaatacttggttggctgctcattaagattggattgggtggggtgtagggacacttcagacatgtttaaaaaagaaaattgattggaaaatttgagcgttggagtggggaggcttgttaatttgggatttcagtgtagggtcaccagagtgggcatttgttagaaaccccagtgttagaatggtcatttttttttttttctgggctagtcagattcatcgttgaacagtgtctgggtaaagatctggcttctggtgttcctttaaatgtagaggaggctctacatttagcattctaatgtgtacatagtcctatatctttgatactgttgactgtgtctgttgtcttccagtccaagttctgaattttaccctttcctgagaggaaactgaatatttctgctagtgtagagaagatctaatgatttaactgcttatcagtttttactttcttgttttagcgaccttctctcctgtcccaccccttgccctagttctagaaatgtacctggtgctaccagttcttatccttttgaagactgattgggctgcttctcagctttccccactgctaatcttagatttcagttctctcaatgaaattatcacttgtctggtttccagcttccaaaatgttgctgcccttgttttctttgatttcagtgttagcctgctaacaaaacaaaacaaaaaaaccctttatcataattttagtggagattttagaaggattaagatcagatgagtttgtggcatctgccatcttaactttgcaactctcattttaaactttaaaaagagtaaattggttgtgacagcttgatttcccccttccttattatttaattttggatgcctgttagccctgggagggtggaagtcagaggggagt

SEQ ID NO: 70503 - DNA, 1052 bp, Homo sapiens
ggcctcaccttcattcttaaaagatgttttggttggggatagtattttaagagccttagttattttcaacatattgaggattctgttgtcttttagtgtcttattgaagagaagacagctgtcagtctttttgtgcctttgaagttaatctaccttttttgtgtgtgcttttgagatgaatttgtttttgctatcttgcctttttactgatgtatccggagctggataaatatatgtgtgtgtgtgtgtgtgtatatatatatatggattctttattttatggttttgatttgtagggctacttgaatctgtggattggtgtctttcatcacttaaggaaatggaaaattattgcgtattaacttcttcaaatattctgtcctcctgctcccagaacttgtatgaagtctttattaggcttcattggatcttaacatgtcttttcatttcagtattttcagtcctttagattctgtggctctgccatattttcaaagttttcttctaggcttcatttcagctcacttaattctctcttcagctgtgtatcttactcttaagccagcccatttagtttgattcattagttttatttctagaagttctagttttccaaattttgttatatcacctttaatagatgacttccttgcagacagtgtgttttcaaacttagatcaaagacaaccaggcttactatgtctgtaggtatgtatttgtttatagtctgacaatttttaagtctttgtgtaggattgatttctgttatattttctgtttttcctgttggctgtgaaaattacttgtatgaattttttaaggtctagaaggaagctttcatttaattttgatatacaggtgtctgaatataccagggacagatcattttaagtacatagcttggggtttggagggcaatacagatgaggtaaatttgggctgtttgtccaggagaatgaatttattcttgaggatatagcattttggggttcctgcttaatttgggagggttaccataaagatagccaccgtggacaggcccagaattttaa

SEQ ID NO: 70504 - DNA, 1098 bp, Homo sapiens
ttagtaaatagaaatttaaaagttttcactataccaatttgaatatctttctaaattttatctgctacaaagtgcctatttttatattaggcccattgatttgcagaattataaagctaatactgaatatggtaaattactgcacttggcctttaatgagatttttgaaacgaatacctgtaccataactaatgtaatccaaaatgccatctcattttattcagcttgctcctgttggctcctggtaaaactgagttgattctaaattctcaaaatatattcaaaactaagggtctttttgtagaaggggctaaagaagcagtatctgttggacttcaaaggtctgaagatgtcaaaatacaatattttattcacttcttggttgtaaatttgaaacaaaggattagagagaatgactcatcaatatcaaaatattaatgatcagtgtattcagatcttcaagtttaatcaaacctgtaattgtgttctcagtttagtctttgggtaactatctagcacctgtatggacatgtatcttatgtcatgagcaaaagaggcaaattggttgcttagatgtagaatgttaaattgtgatgagagctataaaggaaggaaagggtaaaggggtcaaagagtaatacagcgtttacacaaaggaacctgttataatttgatgattttaagttccatttcaaactagtttcatctaaataagtttttgggcagaataggggttagaaggagagagttgttactttacacctatccatatgtaagtcgtttagcacaatgactacagaacattagagtacattagtgggcttgccatagaaaatggcttctatacctttggttaccaactctgccttttacttcctgcatatttgtatatatttttacttattcagaagttttgtacattttaatttttattgggaaacagggttatatatattttttccttgtggagacaggctcttgctgtgttgccctggctggtcttaaatgcctcacctcaagcgattttgccttggcctcccaaagtgctgagtgtatgggtgtgagccaccacacctgtctagagttataatttcagtc

SEQ ID NO: 70505 - DNA, 1028 bp, Homo sapiens
gaaaagaacggcggaggctgcgaattccgacgggagggaggggctgtggagggacgagtccccgaggcggggagggggcgggggaggctgcgacgctcccgggctctccgcccattgggggcggccgcgcggggaggggaaacccccggcggcttcgctccacacgtggtaatgggcttcatggccactggctgggcctggttggagacccttgccctcggtctgtgcttactttgaaagttgtagagacggtggaatgtgaaaaggaagggtaagcgagtaagccctgtccctgggtttcaaactcttccctgcttctctttggtcttaatctttttattggtaccagagattgtggatgttagctgatgataaggaagggcctccactgctagtattttaaaaagttaacgcgtatatagcgcttatattaactgttattagcaaaaggttgttattgtgtttcccaggtactgttagatgggtgtcttgatcagggttttttatttggggagtattgatcctgatcgatctaaacccctaaaccaagcttgtccaacccgcggcccaggacggctttaaatgtggcccaacacaaattcatgaggttttttttttttttttttttttggaaaaaaaagctcatcagctagttaatgtattttacgtgtggcccaagacagttctagtgtggcccagggaagccaaaagatcggaccacccctgcaaacggttcttagatgaaaataaaatgtttggccctttatgactttaattgttcttggctgtcttataaattagttcctttattgaagtcactagaataagatacttaacggtttcctttttaagatgggaggtgggatggaatgaggtgttagtataaactttgccaagtttgtagcctgcaaccttgtcaatgaaccctactgccctaaagatctgggggatggcagtgtaggggggctgggactgaggtcccatctgggaaggctagactttgagagtgcaaaaaggatgaaccaggc

SEQ ID NO: 70506 - DNA, 1059 bp, Homo sapiens
tatcatgtccaagcagcaggtgggggccccataagagaggtgctggtttaaaagtctttccctcatgattttcagattttcctaattggggctacaagttcatattcagatgttgtgtttcttctgattttggaatctgtaaaccttccccctctccctacggaagccctagtttttgcaacagctctccatctgcacatgcatctcattgtggggtgcaaagggctggtggcgagattttccagtgtgcctggctaacctgtcataactaaaatttatggagcaaaatagaaatgtaggtggttgctgtgttgtcacaatgaccgtgaattgagtttggggactgtatgaaaatagaggaatattcttggtttgatggaaatgtatagtgtattttccggcaatttctcaaattcagttattcaaatctcacatctatttaagccggtctatggatcctgtgtaggggatcaaattacacagattgaattcttgacaaaatttctggaaacaggaccctttcaggtttatcaaattctacgtgggtctgtgtctttcattgtccttgactattttgcaaatctgtagaaattgaagttaagtggtggaaggttggtggtgatgtacatgattcctgttcttagaaataagaatgacttttgtccaatgaaggtgtattgatttccactctatggaagaggctagttttgcatctataggcaaaattaattcaatatttctgattgcctatatatgtgttttgtccttgaattctcctttcaaccaatttttacttcttactggtttccttattaaataataagtgaaatagactgggcgcggtggctcacgcctgtaatcccagcactttgggaggccgaggcaggcagatcacgaggtcaggagatcgagaccatcctggctaacatggtgaaaccccgtctctactaaaaatagaaaaaattagctgggcgtggtggtgggcacctgtagtcccagctacttgggaggctgaggcaagagaatggcgtgaacccgggagggagaacttgctgtgag

SEQ ID NO: 70507 - DNA, 1058 bp, Homo sapiens
gataagccatacatgagactgcagattatattgaatcatattaaatgtacagaaataaaatattagatttatatcaaattttccaatttgaaccagtggggaaaatcccacagaaatcagtaagtttacatttcaatttctatcttatttgactaagtggaaagagattctttaaaatgtataacctgccattatgtaatttggtttcattttattctacctgttgtgtgagtttagtatatttaatttactttttgttactctttacatactgtttatttttgttagtttttaattgaagatggactgttgaaattgtataggaccagtgtcttattaatatgattaatatatttagaagagccacgtgaaacccatgacaaaatgaatgtgaatattctttctaaaaatttagaaaatgttatctttttgcatttattatgtaaaactgttttacagtatcaaaatttttcacttaaagaaaaaaaatgccatgaaacatttgaactgatgagccacagaacttcagttgaaatttttttcactttttagcatgctaaatatacatctgagtttaaatgttctgtttaatggccattcataaattcaagcactaccactggtcagttttgtgtgatagaataaaaatatgttacctgcagtgtaagtacagcacactgtcaaattcttttccttaaggtgcacagtaaatgtacagatagttataggccactgttttgtaatgtagtacatttctaatctattattcctaacctattataactgtttgcagaaagaaaagaatttttctaataatctgtaaaattatgctaacttctacaagtaggcttctaaataaaatttttaaaaagagcaaacggtgatcaagtgacttttaatacaatatgatgactaaattattgctaatttgttttaatccccccttttgtggggatagggatagctgcaaaggatggcaaagggcttgaaagggattcaacagtgagaatccctgaagtatgctttgcttggtgccttatattcattcttctcgaatc

SEQ ID NO: 70508 - DNA, 1018 bp, Homo sapiens
taaatacaagattggtaaataaatacattgattggtaaattatgagaatcaaaatgataaaaagagcctgcttttttccctaaccaatatagctatcttaagtatccttaggtttctgtgaagaaccatttcccatgttttcttggcaaaataatgctgtattccatatgtacatgtgaaatgatgttttaaattgataaaagcttaaataagatctacctatacccagtattttcatgatattagaacaaatgggtttttggttatattttatatttgtcaatataatttttgtattcacattctgttacactctgcctattcattgatatatgatattctgtaaatattgtacaatttgatcttttttatggtttaaattagttaattacatacaaattgattggcttatcacaaaaatcatttcatcagtaaaccttgttaacattttgtactggtgacccacctcttaggactttggtcttatccacgtgtatgttgttttcatttggtccaaataatattttatttgtatgggtatcttctaagactaaataggtagttgtgttctttatttttaaaatttctttttagagcaaatgttatgggttcttacccaaagagtcaaaaactatttcttaagaaagagcagagttattcatgactgttctttatacactaaaagcatgcatctaatctaatagtcctcttattatgcttttagttgtatgagtctctttctatgaactgaacacaaaactcaggaattggtggcttaattttagatcagtgcttgtactaggcttagttatatgaatctttataacacataattactaactttgtagccatatatgtaattgactttgaatgttatttacctgaaattaatcttccttcacacatggaccgtaaacggttcccagttgtctgagagcctcatgagggtttctaggatttatgaccttatgaccagtttttttcatttaccaagattttattttcctacatgaaaatt

SEQ ID NO: 70509 - DNA, 1350 bp, Homo sapiens
tgggttgcatgtggaggtgggattgtttctgagaaagtcagttaacaaaggcctctatagtcccctctgtgcatggctgttatttcattggaatgcatcagttgaaatattgaaatacatccataacattgggtaaatatttactccctgagcccttaagtattcctctttgcagtcccagaccccgcccccccccacccctacataccaccccatgacccagcaactaaaaattattaacattaaatgctctgtgactgtttaatatcaaattgtgggctctatgccaacatttctggcaaatcattacaaaatttgttgttgcttatttttatagaaatattatggctcttcgaaatcatttagtttcaagcacaccggccacggattattttctgcaacaaaaagactacttcatcattttcctcctgattttgcttcaagtcataataaacttcatgttcaagtagaagttctctaccattgaatcagtgaactagaaagatctgatttggcctgggaccagtgttcaagttggtttggtctttattaaaaatcacaatattccgaaaacaaaaaaacctaggagataaatgtagaggtattgacttttcgtatcttttatcttcacactgaaacaagagctatcctatttgattattaaagtgagctatgtgttaagtgccaggacatttctagcttttgtgagaatgtgtctacatatgagtataataaacccacatgtatacacaattgtctcttatgtactcctacctgacagtagtctttgtattctatagtatgttctgagatataatgttaacattgttcataacaaaaaatgctatcaatcttataaatatatgtaatctattttcttcataaaacaggcacaaaagttttatcagtaaggaattacagattgagaaatgatggaataatagacataattaattcaatacactactgttaaaatcatttgcaaagcactcagctcaattatcttcttagaaagaaagaaaaagtatgaatggtcaaaatgaatacatcgagagagataaatggcaaattgcttttttaaaagtttacataagttttttttaacccctagaatttaatatttgtagatgcaggtaaatatatatacttacgtgtatatcagtataaaaacactggtgtgcaattaattggattgattataataccaccttaagcacttgctgaaaaaagtgtggtcaaaattgattgctgtccttttgtcttatttttgtttttcttaagtcagctggttcataacataggccaaattctagagatgtttatagagcatttgaagtgctgataatttat

SEQ ID NO: 70510 - DNA, 1049 bp, Homo sapiens
gattctgattataaaaattctctgataattcatggatccaaacttcagaagcactgcattacattaatggatctttatgaagccagtgaatcttaaacagtgtaagacgcatctaggaagcttgctaaaagcgtagattcctgagctttaccttcattacatcctatcatcttgagccagcaacacttcaacacttactatcatgagtttaagagtctatgtagtaagtttctcttgccaagtaaaaaaaattagtctccacttatgaacaggtctctctctactcaagggactggatttatatcttgactcatttctaagcctatgagcataagtgttgtcaaagccagaaattcatgtgagcattattttctctacaagggatttgaggcctattctatatagattttattttctgttacatttttaatacttttaatattttcgcacatgtattagactctggcaacgggtaactcgagccataaatgccaaagaccaaactgaagctacccaagagaagtatgttttggaagaagctcaaagacaagctgccagggatcggaaaacaaaaaatgaagagtggtcttgcaaattatttgaacttgatccactcacaggagaatggcattacaagtttgcagagtaagtaacttaaaatagtttatttcaaacaatgtattagcatggtttgttgcctttatttctagaatatttgttgctggagtagtttttatttaattaaaccatgtatattagtgtgagatttttaaacttggttttgcattcattataagcttgactctatgatagaagttagcctataaaataagttgaggatctgaagattaggtatggggaaatctcattattagaactatgtatataattattaataaaattggatcatagaatagaaagttttaaagttctttgtttagtcattgagcaaatggtttttttttttttcatttatgtagtacccgaccatgggacccacttaatgatatgatacagtttgaaaaagatggtgttattcagaccaaagt

SEQ ID NO: 70511 - DNA, 1038 bp, Homo sapiens
ggagctgaaccaagagtgtttgccttgctcagcctcagctcagaatgtgtgcattgggtgactcaaatttttcgctactctgcacatgtctccaaatgactacagaagtactgtgggtattgatattttactgagtaggtgaatttacagatagggaatctgcacataatgtgaatcaggtgttatctatttatatcctacagaaccaactgtatgtctatattatagtttttcatttgagtgggacagagtgattttgaattatgtttctcctaaaagattagattactaaactgtttatcgtgagccatatactatactatactcttttcaattttttgtcaaatctttttcctttaggaattctttatggtacaatgacactggagcttggtggaacagtcaatattacatgtcaaaaaactggatacagtgcaatacttgaatttaaactaaaggttagtagacaatacagtaggtatcacctagctaaaggagagccatacaataaatattgaataaagggcaccatgtatttcctaattaaggactaaatgtaagaacacaatttatgtcatgtcaaggataagtgcatctaaggaataagggcaaggctgggtgagtatcttcgggtagcctaagatagcagccttggaaaattcaaattaacacaaaagacattttttgtttttcatcttaattaataaaactgtgggtattatatagaagatgagatttaagaagtgattggatagaaatttcttagtaaattaaaggattgtttttaccaaataccagaagatatgtgtcatcttgcagtctagctgtgtaaaccaaggcacagttgtattagtcactatttctgtgtaataagttactctaaaactcacagacttaataactatgtgctgttcctcatgagttctgtgagtcaaaaatttggacagggtatactggggatagcttatctctgcttcataatgtctggggtctcagaaagactttgtaggccatgggtgactcaatagttagggactg

SEQ ID NO: 70512 - DNA, 1073 bp, Homo sapiens
gtacaggaatctgagagctgcttagttgggtggttcctgctcaggatttctaatgagcttgcagtcaaactgtcagccagctttgcagtcatctacaggcttgactgggctggaagattcacgtccaggttcatcacctggctgttgacagaagagctcagttcctcaccacgtagccctctctgtagggtttttcacaatctcaaagctggcttttcagaactaatgattgagagataggcagagagacagcccccagcatggaaggtgctttgtaacctaatctcagaaattacatagtgtcacttccacacaaaccaacttcagtacaatataagaggggcctatgtgactaccaggagggtgggtctcattaggagacaggaggctggttactataaccatcaatatttaatttttactacttattaaatgttttttcttactcattataagacttgaacttttgataatggcacaataatatgcttatctttttatattttatataaacatgtttttatattttatatatgcatgtttttcttatgtttaataggtgtcccatcatccaccaatatctgccttttatgttagtaatcgaaaagatggattttgccttagcggtagtatcctggctaagtctaagttttatggtgagttttcccgtcccaacttgcaccctctcctgggaggtattattttctggtgagcttttatttaggcagtgtcatgggctattttcaacaaggagtttgtcattttaagtatcatctttccttgaataatggcttttttctgcccactcataaataaaggtgtggcttatgtattcatcacatatatgtgaatatatcacaaacatttcttatgaaaagacagaatgattgcccattatagccctttagtgcataaagtgtttcttttgcctttagtctggccagttttttgtgtttcatttcagtgtatctaagggattagtctttctattttagtctttgaacagagaggaagaatccaagtatggttacgatacctggcccagggtcagtcagtaaatatatttaactttg

SEQ ID NO: 70513 - DNA, 1524 bp, Homo sapiens
gcattttcctgacttaaaaagtttcatacatacaagtagaatggttgttaatcttgaggatagacctcctattaacaaaaacagttacttcagatagtttgtttgtagtagaatcataaatcctcaagtgtattttatgtaccttgcttgataccttcaaattatactgcatgttaatgttctaagatttgaaaaataaagtatgtttattttagattgggtatagtttctaatgcatgctgtatactattcatttatcagtggtgtgcttagtatgtgaaaagcatttgaaaaacggaaagatttcattaaattctagcaagatgttatgttcagattaacttttccagtgcatgtttctcaaagaaatagtggtaacagggtaagttaagatgcatgctagtttcatagttttaaaaattatagtgcttatgaatctgtgttcttttaggaaggtgctggatggatgctttggagttggctttgaaatgttctagtcttcttaaacgtacaatgatcagagaaggaaaggaacatgacctgagcgtttcatcagatagcacacatgtgactttctatggcttactacgtgctaacaatctccacagtggtgataacttccagtaagtagatactgccgctgagttggtaatgtttcagagaccatactgttcacaaaattagttggcaggcctagaattttagtagtgtatctaggactgaaatttgcatatcttcccattatatggcctaggaaccggcttaaaatttgtttagctgctataatcaggtgtagaaatgtatttccttgattccagccaacgtgatttactttatctttcccaaatatagccatgctaattattcaccttgtctgtgcatgatgtcccttctattaagaatgatttctgcctactcctccttacgcttttctcctgtctatatattcttcaagatcagtctcaaatattacatcatgtgtgaaaccttataactatgagacataatctgtctttctatagagtaacatgtttttagtaatggcactggacttaactctacctggtatttgtgaaattcatttatatttctgtttggaatggaactgtatcctatttgtggttttattccctgaagcatttattgtagttaacactaaaaaagcatttctccaaggaaactgggcagtagtgcaaagactttcttgagattcaggtctttttgttgctttgcaggaaaaacattagacttttctatttcctccctgtccccaccccttggcttctgctctgtaaccactttcatcagcattgaggttgctcttctcaaagttagactgctattctcctcttcttcatattgcctgatttagacatttcttccctatcattttgcttgtttcttttttttttctgtctgtattactttaaaaaattttttagagccagggactcactctgttgcccaggctgcagtgcagtggcacaatcatagctcactgtaacctggaactcctgggctcaa

SEQ ID NO: 70514 - DNA, 1077 bp, Homo sapiens
tgccagcagtgttttcagcactgttgatgtggtgaaggggaaaaattgttttaagcagaatcatcatatgcacacaaataagattacagccatgatcagtgttagaaaaagaagaatatcagtactaagaaagcatattttaatggcccctgacctggtcagggagattaggaaaattatcctacttagtacactactttgaaactgttggcctgtctcccactaaaatttaagtttcttagaaataagagccatgtcattttcatgtctgtttgctgtgcttgccatgtagtagcttttaaataaaatatttaaagtgtacgtgttatggaaattttagattaaaacatcttatttgcagtattttcgtttggaccttggagaacagatcttcctttttaaaataaatttatctttctgtagattcgtggtactctaaagagctggaccaagttatggtgtgtgttgaaacctggggtgctactgatctataaaacccaaaaaaatggtcagtgggtaggaacagttcttctgaatgcctgtgaaatcattgaacgtccatcaaaaaaggatggcttttgtttcaaacttttccatcctttggagcaatctatttgggcagtgaaggtatgtaagcccttgttacataggtgaaaggtaaagatgataatccatgaatagaactgagatacatcaatcaaatgagtttagtcctctgccaggacttataaatctgttctgctttccattgcattattcccccattctgcctctacccacaacaaaatgtgcaccaaaaagctttacctttgaggtctaactttttatattgcatctttttatctcttttgcccttggggattcaatttgtactgtttttttcagtttctaattactaactcggctttgtaacattgtattatatttattgttgttggttttttttttcccacccacctgcccccaccccccctccccaccccctgtgatttttctctttgtcaaaatggtaagtaggattccctggaacagaaactgccatttatttttatggtctttcctgtagtgatgtaaagc

SEQ ID NO: 70515 - DNA, 1035 bp, Homo sapiens
tacgaattagatagagtggcttaatactagtttctaaaggtgtttgtatttcttcctattgaaggaggagtagaagcagggcaatatgtgcatcagcttgttagaatttgtgtctttgtttgtttttagaatatttcaactattaaaagataacattgctttggctacttttgtgctaagaataactaaataattatatatgttcttagaaatactcttaaaaaatagaatgtaaaatctacagatgatcttatttaacttcacattgtaggtttgtatactgattagttttaacttttttatatttatggatttaacatggattcatttttaaagacatatagggaaaattctattgaaaattgacatttgcttaaatcatagcaataaatgagaaaaatgtcacataattttaacattaatttttatgcgacgtgtagaaaatctgaaggatttaatttctcttgtttctgtatgatttcagtctgaatctaaactttataatggctcagagaaggacagttcaacttcaagcaaactcacaaaaaaagaatctcttaaggttagtttccagttgtttctgaaaggtaatttacattgtgctttgcatgtgtgtttggaagtagactaataggataaatatatatgtgtgttcctaaagaaagaaaaaacatccagtggtacagacaggcaggcacacatagaaaatgttaatatttgtatggtacactgtggtcaactgataagattgattgatgactgtcacagagcagactgctttaggcctcaaatggcaactgcagaggctgaggatgtgttatctctgtacagctgtatccaaactaggtatattatcactatgttgtggaactcctaatgggaactctggcacccattgaaattagagattgctaactcctgggtcatggcctgaacttgacctgcataatgttttaaaattttgacccaacagttaattaaaagtccagatttccaatttctctgagaaatatgtagcactgggcttaccttcct

SEQ ID NO: 70516 - DNA, 1092 bp, Homo sapiens
gttggaggctgcagtgagctgtgatcacaccactgcactccagactgggtgacagagtgagacccatctcaaaaaataaggcagttcctctttctcatgcaccttttcctaggctttttcattgtatgaatgagtgaattggaaaagtcggttaatcagattatcccaaacaaagtagcattttaaaatgaatttttaattatccatctcaaccaaaggaattacaacataactaatgtgtctagtgggataaaaggaattctgttaaaaggataaggagtttttgagctcacatctctttaagttgatttttcaaccgtttaactatttgccttgtaggtttgctaaatcatcttttacttgctttaaaatatacatttacctggatagttaacaaacctttctaaaccaaaatgtctgatgtgatcacagtaacttatcattatccttgttgttccttgtatctgtagcattttgtaattttcaaagcaaattgcaaagtattttcataaataaatgccccattatttaaatctctaaaggtcagatttttgatagcacctgcaatctgaaatatagtcataaacctgaaacaatatattaccaagtactaagttaaacactttaagtatcatttaaccctcaaagcaaccctataaattagtagtagtatcttcattttacagatgaagaaactaagactgacaggttaaattaacttctcaaagtcacagagcctgtaaggggatagcagttaaaggggaaaataaagaagaaaaagagaaggaaagaagtaaaaaatatataacatgctaaacattctaatgccatttaacaaagagggaagcagtagtatacattaaacctgcctatcttgatggtcatcattaagagagtggtcaataaagtttatgaaggcagggaaacttagtttagtaaactatccccaacaaaaaaatcgtttacatttttggcatttgaaaggtgttttgattcagaaaaccgaggtagtaatttagaaaagactgtggaacttggtcattcctttttgtattacagaactagactgcacgttatggcagagattccttg

SEQ ID NO: 70517 - DNA, 1059 bp, Homo sapiens
tagtgatgtcatgatgcaatgtgtttgttttatttagttcatatctgattatctatctcttgatctcagctgttacttttaggtatgcttgttttactaatctctagaacagtacgtacaaattggagtaaataaactttgaacaaagaaagcatctatagacatctatagattgtacattttagtacatagttgttttgtatattttgacttctcagatttttttcttggctcttggctgtattcaatatagttaatgtagcaattctgtatttattttgtagatacttataaaatctttatttgtagatttgtttatgtaatttcattttaataagactgacgcaacataaaatttgctttattatatcacagtattaatgaaccaggtatatcaaaaagataacgccttatcagtgatgatagtacttgcattttgtggacaaattagaggttaagggcagaatgctaatttattcagcgataatattccattgcattagcaggaaaaagtaaacctatgtacttacactagagattgtctaatgtaaaatttactgtagatgggaaactgaagtctctggaatttaaggaacttaccatggttatataattacttgatggaagagttattatattcactggaattattatgagtctgtgactacttccaaaaccaaaagattagaagaaagatatgacagacttttttcaaccaggtttgaatgtcattagtttttgttttggggttgagctttaggaaattcttttttatttgctttgatggctaaaaacatttctgaaactcattactatgtttttttctttttatatgaagagaatattatagcactgtcttgcttcagtcttaagtactttatcactttcaagcctttccccattggagaaactgaaccattggaagttaagtattgtgcccaatgtcatacagctagtaaatggtggcgccagggttgatagatagtctgaccccatagcttattcgcaggtatccctctgcctttattataagcagttattttactgtattataatttt

SEQ ID NO: 70518 - DNA, 1047 bp, Homo sapiens
tggatacctggcaggaatatgaccaggagaggtatattctgcttttttagttcaccatgttcaaccaggattaggtaaaaagtagaatgcttcattgttttggaagtattctcagctgatccaaacatcagcttgaaggaacagagaagaagttttatcagcatacagtcagacagacaagccagtgtcaacaaagaacttgggcaaagctcacccaagcagtttgcccatgtgtcaaaaaagatggtgcagtggcagggggactttttggtaatgacacctcttttatattggatgtcctgtttctgtaccccatgcattcttgatttatcacattttggtacagttttatcttccagtacagcctttcttaactggagtctcatgacagaagtaagtcctataggaatattttctctgtttctcaaagatatagtgcattgttggaaatattatagatgcatgggagataaatttaattcatcttgaacagtggatgccttagtacattaggcttaattctattgcagaaccccagctgagaagggctactgtagtaaattattttaaatggtacatagaaaataaaattttgagaccttgcatgtctaaagatatctttattttactctaatatgtaattgatagtttggctgggtatggaattctaaattgaaacttgttttctttcatattttgaagattttggttattttttggcctgcttccagtattgttgttgacgtaaatagcctatctgattcatgatccagaggaacttggtgctgtgaattatgtgcaaaagggttatttggtgtaaataaggttgactttcagtttttattactgctgttgtgatttggctttcttggatctgcaagaccatgactacttgttcatctcgagctttgcagtgtcaaatttatgttgttaatatatcctctcctggatatgtacttttgggatatatatagatatttgtttatttttttaaaataccccttttcttgattttacttgagttttaggagggaacgcatttgttca

SEQ ID NO: 70519 - DNA, 1045 bp, Homo sapiens
gcaattgagagcataaatttaggcttccatatctttggtagtcaaggttcttagtatgtctgattttactgtactcttccagtttcatcttgtgtttctcatcatcgtggacccagctagatagctttcttcactgtttcccagtgagactgtacttttatttgtgctggtcttctatagtggaatatgcttctcctttctacttgcttatccaaatacttctcattctagaaggtgtagtttaaatctgttctcttttgtaaggctttcttaggtgatactgttatctcagttttcaaaattcttatatcactgctttggggatttcacaatatgctgctttatattgttattataataggtatgtttgatttcttcaagcagtgttgtaaagagagttaaatgccttaaattacattcataataaatgaatgattgcttaccatcaatttaagaatttcatctattctcattcatgtttctggctgaatctctgttatgtatattgactcataccaacttaatgtagctcatcattctttaaaagctgttctaaagttttttgcactctggttttgttctattgttttaggattttttttaagagctggggagactgactctccttaccccacacacatcaaaatacatttttgtttgttatatgtttagattttggtgaattagattattcaagaaattatgtattttccagattgtgttccttattcaaaggcttagtatcagtttactttaaaataattttaccttaagtaaaattatagtctcttaaagaggatggtatttgttttgatttatttgagccgaacatatttcaattgtttattaagaaagacagatatgtaagggccgggtgcagtgtctcatgcctataatagcagaactttgggaggccaaggggggcagataacctggggtcaggaatttgagaccagcctggccaacatggtgaaaccatctctactaaaaatattaaaattagccaggcatgatggtgcatgcccatagtcccagctactgggga

SEQ ID NO: 70520 - DNA, 1007 bp, Homo sapiens
cttttgtagaagaaacatactaaatctctttgtagtgttacgtgctttcatggcatgcagaactaatctttaatagtgcatgggtgttatatagttttaaaccaccttaaatttaaggaatgcataacttggctgtctcttaaatttctatgtaatttttacctttactaacatatcttgaattgtaattgaaagtaatttttgacttaattttcaaaacaaaatacttaggtgatccatttttctcttaccaccttcattttctaaagataaaacaaatatttgatactgcttaatccaatatctttttttgtgtgtggaaaaggaagtttcttgtaaattattacggttattactattgatgtgcatgtgctttctacttataaactaatgctattttccttgtccttttgtttcactgctgtttccgtcctgatgcattttgcttcttcctgatttggactgtatttgtttgctgctcaattaccctgccttaaaagcttcttggtgatagcaaagatgtccttgggccatcaagtaagtagctgaagcttgaacggcatgtttggggacatgataatattttgatgtgtgattattatgaaaggcaaatggtgtttcaattttgaattattaagtgttctacttttctttccaggaattgaaatataaagtaaagaatataaatggtcatttagtacccagtgccccatctgttctcattgtccatctgagattcataggcagtgtttgtatatttacatcttacctaagatgcattatttacttaattatctaactcataatttgggacctcttcttcatagtatttctttctacagttatcacatggcatagatctagcacaaggatttcactgccatatgaaagggagaaacacttttattttgtcagaatttttacataataatttgattacgaaaattgttttatactttgggtattttataagtgaaacatgttttaccttaggaatttagaagatg

SEQ ID NO: 70521 - DNA, 1234 bp, Homo sapiens
ttgtctgtgggacaatggtaaacaataacatactcaaatggagtcaattagagaaactgttgctttttagagacagggtctcactatgttgctcaggctggagtgcagtggctgttcacaggtgcgatcatggatcgtggtacactgcagccttgaactcctgggctcaagcagtcctcctgcctcagcctcccatgtagctggggctacaaggcgcccatgatgacctttttctgaataaactgagaagctgttcttggattctctgagattctagctctatttaggttctttaacaaaaaccaagaagaacgcctagcattttactttttaaatattgtacaagttaattgtgtagagtggttccacatcaataatttcacattgtttttattcatgtgttatacaacatggtactatacaaatttgacccaggtcctagaagtggtaagaataagaaattagtagtgtgcagtttagccatgtgcagaagacttcagtggtatacgttactttgtaaatttgatatgtaatcctcaattacttatatcctgtttcccattggcatcacttacaagcaactctggaaggatgatttcacttgactcccagttcagtgcttttgtatccatatccttttgaggaagttttctgaagccatgcttatttttcattgtgtttcagctttgcatttgcagtgcttgagtgtgattcttagttgtgttgtccattataatatatgtttttctagggcctgttcttttatcccatggcatttttcagtctcttatgattaagccattcaggtcatataacataactctcatacataatttatatttttcttaccagcctgaacctttccctatacagatttatatatccagctgcttacttgacatttccacttggatgaatgtctgacatgcatttcaaacttaatttgacccaaactgagttccttatatttcttcctgtaaactagctgctctcactatcttttctgtctcagataatgaaagtcccatccttccaggtgctcaaaccccaacacttgacatcattttgttcctgccttttttatctcacatttggtctatttggaaatcttgtttgctctattttcaaaatatatttggaacttagctacttctcatcaccttcactgctaacactttggtccacgattccccctctcctagattatagtggtaacctcctaagtgattatacc

SEQ ID NO: 70522 - DNA, 1027 bp, Homo sapiens
tccttcaaaaaattgtcctgatttatattctcataacaaaagtacatgagaatatctgtttccccacattctctcccatgatggattttagcatactttttagtttttaccaatgtaataatgaaaaactaatttatttcattagttgtaagtagatttatgcatcctttcaaattttaggcagtctcatgtttaaccttgctcttactatttttcttcacttggaatatttttttcttctttcatttttctctgaacctttaccattcttcaagcccatgtcaattttttttttaattattgaatttccaaataacctcagactaaaatgatttttcccttctaacaaactcaatgctttatttctacttgtcacagttttataccagtcctaataaatatcattttcttattttaggatttgcagatttacagaatggctgcacattaatggaaagagaagcataaacctatcttctttcattatggagggaggtttggcagatggagaacctgatcgaacttcggtgagtagttcatatatgacataggttctatcatctgtaactgtgaagtgtttgatgtaagctagggttttgtttttaaaatatattaacaacaaacttttaaaaagtatttttaaaataatgctttaactccttgagaattacagatactttaaatgatatgaaaattacagatagctagctaggcatggtggctcacacctgtaatcctagaactttgggaggccgagatgggtggattacctgagctcaggagttcaagaccagcctgggcaacaatggcgaaaccctgtctctattaaaaatacaaaaattagccaggtgtggtggcacatgcctgtagtcccagttacttgggaggctgaggcacgagaattgcttgaacttgggaggtggaggttgcagtaagccaagatagcgcctctgcactccagcctgggcgacaaagtcagactcggtctctaaaaaaaaaaaaaaaaaaaaaaaaatgaaaattgcaa

SEQ ID NO: 70523 - DNA, 1054 bp, Homo sapiens
ggacatcctgggagataggaagtcacatatttatcatataaaacttgttgccataagagaaagccactattcattactgaataattgaatgttcaatattcaatcattattttaaggttattatgattagatatgtattaaagccattaaccttgcctagtaggtgctccttccttttccctgtgactgaaataactatttgtaaatcccaaatagagaataagttttataaaaattactttctctaggaactttgttagggtaagtatagacaatgagctaccagttccccagcttctggagtactgataacaaaaggaacaatagagagaacattgtcttctttatactttgaattcaactagtaattatatttaaattaggatgcaggcctggctttagtttggcagttttgagaaatgagtcaatatggttgtcaaatgccatactcttttacaaaaaagttacttaacttttaaaaaattaacagaagcaatatacactgtttaaaatacttaaaacagcagagaagactacctttcttctctcgaagcctgttccttacagcctactgccattaagtttgcttttaattactgttttagcttttaaaaaatgcttccctattctcagatttattatcatttaaatgtttttgactttgacctctaaaggatgaagagattggtgtacttatactttaagcccccagccactttccccttccaggattttttgttattagcagtgtttcttaactgttatcaaaggtgtggaatttagggcatttatcattaattttaccttttgtcatcttgcttccttttttagttagtgattttataatttttattttgtgtatgtcttgtttttcatatagagtaaatctctttttacatagatatatagagtaattctgaaagttgaaaacaaaaaatcaggattcattaattcattcattttataaatattgattctttaatactggagcacctcagcgctctgatcttgggttcttttctgtctacagagatttccaaaattatctcattca

SEQ ID NO: 70524 - DNA, 1033 bp, Homo sapiens
agctgtaacttaaaatatctaactttaaaaacagacatttagtgtataggactaaattattaatatatggttgccagtatcatatttgcaagcattatctttaagaggccttgagttactctttgagacacccttgtcacaatgcgacctagtatcacaaatgctgactgatttagagaacagatgcactgggaaaataaacctgcaagaagtgttatctttcctagtaagtaactgtgtgaccttggcaaaccacttactctctctgggtcctagtaaaatggagagtttggaaccaatggccttttagattctttagagaggctaaaattccaatcaggtagtatattatgtaatccttgtaatagctctgaaataaatagatggtattctaactgttttacagatggaattattcctgttttttttttttagactcagtgtttaagtaacatgttcagtcatgttgctgctaaggagctaagtgagaagttgaaccttcgcctatttcactctatagctgttaagttcttttagtataacatactgccacccaagccatgttgtttatattagaccatcggatcttattcttaaaatttgttacatttcttaatctgaagtttataataaatgtgcttttgctttatagcatgcgtcattcaggaaaatcagaagtcaggtatcaggcatgtctatgagttgtgccaaagtagaaatatgaccagttttaaaattattattctagaacttatgtgtttctctaagagatggtcagtgtgttcaaagttaccttatttcaataatatcactattgttcaacaaacacttttggaataatgcatttgacatttctttactgtctttcacctcattcttttaacctacattctgtggtgacaaattatatcttttgagaatggatttggtatttggtatttggaaaaggtggcaagtctttctgaaccaagtctcacacataaaattaaggatcaaaatgaagaaggccatttttagtataaataagcagtga

SEQ ID NO: 70525 - DNA, 1029 bp, Homo sapiens
tctagactcatgttgtgtgcatatttcatggcagtatgtgggaaacccctgagagattttagatctttcttcccaccttggtccccatccctcacatatcctcacaaagtcataaaattctcatgtggaaggcgtgatagaaggaatttttcttcctgaaaagtgttatcaagcttgcaagggagagagctattttcggagaccttatagggaagaaatcctagtcctagagcatcatattcttataccctgttatttttacctttgtcgaagatccagataatgtaaattctccatgatagcaaggaccttgtctgttttgctcaccattgaatctccaaatgttcaatagttaatgaatgaaaaaagtctacttccagatatatgactggagaacaaaaggagtatctgataatgtagtccaaactaaatgcaagcagcgaaatgataaaggaaggatgttagcttgggagaaggggaacaggtcatttaatctgggaaactttcttggaggaggtgattcttgagttaggttttggtgtgggctgtgtgtctgaagataagcagtgtctaagggggtagacaacgtgcagcaaagcatttaagtcagactgaataaattatgtcagataaagcacagtaagtctttttttgtaacattatgaagaatttttattctcccatctctattttcacctctccctaaataaaaagattaacttgctttgcaacagcagagattgacagtacttgagttttggaagtacgataagggtcagaaaatttgaattggtgttctgactgaatcttatacaagcgtcgtttccatcggccaatcacttggtcttagttttctcatttgtaaaatcaggataataatccatgatcgttgggagaacaaagttatataatgcatgtgaaagtgcatacctcaatatgaatgtgcctacctcaatgtgtcacacataggaggacttcagcaaatacaaaattattaaaacgtttgtctgcagatctttaaaacatatt

SEQ ID NO: 70526 - DNA, 1018 bp, Homo sapiens
ttgtggagaatcgtgggtgaattgattgttaaattttgctaatttcctagagtttcatctaaacttgattttgctgagaggctatgatcagtttctatgcttgctagaacctgttttgcagtgaaattattaagatcatgctagttttataaaataggttggaataggaaaagtaaggccatgcaatttaaaactgttctctataaaagtacaactaatttcaaatgtttgttacttttatttttttttaatattaaccgtgtatggagtgactataatatacctgctcaaagggctgagaaaggaaatagatgaaacttaagctaccttttgggtctttaattatggacatcaagttattgcggtcacattccatgtcaaccgtttgaacagcaataccgtgtacacaggtgcttagaaatgcctgtttaattaaaaatggccatggtttatttctctttgattgaatcataatagttattgaatctctgatctgtggaaagatgctactgtattttccttagaatgttactgcattttaaagacagtcaaatatgttttttataacacattcagggtacttatacatttgtcaatattcagttccttggttcatttaaaaattggaagccttagaaaacactttggggataaatttacaattgtgtataatgaatttatgttttagtttgctttaagaaaaatgatgaaattatgaatttgtaaaatatgcattacaaaaggattttttttttttttttttttaagactgtctcactctgtatcccaggctggagtgcagtggtgcaacttggctcactgcagcttctgccacctgggttcaagagattcttatgcttcagcctcctgagtagctgggattacaggtgcgtgccaccatgccaggctaatttttgtatttttattagagatggggtttcaccatgttggccaggctggtctccaactcctggcctcaagatccgcccgcctcagcctcccaaagtgctgggattac

SEQ ID NO: 70527 - DNA, 1010 bp, Homo sapiens
gaggtggaggttgcagtgagccgagattgcactccagcctgggcaacaagagcaaaactctcttaaaaaaaaaaaaaatccaaagctgtggtgacaaactgaaaatgtagcttctgcagcttactgttatcatggtcaaagtacatttttctcatttgtaaagttgggttaatagtgacaccttttacagttattgtgaatattaactaggctaatgtttataaagcagttttcatagacctaggcacataggctgccaagcaaattgtaccttctgaaggccctggcatatagtgaatactgaaagggaagctgctgttactttgttttcttttgaaataggtgattatttgttttattgaaatgaaagaaattaaaggctctttggataaagaagaactgatgatcaagggattagggtactagttctagctcagtgaccttgagctagtaggtatttaactggtctcagttttgttgcttttaagataaagtagctagactagatgacctctaagatttcttcagactcaagtgttctggttttaaattgtgatttttcaatataatcaacttgagcatctgtctactaggtacgtagcattgtgttaggttatatgggttaaaataacataaaaaagatagcatatgttttccagaaggtaaataactagttgggaagttgtaggcacgtgaaacactggacgattcaaataagtactgaattaagtaatgtagcttgtaagtggtgtcagattcctgtcatttagagtggttagaagaaaggcttccgtagagggacagagaccatatgttggtctactggtccagcagactagccatgaccagcttccattttacctactagtacatcctcagtaagtcatctcagctctttgatagaatgagatcacaatatccccttctgccacagtatcacaggggctatttcagaaccatctgactcagagctttgaactggattgcctagattatctagggctttcatc

SEQ ID NO: 70528 - DNA, 2016 bp, Homo sapiens
aatctcaattctgctcactagcttgcaatcctgggcacgttattgaactctgcatcccaattttccaaactaaaatgggggtataataacacctactttatgaggctgttgtgaggattaagtgagataatacatgtgaagttctgtgtctggcacttagtaaacaacaataagtgttggctattaatattgtggtaaaaagtagtacctcaaattgataaacaattgtagtatgcatatattagagtggctaaaataattagtattggttgtctctggggattgaagagaagatgggcagaggacttcttattataagcccttttgccctatttgatgtttttaaagacgtgtgctttgctacaagggagtgtttattgagaatccaagtatggtcttgaccctttgctaggctccgaagtaataacatttacaaaataacacattgtaaaatgatgtaagattaactgtagaccttcagatacctcaggatagatgagggagagtgtgtctgtgtgtattttttaaaattagaaatgattcgtggtcctcctttcctcctagagagggttgtaagggtatgttaaggtagtcagcattgaacagttaaggtgtcttaaaatgcagtgtgctggccgggcttggtggcttacgcctgtaattgcggcactttgggaggctgaggctggcagatctcctgaggtcgggagttcgagaccagcctgaccaacatggagaaaccccgtctctactaaaaataaaaaattagccgggcatgggggtgcatgcctgtaatcccagctactcgggaggctgaggcaggagaatcgcttgaacctgggaggcagaggttgtgagctaagatcgtgccatcctgcctgggcaatgagcaaaactccatctcaaaaaaaaaaaaaaaaaaaaatgcagtttgcttttaacagaacccacaacaattacataatccgaaaagatgtttcactattaaggttatgtaaaattctctttcagcgcattatctgattatagtattattttatgaatagattttattacagatggataatttaagagtaaaatcaaatattttaattttggaatttgaaaaataatgattcaagacaatattatatttataaaatacataaaatttgacccagtggaataattatttagacctaggataaaatatcttcttttaaaattttcttaaagtggagccacaggcagctaatttgaaagtacagtgaaacttcagccttctgtgaatgagatactgtgaacttagtatcctgagttacagagaattaaacaatacttttttgtttttgtttcaattcctgttgcaaatttgccaaattattttctagggttaatacatactaaacataatagaatctttctttgataaattagaacattatagtgtcctaggatcatctttctgattatcggtgatactgttagggatatgaagattataacattaacagtacctgagacattttttgtgtatatatgtcagatggcttgcatttttatcagttgttgtattctagaaaaaaatgaagtgaaaaattacttctgattgagatgttagtataccctacccttgtttagtttttaagaataatttttcaattatgaatactcattaatttttgaaggatttaatgaggtatgaacaaaactggtggttaccaaaactatccctattctcatgaaaaaaaaaaaagttctttgagttgaagacagaagtttcttgttgtgtaaggatcctcttgttgcagatgtcaacaatcttgtctgaaacatagttgggcaaaaaggggaatttactgtctcagataacctaaactcaggatgcaaggatgcagttgaaatcaaacacaactggaacctgagctgagaatgccaccaaaactctcttatctctcctcctctctccctttcagcttcattttctccaaatgcagaccagcttctttcttccatgtagccgggacatagatgcca

SEQ ID NO: 70529 - DNA, 1051 bp, Homo sapiens
cagtaagtgaataataataaaaggcaaatgtgatagaatgactgggatggaaggaccacatccagtgagagtgatttgggaatgcctctgaggagatgacatttgctttcagaattacgtaatgagaagggatcagttatacagagacatgtgggaaaaaattttccttgtagaggaacatgcaagtgcacggtcctaaacaggagtaagattgcagtatttgaggtgcagaaataaggacagtgtggccagagtacagtgagcaagatggtgaagtcacttgagaaacacaggtgctgtatcatgcaatgcgataataaagagctttaattgtattctcagtcatgggaaacatttgaaaggatttatgtaggctgattatatgatctgctttttgttttaaatattttttaaacattactttggttgatgtatggagaatgcattgaagagttaagaaaatggaaaagatggagatcagttaggctgttgcaataaatcagacaagtgataatgttagcttagcctaggatcagaggagtagaggtagagagaaatgactggatttggagaggatattttaaagtagaaataagaaggtagattaggtgtgaggataaaagaaaccatcgttgatgacttaggttttgttttgggtaactgagcgtcttgtgatatcatatgttgagattgtgaagactgaagaaggactttttgggatgaaggtgataggaattggttctgtttggtaatatttaatttgaagtggtgtcttagccgtgtgaactattaagctaattaagtaaacttaaattgctgccaattttgaaaaggaaacatttattttaaaaaaatacctagaatatttgtccaggaatctaaccaaatttatttatacctatgctttttccatttttaagtcttaagaaagaatcttgttgataatagtggattgtaacgataagatgcagcctgcaaatctggctatggctttaatagctataaaaagttatatttttcaaagaatatgaaaaattacgctttgtgttat

SEQ ID NO: 70530 - DNA, 1052 bp, Homo sapiens
ttatttaggtacataaagaaactctacggcaattaacttcttttttgtgggaaataagattgtgcagaacctagaccccctctctgggggaaaatattctaagttttagtatcatataatcaggcaactgagccaacagtcatacaatttaaaactgaaggtatatggatgatctaaaatgagttttccatagaaaggtcaagaatataagctctctgaaaaaaggtatacaacatatcacaaaagaatgcaaagctcaagttagagctggagttgtgagtagtttaaaaagatatgtattagaactaagctatttcacaatttattatcatactaacaaacaagcattcactagaaaaacctttatttttatctattacttaacaaaggccagttgaatcaatgaaccaaaatgtacacgagtagccgatggagatttaaataatttcatatatacccatccttcttaattattagccccaaaaggtcaccaaccacgtaggtaagagcccttggaaactttgttatttaccttcatttattctgagtataataatattttaaaaattacattgagaaatgccaaaattaaaggctgtaaatactcgtgctaagtaagtgttcctaagaatcctacttaaaaaattatatatcgaaaatcttcagctgggcgcggtggctcatgcctgtattcccagcactttgggaggccgaggtgggagtatcacctgaagtcaggtgaagtcatctgaagtcaccatggccaacacggtgaaaccccatctgtactaaaaaaaaatacaaatattagctgggcatggtgatgggcacctgtaatcccagctactcaggaggctgaggcacaagaatcactttaaaccgagaggcagggattgcagtgagccaaaatctcgccactgcactccagcctgggcaacaagagcgaaactccgtctcaaaaaaaaaaaaaaaaaaaaatcttcagttatgagtttaccttatcagctttcagctttctaaggaaggacggattgtcatatccttttgcttgc

SEQ ID NO: 70531 - DNA, 1055 bp, Homo sapiens
gtgttgggattaaaggcatgagccaccatgccctgccttgaatatcttacatagttttgtgacctaaggtaactgaacagagacttgataactggctataagtttgtgaagggctcttacatggaagaggcagtagactttctttggttgctataaagataaaattgtgatagaagttaccaggagttatgtaggttttatacttacaagtatggactttaacaaccagaccagtacagaaatgaaatggaaatacctttggagtattgagcactctgccttgatctttgttcagagacacatctcttcattcagtgaactctaggagcctatggattgtttgcttttattctttatctcattttaagattttaatatactatttatcatttgaaatgtctactccaggcaagcatcttcaggtttccttatgtgttataattcttatactattagtcattctagttgtccttgtctccctggttatcagtgcccctgttaaaaaggggtggtatttttcatgaactgtttgctagccagtgtatgtgttaagcaggtagtactgtcttctatatttaaccatatagaaccaactgctataacttctgttcttattttccacaattttagcaaagttatttaaaattgttcattgcctgtctccagaagacagacaccagcaccttgaatagtactgatacatagcatgcaaatttgagtgaatgaatttcacccgctgttgcatgccttcacaaaggtaacaatgattcagattgagattacttgaaacatgcaaaaacttttctaattttttgtttctatacaggaatttcggcagaaagtaatgttaggaactcctttcctagttatttggctggttgggtttatagcagacctaaatattgattcttggctcattaaagggctaatgtatggtggtgtttgggctacagtacagtttctttcaaagtaagtgtgttgtttttaactatattttaaactgtacatgaaataatataatttgtactcttgtataaaattaatgtttgtatgtt

SEQ ID NO: 70532 - DNA, 1129 bp, Homo sapiens
agaatttcccatctaatttccagtcctttagtatcttattttcacttgcatttcagaaaagaattctgaaaataattcacacagagatgagaatgactagtattataatatgctgagtggcttaaatctagttagtgaatctcattttagtatttctagagtctccaaggggtataaataggaagtcactaagacctcctgcctatatggatagttgattctgttcatgtttaataaatggattaatgtttgtttttccccaattttaagtattaaaaacacaactcttcagtttcactaagttggccagttcattctacttgaaaagatgtgctccaacttttgctggagtgttataggtaaggagaaataatgatgaaacagagaaaaatgtgaggcttggtttggattcatttgtcaaaattttgacacatctttggtgaatagtatgctggatgatagctactatatatactaaagtcagttattgactttaagagaataggagtgcgctaaaattctgaaactgaaaagtatatggaatgtaatttaaatttggggggaattaaaaggaacttcagaatcttgctgagtctttcagctgtgaactaatttttattgattactatgaaaaattgagcatcctgaactctggattctggtgaaaccaatgcttactatacaaaatgtgtgtcattttcatttaaataaatactcatttttacaatgaaatatagagctcatattttataaaacttgtgttttacagatcctttttcgatcattcaatgcatagtgcattgccccttgggatatatttggcaaccaaattctggatgtatgtgacgtggttcttctggttttggaatgatatcctttggttataaagatcataccaaaaacaaattttgtttgttatttgaatagatgtttaataatttgacattaggactgatctactcattcataatacattaaaatagtgttcctagaaaatttagtaaactaatataagtaatgtttttaaatatttaataggttgcttttgaaagctgtctttaataacagcatataaataatagtagctatcatttattgagtgtttaaaaggcattttttgactactcat

SEQ ID NO: 70533 - DNA, 1032 bp, Homo sapiens
aaaaatgaagagatttctcatgttcaaagttattaacatatactttatgtatatgcactgcaatctttaggcatctaccaaatattacagatatcatactcgtatatttaaaagattgcttttaactataggaaagtcaaaaaagaaaaattctcacttttgcctttttttgaacacactgaaattgatttcagaaaaaatataagcttgcttaaaacaaatagtttatatgttcacattttttctatctcataaaaacgtaagaaatatactaggcatttataaacacaagtaaattatcaaaaaacaatttaaataacactataaaaaatacagcaatgtcgctagagcaatacatttctgagacacaaaacaccaggtatactcaaataccatttgtaagattgtatgtagatacaagtattatacaagaatttcataagactttttgacattatcatgtgtacccactgtttacatttctcatgaagcacagatagaaaaagaacagcttcttgaatgaaatcattctatatttgtttggaaaataccagaacactcaatagccacttgacatacaggagaaacaaaagacggaagaaaagattagttattatcacctggcatattcaaaagtgacttatcttttccttttttctccaatcctctcttttcccccaactttttccaatcttattccacaaaatataccggtatagccagcagagagtaaataagaagtcaaactttcagctgtttattctggagaataaagtgtgcagaatgctgaggcttgacattactcaggggcagcacttttatttatcacaagttttgaaaaggtgccaacgtaacatgtaaataaataagtcaaactctcaggacctggattaaatttgcagggggtcagctcaatatatgactacatatttgaaaggtatattaaggaattaaatactgaatgaactttaaaaatgtctttccttgctctttaatgataaagaaattaggtatcttcaaatggtagactga

SEQ ID NO: 70534 - DNA, 2019 bp, Homo sapiens
gtctgcatgatttaaaatttataaagaagtcacattatttttacatgtagttataaacataatgcagaacagtttgtatttttttgactggtaggtgttttgtaaaattttatagattataagtttatatataatagtaattcatttatcattgcttctttagattccttaaccttaggcacatctcaactttttatttatccatcttccattccttgccaatagtgttgcacttttctacaattttggaaaatcttggaaatcagatccagggattattaaagcaacagaagagcaaaagaaaaaggtagcaaaataccaactaagtcacttgtatttaactgccagattatcagtatttacagcagacattagaggacagaggaattaactatcgtttagaatgtaaagaagttttaagctaaattgagattatgtatcttttatttggtgctcatccttggtgctcttgtgatgcctgtccataacacttccatgacattttataatttcgtgtttctctcccttacaagactgctgtgattgctttgaggggtgaatacggtgtcttaaacatctctgtaaatctccaggaaataatttgcattcagtagatgtttgctgaatgactatgtaaactagaaggttaataaattggttgatagtgcaggtacaccatcccagtagctaaaatatttgtatataccatccagggcatccctttcttataatgcaggtaattaggaaaccaatattataatctaacaatgttgtgtatttagagaactggactagaagcattttagattattttaagagctgttttatttagtctctaaaaacaggacaaattttgataagttattccagtccacaattgactaagacaatggcagattcttatggtctaatccccttttttctgggcagcatagagattgctaccctgtattcttcttgcaatgaaatagcagtaaataaaagattttatttctctttttgaactcaaaacatcagtaaattaaagatgaaaatcatgtttattgattcatagtggtggcaaaagagttggtgagcattgttcagttttgaattaaatattatttttttaattcacagacaatagttgaacttgcagagacaggaagtctggacctcagtatattctgcagtacctgtttggtagtattttcttctttgttcttccctcccttctcttcctcctgacagtggcatagcatagcgggtatggggtgtggggaaaaggaataattattttcaatgaacacattccctgcttcttggtataagaggaaagatggttaaaggatgtctgcttcccaaggcgcttattcctcgatggtaggccttgactgtacttttgattcggaggtgccgtttatttgtattcattctctttctcttttctcgcttaaaatgttaataaattaaaaactaagtaataaagtatttcagatcaaagatttataatgattccctaatagattgttttctttactacattttaagaaaatttatacttgtatttaaaagccacatgggaaaatccattagataactgttaagacaacatggcctctaaacaagttcaatttgagtaggtggttttttttgttttgttttgtatcagaatgtttatgtaactttgaacactgttttatcatagatttttaaagtggtcatcctcatccaggtcataggtaaagatatatatgaaattactagtatttattaatagagtcaggtatagcactattgagattgtttattattatagacattaattttctgtaggataatactcttatgtttaaattatttttcacttagtttttataattagtatttgtgaaaaatatatatactgccacagtgcttaaattatgtttttctacatggaaattgaaatattccaaagtcatacataaaactaaatgctcttttatacttatacactgcaagtgagctcatgtcttagcatctgattaataataaagt

SEQ ID NO: 70535 - DNA, 1038 bp, Homo sapiens
ttgtaaattgatggttcagttccattcttaagagcatattttctagagtagcctcattcttttattctttgtttttgcagttgaaattttattaaacaatagtgacttttggtttcattcatttggaaaccttgatataatcttgtttaaaaaatatagttttatttttttataattatattttgagaaaataaatagtcagcttttctctcttagtataatgcctttcataatcctttaacatgcctattaacagatacgaaaaccggtgaggtccaaacattgtggtgtgtgcaaccgctgtatagcaaaatttgatcatcattgcccatgggtgggtaactgtgtaggtaagttgtattagtaatttcttctgtatcattcatttaagttactttaggtaatgaataaagtataatattaaagtaggcaatagaaagtttattactccacgcttcattttctcagttatcttctggttgacaacacagcaactcagttgagagagggagggaaaaaaattacaaaattagtggctgataccttttctctgtcagttctatctggtgcctactcttgataaggaggcaaaattttttttttctagttaaactagagagatgaaggcggtaatatttgaaatgatattatgtgcagaggtagagaggaatgacagataagaacagtacacacattagtgttcaagaatggtatagtctaaggagagaaactacatggtttgagacatgccccggagattttatgaggtgacaggaaacattacaaagattgtttacctctgttgaagagaaacctttggattgtaaagtttataaaagtaaagataaaatagggctattttaaacctcacaaagaataggattagaggtcagaattgtgatttatttagttctttgggacttgaacaccattgtcatcattatatctttgtgtgtaattgcaagcattcttatttaagatttttattaaaacatttttcctgaaaaccactttataaaataatgaatgtatgtgtga

SEQ ID NO: 70536 - DNA, 1110 bp, Homo sapiens
caaagatgagaggatatatgaaagagatttttttgaaagagggcatataacataataggatggtgacatgagcttttttttccagacaaggtctcgctctgtcacccaggctggagtgcagtggctcaatcaaggctcactgcaacctcgacctcctggacccaagcaatcctcccacctcagccacctgagtagctgggactacaggcatgcgctaccacaccgggctaatttttgtattttttgtagagatggggtctctcttcctacgttgcccaggctggtctcaaactcctggcctcaactggcccacctgcctctgcctcccaaagttttgggattataggcaatgagccaccatgcccagccaaggtaggcctttcctaatacaaaatctcctgctgtaggagagttgctataaaatactgctgttgttggcaagaaagtattctcctcaggtgtgctgggccagaaattaggtcaagttctttgaccaaatcttcctattaatctttaactgaggtggtaacctcctttggttcattagggcaataacactgattatttttactatctgtggggcaggaagactagaaaatcatccttccaagacttgtatttaaacgaggatctaatacatctttatgccaagcaccaccaagccctgaggcatcgtaagtgacgtatccacttaaactctttccagactgcattctcaatgcaacaaaaatctatcatttcctttaaggtataaaacccacatgatggaataacaacttattcttaaaaaggtaacttctgatatttactaatattctctaataggcaataattataccttacttttcaaaatatttcaaattctctgcaaatttaattttaagtatattttcccaactgcttggtaagaaacagaactaagacaatcacttaatctataagctactatagtaaagcaagcacatgatgtggaaaatgttgatgtatttcacccagaagcttctcaaagcctattaaaccaatatgtttttcagaggacacaagtattaaaaggtggttaactgctaactgtttgcttacactgtatattggacataattgatagagctg

SEQ ID NO: 70537 - DNA, 1663 bp, Homo sapiens
ttcctaaccactcctgctcttcaaatattcattttatttttcaatttagttttcctttctacctcactcttttgccccttcctcttctcatattgtgaacttttgaattttagtacttatctcaacagaaattttaatctgttattcctgacttaaatacatccagttgagtatgtgtgagctcagattgatgatgacattaattttgtgtttttaatggtatttttattcacaaatactaatatttattcaaaagcctttttttaatttttaaaagctcattctcagagaggctgatagggaggttgtctgtgcaggaatagcgcctgtccatgcacagtgtcaagtaacctgtctttaaatattttccacatttaactggctacttttcacagtcaaatgataccacgtaaactagttctgatgatctcctgatggaaaaccaaaaacagacttcattgtttttatctttatcctagttttcttcaaattaatttttttatattaagtatttagaaagaataatggtttgtgcagcctggcatggtggctcacacctgtaatcccagcacttggaagccgaggtgggcggatcacttgagcccaggagtttgagatcagcctgggcaacatggttaaaccctatctctaaaaaaaaaaaaaaaaaaaaaaacccaacaaaaaaaagaaaattagccgggcatggtgcatgcgcctgtaatcccagctgctggtggggtgggggttttggggtggggggaggtggcgggggtggaatcacttgagcccacccaagagggagctgagaattcgccattgcattttagcctgggtgacagggcaaggtcctgtctcaaaaaaaaaaaaaaaaaacaagaataatggtttgctttttctttcctcttagatatcatgtttaggtattactacaaatgaaagaatgaatgccaggagatacaagcactttaaagtcacaacaacgtctattgaaagcccattcaagtatgtacatatttataaatttaatattttacctggtcataaaaattttcttactaaccagactcttttacttagtgatatgtaaaatagcttttaaacctttttaagatttctgtagaaatagcatcagttcaccataataacaacaaaacagaattcatcacattaactgtatataataaagttgtgatatctccttatatttttttctttttaattttaaatttgtattcagtctggtgcttagaaatagtagggtcctaagtatatgaaatatttaaaactttgagttttactgaagttattaccaactcttcagcttttgtggtgctgtcaattatggcatacttctggaaagcaagcagacctttaaataaaaacagagttagttgggtagttttgagaattctcccataggtacaaaaattatataaggcacaaaactgactgcttttcttttcttttttttagacagagtcttgctctgtcacccaggctggagtgcagtggcatgatctcggctcactgctacctccacctcctgggtttaagcacttctctgcctcagcctcctgagtagctgggattacaggcatgcaccacgcccagctagtttttgtatttttagtagagatggggtttcaccatcttggccaggctg

SEQ ID NO: 70538 - DNA, 1644 bp, Homo sapiens
taaaggtttttatcaaaaattacatatggagccaggcatgttggtgcatgtctgtagtcctagctacttgggaggctgaggtgagaggattgcttgagcccagagttcgaggccaggccgggcaacatagttaagacctcatctctaaaaataaaaataaaaatgcatataacacagaaagtatatgcacatttgaataaatttaaaatataattgtgtaagtctttaaattggcaaaagaaaaaatcattgttggcagagcagtggagaaacatgaaggcatatatattttatagagttatgaattggttccttcttgcaagtaacctgagtttttaagtttagaaaaaaatatatttaacacgaaaattatattgaattcatgtattaaatcatttgtactgactgacgtgttttctttttggggtgctgtttttagccatggatgtgtaagaaatattatagacttctttgaatttcgatgctgtggcctctttcgtcctgttatcgtggactggaccaggcagtatacaatagaatatgaccaaatatcaggatctgggtaccagctggtgtagcgacatcttatcctatgaagcatattgctgagtggtgcctgaaaattgtgtctgtccgtgtctttctcacactcgaatccacatcctttgaacaagagcatgctatgtgtagggctaatggtgaattttacagtctttttttcaacacttttattaacaaaagtaaacatggacagaacacactgccatttctgggaagagtaaagatgataaaaaataattttaatggttcttaatgtggaaattcacaacatactcaacttttgggttttgttctcacagtatttttcacaaaaaaagggtaaacttattctattgacagacatggtgtactgatcagaaatgttcagttttaactaaaactaaatttatgttatttggctaaatgttatgatgcagtctagtacgagtattgcatctaattccaggagcattgttttaagttgattgactagttattatgtacatttcagaatgtacacataaatactgtgatgaaaatcatgtgattgggatctactgtgatgttgtcttcaaaggcaggagaaaataatgttcacaataaaatgtgctaacaatgttttgtttctatcagctgttgcaatgctgatatatttctagttcagtgaaataatttgtagtaaccttactctgaggttttacggtctgataatgaagcacttgcatgagtatagtaagtcatgtttttttgttcaaatttaaaagccctgctaattgcatgacacaccacatagaatgtatactagcagatactatccagtgaagcataaattagaatttaatttgatgttcaaaaacagttccatttttaagggttaaggtggtattttcaagaaaaggcagaacaaataatgcaaaattctcagtaatagtgatacatggatatacttccttttaaattctcagctgcaaaataattgtagacaaaataatggcatttaactaaagatggagcatgatctaagtacatagcacatgtgaataaaagaaaagctgacagtatattctggtttcaataaaatgacctatcagaaagtagaatttc

SEQ ID NO: 70539 - DNA, 1095 bp, Homo sapiens
ttgttcaagatattgttacttgaactccagactaaaattatggatagagtattagtccaatttgaaaatattcctgtttaataccactgggttctcaaaccattaacaaccactggaacaacaggaaacagttccttaataatttttgccttttaaagtcccaaataaagaagttctctctgccacgcatatcttctcaagtaactgagatcaacgtttggtaggtttcattctgcagtatttttctttatatagtacattttgcaatatttttctttagtatctttagacatatttaaaacttggagattcatacagtccctgaggatcctaattaactacatggaattcaaaaattcttaaaaaatttattatctttatttaaaaaaaaattacacacacacacacatgcatacacacaggattggaaatttttttttttttttagaatactaacaccatcttttatttttccaaattcctacagtcttatgccacttgactcctagttaaccaggatataaatgtataatcttttcatatcataggtaccactatcatttcatcaatttcctgaagtaaattgagtgaaatcataagcacacacttaagagtcagtatttattctgattaatattttacaaaattttgacatttaatttatgtaaggagggctaatttattaaacactttacaggtttttctttccacagaataacacggtaagtagcaaaataatacttggcacagttataaataaagaaaatataaaataaaaacatccatagcttaagtacaatgatgctgttttacgcccattaatatcaaataaattcctggaaacaacaaaaatatgaatgaaaaaaaactccaaggaagtaattcatgttcagtgctgagaattaagttcctatttgctaaaagtatccaattaagttgataagaactattcccaaaggttcaccatcatacacaactttagaactgggtttatagttggttccacacacaggacctacaaaataattaaacagatggtatactgctgcatagctggctcctgaccatctgaccatttctgagttatagatttca

SEQ ID NO: 70540 - DNA, 1095 bp, Homo sapiens
accacaaatagccatcttttgccttcatgtcttgagcaaagcgtaagtatatggaagaaaacagacaaatacataccttacctggcctgactcatgcttgcaactcagcaggaccacgctgaacactatagggccagaatgtgtggacttgtctttgcagctttaagatatttagtacatgacacatttaacatcttaaataagttgagctcttttacacagcagtttaatttatgggggtttgttgagtgggtcttaagcagtgctagcaaagcttaatggacttgcactaactatccttcctccctttcctttgtaggatgctatgcaaagaactttgggcccaagggatttggctatggccaaggagcaggggctcttgttcatgcccagtaagatgtaaaccctgaactaaacatcacacactgagaatctcttcataatctaggcacagataatctttaacactaaactactgtgaaattctaccagcattaagtactgtatatcgccctgtacttggataggctggctaactcgtaggaagagagcactgtatggtatccttttgctttattcaccagcattttgggggaacatttcttttacattttaaataaaacttcagcttgatttgggtgttcattgtcttttaattaatcttttggaggagatgctctgatttcagttagtggaaagtcatttggttccctacctttgttaccccattacccagctgactcactaggttcatgtttgcattacagctgttgaaaaggatctctctttcaagcaggcaagtgtgccttaagagtaaaggttgcaggccgggcgcggtagcttacgcctgtaatcccagcactttgggaggccgagatgggcagatcacgaggtcaggagatcgagaccatcctggctaacacggtgaaacaccgtctctactaaaactacaaaaaaattagccaggcgtagtggcgggcgtctgtagtcccagctactcgggaggctgaggcaggagaatggcgtgaacccgggaggtggagcttgcagtgagccgagatcgtgccattgcactccagcctgggcaacagagcg

SEQ ID NO: 70541 - DNA, 1036 bp, Homo sapiens
ttttttttttttttaaatttagcagagacggggtttcgctatgttggtcaggctggtctcaaactcctgacctcaggtgatccacccacctcggcctccgaaagtgctgggattacaggcgtgagccaccatgcccagccagaaccaggcattttaaagtggtcgaggcagactaatttgttgagaagggagacgagaaaatgttggccctacatgacagtgagacaccctaggatctgtacttccagcttgccctttacagcaggccatactattcagaggctattcctgcatgctcagcaaacagttcaactggtaggaagggaacttgtagcagattctgtatggcctgactgacttgccaaagaggaaaacccaactgctggctgcactagtgggccttggggttagtgaagcatagaaacttaagccggagccatctggatgggcgtttgttgtggttacggcaaaagttccgtgcatgcagttgtacgagtcacagacacagctatttatgctacaatcgtgtaatttcagcaaacaaatataaaacttgttcttgcagggcaacacactttgttccctagaaagcgtgttatagcttatatatgttaaacgttaagaatttagtgttgttacaattaattaaacatgtaatgaaaacctccacccaagggtaagatcttcagctgagttcaaaaaaatatgtttattaaaaatgggcatattagggagggggacaaggcttgcctttcccctccccacgcttctttcttaactcctgtggattctaatggcatagcttgttttgtgcctggtgacctgtactattgtactgaatgcaggtcctttgtctggcaggaaaaaaaaaaaatcttgtgcacgacaagccagtttcctaatgaaagagttgttatttgggagaggagatgaggttattttggaggaacgcaggcctttgaaagatgtggttagagaggttcataaagaaacgaaaatctgcagctgtccctgggcttaaatagccctctaggga

SEQ ID NO: 70542 - DNA, 1053 bp, Homo sapiens
cttctatagagttaggttaaaaatgtggttctaaccatcaacaattgcatggttaaatgaccctgaactaaaactgatgggttccctatcaaaacaaataaaaatatacctttttcaggtttcaatctgtgcagggtatatgcatgttaattctaccatgcttaagaacttccacaaaatatttcatggagaggtctgcatttagacggaaacagaaattgcttttcccctcactgttcctgaatgctctatacttgttttaacatttttgctatctttttttattattctgatcatgatatgaccatttaacctcagaattcataattcctgaggggtgttaagaagcagtcccattggtgaggatattatgacttggtgaccattcttaggagtagaaaaccaaggacaattgcttctgtattcagtatccacttcttaatgtggctttatatgtaaaaataataatgcagtggttgtttctgtcaggaaaataaatcttacagaacaactggtggaattgaagctgctgcgctagacttggatattttgggtagtgaagaagcaatggcaatcttgagtctattattgtataatttagtaaaagaaaaaaataatcgttggtggtcctactaagagaatgcagcttttttgagttgtcacagaggctgtgtgtgccctacactgaccagggtttgtaaaaccctttcattctggtacaagagtcgggggtataacttttatacttgaatctacctaccaagtttacatttctcaattcctttttgtaaggtgctatttctgtatttaaataactttcttttaacgtaaagctgctttctgcttatcttattgcactgctagttgtatgtaggtattaattttattgctgcttactgcttttgttttcttattatttagctctgctctttttcctaatggctatattatctatagctatttacttgtaactgtactacatgtaaactgattttttgttctgattttttttctaatatttttaggaaaatattaagctttataaaatagcaa

SEQ ID NO: 70543 - DNA, 1662 bp, Homo sapiens
tttcttttttcagtcaccagttccagtgacccccaagagcatccaacgcacacatcgtgagacgtttttcaagacacccggcagccttggagaccctgtcctgaagagaagagaaaggaaccagtcacgaaacaccagctcggcccagaggagactagaaatccccagcggcggcgctgactaacctgccgctttgccaggtgggggtgggatcaaacgccctgagagtcccggatgtccgaggcgggatgcaaaccatcccgtcctgagcacgggtccttcctctctctttcatccacacttctgttaacttcccaccaccatcaatcatctgatttcctgaaagtaattaattgtgcatttaataccagttagagttccgactctgcatggtgtcacagtgaaagcgccgactgacttatggttttgattcaagaatcgtcttattctggaagtagatctgaataggctaccggagccttgtttttctaaaggggggcgctgtctagcacttaactagggtaagcattcttaacatgtatttccacttgccctgagtaaatctgtggtgagagaagcttcctttctgcagtttaaaaaagctactgcttccttaggcttcatcaggaagccaccttcagttgtgaatcctatggtgttatttattttgttcctgaaatgggatttagtgcaaaaagtttacaactacagtctttaacacatttttttcagggtatgacgacttgaatgtttatacttttattctataatttgccctgcacttattttacaacctagtaataatgtggataaatgtatctacatgacacatgtcaagaccaaaataactgtgaatgacacaccttgctgtaaatgaactgtgctaaccctgactgtgggcttgagaacaaagatgaactctagaactctagcagcctaactgctgcttctcaaataactgtgtgaacagtgagatattactgtttgtttctaaaaatcctactgtgcccagtttccttcactacatgccctgcattttttatttaaatatttagctgtagcgccatcagatatggatgccttctaacaattgctgtttgtaaaataaatcaggatggtagaaagtgattatatggaaaattggaacctggatgagaccttttcgttgaattctgaagagtaatgatgtgaaaattgatacagggcaagagatgattcttttgtttttcttctacttcatgtccagaagagtaagagggaaaatggacatatgtttcatatccaagggtattcaaactgtagttagttggtacctctgaaaaatgagaatggtgagcgcacgggttggttgttctagcatgaatacaattctggaaactgttatgcaatttcccttttttaacccacattactttaggggtgcattaagtcgccaaactatactagttctttgtattcctagacttgctgatatttacctctctcttgtctcttcagagtaaatggttcccttctttccttcctactttccttcattctctcttccttccctccttcctacttcttttcttccttcctcttcctctcttaaaactatcttagatgtagaatcctggtgtagggttttattttatttttattttttgacccaataaaatgtta

SEQ ID NO: 70544 - DNA, 1035 bp, Homo sapiens
ataaatgtgggattacaatcttggccacagctgtgaaggagcagggtgtgggctgtttggcctggtcagctgggggaaggtctcatcattcattgatttattgtggactcccgtttgaaagggccatgacaaatgtgagcttgaatgatatcctcatgatgacatatattgattttcgcctgttctgcttttctttcaggattaaatggtttcaatgtacttttatctggcagtcaaaccccccctactgtgggcccgtcctcaggtcagctgccgtctttcagtgtcccttgcatggtcttaccatctccacctctgggcccttttcctgttctctattctcctgcaatgccgggcccggtttcttctactcttggtgctctcccaaacacaggacctgtgaatttcagcttgcctggccttggatcaatagcccagcttctcgtcggccccacagctgtggttaatccaaagtcgtccacactcccttctgcagaccctcagcttcagagtcagccctcactaaacctaagtccagtgatgtcaaggtcacacagtgtcgtccaacaacctgagtcccccgtttacgtgggacatccagtctcagtagtaaaattacatcaggtgaggcctgaagtttcctgaagacactgtcactctgggaaggggtatgcctgtgtttagctttcattttagccacatgactgccggacagaggcactaggtcaggctccacctggcttccgttgtagacctagagttatctgctccttttataaagcactgagacatgaggtgagagatcctgtgctttaaagacaaaaatgtatgtttttagttgtcattctgtttcttataattagagggacctgttttaggcatagttcggggggatttttgaggaatgctaaatatttttattattttggtgatcttcaagcttttatttcactaggtcaataaaagaagctaccctaaattttaattatacagctataaaaacaatcaaaggaaacagaagtcttgatagtaact

SEQ ID NO: 70545 - DNA, 1060 bp, Homo sapiens
tcattatcgtgcctgtctcatgtgctaccaccccttctgagtatttcctgtactttgtatatatttaagtgtttctcccaaagccacttaagattcaggcaaggcccatccaaccccttctcactgggtggctagaatgctacaatttcaggtgaggagctgcctgtctttagtacagttgtactgttgaccttgagcatcctgtgtgcccaggagtgcagcctggcaggaagctctggggaatctttgtcattttcacagaccagctgccttgtggagctggcgccacagtctcctgcttggagaaactcagggcatgcttttgacgtgccatgtcagaattacatttactaagcttttaattacagcccattccctcccttggtgtttttgcaatcacagtgctccctgtttgtcgccaggtgcctcttgtaagaggtgtgaagttgtggaaatggaaggacacactgaccttcccttagccttcagatactgcaggtacataaatcctgggtgattttatgacagagccactggtctcctcatcccaacctgctgctttccacctgaggtttatatggcagccgagaaaagttacctgtcacataaactaaactgtcatggtgtcacaggcagcatgaccgtaatcgtgttttatatcttcaagcaaaggtacgacgcctctatgacatagccaatgttctgaccagcttggctctgataaagaaagtgcatgtaacagaagagcgaggtcgtaaaccagccttcaagtggatcgggcctgtggacttcagctcaagtggtaaggtggcgtggttttgctagcaggctgttttatttagaattctcagttccttttccaagtctcacatctactacacagtgagactgatctttttcccatgtcacatacaaaatagactagtgactccactcttggaacagttaacattagcctacaaattgtgcatgctggtttgcccacacatggtaggaaaggaaatactgagtgtttataatatgggagtttctgtaactactaatttgcagctctttgttc

SEQ ID NO: 70546 - DNA, 1019 bp, Homo sapiens
ttttatccttctacattaatctttccaagaagttgcttcaggaaaactaccgtatggattctattataggaagtataagtgtaaagcattgagtggtttaaaatatgcatctcagagtttatgcctactgtagagtaattttacaagccacaagaaaatctgcctcatttcttcctgagctgacttctgtgatgtgtatccagtaagcttctgccaatgacaagggtgatctttccatctgctgatagggctagatcattttggcaagctgcaagtatagtctttcttgtagaaaatcatatactttgatgcttttgtttcattccttgtgtagcatctgcaaacagtagaaaagacaagtctctgagaattatgagccagaagtttgtcatgctgttcctcgtctccaaaaccaagattgtcactctggatgtggctgccaaaatactgatagaagaaagccaagatgccccagaccatagtaaatttaaaagtaagaatcttcacctccatcaacttactagcacataaagggtgggatttcatgtgttgatattttctgcttccaagattaaaaatatatatattgtttttgacatacatactcctttcctgcattcatcaaggtttttggtgctgtgagaggtaagttagtcacctactagaattcagcttagagtcctgtcagtgccttttcctcggtggtttcagtagagtgaaaaacagaacactatcctgagaactccggtcagggagggtgtgaattattttgcatttctctttagtattgctgcatccaagacagaatgtctgagttttctttccccttttttccccaccccctgcatactcttctgaagggtggagatgaaaattgtctacaggtaagaaccagaagaatggccagggtaagggtggtgggacatggacagggagagagtttccaagtatcacacccagtgcatcctccttttctgtccatcttggatactgagccaaatgccctgggctgctggtag

SEQ ID NO: 70547 - DNA, 1072 bp, Homo sapiens
agccttttactttcttggggcttgaatggagcccctttcaaatgtgggttgaggagacaggatgctagtttaatgtatttacaaataaaaggataaggaagaatatgattggactgccttcattcactttcatcaacctttggtcgattgtaaaatataaaacagtttggtgacagaatgcaggccagtgcgtctgaaacttccacgtcattagaaatcacctagaatcttatgaaaaggcagattctgatacagctgatgcctgagcttctacatctcacaagctcttggtgatgctgattccacaggcctagcgagcgcactagtagctagactgtagcaacctgtaaatgactctcatttttcatttgtcaaacttttgactaatagactcagcctcaaattataaaggagaaaaaaatcagtccagagaagacaatagataaaacattcagggaattagattaggaaatgtattttaactagaatctaggatggtatggattgagatgtccccccagtttgccaacactggccattgccatttctccattaggatgttaactgtgacatcttccccctcccttctatctgccctctgtagcttgatgttgttggggacagtgctgtggacgaatttgaaaagcaaaggccaagcagaaaacagaaaagtttaggactcctgtgccagaagtttctagctcgctatccaagttatcccttgtcaactgagaaaactaccatctccctagatgaagttgctgtcagtcttggtatgtatcatcagattacctggaggtctgtctccagttacagtgggaaactggtttccttgggcaggctgaaggcttgaagtagagtgggcccctcaatcgggtgaagacagaggaacaggcagagcttcctttgtcatcgtcaaatttgttttcattatacatggaatttcagggagccttttagacctgaggaccaaatgaaaatgcagtcttttttaaccttaaaaaatatttctataataagtaatatttttataatagagttacattacaaattagtatctcatattttaaat

SEQ ID NO: 70548 - DNA, 1043 bp, Homo sapiens
tatttgggtgtagtggtgcatgtctgtggtcccagctacttgggaggctaaggcgagaagattgcacgtgcccaggagtttgaggctatagtgaattatgatcacaccactgtactcaggctgggcaacagagtgagaccctatcttttaaaaaaaaaaaaaaagtaagaaaaataaacctcagtagcaattcagtattgccaccatatctaagcttatgattagtggtctcttcttgttgaagaagctgtgggtcagtttgagtgacaaactcaaatggcaaatcacatctggtgggagttgtgttgcacattagtcctgtgaagtaaggtcacatatcagtttgcaggagtttggaaatctaaaaaaacgagtcctttaccatgggtagtttgagatgcactgctctggagaatgacgttagagagctctctaggttggcttaaaatgtgggattttgttggatgctcttccattaactggtcctgctactaagtgctgtattagcactggtgcacattgaactacagaagcattgttgctcttcactagtcaatgcaaacttgtaagtagtgttttaaaaaaggtgacacttagaaacaatatggactcaacccacattggccctcatagtcctcatctgttataaacatgcaacagtaacagatacgttgtgatttcttttacagagataccatgaaagataggtgtaaaaggagtagcagagtataatctacttctcattggagccactcttctattcccatgactacttttcgttagtcctatcctgatacttttcagccctaaacatatggtcctatttgtattttcaagtcttagtgaatggtgggaacaaagtatactcttagctgatacctgccctttctcattcttgctaaaagtttcttttttaaaataggaaaatatatttgttgatcgatcaaggatggccccgaagactccaataaaaaatgaaccaattgatttatcgaagcaaaaaaaatttactccagaaagaaatcccattactccagttaagt

SEQ ID NO: 70549 - DNA, 1028 bp, Homo sapiens
gggaggcgggaattgggatacagggcccactcccgccccggctgccagcctgccactcctcacgtcccccggctggcgagggctcgaggtgtttctgccggggaacccggtgcgcagagggtgtgccgggtgcagctctcactccggcccggcagtagaggggatttgcccttccccacaacttggagctttcattggagaagtttatttgggggatctgcttggaggcctgggaaggggctgcgctcagcgctgagtgggtttggtctagcgatcgggtttccttcccccgattcaaaacccctcaaagccgaattcctctcagttctttgcgccaaaattaactgacctgggagaccctgtacttttctgacagatttgcccaacacccttccgacttggtaactttattttgccatctagcttttcataaggagttactatttttgtagatttttttcttcccagattttcagtattactaagcacactttaggtgtttgagtttgttcgcgtgagttttagaaagttgagggtggctacaactcctggaaatgcccaggatgtgcttagagaagggggaatttcatattgacaaacaagtaacacatatgtagatatttttgtttgaggaaaaaatacctaattgcaaaatcattttctagtgtaattgtgcattacagatggaggtaaattgtttaacactaaaagacctgatcagccccaggcagcccagactagattttgcagttgaagatggggaaaatgcacaaaaggtaagcaaacataaacaccttagtttctaatatgttaaggatggtgatgttgaattcaattaagtgttccaacatgccatttgtatttgtatttaagcataataattaatattgataaacattatagaaacattcttttttaaaaatagagccatccaaaccattattgttggaattctactctcagatatagtgggaaaaataggcaaggttacatgtaatgttgtaaccaatttatataagtcaaaaata

SEQ ID NO: 70550 - DNA, 1003 bp, Homo sapiens
ataaagaaagaaaggttattgaacatgtgagatattaataattctcatggtttaaaatgttgactaatacaatgatacattgtagttgatattttagctaattacccttagatttaaacacttttggattttgaaaaccttaaatattcttcaaggatgttttgtaaaatgcctcagtcacaatgatcatcatgatatataattaataaagacactggtccatttcccaaaggggctaaacacagttttccaataacaaatcacattatagcagtttacactgacacagactgccccaaacttatgtatatttgagttttattaagtacattcagtacagtttgcatctgggcctctgttttatttgattaaaagaaaaaagttcaaattttatggctaaagagagcagacatatccatttgaatattccactgtcacctcaaaaataatatttttttcttttcaagcagtgcttttatttcttacaatctgtacaataaggtgacttgccttgaaagcatttcactttttctatccaaaaaagttataaaaatttgcaaagttaacttttataaattgatagtgttgtctctgactcacatcatcatattagagatgaatttccatagtgggagggaaagaaccttagatccaacatacccacaatagtattttagatcaagaaacaacagggtggggaacatcacacactggggcctgtcgtggggtgacgggagcggggaaggatagcattagtagatatacctaatgtaaatgacgagttaatgggtgcagcacaccaacaaggcacttgtatacatatgtaacaaacctgcacgttgtgcacatgtaccctagaacttgaagtataataaaataataataataataataatgtatcttaaactagactgttcaggatgctctcctcccttctacttttatcatcttcctcctcgctcctttttcttccaagcttcacagtttctgtccattgtaacca

SEQ ID NO: 70551 - DNA, 1020 bp, Homo sapiens
atgtggttacttgcccagcaactcaaaactagtaagttgtatagtcaggacgagaacccaggtaatctccagagcccattcccataaccagtacagagtaccctttccatgtgaagtggaatgtgaaaatctcctctgcttcttgcacacgattgtggttgaatgtaaggagcaccccttttaattgcattacagtatatcatccaaaccagcagagtccaatttctatacaaatttcagatgtgaaagaaatattctatatttatgctgtccaatatggtggttagtagccacatttgccttttgagcacttggtatgtggctagtgtgactgaggatccaactttattattttgataattttaatttaaataagcacacatggctgttgcacatgccagcacttattgggcaatgcagtttaagttctatatcaaagctcttcagtgttttctttattggcatgtgttacagctcctatttatatgtgagacactctcccatagctgtaggctgacaagacagagaaagtagtgactaaaagtttagatgctgaagagacaagtttacatcttggctgtggagcttagtatgttactctgagtttagagctgacttacccttaaattgggatgattattgaactacattatagaactatttaaaaaaaatttattttgacataatttcagatttcagacgttcagaatagagacaagaattgtacaaagaataactgcatgaacttcactgagaatctccaaaggtttctgaactctctctccaccccccctttctttctctctctctctctctctgtgtgtgtgtatatgtgtgtgtgtacactttattgttttcatgaacaatgtgagagagtaagttgctggcttactccttttcttttaggtgcatattttctaaaaataaaggcatgatctctcatcaggaaattaacattcactagtcttaatactattatctaatctacagacttaattcagatttcataggtttcccaat

SEQ ID NO: 70552 - DNA, 1019 bp, Homo sapiens
aaaccatccactcataaagtaaattttaagagttacctctatatgaaagaaatcgttatttgtgttagttataacattccttatacctggccacccaaaacaagaaaataatcaagttttcaattttcaatttttttatcataactctggatataaatataactaaaatgttttcagtaataactccatgcacaatgatcaaacaaatgctgtacttgttgtgggctggcatcaacaattatgaaagtggcttggtaaggccaggccagacctttgtaaccagttataccaggctactgttagacagccccagatagcccatccctctgcctcagggcttatggaaacagtggatgttggtaactgaacacttactccctgctgcatgcttcccatgtcatttcattcctgtgaagtgcattttcatatctatatttcataaatgaggagacagattctgaaaggcaaaccaacttgctcaaaataactagcttatatattttgagccagatgcagactaaagtctgtgtaatgctaaaacctgtgctcctagacattatgcaaactgtttcatgggcttacactgaaataatatctgatgaatttctctttgcataagagagtgagctccacaagtgtggtaggcagagcatcctcctatctcagaacctgacacagcgaaggtgctcaatgctggttgaaccaaagtgacaacttgtttatccagctctatcatagcagtaactttactaaaagttctctgttcccttactttttttcagaaaagttatccacgtccccaaacaaaacctacgtccctgtaacaaaaagcttttattttcaagagctgtatctttagccatttttttaattgtggtaaaatatatataacatcaaatttaccattttaaccatttgaaagtatacagctcagtggtattaagtacattcacactgttgtttgatcatcagcatcagccaccctcagaattttttcatcttcccaaagtgaaactccg

SEQ ID NO: 70553 - DNA, 1061 bp, Homo sapiens
caaagtgctggaattacaggcatgaaccactgcgcccagccctgacttgagttttttaaaagattattcttgctacagtggaaaaaaaaaaaaaagcaggggtagcaggctatagagaggcaagggtagaagagaaagcaggttgttgcaataatccggatgagagatttataagagaattattctataaggacactgaaaaactaaatgaagcatacaaggaatcagcttcttattcctcattaattagcaacttgttaatttgtctgtccacttttaagaagttcaagttgatctaagacacacacttagcacagttgtcagtaattaccattcttagcaggaagacttgtaagccagtagagatgaagatggtccaatacatcgaacactagaatgggaaacacaaaatctcagttcttgtccttgctctgctgctgagttaatggactgatacacaaactccgggtacttttgatataactttgaggtcataactaccaggcataaaccaaatacatatattatgggtgcaaactttcacttaaggaatattttatcaaaatgtttacataggagaaatgtgttctagagaagcagagaaagcaatgaacaacataaatcaaattcatatcttggcttttaacaccatcttcctctctggaagaataaacaacatgagacacatggcaaggctgataagtataggattgaaatgctccccatatacgagcctaactcatttacccatttccttttggtctttgcccaatgttagcacctccccaaccacactatttaaaattgcaatccattcatctcaccccatctttgccagtatttcctgtcccccatccttgctttatttcccaccatattacttagcaatatctgaaatatcatgtattttattattttgttttaaattgctctagcttcttccaaaataatgtaagctctctgaaggcaatatgttgggtctgtttatgctcatgcctagcacatatgaggcactaaatacatatttgatgaatgagtggattaatgacaaccaatttaac

SEQ ID NO: 70554 - DNA, 1046 bp, Homo sapiens
tctgacttccagaatatgatacctcccagtaagaaaaagctcttatttcttgttcttactcactctttattaataaatacaattccggtatgtaaacatattcctccgtattcctaataagggctttcctggaacactcacgttgaatcaccctcagatatgtcaatttccttgagtccagcaagaacagaccacttaaaatatttcaaatttgagggtaattaccgtgcacaactttggtatatctctgcagtgtttttatatctgtggaaatgtatttataatttatactgcagcaacaataaaaatctgtgaacaaaatggtgaagtcagtgattttaggatgatccaattctggtcattttgttataataacccagaactagaagaatcttcatatgataaaatggatgatctatgaattgtattttaggtggggggaactcaacttcaacttgtgtgttaaggggaattttttgtttgttggtttgtttaagaattaagaagtagccacctaccctggcttccacaaagctggacaccaaagggcaaattatgttatcagcatttcgttttttctttttccatctttggcttggctttcttcaggttttaacatctctcttaggcaggtgtcctctacatgttggttatctggcagctcaaggtttccattcaactagtggagcagctcagcataaagtgacttttcactttatgctgagtgcctaccatgtgacagcattgtactcaatgtggaaatacatcagtaaagaagactgcaaaatttctacccttctgttgccttttctagttctagcatttgtcacaatagtctcaagtctgagtactactaatactgacttgggtcatgtactcagctatagactaatcattttgccctggaggaatgaaatctcctgactcaccagacctgagacttatatccacccttaaagaagggaagaatcactaatactctaattaccctgattaacaatgaggaagcattatttttccagagaggaatttgagtgcttttacca

SEQ ID NO: 70555 - DNA, 1065 bp, Homo sapiens
atacaacctttaaggggtaattcaaggccccagatgagccagtgttggtttaaagtagcagctaggcagcactgcagcagtattagagactgcagcaatgatattcaccagcactgccatgcaccaccttctgtgggccagcctgagtatacataacaaagtttgttttccttttgactacaagatttttctagctttttaacttagtcatagaccactttatccagctaactgacaataacaattttaggggagttatgaatcttggtgtatgttttcacctaagacaccagtggcacattctattaatagctttatttcctttatttagtatattcatatacaacacattttcctgaattaaaaaacaacaacaacaacaacaacaatgggtaattgtataaccacagttggttgatgctcccttcagttggtaactctggcctaatacactgatttgttctaaatcctatgataaactgcatatacaaaaccagtttagtatataatgtggctctgataccatcttgaattataaattatagcatgctaccaccagtaagtttggtatcataattttaattttaattgtggctgacaattttggggggaataaacacgcataactagggcaatcagatttgaaaaaaatcaatgaatatacataaagcttgattgagcatccacaaatacatagaaaataaattatgcaaacaatcctaagaatgcatttccagtaactgattatacaatccttatctatgtagagtttggaaaaaaaaatctttttttgatagtagttttttccatatggaaatccagtggtcctgcccagaagcagtggctcatgcctgtaatcccgacactttgggaggccgaggctggcagatcacttgagggcaggagttcaagaccagcctggccaacatggtgaaaccctgtctctaccaaaaacacaagaattagctgggcatggtggtgggtgcctgtaatcccaactactagagaggctgaggcaggagaatcacttgaatctaggaggcggaggttgcagtgagctgagat

SEQ ID NO: 70556 - DNA, 1037 bp, Homo sapiens
accaggaatgaaatgtaacctcttttaaagatgaagaaaaactgaaaaaatgagattaagaaaatatgtgggtagtttacagctgctgatagaattgtgtgcacgcgtgcatgcatgcataaacacaaagtgaatctagaagggaaaaaattgagtttgatgaagtctaagatgaaaggttccatttcatgtaagattatgtgaccttggaaaaatttactggcttgctagtggaatacgtccttatatagggacttgaagagtttatctaaatagactgacttaaggatgcttttcctcttgttagacttgtatgacattactgagaagatttagagttctagaagtagagaagactgattagcttgtgcctgtgtatgaagaatgacaaattaagacaaaaggttatgtaaaccatttactaaaaaagtctaaatttttatattcctaggcccctacttatcttttacaaactttgaaggacctgaaattctttggacaccatcagatttagtttataagagttctgattttgaatcaagaaattattcatgtagttttaaaacacaattaaaattttcagtcaggctgaacttttgtgcacttcctcatttattcgagaaaccccaccactaatgtatttagaccttaatatgatggctttgagtcttaaatcattgtccacctaaaataatataccaaataaagatttttaaagtgctgcatatggtttctgtaagaggtacataattagattaccagcattatcctttagcttcaaaagtaaaactcatagtcaggattttactgatagtacaggaagaaaaaaaataaccactgttgaaaaataaatgaaaaaaattttattgagtattactttatacatgcaaattgaaagtgaatctatattaagttgactattccacaataaaaacctatgaaatgggaatgatcaaagctgtctaacacaatactaatgtgttcaataaattatccagatgtttttccacaaatatttggattacctgaattagctg

SEQ ID NO: 70557 - DNA, 1037 bp, Homo sapiens
ttacattaagccgaaaacataatactaatagacaactaacagtttgcttatcaggcacatcaactaaggcacctccccccatgctaagtttctcctggatatatggaagttgattgtttcccagtttaaaaacttgaactaatatctcctaagaaaatctgagtccatattgtttttattttacttagctagaatctcatagcatgttaaagtcatatccttatccccactaaaaataactatgtctatgtgagaggaatatagtatgtgggagctgtattaaatactattacaggtgttacagaatctttaaataaatggacatggaccaactttccatctagtagtgtacgatctatatagtgcatgtcagtagcacaaaatgcagtcttagcattagcctgtctaatctgaatagtttactcaaaagtacttctttgtgttaagtattcagccactgtttttagatctagttaataggttctatttaatttgctacaacatttactgaatggtggagtgaaaaaactgatgcatactgggaaatatctaccattttttaaagataatgttaattaggaaaagaacacttttaaggaatttatagcagtgatgaaatgaattcagttatatcagatacaccaaactgttgatggtatttaaatgtgacttcaagttagtatttctgtatatattattgattactggtttgtttttagatatgtaagtctgttctaatctacagttcacatatcgacagttactctggtaataatagaatgttagtgatgatcacttggtggatgttgattaagtgcctgtgttttgtttcctcctctggataccaaataggtgtatgctacttttttggtgaacttatttcttggaagatttggctatgctattcagggtttttattcttatgtttttcttctaaatttaagtagcatcctgctgctaccatattaaagctaaaatttaacttttgctgaagaatcagctaattcaggtaatccaaatatttgtggaaaaacatc

SEQ ID NO: 70558 - DNA, 1065 bp, Homo sapiens
tacacctttaaagatcagacagtggtaggagtgcatctagaacttgtacctgcaccttttgatgactaatttgacacaaggttgcaacctagggctcaataccatatatggcttgcatgggtagtttttttttttgcctcagttttagggaggggaagtggagtttgtttagctaaaaaactaacttatttatgatgattgaaaattggaagattcacaattttaaaattctgactttcggcttcctttgaaaaactgaaagatctgtaagagttggcctatacacttgttgtaagaacgaagagtcaagtaatggatgctcttttttggtggggcatattacatctaaagttgttttcagagcttgccctcatttcaaaattaattggttgtatgaattatttttaatgtgtattaagtgttttcatctctcctcaaatatttttaagtatttttaaagtgtcttttttttttcttaaggacctagatgacatagaagatgaaaatgaacagctaaagcaggaaaataaaactcttttgaaagttgtgggtcagctgaccaggtagaggattcaagactcaatgtggaaaaaatattttaaactactgattgaatgttaatggtcaatgctagcacaatattcctatgctgcaatacattaaaataactaagcaagtatatttatttctagcaaacagatgtttgttttcaaaatacttctttttcattattggttttaaaaaagcattatccttttatctcacaaataagtaatatctttcagttattaaatgatagataatgcctttttggttttgtgtggtattcaactaatacatggtttaaagtcacagccgtttgaatatattttatcttggtagtacattttctcccttaggaatatacatagtctttgtttacatgagttcaaatacttttgggatgttaccttcacatgtcctattactgatgtgtgcaaccttttatgtgttgatgactcactcataaaggtttttgtctactgtcatttgttctttccacttattctaagcatttagagtaat

SEQ ID NO: 70559 - DNA, 1050 bp, Homo sapiens
gggcaacatggcaaagccccatctgtactaaaaatatgaaaattacccaggcatggtggcatgcacctgtaattccagctacttgggaggctgaggcaggagaatcgcttgaacccaggaggtggaggttgcagtgagccaaggtgccattgcactccagcctgggtgacaagagtgaaacactgccatacatacatacacacacacacacacacacacacacacgaggttaaatcattgagtctattacattagttttgttaaagacttgtataaacatagctttactcaggagcatcctaatatctcctgtgcattctctgattccttttgtggtgggatctttgttccttcaccaaatgtcttaagggattcattggaaatcttcatgtatgtaagatattttaccaaattggggagatatatgccacttaggaagattataaataaacaattacttcctaattactggtttttaattgtatctaccaggaagtagtaagagaaagacaagaaaacctaagacttgtgagactgatgcaagataaagaggaaatgattggaaaactcaaagaagaaattgatttattaaatagagtaagtatttcaccatatttcaggtttggaggggttttttttggcaattggatgaaaatatataaatatgaagaaattattaattgcattattcactttgttcttttgttagtgaaataataattagtaagaggtatcattttcttccaaaaactgatttcctttgggcagttatcagtttagctcacttaattttattcttttggagatagactgatttatggatttgttctctgttttgttaaaatctgagggtgacaggcgctttgtcactaccatatgtaagggcactggcacagagttgcctcaagaaatatctaaaattggccaggcgctgtggctcacacctgtaatctcagcactttgggaggccgaggagggcggatcacgtgaagtcaggagttcgagaccagcctggccaacatggtaaaaccccgactctactaaaaatat

SEQ ID NO: 70560 - DNA, 1141 bp, Homo sapiens
gtaggtgggaattgaacaatgagaacacttggacacagggtgaggaacatcacactctgggacctgtcgtggggttgggggagaggggagggatagcgttaggagatacacctaatgtaaatgacgagttaacgggtgcagcacaccaacatggcacatgtatacatgtgtaacaaacctgcacattgtgcacatgtaccctacaacttaaagtataataataataaaaaataataaaaaacactccatctcagacagatgctttcttccatgtcctccattgtagaccttgtctttatcaagcttggtacccctttcagtatgttcctcctatctccaaatattccagtgcaccttcttggtttgcacaatggcttcagtgttttcttctctctgcacaactttttttttttgtccaattcctattgtcttcactgccatactgttatactttgctgtgatcagttccttagtgtctctacaaagaggtgtgtggttttttttgtttttgtttttgtttgtttatttgtttttgtctggagggggtgtgagttctcatgcagaaacctttagggcagtgtattggttaggaatgtattcagttgcaaggaacggataacccagcccatgatgtgtataatggatagagatttgtttctattttgtttttcttatgtagaaagtgtagagttagataatttctagtgttgcttctgttttttagcagccttctcttgtaagcttttccaatatgctgttacatgtgtaattctctttttttatatatctgcaattccaaattgtagccattctttaaattacaagattttttatagtcttttctaactctccaggtaaaaatactcttcctttatatgctcatagaatataaagctagaaactgggcctttatcactaagttatctatctatctatatatatgtattatctttcctactagattataaattccatttctttaatgcatcctttgttaccttctgcagaatgccttgtttaaggtagacgtagtttacttattgaatgaatgataaagaatgaataaacctttcctttaagaaaaccctgtcactgatgtttggagtttagggaaaagatttgttggcagtggtgtggatat

SEQ ID NO: 70561 - DNA, 1051 bp, Homo sapiens
gtatggcagatacaggaattctcttatttctcatgatttccgccaacttcttcctccagatgtatttatcccagttagaaaagattgcttaagaatttctaggatgcttgttatcaaaagaactgcactggttgctagcagaattttggagagaagttgtgattcatcaagtaatcctatactaaaagctgcctggaacgttagatacatactgtatccacagggatactatgtgtgatgaataggttcccagttcagtggatagcagtgttgccatgggaaagagcattcagaattttaacttcaggtatcacagttcaccttccagttcatctccaagatgatttgtctcatcttggtaactcattcattgttttatgaaacatttaccgagtgttttgtttcttcctttcttttttcttttaatatactggtaagggagtctagttgagggggcaggaggagggaaagttagtgttgtggggctgggtctcagaaaatgaaaacaaagacaaataaaatagcatcccagtgctctgggagtgcgtggctacctgcctcaacttttgctttctgttaatattaatctatgataatttaagaattccaactttaagctaatgatgttggagcctaggtgagggatttttgagtccatatgctggagaataagtgatgattgctttcacacagtagaagactagagatgagaccattctttattcttttccagatctcatacttttgcttctcctactgttcattaaatgattgacctctcctcccccttttaaagcaactccttgatttaaaatgccttttatgctattttattctttctgttctaggacctctatcaggtatttttgttattgtagttttatacattttaacattaactagagtgtttggtcatacctcttttttaaaaaagtaatttttttgatatcttatgtattttttcttccagatgatgcaccactactttccaaataaatttcttcatgattttgattggaattttaatttatgtgttaagagactgttgaca

SEQ ID NO: 70562 - DNA, 1053 bp, Homo sapiens
gtggcatcttagattgaatgaaatacattttttacattatatcccacctctccaggtccccttgtagcatctcaaatatttgtgattcttcaaaacaatcaggaaaggagttattatgtagctttctgtagtaaatcatatgacttttttttttttttttttttttttttttttgagacggagtctcgctcggttgccaggctggagtacagtggtgcgatctcggctcactgcaacctccaactccctggtccacgtgattctcctgcctcagcctcccaagaagctgggattacaggaacatgccactacgcccagctaagttttgtatttttagtagagacagggtttcaccatgttggccaggatggtctcgatctcctgatctcgtgatccgcccacctcggcctcccatagtgctgggattacaggcgtgagccaccgcgcctggccaatcatatgactttcttaatcctgttaatattctataaaatatctgctgtattggagagcttgttttatataagtaaaaatagagaataagctaattgtcataaaacagtaaatgtggtctcatagttaagagaataggctcttcggacagaatgtcttgagttcatatcacagctccatcacttgttagctgtgtaactttaagcaaatgtttaactgctttcaaatccataaagtagggataaaaatagtacctatctcatagggttgtgaaggttagaagagttttgctctgaaaagctcttagaacaatggctgtcacgtaggtgctatgtaattgttagctgctattgttattgttcctttgagttaatgaatagtgttttttcttaaacatttaaaaaaaataccaattgcctttctgtataagcaacaaaacctgagaattcaaggtaaaaatagaatttaatcttatctaatgaaagttaaaatgaacctaacatttaatgatgagtgtgttgtatggtaattagataaaattaggattaaatttttagtcctctgttcattttctttagtatgtaaccaccgccaatgtaa

SEQ ID NO: 70563 - DNA, 1027 bp, Homo sapiens
tacagattacctaaaattactttgtttccctcagaaatttaaagtttgtctgaggtgtctgagttcactgcactttgatgtgttgtttggaaactatcttagggttaggacatgtaaatgcaaacctgtttagaatctaagggaattttaaagcctagtttcagtttagacttcaggtaaagttgtattttctttaccttggatttttagttttactttatgtgaaaatgtttttgctaacaaaataaaaaagcaggaagctttctatctttgctcacagatttttttaaaaaagaatcattgacgaaagtttttgtttatttaaaactttctgaagcacagcactctttaccaattatttgataaagggaataggaaaacaactgaggtagagagaaatggaatgtttaccttctagtgtcctatttaaatcttccacttaggtgactggctcaacagtaacgtgttttgaacactgaagagaggtatgtaaatgaatacttcatggttgtaattgttaggcatataatttgatgcaaactatgtaatgagagaggcatatgattatcattctttaaaagacgctgcacaagagcatttttcagtaaatgtcaaagttgagacaaaattaacttgttttatgtagacattttgttttctgtctttcttataaaagtcttgttctgtcctcctgaaatgagatcaagaactttgggtccttttaaaataaagcaaaacccaatgatacgggattttggcaatttaaacaaatctaaaatttcaattacaaagaagagaaaccacataataagcacatttgtactgaaggaatattttcccttctaaacaactgatgtatgttaatgtttgatttgacacatctgaatcaatagtgttattgtcttaccatttgcttcatacgaacttgtgcaaatttatagagcagcatgacacatagcagaccaaaatccatgtttgttcacctagtaattatttagtccaatgtcagtgaaatattttttatttt

SEQ ID NO: 70564 - DNA, 1057 bp, Homo sapiens
ctgtctcaaaaaaacaaacaaacaaataaaaaaacaaacacaaaaacagaatttcttacagttggaatattaatttatttttttaactcaaagtagaaatgtgatttcaaatactttgttgttgtaggcagataaagctatgaccataaatacgtagaaaactatatttttaattgaattgaagttctatattattttattactttactggtgatggagaacataaatgtgaattcatgatacaacattttaaattcagaaaagaactctttgtcaaatactaaatccaattctttgcttataagccaggtttcactccctcacaaattaatttaaatcctcccaggaatgcacagtgtccctgccaaaggttttcacatggtgattgatgaaaagatttgctgaagaatatgcattctttttaaatacattttaggagcagtttaatatagaggttggaaaatgaaataaattcatgatgctccatattttgatcatgttttgtgattgaactttttccaaagaacttttgaaaaagacacattcccttcagaattacaaatctgaagcttcttcacaataaagctttaaaagtgacttgtattgaaagcttttctttaatctgctcacatccgcacatctcaggttgtggtctgtattgcagggtatatttagccaatgagtatctttgtattacttagtaaattaaatattttaattccactaatgctgttgaaaggtttttagggtcagttgtaaacttaattgctttcagcttttctttccttttttattaatgtggtaacatatacgtatataatataaaacttagcatcgaaccattttaagtgtagagttcagtggcattaagtatatttacattgttttgtaaccatcaccattatccatctccagaagtttttcatctttccaaactgaaactacgtatctagtaaacaataactcctaatttcccacccccctctggccaaccaccattctactttgtctatattaatttgactactctaggtactttgtagaagggagatcatac

SEQ ID NO: 70565 - DNA, 1436 bp, Homo sapiens
aaaagaagacatcctgtttctcctatctgcttcatcctttagtttgttgtaatattacatatcatgtaaccgttggaaactttgtgtacactcatgggagaatgaggagagaaaaggcaagtaagattttagcattctaaaaatagtttgaccttgcggatcctctgaaatggtcttggggactcacaggggtgcttggactatgatctattttattattggttgcaaaatggtggtattctaattcattcctttgtaatttattacctggaatattttatatagagaaatttcctttcatcagctgttttagttaccttgagatacaatttgtacaaataagatagcctagatgcttgattcttttcctttaaggagacagaagctttattgcattcattttactatgtgagaaagagatgagaagactacttttaagccccctttgtactaattgaaaccgcctccacttaacaagtgaaggaaggactccactaatacagttggcttcttaaattattaagatgcagtttgtatcttagaggttgcttattttagtactatatcaactaacactatataatctctttaagaaacttgcttgaggagtctaaaaaggattggaagctttcaagttatctgatgatactttcacctatttccttgtgaaaatgcaaagttaacaagataatgtctgcgattagcttaaaatgcttatttattgtgagatatattactattaactccatggaagagaaaaatcaggctctgttacgggatattgagttttgctgcagtttgattttataaaactcaactaatttgcttccagaattgcttcaaaaacttgagcgctcttgaggcaagacagggagttgtaagctgtcataaatgatacaacccagagactaagacttggaatggaatgaagtctggagagaggagatgtatatcagagtagtgtaagtaataggttaattaggcataatgaaatttcagttcttgttcttaaacacaaatgaaaggggaagttcatcttaattccttacttgtatatacttgagatgaaatgtgaagtcagttttcctctatgtaacaatttttattttaattgacttacggaatttttatgatacaatagaaatacgttgagacaagtttattgagccaactatctatacatcttaaaatatttggcagtttaaatagtcatttaatgtgggttagatgtgggaaggatgtgagttgaaggatggaaggaagctggaccaaatagcataatctgtcagcaaaataaatcttttctagttagacttaatctcttgttgtttttggacctgatgaaaattgttttagagattggaacttaatagaatagttatggtttgaagatatctgttttagttatgtatttgtagactataagaaaagtaaat

SEQ ID NO: 70566 - DNA, 1167 bp, Homo sapiens
gagaaaccctgtctctactaaaaatacaaaattagccaggcgtggtggcacatgcctgtaatcccaggtactcaagaggctgaggcaagagaatcacttgaacccgggggacagaggttgtggtgagccgagatcgtgcctttgcactccagcctgggcaacaagagcaaaactccgtctcaaaaaaaaaaaaaacaaggaaaaatcaaatgaacaaaaggaaataagatagtattatcaaccctatgtgtgaacatgttaactagcttcagttatttttaatttatggctcatcttactttattgatttcctccaatttttattgttttgaggcaatactggatatcatttcatttgtagatagtatgaatttattaaagataaggactcttatttttaaaagattactccattccactattacatgtaaataataattcattaatatcaaatgtccaatcagtgcccaaaaattttcatgggtatctcatatatgtcttttatattttgtccaaataagatctatacattatagttgcttgcaatgtctcttaacttgtaatctttacattcttcctgtattattttttcacagtttatctgttgaataaagcttgttgtttctcacagtctagattttgctgaatgcatcccccgtggtcttgtttaatgtaatcttgtaaactatttcctataatttggtaaatttagatttaaactagaggtttgatcagatccattcattattattattattattttgacaaggatacattatatgtggtattttgtacttccatccgaaggagtaaaagtctagtcagttctttttctatgtcagcaatcactggtaaattgcctagatcagctgtcaactcaaaatattaatatctgagacaggtgtcagtcaatttagaaaatttattttgccaaggttaaggatgcacctgtgacacagcctctggaggtcctgacaacatgtgcccaaggtggtcggggcacagtttggttttgtacatctagggagacatatgagacatcatgtaagatgtacttggttccatccagaaaggcaggacaacttgaagaggggaaggggcttctaggtcagaggcaggtttgccctaagcagttcccagcttcacttttcccttcagcttagtgat

SEQ ID NO: 70567 - DNA, 1010 bp, Homo sapiens
tcatttgatttttttctttttttaaagaacacttgagaattactcaactaagtttagattatctagatgtttgttagagttgctttcgttggaggacttgaaaatgaagtatgtataatttaagatggttattagaagaggagtttttttaaatatatttcttagttatttaaggtctgcagatacgaaaatcatatgtcccaaaccaataatcaagatataagataatatggcaagttgaaaagatagaacagtgtatcttgaaatttgcatagtcctgagaatagacatggccctactctgtaatatggcttattccctccatgcagggaaagttctgaggcctctctaattcttaaatctattttgcaaattactttttaagttctattaacatcattgtacaagaaaccctcaatttaatattgttggtcttatatccctaatctttacataatctgcactgtgtggggaatcttctgcatagctcatgccagtaacttttagggctattttttaaatatcaccaagactgaagtcattcaagccaaaatgtgaagactaaaatctttgatgtatctgaacagaaaaagataagtgaaattatttaaaaatgtacttcattcttcctttccctagctttgtttgttttgaactgttttcttcataacagcacacagttggaagtgcatgtgtgtaaatatgtttgtatttgattgggatgagagtatttccttccaataggaataccccaacttgttgtctggattcctctccttatatttgtattctctatacaggggtccccagctcctgggccgtagacccgtactggtccatgacttgttaggaaccaggccacacagcaggaggtgagcagtgggcaagcgagcaaagcttcacctgtatttacagccattccccatcgcttgcattactgcctgggctctgcctcctgacagatgagcggcacccttagattctcataggaacacgaaccctcttttgaa

SEQ ID NO: 70568 - DNA, 1224 bp, Homo sapiens
cagctactcgggaggctgagggaggagaatagcgtgaacctgggaggcggagcttgcagtgagccaagatcacaccactgcactccagcctgggagacagagcaagactccgtctcaaaaaaagaaatatgattaatttgactcacttaataatggttgtggtaattgagaaatttgacatctaacttgatatttgataatattaagtaatcatttttcattattttcgttgtggtagtggtttagtgtgtgctgtagaagaattgttttagagatatatattggtatatttagagaagaaatgcctgggatttgcttccaaataatataggacagatagtggtgggaaagtaatagaaatataaatgaaatttgtacttgttgaaattgcagtaatgaacaaattaggattattttattttctctactgctgtacatgtttgaaatacagaaaaaaattagaatcttttttttttttttggtgatacattcaagttaataaaactgattctcgttgaggggtatggatgtgatctaatacacacaataaacttgatgataagtaccttggagaggataaaacagggagataggctatagagagtagaggctgcaaagtggtggtagcactttagggctggcaaggaaagcctctatatggagcaaggtatttagttgagatccaaactttggaaggagccagttaggtaaaaatcaggggaaggagctggggtaaaaatgttctaggtaggagaatcggaagagattgtggggagaaagaaaacaaaacaaaagttctaggtggagggaacagacattacagaggttttgaggcaggaaacttcaagtattcaacttaaagcaaaagttgggtaggtgagaagagataaagaccaggtcatggtagagtttggagtttaagtgcagttgggagctgcttgttggttgaagcagaggaagtacttgatctaatttttgtttcagaaagatcagtttaggttgtaggtaaagaatgggctctgtgtacgggaaggagagggcagaccactacagcaatacaggagagagtgaccaggtgggaggtaggggccatggagagacgggattgcgtatggaatatgttttagaggtagagctgacagcactttctgtgagaagcagagcaatcaaaatgataattaggttttcctttagagcaattgggtggatgctgatgccattaac

SEQ ID NO: 70569 - DNA, 1090 bp, Homo sapiens
agggggccatgggccgggcacagtggctttcacctgttatctcagcagattgggagacttaggcaggaggattgcttgagcccaggaattttaggctgccgttagctatgataatgccactgcacttcagcctgggtgacagagtgagaccttgtctctaaccaccatcctgtgcctcccacccccgccaaaaaaaaaaaaaaaataccctaaagggagccattaattaaggaagtcaataaaggctttacataacatgaggtggtattatgctttaggtctcagttggtaagaaagattctccaagtgaagaggggaacagggtaacatttcaggtagagcaaatagcacgtgcaaaggcacagaactgggaagtaatagaaataataactttatattgcatgcctgctgtatgtccagaactgcacagaaggctttccatgggttacatctaatcttcacattaactcatgaggtaggtttttatttttatcattttacaagatgaggaagttgagcctcaaagaagttatgacttgcccaaaggccatcctggcagaacttggctttgactccagatctgtttgggtgccagtgcccacacattggttatcattgttggaaataagcaggatatgttctaacagaggaaatggtgatgttcagaaaattcatgatggggagtgaatggagaacagttaaagaggattgatatggaccaattgtgttggattttaatgccatgccaaagaattcagactttattctgctgttcagtattgttgactgggtacttccttcctctgtccatatctgtttatgcaacaactctcacaggttttggaaagaaaacagttttgtctgcctaatttgaaatcattaaaaggattgtcttgttcggaggcagatattcaagagtagtaaacaacacaaaatactgtgaaaataacatatagtagaataaatcaaaatttccatatgcattaaaaagaaactagaggataggatctaaacaaagttgtaccaagtgatttcttttgatgacaaaaataattatataatgaataaatttgagtgtttgggggtagag

SEQ ID NO: 70570 - DNA, 2402 bp, Homo sapiens
tcccgggttcaagcaattctcctgcgtcagtctcccaagtagctgggactgcaggtgtgcaccaccatgcctggctaatttttgtatttttagtagagatggtgtttcgccatgttggccaggctgctctcaaacttccagcctcaagtgatctacccgcctcagcctcccaaagtgcttggattacaggtgggagctaccgtaccaagcctatctatgctatttattatttctgcattttttttttagcacctatgatgtgtgccagaaaataattatgccatttaatagcaaggttgatataatgttttataagtataaaattattggcaaatattagggtttgacattttctctgtgctttttttccttttttaaaaattgagatataattcacatacaataaaatttacccttttaaagtgtacagttcagtggttttttagtattcacacggtgtgctcttaagtgcttttatattttcatctttatttttcattatgttcttagaacctctggtccctaaattttagctttcctttcagtaaagtgatatggtattcaaattatgagaagccattaacttaaaataatttaatatcagcctttcccactttacagagaaaatgaaattatggtaggatctcctcaattttaagtttcttaaaacttgggcacctactaccatttgtttgcagtggagtttagtataataggtatttattaggtttgtgcaaaagtaatcacagtttttgccattgaaagtaatggcaccagcctaatagttggattacttttgcaaaaacctaacaatttaactgagtgtaatactttcaccttaataaaacttttacatatctttcatggagatctgcaaagctctgtcatctaaacatttgggaacattgattcagagttaaaaaaaaaaaaaaaaggagtttccactgcttaccactttagttacagtactagaatcagtgtcctaaaagatgtttctggggggaccatctctaccagtatcacttttgccatttatttaaaatcagatttctggaatccaccccagtctgggttagggatgttatctgagagtctgcattttaacttgagtgattttggtacacactaaagtttgggaagaactaacttaaataccctgtactagtttactgatccgtcaaatgaaatgaatgctggttatctaacaggattgttacatgaattaaataaaatgatgtttgtgaaaatgttataaaaatgcccaaatcagaaattgtagttactgtataggttaatttcctatgaggttgttaaacattttcatttttttcttccaatttaaaactgtgcatattttaacagacaggttgagctacttggaaattcaaagtactttaaacatttatgtaatgtcacatacttagtgcaaaatgctctgtctgctttgcctcttttccagaatttagacaagtctagactacagaaacacctcaaatagttaatgcgtaattagaactttactttcactcatttttaatttttacatatctttaagtgaaagcatatacttgtgtttataaatgtatttgataattagcaactcaaacttttaaagcattgtgtttgccatcttatcaaactactatcaagtgcaaacatttttcccattgattacaaatcttacatgttagacctataggcatccttgactggcaattgattttgaacatatttggttaactgctgagtcaactttctgtttagatcttaggcaaatgtgttatagccatatacctacatgtatagaattgagcctcagccacctgttacattctccttaggctatgtaaaaatacacagggcaccatggctgaacgacattgtaggaatatttaaattctaaaagcagcaaaatcacacacttcaaaggtaaaaagagctccagcaagttcaaatcttagcatgtcagttgactagtaaaatgtttattctgtgatagtttttggagattttgtccagcaaaattttgtgggtcacagtgtatttttcaatgatagtctcatttattttaagtagttgaagaaatagggcagttgtattctgaaaattaatattttgttaggttttgctgaagtgaacagataggagagaatttatattgtggattacaattctgtggcagctgaaactttgttttcaggctcttcataataaattctgtggggccaggtgccatagctcacacctctaatgctaccactttgagaagctaaggtgggagaatcaattgagcccaggaggtcgagcctgcagtgagccgtgactgctcaactgcactacagcctgggtgacaaagtgagaccctggctcagaaaaactcaaacaaaacaaaactctagggg

SEQ ID NO: 70571 - DNA, 1030 bp, Homo sapiens
ccattgagtagggttgtgtgaatgggttaatggagatgggtgccatagaaaatgtaatctttgaataggtagaggtggcactgaagttttggtttaagtataaaagttaacatatacagtatttaaaacttctgttttaaaatagtggttggctaaagtggtttagctttagtggttggctaaagtgctttatgtactgaagttcacagcaatctcatgtggtagttacactgtttatcactatttccagaggagaaaatgaagacttagagcttaaatgattcaagatcacatagaaagtaactgatagagcaatattttaaacatttttgtgtattttgtgtgtatgtatatatctagggaaaggggagtttttaaaaattaacctacttttcattattcagcatatttccctagatttttacataactttttattaaagattatcttaagtaatttaaacatctgaatgaggaaaacagtaaaggtatggaattgaatagaatttcaggtcaaatttgtggactcagagattgcctctgaccctctaacctatagagtggcaaaattttgaacaccaggctctcggcaaaacgtaaatttatttttggctagtggtcagaaaatgtgaatctttgattttacctaagtgatatattgtttttctatcaagatggggtcatgacacctactccatagtttgaactcgtgttggtgaaagggaagataaaggagcatttaacatatagaaagcacttttaagtgaacacaggttaggtcataattatttagtatgtttattgaacattatatataggacaagttccacttagtaaactttataaatccaggtggattaagaaatgccttttgttattcccattatgctccagactgtctacctttctgtgtgatgagtcaggagagaaactaataatgactcagagttggagaaaatttgattcgtgaatggggtagatatagtgtaaacactgagactgtttagtgtaaaacctgggctattagccca

SEQ ID NO: 70572 - DNA, 1349 bp, Homo sapiens
cagcaaaactgtcctctgcggtttgctacttgcacaaaagatctgttattcattaaattgctttagaaggaattcgtaagagtggtaatcaaatttctaggtgttttttttttttttttttttagttaaaaatatgaagattaaggggaaattgaagacaaggctttggaaaagctacattcctcaacttgatttttaaaagtagctgatgatccaaataaaagaatttgtcattttcaatcttttcctcattgttcatctgacagcggtcttattttgggaaatatcttggcagatgttaaacttcactttttttctggctgcatgtgctaaaattatttttcaagtactttttttttttttaaacaagggtaatgtttactgggggaagtaagtagagtgtatcttgtgagatcctaagaaacatcttttgttaatacccctgctttgagtaagagaacatagtgctgagaatgtagatgacttcccactacaatggagtctaatactctggaatgtttttcgtttgggtgttggcaactcctaaatttaatcttccctgaaaacaaacaaaccaagggtacctttttttttgtctgtagagtttgaacctttttattgaatagggaattgaggactgctttcttttagtggtaactatgtctctgtccgtttcaagctgcaggacccaacaaaacagtaatgcttcactacagtatctaattaacagacatacttcttgagcgcctcctcctcatattttcttatttttcaaaacaacttatgtatttcagattattttaatagtggtaaaatatatgatgcaaaactttaaagctgagccattttcatgtgtttatattgttgcttttttagaattgtgccatttctcctggtagtttcaacattgagaataccagttgctgtggagtttcttgtgtaatatttaatttagcacccctgttttaaaaagtcatacatattttgcaaatttttcgggtatgaaaataagtaaaaagatgaaaatgaccaatctctttatattcaaaagtagactttattttatctaatgtcgagtaagactcttattttcagacatgattcccaaccaagtctgtattagtagattaacatgtagttcatatgtagagatctggttttaatggtggataaacattaagttccttcaaggaagtacttatgaaacatctgtgtgatacatttattgtgactttcattacctcactttactagttatagagtgtatatataatactgttataaaggtatctgacagcagctaaagataccagaattgactagaagatagttataggcaaggaaccagg

SEQ ID NO: 70573 - DNA, 1093 bp, Homo sapiens
caccccggcggccgccgctgccaacgagctcaacaacaacctcccgggcggcgcgccggccgcacctgccgtccccggtcccgggggcgtgaactgcgcggtcggctccgccatgctgacgcgggcggcccccggcccgcggcggtcggaggacgagcccccagccgcctctgcctcggctgcaccgccgccccagcgtgacgaggaggagccggacggcgtcccagagaagggcaagagctcgggccccagtgccaggaaaggcaaggggcagatcgagaagaggaagctgcgggagaagcggcgctccaccggcgtggtcaacatccctgccgcagaggtgagccgggcgggggccgcagccggaccgggccggggcgggcagctgcctcccggtgtcttcctcctgggagctacccggggcgcagagtttacctcccctggctcgtacttgtcccttcaccgagttaggcaggcagggggtgatggagttttactctgaacaaatgcttcctgggaagttccccaaactcagagtaggacacgtgcttttcaggcttcctggccaggtctcagatccaggatccttttttaccgtggtagaaagacaacttatggctccaggacttgcccacctggacttggctgacttggccacctggacttggctgtttatgcttgatcagttagaaaaattgattaatggtgacgacattctctagggtctcacgtgcccatgtgaagttaccagtttatttctcctttcttaccaatgtttaataacatctgtaaagaaaatgttgccttagcaatatccaagacagctttatcttacagtgagctcaagatgagtatatccaaatgaatacgtgcactattttatatataaatcagctgtttataagttgtgctcctaaacacacagtgtttttctgagtgatacttaggacaatagggatgatttagtaacccacaattctgttcgctaagacgatctctttttgagtactgtgtctgaaaaacatgtggtagggtttttgtttgttttgggttgtttgcagtttggagcattttcgaaacgttacaggtagca

SEQ ID NO: 70574 - DNA, 1031 bp, Homo sapiens
agatgcatctgacttaaacttttataatatatatactatacacatgctctagtagtatactagtttatgtgagtgagtatgctattactttcctcaacagtgaaaaacaaatagaggtacagagtaggagaagcctcacacaaagataacctggcagtacaagttagtgcactagtattcaatattgtccaaattttgcctatatctaaacattatttttacaatttctaaaaattaaagcattttagcaaaatttgaatttaaatttggtaaaatccattaaataactttgcaaaccctacggggacactgatctgtaaacctttgacatggtcctttggattcaatcacatctagataataaatctcagcttcatttgataaaagtcaattacatatatccaaagcatcttgttttaaaaaacatgttattgtttcttcttaaaataccttaaagcaaaattttggaataatttacttggttaccataaacacctaattttttactcagaccagtaagggagaaaggtttaagaggtggatttcagaggacttccttgtcccattggaaagagcaaagtaaacctctgtaactatgctgccacatctgtcctaaaggactccagggacactgacctgctactcatatgaatctgctttgtttatgaaccctagttgctgttaccagagaaggaaagatagggaaaagtggcaggatgtttataggcgtcatatgcaaaatgtgtttgccatagaaaagacaggtggtgtgggctagaaaatgttgtaatcaatacttgataatagctaataattattaagaaaatattataatttgttggaatgtcaggattatcactaactgtggatacttaaagtttacgtaatgcttctcaaaatatcatgaggtcatctgggccatttgtcagccttcggggtcagactaaccttgttacataatgctcttctgcataagaatgttataatctgtgatttgtccttttggctgaagctttagtcctgcgtatctc

SEQ ID NO: 70575 - DNA, 2644 bp, Homo sapiens
aatgactgagaaaacttgtttacagctccagcatataaggaaagtgttcaaggccagatatgcctcagatatttaaccagtaagccttagttgtacataaatacttttgtgtcaacaaaaactttcagctctcacagaagacagttactcaacattttttgatgtgccacagtttcgagtttttcgatatttaaattttttggcttttcatctaagtttgggtttgtattttttccttctaaactcttcatgtggcagagtcttctatgttttcacagctttttcattacagaaaagaacacttgctcttctgtgattattgtcatgtattaggctaatgctgtgttgtctcccacctggaactgaattgcttggtggaacatatgctttcactgtttgtgcaatatgcatttatttcttatatgaatgctttaaagtcatttgaggttagatcttttaattcctattttctgcttcattggtcactttttttttattgtagtataagatgttagattctgtaatcttcacattcattttagcaggtactgagtgatgctgtatatacaaataagtgtattgttttgatttttagaccaccacatggcatgcttgactatttcttatttcaaatgtctgctaatgcagagtaggctactccatgatagtgttaaaaaacaaaatttgctaacaatgtgatataaagactttaaaagttacacattatgtggagccctatctttacaaaagtttcctactgtaaagtgcttttattttcagttttcacttgatagtactcaaccataattaaagttgcataagataattgctttacatttcacatacctatatttatctgagtgctgtctaaaactgttgtgctagccaaagtaatgctatgaaatcatttgcagaattaacccgtgagttaatgttaaatgcactgttattgccatgtgaagaggcatcgactttgataccaccatcatgttcagaccattttatacatttcagtggcctttttttttttttaaggaaaaaaaagcgcaaaaccaagtacatagtgacgatggcttttatttggacaaatagcttttatattttcattaaaccatgcaaaaaatactacatctttctggcacataactgtctccttaaccactgaacagttcagccatttgaataaattgtacattgtaaagcttatagtagctgattgtattattgattgtattgtatactatattaaatgtgaatttgtaccccttcattttaaaaggtcattgtgttctactgcctattttagattactttggggttggggaagggtgttttggtaagcaggattttaagtcctctctctctcgattggttttatgaagatataaggttatgctcttactaccaagctcaggattcttgattttaaaggtacaaggatagttgtgggagttttatttttggttatatttgaactgtatgaatggtaggtctgaatattgagaatttccatggtcttatgtggaggtaaaatatacagataactgatcagtttgagtgactgcaacatgttctggttgcacaacagttaggcatgctatggtttatatttgtgaagtttggatgcctgtgaagaatgattaaatacatgtttctaatattttagtgttttgtatttaggttatttattctttgtatctaaaactgaacagctactgtgctatattgattttattggtagtattgagcagaccttgtttctgcatgaaactagttgcaaaacccactattttggaaataaaaatgtattttgacatatacaaataaaatgaataaaactattttaaatgtgtgaacttttaatgaagacattttaaattttgttctgagatatttaaattctgcatgggtattttttcactaattgctttacttggataccaatttgaataatttctgaaattgtaatattgtgataatttgcacagcattgtacatgcacatctgtaaatgcaatcttaattgccatatttatgcaatctgtgtaccaatttggacaaatgtttatatattttacataaagctgtctgtatgcagaatctgagaactagtttttttatgataataagtgggtaaaaattaataacagtgagtttcagggtagttgctttgtagcacaagatttcgcttccataaacattgttttttttttttttcttaaagtaaacctgtgctttttcttatctgcaaacataggcttagcgatacatataaaggtaatattccattgaaacatacagtttactttaatattagatcattttccaatttagatttgtccaaggttcgacctgctaacacatctataaataagaggcacttttagccaggcatggttgggaggcccaggcgggaggatcacctgaggtcaggggtttgagaccagcctggccaacagggcgaaaccccgtttctactaaaaataaaaaatgagccaggtatgatggtgcaatcgcctgtagtcccagctactcaggaggctgagacaggagaatcacttgaaccagggaggcagaggttgtagtgagccaagattgtgccactgcacttcagcctgggcaacagagtgagactccgtctcaaa

SEQ ID NO: 70576 - DNA, 1003 bp, Homo sapiens
gaataacatggtacttaaaagacgatcagtaggattctgtctactttttaaaatcacataccctaaaaacattaacatttacagtaaatgtactgcttgactaaatatcagcattatttattaatctgggaaagagtgtcttggaaatagtttcagtgtgattaaactaaatttaaatggtttgtatctgaaaggtgaccggcaagagtcagtatcttctgggcggtatgacctaaccagttttacagctcatcaattactgctgcttgctttttgcataacaccccagaatgcttatcatttaagggagaataaaacagtacactgcaataatgtgttgtgtgttggctttgcctgtcactctttgaaacaagtttaaaataaacgctgcagttgcttttctattacattcactgcattaatgctacacataatgtcaacctaaatacaaagctataaagtcagttggataaataatggctagtacacattgtgagtggaggaaatgagcttctcttacattcctctgaaattgcaaagtacacatattttaggcatgtttgcttcttgcttttctgcttctgtcactgtaatatgattgcatctttgtgtgagttttgtttttcttctctgtacagtcttcagtcttgagtattgattcactctaagttttacatgaactcaaaaagtagtttgaatatgttatgtagcatcttcccagaaagtcaaagctttaaattaagagcttgtactctaaggataaagatcttcatatttatttttgtcaaattttggaaagctctttacatatcactggcatcacatcttttctacactgctcctgattggacctttaattctgaagtatcactatttcacagtatagaagaagacttaagaatataataattatataactaacattggtaccttaaatcgatctaggaacgaagagctctagaaagaagaatatctgaaatggaagaagagctcaaagtaagta

SEQ ID NO: 70577 - DNA, 1639 bp, Homo sapiens
cctagagtgtgagccaagaccaagatagctgtgggagaagataaaaaggccagtttactggtctggctgcatggatacagagtcattcaacctgctgatgaatatatttcaatcaaggtcctggaatctgaccattctgattagccactcctgatggtgtaggaaaggaaagaatttgagcttcagaaggaaagctacagtttttttttgtttttcttccacatactcactcaccctcacgcccaactaaactatgaaagttcctggggaaaagtgatagagaacataaaatgagagctctggttaccattctatttctaaacattcattgcactctttattattttaatacaaatcctgttttctctttgctttactcacgaacctgtgttttactccacttgaatattgtgatttaatacctattaaaagagaattactgtggtcacccctgaacttttttgcacttatctcttttataatttcttactttgttgcagagacaagaaagatttgctgatagatcactgttggaaatggaaaaaagggtaagtgtcccacttattaaataattatttttttctttcttgttttaggtaaacaatggtaggttttttgtttttattttgttattatggatgacagttttaattagtttaaatatttattgagttaatgtattttgcagcaacttctttatagaattctatggggtttctctaggtatgaaatgaccttgttaaataaaatttaatttaccacataattcttttaatgaatttaaaaaaactgtcttgccttgattctgaaatgtactatacacattttgatagtgaatttgatatttttgaaatgccgtttatctcttatggcctgtacctaaaacgttttaatcataaatacatttattttaattctttataaacctaaaatactttcgttcttgaaataaagtttctaaatctggaacatcaaattttcaaattctttttaaagttaatttaataattttttaaaattttgagtttaaatatttaacttaagtaggctattttaaacaaaaaaaagattacaagaaaatccttatgccacttgatgtctttctgcaagtttttattgattgtaatacattcacttgtatttctcttcacttattgttgctcaaaggtctaggagtagtcataggaataactgtacaagtttagcctcatcagttgaaaatgtataaatgatccaaaagttaaaggaaaagtgcccaaagattgtttgtagtgtagctgagcagtagctagacttggtagggtttcgaccagagaagaaatgacatgctggtagctatgatcaaagagtaaatacttaggagctattgatataaaaacatttttcttccattctattttaaaataaccaatttgcccttttcaccaaaaaaaagagaaatggttaaaaaaaaagaatataaaaatagtgttataatgtctgtcatttgctagttgtaccttgcaatagctaccattttattatgctttctgcaagttttaaaaattagtgttctgagtcatgttttcaaaatggacataataattgctaaaatattgttttaataaatttaatattattatatcctgttagaatattt

SEQ ID NO: 70578 - DNA, 1025 bp, Homo sapiens
ataaatacagctggtactccgtctcatttttgggaatgcaagagagagtgatgggcagaaaatctcacggactccaaataaagatcacagtgactccttagccctagctgcagttgctgtgcaggtatgtggtccctctttatcagataactgaatcttttttaagataacctgaaaagtccaatttttctgtgaagtcttgatttttgaatactggaactaattttaagactttatatgggacaaacacacttgcataacgaacagtctctgctttgcaaccatgaaggattttttaaatgtatcctttatagctcatatgctacattaagctgttttaatattgcaaagtaatcaatgagaaattttaaagtaataggagagcagaaaagtaatttgttcttttaccctaatttttatagctttatgaacaaattctagctgaaaatgaaaagctgaaggcacagctacatgatacaaatatggaactaacagatcttaaattacagttggaaaaggccacccaggtttgtacccttttctttttgttactctcaaggtaatggttgtgatttatcccatctaaaaatggtattaaaattttttctaatactctaaatagaagtttgataattggtaatagaagataatgctgtttatggatgatttactttttctggagtaaatttaaaaaatagtcatagtcaaaagtcaacttataaaaagccttttaataccaatgttgtggtatgtcaaggttttaaatgtttatttccagaataccaaatgtagcaagtcattaaaacattaaaagcatctatacagaatcatcttatagccatataaaaaattttataatagtttttgtttactacaaatattttatgtttgttcaagtaaaggttattttatattatagtgctggaagaagataattttaatcataactccttttgtaagttccttctatgcagcagtctagagaagataaatttggacaataaaattgggatggccaagcaaaa

SEQ ID NO: 70579 - DNA, 1109 bp, Homo sapiens
tttgattaagtattcagaatcttctcttgtagccctgctttagacaaaagagaaccagtgaagacacttttaaaaaagtgtcatctagctcaacccttaatcctagcacttggggaggctgaggcaggagcatcacttgagtccaggagttgaagaccagcatggacaacatcaagactccatctctaccaaaaaaaaaaaaaatttcttaattatccaggcataactgtatgctcctctatttctagctgctggggaggctgagtcagaaggatcacttgagctcccaggagctcaaggttatagtgagctatggttgtgccactgcactcctcactggatacagtgagaccctgtgtctttaaaaaaaaaaaaaaaaagtgtcacctaattcaaaattatccatcttttcagagaacctccactatatccttgattttgatctccattccatttctcttatcattgttaaccacagccctgtaagaccagtaataaatttctgtctactgatgattctattgaattgaaatgcagagccaatggcatctttcagaaaaggtaacctgaatttcagaaccagataataagagaattctcctttaccagtaagatatgtttttcctgcttaggacaaacccattacttgtcactttggatatactttatttcatcaaatctaagacattactcattttaaaacaccattgtgttacctactactgaaaaaaaggaaaggtgctaccaattaaactataatgcatcatcaattgtaagccattttctggttttggaaatattaaaatgtgggaggaagtgtacaatttaaaatattaatcattatatgaaaccagttttggcttttaaacatggaaattttgactctcttcctcaattaatggaaattagtagtattaaaaaaataggctgggtgcagtggctcattcctgtagtctcccagcactttgggaggctgaggcatgtgaattgcttgagcccaggagttcaagaccagcctgggcaacatggtgaaaccccatccctaccaaaagtacagaattaggcatggtggcatatgcctgtagtcccagcaacccaggaggctgagg

SEQ ID NO: 70580 - DNA, 1918 bp, Homo sapiens
agacagggcctatcactgaactgttgcagccattttgctaccaacatgggccatgtgtcatctcacctaaacctagtaactgctataccatgagaaaaaggaagaatggatgtagataaataaataaggtgcaatgtatgtgcatagatcaatattttctatattcacatagatattatgtgtccagaaaaggttggttagataacagtggttatctagagaatggagggatgaggaattacacaggaactttgtataccattatgtgaactttacaataccatagtcagaaagatatttctgaatatctttctatatattttaatcttttttatctttaaaaagatatttttactttggaaaattaatcttaaaatttggggaacaagggcgttatgctaaatgaaataagcaagttacaaaaagacaagaactgtgtgattccacttattttatttgggtatcatagaaacagaaagtagaacctttgttgccagagctaggaagaggaggacaaaggaagttgttcattggatatagagttttatttttgcaagatgaaaaagttctagcgatcttttgcacaacaatatgaatataattaaaaatactgaactatatactctaaaaaatggtttacatggtaaattttatattacgtggtttttaccacaattcttaaaagtttttaaataatgctaggccgggcatggtggctcacacctataagcccaacactctgggaggctgaggtgggaggactgcttgagcccaggagttcaagaccaacctgggcaacatagggagacactgtctccacagtaaatttaagaaattagtcggatgtgatggtgcatgcctgtagtcccagctaactaggaggctgaggcagaaggatcagttgggccaggaggtcgaggctgtagtgagctgtgatcatatcactgcactccagcctgggaaacagagcgacacctcatctcaaaaatagtaataataatcagtgataacaccatgatttttaaagataatggaatttgagtgatttctcactagactttttattgttaaaatttaaatcagtgaatgtaagtgcagactataaggtaagatgtattatttttgtttgatatgtagacattttagttcaggaatggccattttactgaatttgattatcttgaaaattgaaatttattctttaaaattgttagttgttgttaaaccaaagaataaatcaataaaagaaaacattaccttaaaaaacaatgtaaggagcaaagttaaaattggttttgcagaggaaatttacagactttagtaaaacatttttagtccaaaatagactttaaacaatcccaaaagtaacctagtaattttacagtatctccaaagataaatataatgggaaatcactaatatttaaattaagaagtttaacaaaccattctgaataaattatagaatcagtgagtatttcaatagaaaaagaaaaggctaaatttgactactgaaaaagactactttggcccccagtaagactgttttaccttattaatcatttcacgatttagataagactttctggaacttcagtgtagcataccacttgcttgagaaaattaaatttcctgtcacctaattgctgaccttaaaggtatatagctagatttcgagaaagtaaattttaaacaaaatatgtatatactgttatgcataaagaaccttaggtgttcattcgtttgcttctattgatactacattaaatttacttataatcataggttaatagtttaatgaaagcataaaaatttagtatgcctatgtttttctctttctttccagacggattccatttctaggtatgttttatttattttttaactgacatttttttcttatttttatctttgttaaa

SEQ ID NO: 70581 - DNA, 1019 bp, Homo sapiens
atatgaaaacaatagcacaaaaatatgggaaagtattaaatggagttgaagagttttagtatcttcgcattgtccatgctgtggacaaaatatatattcaacttgatgaatcaagagtgcatatgtctatttaaaaaagtttaaaaagagagggaaaatcatacataaatgacaaagaagggaagaacagatggggaaatcggaaaatagttttctatttttcttttgatttttaatatagaaaagttaaacatatactttatagaagtaacataatagtataatgagccctacccccagtattcattttttcagctaaattcccactccatctcccaactcccatattatttagaagaaaatcctagacatctcattctatctacaaatgtctcaatgtatattctgagagagaaggactcccaaaaataattttaaaaaataaattttgaaattattactaaaatttcctaaaatataaattggcaatctgtttttagagtgatgaaaatgaacaagaacaacaatcagacacagaagagggatccaataagaaagaaactcaggtaaataccattactttttgtattgagaagtattcatattttttaataattacttttaaattgcgttttattatgtttattcatgcaaagcagttattgcatactctacctacatgctgggtatgcaatatcagtgtttgcctggggatcaggattaaaaggactgggaagggtcacaaaataatgttttggaggtgatgaaaatgttctgagtcttgatcctagcagtggttttatggatatacagaactgccaaaactcaccaaattgtacactctaagtggatgtaatttaatgtatgtcatttaaccttcggagttaaaagaaaaagcaaaaaaagaaatagtacccttggccaaaggaaaatatctaaaggataatcagaagtagtggaaatccagaagtagtaggctcagattttatttctgtagattttatttcaaagttatgttc

SEQ ID NO: 70582 - DNA, 1103 bp, Homo sapiens
ccttaatatactttttctgtctttatacttttcacttcttgaaatctaacctgttcttcaaggtcaaatcttgaaaaatttatcgaaatctcttttaagccttaacaatcatcatgcatgtgtatatagatacatatacacacatatatatacacacacacagacatatatataaacataaatatttataatatacaaacagtacagatactggctattcttctctagtttgaacttgtggggaacatttatatgcatagagtatccagtacctatcgttgtgcttgctaatggtgattcttcatagaatgaatgtaacttgctgtttccatttgcaaaccaattttaaacatgcatatttgacttttaatgcatttgtatgtaatatatctatttctaaaatattccttgaaacaagctttaatgcatctcataattatattgatctttttgtgtgtgcagggagtgacattaactgatcttcaagaagctgagaaaacaataggaagaagtcgttctacccgaaccagagaacaagaaaatgaagaaaaagaaaaagaggaaaaagagaaacaagataaagagaaacaagaagaaaagaaggagtcagaaacatctagagaagatgaatataaacaaaagtactccagaacgtatgatgaggtaacagtatatcaaaagcacatttaagtcaaatggtatgaatagtccttatgatccttaacatacaagagatttatataccaacaaaccatatgcaaaatactgtaaaggattttagctggaaatttgaattactttggcgtgattagtatactactttttctttgaaatgaatttttaagtatttttatgtttttaattgtgtttaatgtttcaaatgggttttgatcttaatgtttcacagacttaccagcgttataggccagtatcaacttcaagttcaaccactccatcctcttcactttctactatgagcagttcactgtatgcttcaagtcaactaaacaggccaaatagtcttgtaggcataacttctgcttactccagaggaataacaaaagaaaatgaaagaggtaagaataccaaattttgaaaacact

SEQ ID NO: 70583 - DNA, 1022 bp, Homo sapiens
ttagattatcacttttgggggatgttttcagggctggagaagaggaccttcctcagttaaaaacagacaaaaaatttactccttatccattctgcttaattgggctaaatgaaatccttctatttttttcaatagagctaaaatttttaatcttcagttctctaaatcctttttaaaaatgtggttccatcttaaaattaaattacattattttaaaaaatgtagttaggaagttaaaatgtgatgttaaaatataattattaaaatataactagttccaatctaaaaagaaattataagattgcattattgaatttcaaagaccattttctgaagacttttccttaaaacttactaagatattaaacctgtatgttttattcatatgcattgatagatatttacattcacaggtattgtatttacaactaacgatttttcaatttactactgtagatcatacctcactcctgttagggatgaagagtctgaatcccaaagaaaagcaagatctagacaagcaagacaatctagaagatcaacacaggtatagttaatgtaattaatatataaaacttacataagtagcatataaaatatatatacacacactgacataaaacaagttacctttctctttttcactttgttgtgaaaatattgatgtcagtatatagtgtgagtaaatccttaaaaggtaaaggttgctgtagttattctagtaattctagtgtgaataaatccttaaaaggtaaaggttgctcatagccttttgtatggttacactgctactattgtatttcatctaattagcatatgcctttgtgtctttttgagtattttttaaatccttattcctaatacagtgtctggcccagagtatttggttagaataaattaatcatatgatgtctaataagtatttaaaagttctatgaatatttggaaatcgggggcagagaataggctcgtatattaggtataaacaactaatatgcaagtatgaagaaaatgtcattcag

SEQ ID NO: 70584 - DNA, 1032 bp, Homo sapiens
tgggaagtactgagttaagccaagttaatataggttatatctctgattgtatcacagacctttcaatattttattgtgattttcctagagaaggttagaatgtatagcatttccctaatttatgcaatcattttctataacaagcccctcttatatcccagaattaatgtttcttaaattttaataacaagattattagttattctcttattccttttgaattacttgtcccaggaaactcactataataattataaaaacatagtatctgttatatctaaataaaattaaagtcaaagtataatagtgatggaattttcatcttaatataagtatgttggatgtcccattcaagtaaaactccctcttgtaaatttcttgacttagctacaaatgtaattatgtggaaacagcaagaagaaccagttttctgaactaattttaagcaataagtaagagttaattgatgaaattgaggcaactaagatcttgcgtgagaaattacctggtcatcttagggttaattgtctaaggaggtgaatgctaagaatagtgtcatatattctagttttagagaaacagattccaaaaatttcagggttgtagaaagaaatatgatttccttatatatataaaaagaatgagggctctctaaaaggagttttgaaaaaatggtagatgattctaaggatgtttgaagatacgctatactcgctgaactgagagctttaaaggacacagagaaaaggcataaaactgacagtaaattcagaggtttgttatgattgtatgaatagtgttaggctaaaaaaatgaattacaaattgagaagaatgttaaagctaacaaaagaaagaggcttttttttttttttttttttttttttttttttttttttttgagacagagttttgctctagttgcccaggctggagtgcaatggcgcaatctcagctcactgcaatctccacctcccaggttcaagcagttctcctgcctcagcctcctgagtagctaggattacaggcatgc

SEQ ID NO: 70585 - DNA, 3829 bp, Homo sapiens
aatttaaataatatttgttttgactattttgatgtatttgagagcattgattatcaaggttctaaatagcttatataatataaatgcttgagacctctcagtgaacaatatttgaaagtttatttctctggaagaaataaagatatttcagcttatgacacagtattaatctgttagagaagttttagaaaaagtcattaaaatctggagaaatttttttcctttcttagtaaaatattatctgattccaggctaaaagagaaagaaaactaatttgaacaggctgattattgattgacattaattttagagttcagctaggaattgttgaaatactgtaaactatgatagctatgtaattataattattgaataaccttttcttaatacttttagcattgcctatagtcagtacccaaattaatttttacttatttttttccctgttgtgtaggagaaagatagtaaaggaactaggcttgcatatgttgcacctacaataccaagacgactagccagtacatctgacattgaagagaaagaaaacaggtgagtttattttgatttgctttatgcattcactataaaatctttattatctagcattagagttaatacatgagcattgtaattatgtgcggatatgtattgtgggaagagatggaggatattcctgaaggagaaaataccaggtacatagtcctgaggaggtgcaggcttggtatgttcatgaaataatagcaaagaagatgtggctggaacagagtaaggggaaagtgggaggagataaggtcatgaactagtatgagttctctaaatatttggaacatttaggaaaggggaaagaagaaggaaagcccttacttaatcattttagtttgttttaaatatttttgtttaaatattgtttaaatattttagtttcttcctgtttttcagcttatagaattttatttttttaatttaattatttttatttttatttttattttttttgagacagagtctcgctctgtcacccacgctggagtgcagtggcgcaatctcggctcactgcaacctccacctctcaggttcaagtagttctctgcctcagcctctcaagtggctgggattacaggcacctgccaccctgctcagctaatttttttatttttagtagagacagggtttcaccatcttggccaggctggtcttgaactcttgaccttgtgatccacctgtctcggcctctcaaagtgctgggttacaggtgtgaaccactgcacccggccaataactttttaatatacttttaatcatgttataatatctaatttttttatttttttcccctaagatctcataagcagtcttctatgttaatatatatttttaataagcattttttttgtcggcacataacatactataaagtagatcttctgcggttaaagtaagcatctcccctactttatattttgtgatcaaaaagcatatttctataaatatctgaattttcccccatacttaggggaaaaattataccttagggtatataatcttagtactgaaattactttatcttcttgattagtattcctaagtgtcctcccaaaggtttttactagtttcagcttatactaatatttactagtgtaccgctttcttaatcctattttaaaattatgtaccagaatctgaagggtgttcttttaacagagattcttcaagtttgcgaacaagtagttcatatacaaggagaaaatgggaagatgatcttaaaaaaaatagctcagttaatgaaggatcaacgtatcataaaaggtaataatactattcttaagcggtttttatgtattcatttataaaaatatgaggcaatttgtttggagccctcagtttaacatcattttaaacaaatatgtgtttttattaaatacgagtttttgttgtttaaaacttactctaaacacaggatatatatttaaagataggtgataatttgttatgcctattatataattaagcttcaaatattatgaaatgttttttggattgttacatatttaaaaggaactcctttagaaggaactccttgactagaacaacttaaacaggccagtgtcttaatggatctagttgtcattgttgatctggaaagatttggcttgccctagaactcagagctatggaaatgccttcagttggaatgttggtagtatcatattgaagaggaaaaaaaagccctataaacaatttctttactaaaagcaaccaaaaagaataagatgtgaacaagtatcatgtaggcattggttacttccgaggtatctgacccattgctgaaataatttccttcaaaaaaatgtcaacgtcttgttttccctgggtaatacaaaaccaaagtgtgtttttcaggctcagcctggcatgaccatatggtgtggaatagtttcaaaaatatgaaatatcagatcatctttgtcttgttgagaaagttgggaggaggcactaaaatgatacactaccgaattaagtgaaatcttctaaactctagcaagttgtagatgcaactcttggtgctggagctggtggtgtatttaggaacacagtttttaaattttttttctagccttgtaatttatataatgtatagacattaactatagaatacacatacaaacacatcctatatagatatgactcttttgtttagttgctcctttggtagaagacaagatgatttgattagttctagtgttccaagcaccacatcaacaccaacagttacctctgcagctgggcttcagaaaagcctgctttccagcacaagcactactacaaagattacaacgggttcttcctcagcaggcacacaaagcaggtaagtcacagatacattttgtgctcaggtctactgtgtgcttatgtatgtgcatgcgtttttgtttagaagattgtggggctctggattttttcatttatcttgttaaatttatttgcagacaaaaattggttccaaaatgaggcaattatgcatgtctgggggaaattttaagttcctgaactatgaactttccttgaattagactgcttaaaatgtaaatttctctctttgacaactctgggtgagctttttggttcataatttaaggatgtctcaccttgcgttttaaaaaaatccatccctgtagtcatgtgttttcagctgctagaaagtgctttcattgtttagctgttttccttttctcttttttgtgttgctgcttatgatgctatagtacctcaaatcgtttgtgggctgaggatagtactgagaaagaaaaggacagtgttcctacggcagtgaccattcctgttgctccaactgttgtaaatgctgcagcttctaccacaaccctgactacaactactgctggcactgtctcctccacaacagaggtcagggagagacgcaggtgtgtaaaggtcataacagtactgctgatatatcttgcccagtgatgaaagttgttttttgttttaaaaaagatcttgtgaggttgatggccatctctccagtagactaataaatgaaataccctgtcagctcagaactatgtaaatttatacaactagcaattatttatatttaggctttgcgactcacctctgacagaattaatgtttttttgtttaaagtcagtgagcaagacagttgttttcttaaacattttagtttctaaggtggtttatttcaaaaaaaattttttgatgaagaactgaaaacaccacacacttagggaaaattagatgcaacatgacaaaaacaggttttatcattcttctcattgtttcctcccattat

SEQ ID NO: 70586 - DNA, 1723 bp, Homo sapiens
atagaatttctagaagtgaagttgatgaagtgatctaaagataacagaggttgcatttttagggttgttggaaagcccttaaaatagcataaatatttgtacataaaattagtttttattatagttgaaatagttaatgtttggtggggaaatcagtaaatttaaggctgtgatgttaaaaaaaaaagtattataattggaaaaatatcagttactagtttttgttgattatattggacacaaaattttttaaccagagtatatacatggattaaaaacaaaattcatgtgcagtagtttgttcagtcacatgctatattatctactctgtatgccttttaattgctttagaagtttattagatttttttcagattatctcatgctaaaattagaacttgttcccagtgacttttaaagattggatcattacccaattattggggttaattataaaattattttcaaatgaagaaaatattttttgttcataacttcccttttctgttttcatgctttcaatctttgtctctttacctgtcttattttaattggctttagtatgatttcattgctcctatcatgcctgtggtggaatcagtagatcctgcatcatggaggcagggcttgcgcaaaactggcattgttcttgtgcccagtaagggtgaaaaatctatggtgaggcatttctatgtgcaagaatttatattaggttacaacataacaagtttaatataaattggttccaaagatgcatggttttaagtccttatggtgtgctcatttctgttttctgtatttgcatcataatttttctgtgtgatataaagtgtgtagtgtgttttcttaagtctaacccctaggaaggtagtctatttctttaaaatttttagatctttacattttttactaagacattaacctatgtagtaaaagtgttttatcctgaaactgtaaaccataattttaaatatattatctgtaaacttattgtttccaatttaaggactgatcagctttacaaattcttttttcttttcctaaaaaataaaataaacacagtttccaaccacagctacaaaaatttctcccaaagaagaagagagaaaagatgagtctcctgcaacttggaggttaggacttagaaagacgggcagctatggtgcacttgctgaaatcacagcatctaaagagggtcagaaagaaaaagatactgcaggtgttacacgttcagcttcaagtcccagactttcctcctctttggataataaagaaaaggtaatctatttcacagtctggtttctatgaaaactgttatgatttcttttccaggaacatcaaatctggtagattttctgctagttatctttagatctaggtatcaagttaattaaccttaatgaattacataagacaaatgtaatttatacagaattataaatactggaaagatcagatgtatttgcctaaaacataaattatgggactatactccgttaaaggaatctattaccttacttgagaatttataatagaactgtattaaggagcaggcttattttgtttattatgattcaagaaactttctgaagtttaaaaaacataggaacacatttattctagaatgttagtatactcataagttacatttattcagtatctgaaaaaaaataccagatttttcatctaccatattacaagcaactttgtcttaatgagtaaat

SEQ ID NO: 70587 - DNA, 1011 bp, Homo sapiens
agccaccatgcccagccgaagagggagtcttcttatcaatactgtatgacttttaaaacctgttattttcagtgattcttatactcctgtatctaatttagcatattagtattttttaaaattttttcaagtttatctgtaactttagtgacctaacattaaatttccttaaacaggttgttaatttctaattgcatcttaaaaggttttgcaattatctgtttttaggttcccagtcatgactccacttctaatatttagataaagttatcaagttctccagcttcctaccccagtacataaactatgtatgtgtgcacttgtgttcatggcaagacagatcacaaaaatggaagcacacgaaacagttttacatgcttattttcttttaataacttggggtaactatggtgaaagatagatgtgtttactttaattccttaacccttccgctgaaattaaagaactgtttctgtagcaatatcaagctgatgatttgtggagatgttatctataaaaccatcagtttgattttgtgcttaaaattgttaactaacaagtttatataagcctctctggtcaaaataaattttgttgggatctctaaagcagattatctattcttctatatgggtgtacattccaataaaatgtaaatggcattttctttacttgatggtaaaaattcagaatttttatggaattaagtgttctggttaattgaattcaatgtaatagctaataatttaacaaaagactgctatgtgctgtgggtatataaagtagtccaatcgaaacgtacagatgtagcatgatttaaaaggagaagaaattatatttgacttaaggtagtagaatcaggacattttagataaatcttaaagtaggtagtactccacctgagagaagaagggcttgtaaaccttgttgaaagggagagaagaaaaacaatatgagcaagtggggataatatggaatactttcgcaggaaaaatgaattgttccatttga

SEQ ID NO: 70588 - DNA, 1513 bp, Homo sapiens
gttagtttcatttctttctcttctttctgttctctgtctgttctccatccctctcatctcttctctccaccgaagcagtgttttccagttagtgtgttaatctttttaagactttacgttttcctgcttctctggaacctatctttcttttaacccaaattaacgattaagagtttttgtttgtttatgtttgacctactagtctcttttcaaagatttctcttcacccgtccttttttttatctttttttatcatttccctctctgtccacacatacctttttttttaaccaaacccttgaaaaattgattgcagtaatcataacacttcatgcctaaatatgtcagtatgtatctcctagtacaaggctattcttcattctcaaaataatcacacttaggaaatttaactttggtataatactattatgttattaataactaatatacccagattttcccaattgtcctttgagtatttctgtttgttttttaaaatcaggggtccacttggattgtacattgtgtttagttgcctttgaacttcttattttgttgctcgtttgacattatgtgcatgagtttaaggactgattggtttttaaatcctcacagcatttctgttgtgttgtcagtcttgccaatatttggatttggctttaggtggtcaaaatatagatctttttgaaatcataaactgcagaataaaaaaaaaaatccctgctgttagtaataatccttctctcaaacttcccaaggaaggcagtaatgtaaattattagtggtagaaacgtgttggtttcattggtacatagtttgaatattgagaaactatgaatgacttatcttaccttatatattccaaaactgagggcttcttgaattcagttagaactcatgttcatatgataataattatgtatgcttcagttaagaaattctctaaaagcagtttgtctgcaaaattttgaagactgttaatcatcctataactagcgtcactataaactgctttaattaaagtttattttacttctaagacccccatgtacttcttcagtgaatactaaattcattcctgcatcttttgatctgtttagactataatgttatcagaaattccatctccctggaatacctaggcaagaaactggctatctttttttttttttttctttttgaggcagtcttgctctgtcacccaggctggagtgcaatggcacgatcttggctcattgcaacatctgcctcccgggtttaagcgattctcctgtctcagcctactgagtaacagggatcacaggcacctccaccacacctgactaattatatttttagtagagatgggttttcaccatgttagggtattctcgaactcctgaccttgtgatccgcccacccaaagtactggggttacaggcgtgagccactgcacccagcactggctctctatcttttgggtatttggctaagtaatccctttcctactacagtcaaatgattacggtaaact

SEQ ID NO: 70589 - DNA, 1004 bp, Homo sapiens
tactgttaaggttttagttacattgcattcatgcattcaagttttaaatcttaaatttctttttattttcttcattttaaaagtacagaagtcagattctatttgtgcattttattgtcagaagctttgttgtgtatctttattatcttaactatttatttcagcatatatatagagacaagtctagaagctccctgaaaaactgacttgcgaaaaggaatcacagtggggaaagacttttagttaacaaaaccttaaacaaaaatggaatataaaatgattttttcccagccattgagaccaaatatatatggaatcttgactcttaattgtttgtctttaatagataagacaaaacccctggcttctgtaactaatgccaacacttctagtacacaagcagctcctgtagctgttacaacacctactgtgtcatcaggtcaagcaacacctacatcacctattaaaaaggtaagccaaaattgtatttgctgaaaatacatgtattctatttatgtaccacttggactaactcattaaagtaattctgaatttttatagtctgttccaaaaatatgtaagatttcagaatataaatatgtatttatgtttctcagttgaatgagatttcttctgaatcatgtttttttatcctttttgcaattgatattactgttgatattacagttggtagttaacaaatattacatacagttgatagttaataaatggcagaaagataaaaatttttgtaatattaaaatcagtgattgtattagttttttttttctattgaacttttattttgagaagctcaggttttatatcctttatctctattaagtagaggtgtgcatgttgataatttcacacacgggtaaattacaaatactactaccacaagtcaatgagagaactaaaatctaaattttttaaactcatagtacaaagcactaggcaggcaactttggtatgtcagtaggagcatgatctctgaggtcaga

SEQ ID NO: 70590 - DNA, 1099 bp, Homo sapiens
gactttttcagtaaagttggagggatgtaaaaaatccatcttagccctgcatggagctttttaattgtctagtctatttcattctttattcaagctctttccttttcaggtaaaacttaatttatttatttctttgttttgtcttatttaatgtctgaaaaactactttgttattattttaaactctgcatcttagtaatagtatcttaatagttttcttattttcctttgcataactttgtacaaagctccatagtgaaaaacgggacaagaaatctccactaattgaatcaacagcaaatatggacaataatcagtcacagaagacctttaaaaagtgagtaaaatattcaagtacatttgttatttttgttaatgagttggcatagtggccacaggcatgattattgtggatctgggaagaatgaatatattttaaccttttgtatttctaatcatttgaacactgttttcctttaacagcaaagagacgttgattattgaaccagagaaaaatgcatcccgtattgaatctctggaacaagaaaaggttgatgaagaagaagaaggaaagaaggatgagtctagctgctctagtgaagaagatgaggaagatgactcggaatcagaagctgaaacaggtaaaattaaaagataaatgcattttcgttgaattttgtggcagtgtaaaataagacaagatgagacgtaatttttaaatttttcagactgatttgctacttgtttagatacctgccacactactaaattatctttcagtgaatgctagaaacttacatatagttgtgaatttattattatttaattatctggaggctgttgttcacctctgcattttgccgacctatatttaaagaagttgcagaggcttctaagactccttaggtacagataggttgtgagtgggttctcagcaattgagaaatgctcctgttccttctgaggtccaaacgtccaggatgccggtcccaacagcatcccaaattttccctaagaaatagtaaagtaggaatggagtaaaaactctttcctgtgagggtgtgggggaatttgctttgttttgagaaattttaaagat

SEQ ID NO: 70591 - DNA, 1165 bp, Homo sapiens
ctactgaatcagtattctagtgaaacatacacaatatattgtatgcatgagaaaaatcattttattggcatctggccaacaattgtctaattcctatgctatacaatttatcataattttgctatcagagaaggagtgcatgtaaaattattttgccttatatccttttttaaaaaattactatagtagcagctccttatgtcactctaaattttatttactccttatctgtcattcgatatttcagtagatctttatgtgatagtaaaagaattgtgagccaggctttgtggtatgcacctgtaatcccagctacatgggaggctgaggtagaaggatcgcttgagtccaggagttcaaggctgcagtgagtcatggttgtggcactgcacagcagtgggcaacagaaggagaccctgctcaaaaaaaaaaaaaaaaaaaaaacccgaaacaattgtgcctcatatttacatagaatttaaaggttttcagccttttttacacatattacctaatgcaattcttttaacgaccctgtgaaattaagttttttggattcaggaacatgatcagagaagtcaagtatattttcctaaaaccctgaaattgttttatctttttattctgctaagttcctctataacttcttttcgttttagtttcctcatcttttctttttcaagatactattaagctataaaaatataaattttaatcaaaatatttttcttttaaaaatcaagattttaaagactgctttttatagtgaggagctacataatgtctatagcattctaaaggactttgtgccataaatatatccaaatacaaggctttttttttcatttgagaagttctattttaagaccttgatttttaaaattttaatttcataactttgcatgtatgaattagactgtttttattgtctgcattttaaattgtcatacatcatgttcagtcaaaataaattactttgtcttaattatgtaagcctgcctatgtgaatttatattgtcattggataccttccttagtacttacagattgaagattattactaaattgttttaaaaatgatattaaagatgtgcacttaaggtactaccagagtttagatgaattatttagtactagaaaacatgatttgggaaaataatgtata

SEQ ID NO: 70592 - DNA, 1008 bp, Homo sapiens
ttaggaattcagaagctaagaaaacgttgcattcctatgtgaatgttttctgccacccctttgagttggaacacacgtagaagtgcgtttctaattctttagctgatggtcttttagcttgcttatagaattctttaagtgacatgaataatgaggtcttacagcaggtgatgacagtaaatataactataaagttttatgccaaaggggatcattgagatgcaacatcatctagtcttctagttttgtagatgagaaaatagttcagttgagtgaggtaaatgatgtacttaataccacaattacgtagaaggagggagggagaaaatgtcatacaagcgtttttcacaaaatcatgaaaagattcaggttatcaagtttcttgttaaactagacttctctcctctactcctttttagatacactatcagtcaatagccagtcaccagtattcctgctagtctcttcctactctgtgttggtaggtaataagtatcatggagaactcaaaacacgtctcctctagtgggtttgattacctttccatagaatgttccttgtatattgcattttataggataatatcataggttatgtagcagagattcataaaatgacctcatctttattcaaaacagggctaattcttttgctgtttttggagtagagttctaaatatcttattttcattaactgatttaaaaatatattttatataagaaatgtgcaggcatgaaaatcataggaattggtaaaagtcttaaggaaagtaaaaaaatttgggggaatgattggtttgtacttatatacaaatacaaaaatctttgggttgaatttttagttaaaactttcaataatttactttctctgttgtttttcatcataatagttgttttgtaatcagcattagaagacaaataaatattgatactattcaagtaaaaggccagctaattttagcttcgcaagtcgtgttacctctcttttcatgtagaaattccccttcag

SEQ ID NO: 70593 - DNA, 1655 bp, Homo sapiens
cctgttgacagggtgtaggaaaaggcactcttactagtagaaatgacaattgagcaaattcaatcaaagtaacagttattctttagttccctgattctacctctaggaatttgtttttttacagatattcccactcacatgggaagtaagatacgtgctagcagcattgtttataataggaataagagaatgttttaataaattatggtatatgctttcactggcatattctgaaacaaaacaagaatgagaaatctccttacatactgttatagaaagaacactagggtatattatgaaatgtcaaaatcaaggatccaagtatgtatcatttgtatttattgtaaaaaaaattaaaattgtatttgcttatatatgcatgaaatcattgtgtaaggatccaataaaaattaatagtatggttattttgaggtagggcaagctagttggctaaaagtcagcggtgagagagtgatgtccctatgtatcctttcattctttttttttttaactttgtgaacatattacttatgaaagttaaaacatatatgaaataaaaatcaatagaaaagatgtttcaaatgtaaccttcttcacattttctctccctcccaaacacacacaactcctttcaatttgattttgatgcttttcagttttgtactcccattgcatgtctattcatagaacctatgcttgagagttggttgttgtttcacttccagtaaaagctccttgaatatagatactgtctttttttatgttgaaaaaatttacctctttttttctcgccacacagacttctaagtacttaaaaatgttgctcagcatatttaacattattattgttcatatttcctaatggggaacagcgtttttctcttacattccagtattgtttctgcctctattaataaggtttctgataatatatatcagtggagatatttctttggacttatatctttcagcttttctttagataatggctcttaaatgttggtctgcaggcaggtgataggcaatgatatgaaaatcatatgggggacttattaagaatatagatcagcagggcccatctctccatatgctgattgagtagtactggggtgagctgggcaatctatttttaaaaaacaagcccttcagatggttccgttacggaggcaggattagaaacagctgtattagatattgttaggaaataccagatttgttcttaaataaataaagggggattatacattagctgtcactaccacctcctgtaggtaaaaagaaggtccttctcaagctcaacatcttggaaagtgaggtaaaggttaactagatttcatgagttgtatttagtgttcgttcacctgtttgtgtggggctatgctatgtgcagtttatagacccatccttgctgtctgtgagcttaatgtctaaataaaataaaggttgttgtcaatatgtagttagaagggcatactaacataatttatgcaactctttgcattgtattaaaatgtgtttctgttttagcttgttgatgactggagtatctgctttctactgctcagaaaaatagatccgactccttggaatatgttttttgctttgttttgttcttaaaagattgtcattttcctttgaaaattttcagctcctta

SEQ ID NO: 70594 - DNA, 1041 bp, Homo sapiens
gattcaaagtcagggcgggatttgtaggagatgaggcctgaaaagataggtcagagccagatagtgaaggatatctatttttgtagacattggatagatgcagcaaatatctccaagcaataaattaatttgattggatttggtttttagtataaagctgatggcaacttggaggatgaaatagaatgtaggatatatggtgacacgcattccttgaagaagattctcaaattagtccaggtgaaagatgataagagccaaaacctgttacatttgaaatgaagaacaaggctgtcttgaggaaatattgaagtaaaattagaacagtttggtaaagaattgaatgcagatatgaaggaagaattaagcctaacttactaaagtttccagttgaagaagtgatgattagatgagttcatgtaggaaagtgtgagataagacagaaccagactgagggacttcatgagtatatattgggtttgtagtactaaaggacatctagatgacagtggttggtgcattgttagaacttaggatatgtaaagatgtgaaaagtaaatctaggagaaccataaggagggggagttctgggaactagtagatgagatgaccctggagacgaaaagctaagtgctaacaatgataatagtagtaatgacaatagctaactgttattaaatgcttattatatgccaggcattgagccaagagcttcacatgcatttcttcatttcatcctcatagcagttctgtgaggtttatactactgttaccccatttccagatgagaaaattgaggcttagtgatttacccaagatcatacaggtaggaagtggtagtgctataggtctgtcctaaacagtaagacagatatcttgagcccacattctgtaccactgtaccatactgcattttatttaaaatgtctccctagaaaatacttcatgatgttcatttgatacatataatgggaatgcataaatttatatagcatatcttaattccaaagaaacaaaagtataggggcatctctaacagat

SEQ ID NO: 70595 - DNA, 1596 bp, Homo sapiens
atgaaaaaagctgtgtagatatgttacacaacaatgtgaatgtacttaagaactgtacacttaaaaatagttaagacctgtaatcccagctaaggggggaggatcgctttagctcgtgtgttccaggctgcagtgatctgatcacatcactgtgctccagcctgggtgacagagtgagaccctttctgaaaacaaaaaaaaaagttaagatggtaaattttatttttatgtttattttactacaattaaaaatttatgtatgtgtgattacttctgcagtacctttgggcaggactcacacacacacacacacacacacacacacacacacacacaaagtgccacatgtgatttttgttatagtccattaggcagtgatcaaacaggtattattagagctgtgttttactgaggtcaaatgatagaggaatggtatgaaatattgatgtagagggccaactcctgctgaaatgtgcttcatcagaaaatagaaactaaggattagaaaggaatagaaggtaaataaattccatgaaaggagatttttattccttgggattaggaaaattcctaatgactgcgggtttgttttgttttgttttcgtttgttttgagacagactggagtgcagtgacacaatcatggctcactatagcctcaacctcccagaccctagcgatcctcccaccttagcctcttgaggagctgggactgtaggcgcatgccacctcacctggctaatttttgtattttaagtagagatgcagttttactgtgttggtcaggctgatcttgaactcttgaactcaagcagtccacctatcttggcctcccaaagttctgatattacaggcatgagcgaccgcatctagccaactgtgggtttgtttaaaaaaaaaactatcttaagcatgaaaactgagaaaataaatacctaaaatagaattgaggtgttataaaaagtgattaaatataactagagcctaaaaaaaacaagaaatgcaatagaaaagtggttataaactggagcctgaataaacacacagaagagctttcaacagccatgttctagacaagtgttttagagtcataggatcttctagaattgagtaaactaaagaataagtataaagcatcacaacctagcaagaacttccctgcccattttgctgtgatgagtgctcagataacagtttcctgtcaaacaatggtaattctttaaagtaaacatttaaggctcctattttttatctgatattagcagttgttatgaactagaaaaggcatggagttgtactgaaaatttcttgcatttggtttccttctgtataagggaaattgctagcgtaactgtaagcggggctgattttagttttaatgattcatttagaactgattaatgtgccagcaaatgttctatgtgctgggtgttaacaataaaaaaagcaagacaatccttcttaaggatttcacagtctagcagaagtgtcaaacgaagagcttcacaatacagtgtgctatgtattaaaatatataggaacagaatgttgtgagagaatagaaaaagctgtagtgaggaaaggtttcagagtgatg

SEQ ID NO: 70596 - DNA, 1103 bp, Homo sapiens
gagactttctaattattattaaaaattaacatttttgtattggtaaagcaacgtgtgtacattatagaaaaattaggaaatataaatttaaaaaagaaacatgctctagatggttttgttttttgtttttttggcttgatctcagctcactgcaagctccacctcccgggttcttgccattctcctgcctcagcctcctgagtagctgggactacaggcgcccaccaccacgcccggctaattttttgtatttttagtagagacagggtttcaccgtgttaggatggtcttgatctgacctcgtgatccgcctgccttggcctcccaaagtgctgggattacaggcgtgagccactgcgcctggcctgatagttttttaaaatttaaataatgtatatactgccctttattgctgctttatataggaactttcctcattggttatgcatttagttttatttcaatgataatatcttttgcttaactatttttcctttggttttacaggtttttgattggtcaaggagcacatgtaggggctgtcaacagtgaaggagatacacctttagatattgcggaggaggaggcaatggaagagctacttcaaaatgaagttaatcggcaaggtaaaataaaaagcaacctaaatggaaaaatgttttagaaagaatgtgatacttttccagcaaaaatatttgttgacattgaagggcaatcataatttcatgaaaaaaatgaattcagcttgcaaaacaatagtacagtatgtttctgttttctaaaatattctccactctatcttttaagtatttttaaagttaaaagaaatgttagaagcagcaggatcaggcataaaattatgtggaagtaaaagttttggagcaaaataaagtaggcaaaggggatagaaagtgcacagggtaagtggcacattgcaaagttaaatagtgtggtcaagaaggctcactgataaggggtcatttaagctgagatgtgaatacaatgagggaatgagtcatgatgatctggggaaagagcattccagacaaggggagcaatgaatacaagaatgggaggttgtcttgtatatgcagagaagcagc

SEQ ID NO: 70597 - DNA, 1022 bp, Homo sapiens
tgaagacatcatccaaagaaatagactagtcttcactaaaggatggataaataaatatgcatttatgtcttgtatgattaaataaatgcattatttatgcatatgtgttatattttatgattacctatttcagtcagcctatttggttaaccaagcaaatactggttctgattgcattaaacagaagggccttattggagccataatttcttggagagaaggcattagtggaatatggagagggtagcagataagactgggcaagtcagctggggttacaacgtaaaggatttgtatgccaggctgagtttgtcctttgatggtgatgcagttttagggaagtgatgacctttcagactgtttttttggaagattcttgacaaattagagaggttgggcaagaaaactagggcagtggcagtgagattggaagtagagcagatctgaaagaaatttggagaatagaattgataagtcttggtgtgatttactggatctaagtactaaggtaggaagaaaaatcaaaggtggtgctaatgatgataaatagctaacgtttaccaagtgcttactgtgtttttttttttactgttctaagtcctttagataacataatttcagtcatataaaaatgtactacttcccacaggtccttatgcataaacctccaaaactgcaaaaaatgaaaacataaattttaagtttgttgtaggcacatttggcaacagataatgacctgcactgatgggaggctatttgtagtctttatctcacttaactgtaaatgtgtggtttgttttttttttgcagaaataattttgtgtttggttatagagtgctatcccagacctggtgggagtgttacataatccataatattatctttctaaaatatgaaaaacttttacttttcttctgctggtggaaatgtaaattagatcagccattgtggaaagcaatttggtgatttctcaaaaccttaaaacagttaccatttgacccagcaatcccattattggtta

SEQ ID NO: 70598 - DNA, 1008 bp, Homo sapiens
ccatgcccagctgattttttttgtatttttagtagaggtgggatttcaccatgttagccaggatggtctcaatctcctgaccttgtgatctgcccgccttggcctcccactgttgtttttcactggaattattgcagttgcctccttgtaggcataactgtcatctttcccacacctattttttttcacagtagccgcagtgatcgttttaaattattttgcgttgtagccataatgatcattttaaattattttgtgttgggtaacatgacagttttattgaaagcctatcagtggatttatgctgcattcagggtagaagccagagttctggtggcctacagaggtatgctttggtgccttgtcacctctctgactccatcctccactcttttctaggctttgtgctaaacctacactggtcccttggttgagcctttgaacagactaggcatcttgcctcatggcctttccatctatttgctggttcttctgtctggaattcaataatgctgttatttttggtgctttgaaaacagaaatttcaggaatttcagaaattcttgaacctcacctccccccagcaagaaatattatagtataggagttaagagctcaggctcaggagttaggcaactctgtttaaatcttaattctgttaagtaattctcgtcaactttgaatgaattaccagcttccctaagcctccatttctttatccataaaatggaaatattaatacttgtacctaatttataagattgtgaagattaaatgagatcatgtgtataagacacttggcacaatatgtggcaagtatttctattcagtaaatattaactgaattagttgttattgtttataatataatttttggttaccacttttcagtgaaaaataggtaagctcttgggtttcccagattatttaacaaaggaaactatcattttgtctcttggttttagggcaaacttatctagaagagaggagcagaggagaatgaagtag

SEQ ID NO: 70599 - DNA, 1032 bp, Homo sapiens
tatgtgtacctaagcaaggacccttaacaatttagtgtcattagcatgtttgatggagtatagtcaagatagcagcagatttatttacagagaatatttatattataaaagctacaaagtaggaattttattctattgatgtattatttggagtgttaattcgtattttttccaatcttgctttctgttttgtttttaggcttgcattgatgacaatgttgatatggtgaagtttctggtagaaaatggagcaaatattaatcaacctgataatgaaggctggataccactacatgcagcagcttcctgtggatatcttgatattgcagagtaagccagttctgtgttttcattttattctaatactgtttgacagacctgaatgtttattgaagtgataaagataaatgagtgaactcttatattactttaattcatgaaaattattctttccaagaaagaaaataagtggttattgggaatccatatattctcagaatcagatcttctttttgtctccccaccctctttggcctttggtacttcgtattaacattagtaattgtacacattctctgtctccatcttttttcttttgagtacagctagagcattttcaaatgattgagggttaatacttagcagtctaactcattcctttataatcataaatttggcaactgggttacattgctatagggagaatatgatacatagttctccagtgagcctgtttacttagtttttctgaagattgtcttttttaaaaaatacattttttagaaaattcaatgagaaatagtcattgtattctctactacctttaatgtgtgggtacacactaagaacatctgattttttaaagcatttaacagtggaagtatagatatcttgaaaaataattttttcattaaattatttttcttattactatctatccacacagtaaacagttttgttgtctctctgctcatatatgaaagcttatcaatgaataaatattgaatatgggaattctactctgtaaatatc

SEQ ID NO: 70600 - DNA, 1030 bp, Homo sapiens
gtttcttatgtcgacttaaaagtatatacatttaaaatcaaaattagcagtgtttcatttattggagaatagctatttctgtgtgttaatgtctttcaaagagccagtgtaatcaccttcttcaaatggagaaactttaaaaattaccaatttgtcatgaaagtcttttatcttaagtgtcaaaggattactcaaaagatggcagataagaccctattctggatcttgcttacctcaccgtatttggctttgcgtctttatataccagacctgtttttcacttgttcttatgttaaactcaaatatatgaatcacctccaggaaatattccctgacgaccaccattccttcttagttctccttttctcagctctcataaaaaccagtggacgtgtctgaaattgtcttaccatattccttttgatataatcatctatttttgtatttgtcttctgtactagatggtgtcttgaactttctatttctagctgtttactgactaaggtatcacaaatgtctgttttccaagcacaatatcctgatcataatttaatcttacccctttccttactgttttcaaaatcacttctctacactctttccctgaatgatttcaagtcccattgttttattacctcaatgcagataattcccaaattgacattttcttcccacatttattttcacagctccagatctatatggttagataggtgtacagacacctataaattcagcatatccaaaacaaataaaattgtcatctttcttttcccagtctgctgcttgaatctgtggtgtttatcttcatgaatgtcttcttcctgcatcttaactcttcatatctttcattaaaccttgaacatttcctcctaagcttccttaatacagtttcatgagtacaggcataccttagagatactgtgggtttggttccagactaccacaaaaaagtgagtcacacaattttttttggtttctcagtgcatataaaagttgtgtttatgctataccgtagtctattaaatgt

SEQ ID NO: 70601 - DNA, 1052 bp, Homo sapiens
tcacaattgccatagtgtttattctgtatctttttagagataatccatatgtgaacaaatacacacacacaaaatatatcacattggtcagagactactcgtgttttacatttgttcttttcactttgcaaaatatccaggaatttgtttcatattagtccataaattagttctttattgatggacatttaaattgtttccagttttacacttaccagaacttagcaaataattctgtacatgtcattttgcacatgtgattgtatctgcagaataaattcctagaatgaaattgcactgtcaagggatatgtgcctttgaattttgatagatagaaccaaattgttttggggtgttattttaccttttgctgctgctgtttagttgtgtagcctattggttaggggtacagatgctgaagccagactgctgggttaaaatcctgaattttgccagttatcatctgttaaatggtagtaatagttctcacttactgggttgttgtgaagattaaatgaattagtatatgtaaactacctggaacagttccatggcacgtataaaagtgctatgtaagtaagggttagtgtttatttaggacatggattctgtaaaatgtggcttcactctgccatttttactaggaagaacttcttataattctattttccattttccccttgcttctatgtaactgcattttatttctttccctcctgcctcttcaagctactgcttctcaaccctctgttgtttcccctttcttaaatactcatgccctctgggttctgatgtagctttctctgatcactttttacacatgctgcttgtgccttgttatttattcctctagctttggttactgtgggtatcagtggttcacaatctaatgtattttacaagttagatgggcaacttctttaaagaggaaatttctgggcaccaccttcagagattttgatttctcctctcccccaaatattggttaagtactttagttaaatccatagcatttatcatagctctttttgttgttgtgtgtttagttacgt

SEQ ID NO: 70602 - DNA, 1118 bp, Homo sapiens
aaaaaattgttttaaccttcaccatttctttatccttaatgacatagatcaggtttctcctagaagccttgctcttacttaggctactccctaatctctgagctcctacaaaatacagcatttgctgtattattttgttttcacattgagtctgttaaaatcatatatttaataaggctcggtattagtcatgattcatttttttgtattcccagcatatagtaccttacagatgatagtaattgttgacaaaatctgaacagagtagcagtgctggtgaagggcattgatgtcaaactgtggttttctgaaagctattctctggaagaggaagtttattactataataaaatagaggcttggggtatacctttatgtcttatgtatacagtctgttctcttaagatgaaatagctgtatcagaaaatagtgttccatttggatcagacataactattccattgagctttatacattgctgttttgtaagctgagctgcttctatttccctccccttttttggttctatagtacttaaaaattacatcatacagtgatttactagtatattttaattttgaagtcatgagtaggcagaattgtaaataaaatgtaaataatacaaagataaagtattagcatataatctttctacattttcttagagtttctcctgtttttttttccaggaaccctgaaattatctgcaggagttgcttcatgtgattgctctttttaattatctccatgtgaagaaaacattgccaataatgttagcttgctttttctcagcagtagtcagttttgacattacttgcctatgggctagccctctacattttacagggcataatttcttaataaacttttccccccatattggaaactttatgacttaaaaatatctgggaaataatcattactcatagaactgacacagaagttgtagaatccacacacgtaagcataaagacttttattttactagggagaagtcctcacgtgatttttttgtactcttattttaggctctttaaaaaaaattttggcaaattaagagttgcagattagtatggaagataaaaagttgtcagatagttttaagaggagacagctga

SEQ ID NO: 70603 - DNA, 1064 bp, Homo sapiens
cccaaaatagaagtttcttgattttgtctttatagccttctcacctaacatagtacctgggacattgattgctagatattcaggaaatgtttaatggtatgaaggattctcttcacagtaacctgtttcaaggacttcatcttcgggccttgaagagaatggacacttggaaattctcctcctgatttatttggtgcatggatacccagatgaatagttaaactgagatttttaatagatggacaatccttctatactatggtttatgacatgtcattgattgctgcattgattttggtacatctggggtgactatttaggagccttctcctcttaaaattcgttgtgtatacaccccaaagtcatgtaattacgttacagagaattaccattctgatggtgtgaagatacaccttgggaaatactttaaaatcctggacagaaactgaaatatatatctgaaagatatgttcatgggtattaggtttaaggatgttaaagctatagccttgaaaagctttgttcatgatttaagttccctgccatttgtttcaaaggcacatttacggaaatgtgtattttgtgtgtatttattcagcaaatatttgtgtgcctattacgtggtggaccctagaatccatcaatgaattcacaaagcagacaaaaatccctgcactggtggagtttacatggagcttatttgctgcctctgtatgtttctatatgcatgtgtgtagatatgacatcattataggacaggcagcataataaattgttataaggatgttttgtattttagtagaggactgataaaattggagggccattgctaactcttcattatctgttaccttatttcacagatctgcattttgaatttttttgccctggcttatccaaacaggaaaggcaaagaagttttattaaacaattgaatgaaagttgtatttattgttctagcaggtgcaaagcattctgctgtaaatattgcagggtggaaaggatggctaacacacagttcataacttcaggaagcatatagtttaatagagacaagacaaata

SEQ ID NO: 70604 - DNA, 1639 bp, Homo sapiens
ttaagttcatactgtaacagattctagtaacagttgtgggaattaatatctgagtcttcagaaggatctatttgggaattaacatctttgagacttcagagggaactatttggttggaatagtaaatagtaaacacttatataatagtatttaaggatataacagacatgccttaggcggttacattatcacattaatcatatgaggtattattcattttattattccattagacctgtgaagaaaatgaggtacagatgtgactgtagggtcacaacaaagcttataaattacagggctgggagttgaacctgagaagtttgactgaacagtgttctcacaaacgctatgccatagtgcctctggactacttgaatcaccaggttccatcctcatggtatccttaagaatacctgggtcttaattataggacaattgataggccacaacaaatctggtaggtcagttatctcctaaagctaccccaatggggtgttccagaaacttcctggatgcatccagggtacaccaaggtcttactcttgccagctaatgtgttctgttgctccagggctcactgttgataatcatgggtggtatataacaagaaattgagaatcctgtaggcatatggttatttaatcagcctttgattttaaataactttatctgaacactgttaacatataatgactaaaatctaacaccaaactagctggtcacaggtcttctgttagtattttatatttccattaacttctttaaaatgttcctatatcagaagacattgtgtaaaagccttattaaatgcttctgtttcattttcaatttaactatattagattatatacctgcttttctcctagcttctgctttcatattaagtcatttcttccattactgaaatcttgtttgtttttattggataatctgattccaagtttagaacttctatgttttaaaggactgtggatgacagggagataaaaaatgaaaagactacaagaaaagcagttcctagtttcagcaaaaaattcaaaggcatttgggtcttctattattaactgctcttttcctattttggaataaaattaaagctagagtctagtttaggtatggtagttatcatagatgcttccactactacaaacagtgtgttctttgaagatctgaaataattaaatacagtgctttggatcctcgccctgttttaaatagaaatgaattttcagaaaggattctactctttaattactgtggaagacactgtaagagttaacattgtttaaagaaagccttatatgggaaagatcaattgttagttagtatcctaactaaacgttttcaaccccagatacccattcttatgaagaaatctgttcttcagaaatttagtgtatgtagcaagccgtctgatttttccttaggctaataatggaggtcactccattaaaagtactgtgaaccactattatataccacagaatacagtatagcagtcttccaatttttaaagaaacatagatacatagattaatatatagaggctaggtcttgctttgtctcccaacctggagtacagcagcaggatcataattcaatataatcttgaactccttggctcaagcaacactcctgc

SEQ ID NO: 70605 - DNA, 1452 bp, Homo sapiens
ctattttttctatttttagtagagatggggtttcaccatgttggtcaggctggtctcgatctcgtgacctcgtgatccacccgcctcggcctcccaaagtgctgggattacaggcatgagccactgtgcccggcctaaactcttaactctgtataacatggcatctttttcccttttcaacccatccttgacatttagagccagtctttatatgtgggaatactatataagtttttctcgctttaaaaacactcaaatgtaaaaaatgttaattgcaggacagtatgtatggtatgagccctttggggggttatttacatagggaaaaaatctggtaaagtacctcaactgttaacagtggttgtctctgggagggaaatacagattttgaattatgttacttttggatcttttacaacaagcagaaaaaaaaaaagaaaaatctcaattggagaaaaatgcctaaatggctattcccagtaatattttatggattaaatatagaaacattgatataactaatgaattttagtttgctagtgtttggccactcaaagaagctggtgttgatggttcagtatttatttctgtattatacttgccttttctctgaaccttttatttcatgaggaatgactgcttgacgatgtgatgaacaccttgggagagtattctaagcaaataatggaattctggatatggttagatgtattttgtagctttttgcaagtggactacagaaagttcagagaaaagctaagtataattaccaaaaaggcaagtcatttttgaaggacaaaggggttttaaaggataaaatttgggttttagaattttaaacaatccaataggagataatgtgaagaaagaattagaaaagcagttttatacagtatgctcttttgccccattctttatgaatgtataaagcatttgtcgatgaatatctgtcttaagaatgaattgaaaaaacagccccaagtctcttagaattaggaatgttgaagcccatagttacgtgaattttgtgaaaatatttttgaaggcagtgaaaagaggacttttaaaatttataaaccagaacaagaataggaagatggaaggcaactgatggaatggcttttaatttacatacacatttgttgtttataggtacatttgttgtttataggtacatttgttgtttataggtacatttgtttaaaatggtcttctactctacactggcaaaattctaatatccactattaaacagatagttctggaagagactgtgttgaacactagatgtcaatttgagttttctgaaaacaagttatgttgacctatctttacttcctttttggtcaaggtttagaaacataactgggggaaatgttgcaaacagtatagcttgattttttttgtaaagcacatggaaaggctcttgttatgtctttacggttaacatga

SEQ ID NO: 70606 - DNA, 1051 bp, Homo sapiens
gataacccattaattcattaaccctttaatccatgagtggattaatccatttatgagagaagagccctcctgatgcagtcacctcccaaagtccccagctatcaacagtgccacattagggatcaggtttcagcatgagttttgggagggatatttaaatcacagcagatatggagaaattggaaccctcatgcactgctggtggtaatagtaagatggtatagccactttcaaaacagtctggcattttctcaaaaggttaaacagagttaccgtatgacccagcagttctactcttaggtgtatactcaagagaattgaacatgtgtccacacagaaatgtgtatagtaatgttcatggcagcattattgatgatagccaaagatgaaaacacaaatgtcttatcagctgatgaataaagtgatatgttttgtccctggaatcagcggaatattattcagtagcaaaaaggggatgctgataattgctacaaagatgaatcttaaacatgctaagtgaaagaagccagtcacaaaagaccacatggtgtatgattccatttatatgaaatgtccagaataggcaaatctgtgtatgaagcaagaaggcagataaatggttgccagaaactagaggtgttgaggggagttggtgaataactgctaatgggtacaactttttagggtgacaaaaatgtaaaattgtgctgacagttgcacaactctgtgaatctgtttatttgtacactttaaatgggttattttatggtatgtgaatggtatctcaaacatttaaaaaagtgaacgtatatatttatcagtgtttactactaaaaattgaggcactgacagagccagagtaattatcttctatcagtcccccagcctcagcctaggcttggtattagtcactataattatgatggtgaacagaacagccagacattgcccctgccctaacacagcttgtagtctactggagtgtatagataatacacagacaattataaatttacatcagttatgtgtaatgatatgtaatggtaataca

SEQ ID NO: 70607 - DNA, 2076 bp, Homo sapiens
tgccatttaaatgattgtttatacaaaatactttttaaaaaattttttacttttaagttctggtatacatgtgcagaacgtgcaggtgtgttacatgggtatacttatgctatggtagtttgctgcacttaccgactcatatctaggttttaagccctgcatgcattaggtatttgtcctaatgctctccctacccttgcccctgagcccccgacaggccccagtgtgtgatggtcctccctgtgtccatgtgttctcattgttcaacttccacttatgagtgagaacctgaggtgtttggttttctgttcctgtattagtttgctgagaatgatggcttccagcttcatccatgtccctgcaaaggacatgaactcattcttttttatgactgtattccatggtgtgtatgtgctacattttctttatccagttcatcattgatggggatttgggttagttctaagtctgcaaaaggcatttttaataaagtttctagtatattgaaaatggaaaactaaccgtgaaagtactcatgttgacacatctgttaaattgatgcgataatgttatcccctatatgtcacccacaggcagatttttgttttatttattgttttttttgttttgttttgagatggggtcttgctctgttacccaggctgggagtgcagtggtgtgaacacagctcactgcagcttcgactgcctggccttagtgattctcccacctcagccttttgagtagctgagactacaggcgtgtgcccaccacaactggctgacttttaaaatcattattattagtagtagagacaaggttttgctgtgttgcccaggctggtttcaaactcctgggctcaagcaatcctcctgccttggcatcccaaagtgcttggattacagccatgcactaccatgcctggctgaggaaaattgttttattgctttattactctgtgtgtgtgtgtttgtgagaataaaattagttgtatttcactcagagaagcaattggggaagacaaggtaaaaagtgttcttccttttttctttatgtaaggtttagttctaatgtttgaaaattttgaagttattaaaatattaaacaatatctgtattcatttatatgatgctgttattcatttaaattagtgaataactcattcatgcaagaaacatagagagatcaccatttatcatatgtccagcacagtactaatctctaaaaacagtggtccctggctacatgtagtatacaatctagttgaggtggcagcatgagccgatgattacaatgtaaataagtggtagagtagagatacaaggtgaaattaaaggctttattaggcgggcttaacccagagtatcaatggaagacatccctgagaaagctctgtaagttataggtaacttatcagcagatgttttgagccttttatgaccctattcactactggtttgtcttctgaatgtacctgtttagtgtacctttttgtcagtttctttcttgaagatgaatgttgccaaggttctcatatgtctattattcttttttgtgttatttatgtagtttcaactttctttttatatgatctgtcctccttcttacatgatccatatcttattttttatatcagtcttccatttactaagctagaatctcagggtctttttctgttttctcctcacttgcatacagtacatctcctctaccatgcacacacctaaaaaaaaatcatcttttgtatattcatttaacatatattaaaggtctcttctgtgccagacactactaagtgctgagaagacacatttttgagcaaaaatataccaacagtaccctcatagagtcgacagtaaaatgaaattagccatttgggaaatgcaaatcaaacccacaatgagatactagttcacacctactaggatggctttaataaaaaagagaacaagtaatgactaggatgttgtattagtcctgttttcttttgcttataacggaataccagaaactggattatttaaaaagatttacttattacagctatggcggctaagaagtccaaggttgtagggt

SEQ ID NO: 70608 - DNA, 1058 bp, Homo sapiens
aatgacattcagtagaaaccatggaaagaagtgaaagcattcctcagctgtcacttttttagtagtctatttaaatgttatgtatattaagtgagatattctgcagagagagcttcacttaataaaaagctttactttaacttgatgatttaactcacatttgagctgaaattactattttcttagtttaacatgacctctaacaataaaatcataagattgtacaaagctcatgtcattttcttgaatactgcatagtgcagaggagaatacattttgtgagatgtcacttggcaccctcttaaagattaataaccatgtgggaaagtatattttcatggactgttacacacacacacacacacacgtacacgtatgcactcaacctttacttgtaataaacatcccaaattatatatattttattagccttcaaaattgttttagatggttataaacttatttgaatatttatattcttgcatggaacacttctagagcttttctgttggagtttcagctccagaacatttttttaaaatatcctcagtgttgagagtttttttttctttcaggagagtttttaaattttgaaaatgatatcattcgaagatgcatctggtgaataaaggtggatcatgtagtcatcatggttaataaatatccgtgattacatgatattttctaaaaagcttattcttaactggaatatgatcataaatgtcaccttggatttaagttaactctttacgttgtgtggatttgagtatgcttcagaatttgtaaacctaaagtactgttcatttgtgttctagattttgatgaaacaagtcaatgttatagtttgtgaacatagtcttttttgtatatgtttgtgttttctgcaaaagatttcggtgctgcctggcacagtagctcatgcctgtaatcccagcactttgggaggccgaggtgggaggattgcttgagcccaggagttcaaaactggcttgggcaacaaagtgagaccttgtctctacaaaaaatttaaaaattagctgagcatggcgacacgcatc

SEQ ID NO: 70609 - DNA, 1716 bp, Homo sapiens
tctgtgccagtgacttccaagtcagtttacagttccctcatttctgcaaagctccaagcctcatttccattttttggggttatgtattgatttgaaatgaaatattaaatgtattgtaattttatatttaataatgtcttttaagtagtaatatagtaaatacaagttcaccccctttgccatagaatggcaactactgtattcacgttaacctttgtgatttcttcaaaggatttcttattgttcaaatatagattttcatagttgcaattcagtattataattttacgtttatccgttaacattagagatacttatctttagactttaccagcatcctttttaactaattattttaaaagtattattaatttggtggtaagacaattttacatcgtcaggaatttctttaaattcaacctaaaacaggtctatctttcttcatcaagtctactcttctcattgatgttcctgtttctgttaatgatgtattaatctttagaatcaagttaaacattttagttattgtttactcattccccttgtctatgcataatccagtctgtcttctagctcagtcttttctttacaattaccttggcatcagttcttttctttgccactttttactggcaacctagttcatacctttattattttattttattttatttttttgagatggagttttgctcttgttgcccaggctggagtgcaatggcgctatcttggctcactgaaacctccacctcccggattcgagcgattctcctggctcagcttcccaagtagctgggattacagacgtgtgccaccatgcccagctaattttgtatttttagtagagatgcggtttctctatgttgatcagactggtctcgaactcctgacctcaggtgatccacctgcctcggcctcccaaagtgctgggattacaggcgtgagccaccgcacctagccttatttttatccctagagtatagtaatagcttaattgtttttcctgcctctattctctcccttatttaatctagcatgcatattgctgtcatattaatctttgaacagtatcattttgatggtgttattcctctctctaaatttggatatagtacattttatcatttagcttatggttgatacatctccattgtgttgtatcctttatagaaattggttaacttgcttacgtttcaactagatctttacattttttatttccatgcctttagccatgccttttatcctctctccctcgtttgccaattaaaattctagtcattgttcaagattcacattctcttttctggggtgttcactgtaccttatattctgcctctcctgcaataaaaacactttttactgaatagtgtttgtgtttgtcttcccttgtagcctctgaggacctaatcttccacaatttttgtatttccagagcctagcacatagtagatgctcactaaaggtttattgaatttttatctttttacctcatcaataggaagttttagagttatttttatgttgtgagatatatttttgaaaccttcgcatcagatacttagcgtattgttcttgcacataatggaatttgtgtgattatgaaacaaattaaaaactttgttgtagatttcaatatattttaatatcttgagattttaaaaaaatctttttttttttttgagatggagtctcattctgtcacccaggctggag

SEQ ID NO: 70610 - DNA, 1111 bp, Homo sapiens
atgctttgtgcatattaaagttttatagtagtctgattgggatctctcaatgttagccaaataaggagaaactattggcaatccagagataatgttgccttgcctttaacaggccaaaagcaacacaaccacgtagagttatgcataaaaagcaatttttaagtgacggtaataggtgacaaaacataggctttttctattttcttagcgggcaacttggaataactgtaatagaaaatgactttgcagcgatagcttccccttaacaatgaaaagacttgtaagctatctcaaagttgccttggttgtgtgtggaagatgcatagccttattttgaataatgttgtagtaaaaacttgtttgggaggttgaaactcaaggctttatatttcatgaatattaacttgatgccttttaaaaaaaaggtgtgtagtgacatttttccttgtcctgcttactgtttaagggagtgatgaccattttaaattttgtgtaatggaattctcttatcagacttggagtatagcctttgtttacaaagttgactggatatattgaaatgattgacacattgcaggacaaatatggaattaaaaatgtggcacccagtaaaaatatagcagggtgtctagcgctttctcaatttcattaatttagattctctaatgcatagcaaactttttatttgggtgaagtttatttaaggcatatcataactcgtaaaattttaaaaccatggtgttgagaatgaaggaaacttttggcattaaaaatgataatgtaattatataagatgaatcttcaaatttctttcaagtgtactttacacgttttagtgtgaaacagattttgaaagacgattattactgtaggaggtcaggataattggataatggttcgcatcaatatgttttattcaaattgtcaaatagaaatttaaagttactattgttgtggaggaacccagttgtattggcttagaggaagacgaaaagttttgatatttacattattgtgatactggtttagggaggaagagaaaatacatttaactgccttcttaagatctttttttctcctctcaatattcacacgttacaagaattgtcag

SEQ ID NO: 70611 - DNA, 1348 bp, Homo sapiens
accccacttttaaaaggttattaattctgacatgcccaagttcatctgagttccttagaaagatcaaccagcagcacctacttcacgacctatcctccattccattcaaataacgcggccaataggaaaatcctccgccctgagccaacgactcggcgtagctgagacagcacgggaggcagatctgccctgtagagccttgcggttccactgctggcctccggattcccgggagcccccagcccgacaggacaaccttccttccccgcttcctcctttccaggtctgtcccagcccccgctgcctgggccacacccgcttccctctggtggcccagccaccaccgccgcagttcgcgggagcgctcttcctggggcgggcacaggcccagggcgcatgcgcactggtcgaagggcgcctcccagtccggatctcgcgaagttacgttagattggccgccggtgacgggtggccgtgctgggggcgggagggcttctgtggtaggaagggaggtccgctcggccgggtgcgccgccccagtgctctgtgggatactggaagtctcgagcgtcggctccgggttcccagccctcctctggcccgcactcatagaaacattcacacaccccctgcctcccctctcttccctctccgcctcccccttccccccctcgcgataagaagacccggcggcaggagaggggatgaagatggcggacgcgaagcagaagcggaacgagcagctgaaacgctggatcggctccgagacggacctcgagcctccggtggtgaagcgccagaagaccaaggtgaagttcgacgatggcgccgtcttcctggctgcttgctccagcggcgacacggacgaggtcctcaagctgctgcaccgcggcgccgacatcaattacgccaatgtggacggactcactgccctgcaccaggtctgtgcgccccgccgccggctctcctgaccgtgagggttctcgtcggcctcctgctcgggcctgccctcagttctccacctcttgaggctgggggcggcgggagactccctgctgcggggtgagggggcggtttccccagagggcgggagggagagctggtggaagggagggcgctgggcttgaggccccccttcagaacagttgctggtggagttgggaaccgggtgatttccggggcataggggaaaaggaactgtggtcgtttggggccccagggccattcgtggataagtctgggatttggggtcgagacaaggaggggtgtagtggggttgtgcctgggccccggtgtcagtggtatattcggaggggtggatgctgaaggaagaaaactaacaaggggc

SEQ ID NO: 70612 - DNA, 1051 bp, Homo sapiens
tagtaaatatgttaagaaaattaaaatcacagaatgaaaaagtgatagcaatcatataaaaatgttgaattagaatgcatttatgttatcataaattatgataaaattttaatatattagagtaaaagcctatcttgatctgttaaaagcttgaattttagaaaaaatataaaactgattttattattatttaaaaatattgggtcttgactgctcaagatctcctacatatgtctagcatgagcatcgttttacttcgctagaatatttcaagagcagtctgaaaatgtaatttgtaattacaggcttagtagacctaatttgatgaaattttctcttaccttggtttacttaatttataaaaatattaattttcaagtttatcattagtaaaaaatactttaataaggagggttttaaaaaattaaatatttcaaagacagtatttgatggaaatcgtataataccactcttagatcaaaatctcttaaattctaaaagatgattttactctaagtgtgcatacctgtgtatgtgtatgttaaaatgttacaggatacaaaacatgttggtacataataacagcatcaccttttaccatagtaatttaacttcttaaaagcatcctgagttctcaagaatttaaggaaagttaagtaacttgctaatgctcacttgccatgcagagatagcagatctaggatgaaaaaacagacttactatgcttgagagtgtatcagtttctcattgtgtcacgtttcctccccaattaatcctatcttatcctcataataccagtgttacagatttaaaaacgagctgtgcatacataaatatatacatacacatatatgtttgttagccttttatatttataaaagtgggttttattttgttttttagccctggagtttattcatttgttaatgcatttgtttcttctttattttgttcattcatccaatatttactgaatgacctctatggaccaggcactattccaggtgcaagatgagagtccagatagagtttaactctaaaaaacaatgtt

SEQ ID NO: 70613 - DNA, 1048 bp, Homo sapiens
tgtttgactccctggatctctatttctgttcttatagagaaatggaattgtactatccatccatattatttggtagctcattttttttcacttgtaagaagtgttttttccatttttctaattcattatttttaatgtatacagaatatttaacatattgggtgaatatataaatatttcctaatcctttcatattggcatttagatggtttctctttatttgcttttataaatcggcagatagacttgcatctttgggcttggcattccaaggatatatttttttttcctctctctctctctctgtctctctctctgtgtgtgtgtgtgtgtgtgtgtgtgtttctctttccttccttctggtaaattcttagcagatttcaatgtatattatccagccattctccaaaaaaataataaatattgtaagttcccaccatctttttccttatgaaatatttgaagaataaagataataacttagaggacactcaacactgaattctgtgaaatcttagtattttgtcacattagtttcagatctttttatcataagcagtaaaacattacagacacaattgacgctccctgtgtatctctcccaattacatggtatttacagaaacaatcttagaataatttgtaaggctcgatggaaaggaaaagttctttttggacattctcaaatgattgattgtattccctctttttaataggagctcatattcaacatctctccatggacatgagctaagtgttgagcagaatgagttaatgaatatgctctctgccttctgggagcctcgactgtagaggagcatttcatcagaacattgcagcatgttgttttgcatgagttataagctgaaagagaaagaaatggatagttaagataaagatgtaatatgaaaaaatgaaaaaatgtatagtcctaaagttctcaggtttagaaaacattaatttcaatccttgtctattgctctcctgtcttcctcccatttctccttaaccagagcaacattaacaccaggtcagctagttggggtcc

SEQ ID NO: 70614 - DNA, 1047 bp, Homo sapiens
ttattaatgcacagatccatttttatgttccacagaacctcagattcaacatgctccaaacccagtcatcatctacctccaattcacaacctaagtgtgctctaactccttacttaggcaccttaagggtccttatagttggtgctttcttccttctctaaattcagtcctcagtgggccacactttttgtacctcttaaataattctcaaatctctctactcttctgtttttcttggcacctgaccctgaaattctttgctgcatctcctaacatttctggtgttgtaaatatgtcacattatatgcttgaataatacgacactgtttggtgtgtcccagcaaactccattctttttccttcattaatgttcatctctctacctataatgtttttcctcaatgtctttgtctggttaatttcccatcccagccaaaagtttatctctttcaggaactcttttctgaaccctaagtacatttgttctgtgtgccttactcttatcatttatcatattgtaattaaattgtctgtttatgtgcctgttccccaacctaatctataagctccttgagaaaaggagcagatctcaataatgcaaaaccctctgaactgccaaagtactaggcccataaaaaaggcttttaaagtaaatggagaagtaaatatatgtgcattttgatgtagaaagaacaataaacttgaaataggaagatcagatttgtactgtgacccaactacacatcaccagtttgagtcagaacttcagatttccatgctacaaaaagtgtttaatactaacacctcatagggtaacttgtgatgattaaagaatatgaggcaaataaaaactaattaatgtataaaaaattaaatatggaattacttgcatttgttttatccagaatgctaaaagatgatcatttctatacatatatgtgaataatcattaggataattagagtaatttactaggaatattgacaaaataatcctacacatttttgagaatgggggaataattgtcagttattaatatatttgtta

SEQ ID NO: 70615 - DNA, 1020 bp, Homo sapiens
tcccttctctattatcttcttcttcagattttttaacatgctcaacatattctgttacatcaacattatgcttaatggcattctatactaattgatagccacttgatctatggcacaaggtattctctagttatttttaaaagattatattgtactttggtaatatggtaaagctttccagaattgaacacacattttttaaacaaaaaataattttttgctcattttcttgttcatatgtatgtctaaatttacaacttttatgtgttttcttttatacatacagtttataacttttaacttttctaatgaatgggcttttctaggggttttaagttcaattaccttcttcaaagccttttacctatttttgaagactattttttttttacttaataatgtaggtaataatgtaggaaaggtagtcaccataatacacaatacacttaaatgacaggcacacaaaacatgactctgttggaagaaaagttgatatatgatgacaagttaattttatattttctttccagactcacaggcaatttaagtgtttttgtttcctcatacatatagattcattgtcctgctttttgatttggatacagacttttgagtacacgtgattgcactcaattgaaacatgtcttcagatggagtcacttcagctagggtggatgtggcagagtgcattactgttccaactctttactccctctccagtagtagaattacatccacactctgccatctatctttgaagtgccctcctactattgggataactgtagctctccatcacttggttctaggtttaaaaggaccttgctttggctagatattagaaaatgtaatgtaaaccaaggcttgaaaagcatttgtgtaattgggtcttctttcttggcctctacattgacatgagaagaacatgcaaggccagcattctgtactgttcccaggaggagaatcataaatgcatggatcagatccaacccagccaaactgactgcagatcagtccact

SEQ ID NO: 70616 - DNA, 1027 bp, Homo sapiens
gacgctgacttcctcagcgcagccagcactgtctccggtggcaagtcgaccagctcctcccacacggattctgtgtagaaatccacggtatgtgcattggaaatggacagggcatccctcaggaactgcagcagtccctgcaacttggcacgcagcgtgggcaggtccggggtcaccgggagagggcaagaagccgccatgacgctcaccctccgaggctgtaggtggcgcaaacatggccgtgaggcgccagctcggcccaaattagcacaggcaggctcagtagagctccgagccggattccttctgagcgattgattgcttcggcttggtgacgtattttgtgggcgtccgtcgtggtcttctgatgacgcagttagtcggctgcaatggcgccggtgaggcggtccgcgaagtggcggcctggtggtattgaggcgcgtggtgaaggggtttccactgtcgggtacaggaataagaatgtgagacagaagacatggcggcctaaccacccgcaagccttcgtggggagcgttcgcgagggtatgtaagaaggcaaccatttgcaaatcctcaggcttgctaagttttaggatataagattcgctgaagcttggaagaaggatttaggaaccagacccggtcctacttggggcaagggaattcattcctgagcccgctaaagctgtgagcttcgcagagctctagataggaagacggagcagtgttgctattatttaaacgtcttttctgacgtaaccctgtatttcatcagaacttttttcctatatttttcctgagaaactgagcagagagagtctatgaccctgtgaactcttgcgcatgtggtaaggtaaaggatagagaggaggacagggccagaaacactgctccgaattcttccttattacaaatacccgaggccctccagccttcgctttaatttgtgtttgtcattttgtattgctgtctgtaaggtctcttagatcccacttggaatatataaatgttaaattcagtcttccga

SEQ ID NO: 70617 - DNA, 1103 bp, Homo sapiens
caattaccaaagatttaagtcaaaagtcaactgctgtggaaggcaaagccttaaaatgtttaagtttgcattgaataaaagtaaatttccattttagaaaacatgttcaattcaactcaacctattgagcattgtctatcagagttttattgataagggagaaaaatcaactatgaagctatggcagtagtactggagagcattaacaaggtttgaaatacagtagtgatgtgggagggggttttcaaatgaaggacatttttacatcagagttgatgggtggcttagcatgtggattgatggcacaagaagcatttcaggtaatgtaaaggcttttagctttgccagtgggtgagtgataaggctattaaacaagttagaaaatagaacaagggaaaggttttgggagcatgaaaatgttcagttgagttttgaaccttttgaattgaagacatctgtaggacatttatgcaggaatgaatacaaaatacttctgtgtcattgtgaagattataattaagaggacactgttgatttcttcttgaaactctgggccatgagacagatctaggctgtgtgataatgatgttagtgaccttttcccaaccctgtaacaacaaaatctcaaatttagtacataattgcgttttactttatgtcacattctaaatgttttaaatcacctttttctcatcctgagattataaacattccctgggctattgaagtccttgtagtggcctcagtgattgctattaccatggagccttaggagaatttattttccttttatagttgatgatgctacaaactgtactgagggattgctgtcattcatgcaattcattcatgccttgtgcaaagtattgttgctttacaactgggcataaagcataggtttactttgtttcagcaaatagatatcataataagattttacaaagatatttctttttcagagacattaattattttatatgtaaaatgactttttaatttcttaaaactttttttttgactcagggtcttgctctgttgcccaggctggagtgcagtgtcatgatgagggttcactacagcttcgactttgcaggctcaagcaa

SEQ ID NO: 70618 - DNA, 1785 bp, Homo sapiens
tcagcctcccaagtagctgggacaatgcttttctttactgctgtcctgcttgattttctttgtttgtccactgtacttaacaactgtggcatgctaatggaatgtgggaattaagaccaaggtcttaattcatactaccttggattcatccacctagtgtctgtacaaactttgatacattacagccttcctacgtctcagttgtttcctctgtaaatgaggataagagcattatgtctacttataaaactgtcacatgaaaggtaaagtgcttagcacagtgcctggcacatagtatacatacagtaaatgttagaataatagggatgaattattgtaagacctaacagtactctgttttccttaaagtgctgtataacattcaagtaggatgacagacatttatttttatttactaattataaatattatacattcagtgattgttttactttatttttatttttaaaatattatatgtttttctgccttgagatttttataatccaaggtgtatatatatgactcttctatctttgtccttgtacactggtcccttgtatacaaacaaacaattgaaaaaaataaactgagatatatcctggtctcatatttgtagaaaataatctctcctgcctctttccttcccttcttcccttatgaccaattagcctatcttttaagaacccatcttataacttgtcttatcagaaacctctgtggactagtggtatggggtacataaaaagtaagagtaagtaaagatgataagtaaagcatgtataaagcagaacagggacttccagtagagggagatgtaggccaaacaatcaagccatataatatgcaggtgcgataggcagcaaatttaaagttttcccttcataaaaaatctaagtactaattaatttactaaatataagttaagtaacactggaatttctgttttgctggttgccaaatccaaagcgattatacaagtacctagggaagaactgtgaggaatatatgtatgtattgctattgtcccataactttctcacataactgtttcagagatggaatgaagactagatcataaacagctctctctctctctctctctctgtcttcctccctccctcccccctccctctctctgaatctttaaaaatagcaagtaatggaagttacaggctggataacttgaaaacaaataaagtacagcagctatatttccataattcaaaaatattttttcatggagttctagactatctgagtaaaactagggttagaccaaaataccataaactgttagactgaattagaaaactacccttttttaaaaaaaaatattgttgtaaagataatattgtaactcagatctttaaatttctgaaattgctgagacctgtacttaaaggaaattaacagcatttaattcatgttggattggatttttttcaagttttttctgtaggatagttaagttgattttaacgtttacatttccaacagaaatatcacaattctttcttttggcaacattgtccaatagctaactattataatggtccctttgcacttggagatttaatactcttattctatcacactctacaaaattgctgccttggagcttggggatgttgagactccccttaaacctgagaatttcacttaatagttgactgagttttccagtttgtatcatggctaaatattttgatgtggattttattacttttggctgagttagtaaattcagtttataaaatatccatagaaatttacatcattcac

SEQ ID NO: 70619 - DNA, 1780 bp, Homo sapiens
ggacagttcgtaaatttaataaatacatcactattcagattttaaccaacctaccttccttccttcctccctccctccctccctccctccctctctctctcccttcctccctccctcctttccttcctccctcccttccttcctcccttttctctctctctgtctctgtctctttctttccataaaaaaggcctgattgtaatttggagtttcaatttttaattgcataaaatattaagagaaaactgggtgttccatatagctaatcgtttaaatagtaaatataaatggagccattagatatattgccaaaattcacaacaaaatgaaaatattggcatttgttatacaaattaagtgttcatttgttgtttattaatatcacactaattaaccattaattattgctgaagactttttctgtcttcacttttttaggtatgactgattttcccaaaatattttgtgaaacttctcagaagttggtgagtgtggaagcctttgctctggctgcgaaatactattctgtacaaaacttgggaatatgtactccttttgaacagttgcttgtagcccttcgaggaaatcaaaaccagagaattggtatgtctatttatgtgtgtgtatgtgtgctttttaggtacttagaagcaatactttgttcatatatgtgtatctttccaaaatattattaatttattgttagaccttaatatataagccctgacaaattaactattgtttagaagtgtaggttttccccttgtactatattaaacagaacaacttgtagatgtccacatttttttcttgtaacttcttgtaactcttgtaacttctactgcagatagttcctgcccctcaaacacagatcacagtgagctactacaaattccaaaatctacattatttttgttgcagcaggctaatgttctctatgggaagagggtgggaagagtggaaggggacatttggggatgtggggagaagcatgagtgtcagaaagtggggatggtacaaattaaaaaaacaaatatgataatgtggtagattaaaactcagccatatctataataatattcaatgtaaattgtttctacatgccaattaaaaggcagagatcagaaggctgtggttaaaaaaaaaaactcagattcttttatcttacacaaacctctttcatatctcttatttgatccttatttttccccacctttttattttgaaaatttccaaacctacagaaaagttacaagaatagtacaatagaccctgtatacttttcacctagattcaccatgtgttcacattttgccacatttgttgtagttctcttctacacacacacgcgcacacacacacacacactctttttctgaatcttttgaacataagttatagatattttagcattttactctcaaatacttcactctgtatctcaaaataacaagggcattttcctacacatctcatagtttattggcacactcaggagtttaactctgatacagtaatattgtgtaataagcagtctctattcaagtttctttactttttccaagaatatcttttagagccatttttttttcttcatgcaggaattagtctaggctcatacctggcatttagttgtcatgtctatttagtcttttcaatcttaaatcgtttcttacccttgcttttgtttttcctgacagtgatacttttgatatctataggcaggtttattttattgtttccccaacattagattcaggttatgcatttttgataggag

SEQ ID NO: 70620 - DNA, 1189 bp, Homo sapiens
cattataaattattttatcaagcataaagttttgcagcagagggaacctgtcatacacagtgagaaactccactgggaagctcctatcacagtgtttgccaaaccaacacaatgttttccctcagcacctgggttttgccattgtatagtcatgcataaaaataccaggacagttgtatctggactgattcattaataaaaaatgttttaatgtagatatgactccattaaagtaatatacatgtcttttaaaattgggtgtttattttcttctttatatacatcacactttatatacatataccttgagatcacatttccagcctgcgtttttaaccaaaggataagtgaaatactagtacattgatcatataaaggaattagcagtggagatgagaagtagaaaaaaaggatattgtaaatcgggctatatatacctggtgtattaggcagggtgatcatacacatacatgtaattagatttactaagaatgggctgacacaattatggaggctgacaagttccacagtatgctctctacaggctggagacccaggaaagccagtggtgtacattcctgtgtgagactaaacgcctgagaatcaggaatgccactggtgtaagtcacagtccaaaggcaagagaagacggatgtctcagcttatgcagtgaggtagtgagggaaagaattcaacctttctctaactttttgtcctactcagaccctcaatgggtttgatgatgcccacccatactagggagggcagtctgctttattcagacctcattcaattcaaacactcatttcttcccaaaactccttcacgggccatccagaaataatgtttaaccagatatccgggcatcccatggctcagtcaagttgacacatgaaattaaccgtcacacttggcgtggcccagtaggaaacaaatcagagataataaatttaatcattgtattgtaatcattaccattttactattaccaactctctccgtttgtattttctgggaaacaaaacttcatacatagagtctatatctcagtgatttaaattgaagttacagtctggtgaaggcagaaagaaagtagcagtaggggctcagtccatatttatggaatgaattagttaattgccatgaacatataatcatcgtgctgtgattttctttaaatgtcttgaat

SEQ ID NO: 70621 - DNA, 1013 bp, Homo sapiens
gaacatacccccccatcccttttaagtacgtgacctggaatttgcacatataatttctgcccacattcaactggccacaacctactcatgtagctatcctagtagttgcatggaaatctgagaattgcagcctctagtctcagcagttgagttctctgttagtactaggaataaggagagaacggatgggtaaagggaggagtagctgttttattggttagtaataaaccagtttgaataaaatagcacacccctgtctctctagccctttactttttacagcgagatctgtatttctctttttatttgtcaggaaaaaaataaaatacttattgtaaccctttcatttagcaataatcatgtctcacttaaatcataaaagcttcagtaaaacccaaaccagtctttgaagtcatcttggaaatagaagaagtagcccagagtccctaggacttggataggctgcaagggctctatgagtcctatgcaattgtaactgaaattgtttgttaatgtacatttatatagcatgagtgtttaagagcatgagttctggattcagattgcctgagtttaaattccagctctgccttgtgcttgatttgtaagtaaggcaattgacttaacctgtctgtctgtgctcagtttccctatctggaacatgagaataatagtatacctacttcacagaattgttctaggaactgaagctagttaatacatttaaaggacttacaatagtgtctcaatgttaagtgctgtgtaaatactagcatttttattgatacataatatttgtacatatttacagggtatatgtgatattttgataaatgcacagaatgtgtaatgatcaagccagggtattcaggatatccatcacttcaagcatttatcatttctgtgtattgggaacatttcaaatctcttctagctgtttttaaatatacaatatattgttgttaactatagctaccttgctgtgctatcgaatattaaaacttatttcttca

SEQ ID NO: 70622 - DNA, 1028 bp, Homo sapiens
gacctcagacaatctttgtatttctttacttagggtagttatttctttcttgttgtgactcctagctgttattatctttattccacctccattaagacaaatctacattctcttctttttcacacatatccttcctgactcttaaatgctccagagctgacttggttggtcttgaaagtatttctcatttttaactggtaaggactctatttgggcattagcttattgttcattgattataacttttctttcttattcactactgtttcttttatggtttctttttttttttttttcagaattactttcacaatgagaattagcctcagggtaacactttcgctcgtaatggaaaaattattaagtcatcctctgtgtttagcaacaaaggtttctgacagtcacgtgtggttccaacattctggtatttattttatttctgttttttttgtttcttgtgcttatatatgtctacatttttttcagctgcctactgaatcactcttctatcgtgctgttcttcaggatattattaaagattgttatggcatcaccaaatggtatgaggattttattttaataagaataactatgttatattgtaagtaaagtgacttttagtcttcaggtgaatttatgcagggtcactgttattagtagaagcaactttgaatttgagcataatgtcaataacaagtacacaacaactgtatcttaggttaattatcattaaagtgggggctctaatgattccttcttgtcctgaaagcttgttgtaatgataaaataatctatgtaaaatgtactttagaatttttgaagtattaaaatattaaatagttcagtgacgatattatatgagcaagagtcatatttagaatgtttcataaacagcataacactttaattagaacagatattgatcataaacaactattatagcataaacacttaactctaattagaacagatattgatcacaaacaactattatagcccttcaggtctctgctagtagaatactagca

SEQ ID NO: 70623 - DNA, 1037 bp, Homo sapiens
tcctctctaacctttcatatctgctttctctcctctatcaccaggttttcatcagctcttactatctaatatattaatagtacatgttttatttatttgtgttgttgatcatctcccatctcaaatgattttttgtttcctttcgttcaccaagtaatagaaccaaagaacctgactccagagtattttagaaaagcttttgaaagaggataaatcagactttgattattctgtaactgttctccagattgttgtcctaaagtgcaatgattctgtgaaaatacctgggaagaaaagaatttcttaaaagtgaatgcttcatgcagtatcctcctctttaagacttaagtgcgtatttatattttaaagactcctaatagtttggtgagagacagcagcgtgtcaccattaagaacataagcacaggagctctactgcctggtttctaatcccagtatccccactgcatcatatcactgtggtcgtggtcatattattttatatctttttgcctaagttttcccatctgtaaattggggttaatagcagtacctacctcaaaagggtgttttgaaaatgaagctaaaatctaaaaagtacttacaacaatgcctggaacatactgattgatttttattattattagaagaaatctctttacctctgttgaaaccatgcttacttgttcatacaatctttcttctccgaactgtgtatagacaattaaacactgttttgtggagcccactctgaaaaacacaggaaaatcatgaaaataattattctgatttttagggtctcatttgggatttaagtgattatttgcctatcaactccaaaggaaatgacaataacaaaataaatattttgtcataattttctttaatatcacaaatattgatagggaactataaaatactttcaagaattcttctgaaatattaatatgtttaaatgttaatattttcttttaactacagtaaacagtttatcttaggaacacagtgtgacatcttttctctttggtgaatggtttt

SEQ ID NO: 70624 - DNA, 1019 bp, Homo sapiens
gaaaaaattataatgaactactacgagaagtataagcctcgaatgaatgagctggaagcttttaatatggtaaatctcagagttaagcatattaaattggatatgttgctagacttgaatagggtcctattaaattttattatgggctaagcaatctatgttgtttttctcttactgtagaaaaactgttttggatcatttcctatttcaggactatattaggtgtcagtaatgtaataaagagaacacatggtagatttctcttaaaaaagtattataaatgcacaaaaagtttcagagtcctttgaacacatattggtcccaatgcagttatttcacaagcattccttttaatgaacttcattcttagtacccctttaaaagctttctatcacatatgactgcttgttggagtctacctcacagtcacttaaaggacattcttttcctattattaaagaaaaccttttgatctctgaaatattcattttctgaagatgtacctggattttggagattcagcctatataaacttctgtagatacatttatttaaacataagtttaaggaaataagctagtcttttttttttaagtaccaccaacctacctatctaatttttttattttagttgaaagttgtactggctccctgtatagagactttgattcttctggatcgactttgttacctgaaagagcaggtaaattatgttattttaaaatacacaacaaatatcttattaaatacagtaatatagagccacttatatctaggataagagtctttcacataaaactagtaagaaaatttttctcattatattttcatagtttaaatgttcattccatccctttttaaacatataaacatatgtacaacagatgttttcagcaaagctgctataataaagtttacattcttttaattgtatggtaattactatacataggcagtgaacataaactgctatatatgaaatattgtatagctgaaatttataaaggctagacataaaa

SEQ ID NO: 70625 - DNA, 1045 bp, Homo sapiens
gctgcagggggcacactccgcagtggctctgaagcttccctctttaaggctcaaagtgcgtcttggaggaactggttcagcacctgatggtttaggcgacacgtaaacattaacacctaaatcaaacaccggggacgtgaggcgcgctgggcgggccgagggagtttccgctcctagtttgcagcaggttctctcccttgcttctcggctgttggcagacgcttgagtttcttagcggaaatcccggcaatttgggaaactgtttaatgaacgtattaaattaaagtcttaggtattccttgatgcaacaaagcacattaagtgattttacgtctggttgggaggaagcctctcctcgatccctgatagatcctccctgtcccgtttccttttattgatgggacacttttatttcccgaagttaaaacacacgtttgatagttgccaaaattgtgaaaagggagatcgttctctgctttaactttcccttttaacgtgtatagacttttactttgagccaaaataatgctgctgatggtctctcccgccgccctagcctccttcaccaatccattgggcagcactttataaaagcctcggctttctcatttctgtttgggagttgtacattagatgttagtggttcttttgtactaattggagaagaagacgcccctagagactgaagttgtcttctgcacttaggttagtttgggtggctaatgagacctgaactgtgttgtcaaagaaactgcatcgatttctggaaaatgtcaccgttgtgttggtgtctcttcctatcttttaaacgttattagtgttcagaaagtgatgaaaagcccctatatccattagggaaaattccaatttgtgtccttccggtgtcttaatctgattacaattaaaacagatgcataattaaaatatattagggataacagcacgcctggctaaacttattaaccgtcctggggtgtttcatgctccattgaaattaaaccatccaaaaagtgagcacagatttactttgacagcttttcagcag

SEQ ID NO: 70626 - DNA, 1126 bp, Homo sapiens
tttacccttaaggctctttgaaaaatctgtggctgacaaacctactttcttataactttattatactcatctgaagtgcttttaacacagcaactttcatctgttaacctttctggttctctcttaggagcagagtattgtatcagctttggatacttattttaatggcttcacaaaagtgacaagtgtggcagcctccaaggaaaggaacggtgggttattgaatgtaaagacctctcctctataaatagctgtcctcatttaggagctcagttttttaaaaaagtggagggatatttcagcaggactgcataccttctttttttcattgggtgaaaaaggcataatattttgaataattgctggtgtaattacatacagtgctaaatgtttctttgaagatatgatttgtatgtgcttttgaggaataaacttacattcaataattcacaaattatgaatattactacatatgagcttctttgtatatgtagtgcatagtacaactacagcactgcttaccttgttaacaagcatcccacaaaacattgtgcattcttacctgtactttagcaggtactgtaaagggtttgaatctgagagtctaatgatagatctatacaaatgctgataggttgacctctggcaggtggaattccacttgaatttatcacttgattgttaccttttaattattttactcatgtttatttttattgatactcatatttaaaaactttcattgggagtctgttagcttcttttccaaaacactcactcctaagattcatgattggtactttggcctggccttattttgggtctgtacttactggtgcttcattcatacatgcagaagctttggaatgcctcttccaaatgtctctttcctacttgttcaggacagtcgtttttcttggatgtctgaactctttgagttgactagatttgcctcaacttgtcatagggattcaagatttttgcctcaggtttttggccgtattttcaagacagttaggtccaaaaagatgcagctcttctaaatttctgtctcaccctcttcctctctttttctcctctgtgtttacctttccagttatatttgtcagttgttttgatactcaag

SEQ ID NO: 70627 - DNA, 1057 bp, Homo sapiens
ggacacttgtcattacagaaccattccgaagaaggggttctcaaagtggggctggcagctgaaattagcctatagtggttcctctgggacatttctcatggttttgtaaattggtttttggctacttctgcattcctatcttcagctttaagaaactaggcctgttgccttcagttgtaaaatgtctcaaggtaaaatagttgggttcaaatgttttttcaagtatatttcctttagaacaagttcctcctctcctgccccaaataattaactatacaactgttctcccaaagcaatggaaaagatctcattttgacaaagcaagctgtttatgacaaattttccaactagaaatttgcagaagaaaagttctcaaatgatgaagaagcttaatcaggcaaaaagacatttttatttgcagaaataggccctttagagggaggcaattatttatagctgataggaaaaactggtatacctgaattcgtttggtaaacttcatttaaaataggaaggttattcttgttattctagtgaaagaaaaaaaatatggtactgaattatgttacagatttatattaaagaaacaaagttttatacattaaaccactcttacagggatatatactgatttaactaaagaaaatgaatttgagatttaataaaaatcttttaaagataccagtgtgcagcttgaaatcaactatagtgtaccatgaatatctatttgaaatacccagttgaaatgaccacattaagattgcttcctttcacctctctatttaagtttaaatttactttttttcttttataaacagtggtgttttttggcttttgttccatattgaacagaggatgaaatcagtatttcaaaacctcttgtatgtcatcaggataaatagtgtagtatttctaggagggaattattggttggccacttttcaatacactcctggcatgatgttgaggatgcctgtggctggcaaggagttttagacctggccctctgataacttgcctccctgctttcatatggacaattgactttttaaaagtc

SEQ ID NO: 70628 - DNA, 1027 bp, Homo sapiens
attcggcttcatctatctttatttttcatgtaatctgtcaggcaccatgttagtggaatgtcttgtaaataatgaatcgtatagcctctggtctcaaggatctcataaacctactggacagatattatgtattttggtttcctacatgacatccaagttcatgaatcttttgaattctttccatacaacccaggatgcaagcttctggtaagacaaatggatatttattaagatcctgtaagaaacaaggcagaaaattaaagtcattaggagtatagaaataaaagatttcttgggctttcacctctgtaaacttgaggagtttggctaagtcagtagttggaagcgtagtaaggtcagaagtcaccgtcaacttccgttaaatcccaaagcttacaattatttaacagaggatcacctacgctaacagaatgttgggattttgtttgtttggggttttggtaaataattatatacattcaggggtcttagtactgggtagcttatataagtccaaaaatatgattgttagccttgccttttgattaataaaatgggggaaatatgttgttaaaaaaaaaaacgaaaaagggcaagaaactatttgaaaaccaggcattgggttgaattggaagtgaatacacttcaaaaggtctgaggagaaaatattagaaaccactgatttggataatgtctaatagctcttttaactcttagtcttttacctaaatatccttgatatttacagcatagtaaaatctggttttccaaggattctgatgaaagaaaagaaaaaaaatgaaaacagatggacaatctgagaagtaactagtgattgatggtaaatgtgaacaatgcttcagaaaggaaatgaaatgtctgcagcagatagaagtgtgtaaattttgccttcactttagagctagaatcactatgagtggtagcatttcagaatcagaagaatggaaagctcagttgattatcattacacataggagtaaaaggaaaggttcacatttttattgac

SEQ ID NO: 70629 - DNA, 1039 bp, Homo sapiens
agtatgaaatgctatctcgttgttttatgttttcttgatgattagtacttttgaacgtcttttcacatgttttcttgtcatgtagttatgaatcttgaataaagcaaaaagctctagattttggcttgtttgtcttgtccaattcccaatggcctggttgaaaaaacattttatttgggtctagaaaactcagcaaagaatgatgtcacagatgtttctcacctctgctgtgttttagctgtaagtagatcaagaaaggaaagcaagactagaactaattgctcatcaagaaaggatttacaaatataagtggttctgatacacatttaaattagattacatttaacgacaggttttgtaaatgaagttaatttgaaagggcacacagtcattgggtttaatctgtaaacagctatcatccttcctcctccatccagtttctggtaaataaaagttactcttctagaagagtatttacttgcatgttgcccatgctgtctgtcagtggcagctgctgggtcggtttataaggggatgctacctggttagggacgaagctcatatttttgcagttttcctatggaccagaaaatattgacaaaggagaaggaaataagattttctgcttgcttttgcccttataatagtttaaattgtttttttaattttgtttttttctttctgaattaaattatggtttagccacttgaactactaaaattaaaaaataaaactagaaataagacttctttattatagttgctgctgaataggaactgtgtctcccattatgcagtgaacctattgtctgaaaaagacccactacatccaacagttaactgagataatttctaaaaataatggagtaagagcataactgactaatttagcaaactccttgacaaaaattccaagttcattttgatgagagaaggcaaaaatagagattaaaatatgcacgctatttaaatatttatggaaaagtcagtgtcttgccctgactaaatttctgagatttctttaataatatgtgtgacta

SEQ ID NO: 70630 - DNA, 1029 bp, Homo sapiens
aaattagcagggtgtggtggtgcatgcctgtaatcccagctacttgtgaggctgaggcaggagaatcgcttgaacctgggaggcagaggttgcagtgagccaagatcgtgccattgcacaccagcctgggcaacaagagcaaaactccatcacaaaaagaatcacacacatacacacacacgtatgtatgtgtatatatgtatgtgtatctctatatatatgtgggtaagcttcttatatataaacctaatacatagtttgtgctacgcattgtttgtctcttaaaatgtttttagtggtagttaaatgatatgttcaggtttgatgaataagtgtagcttcttgttttacttgaccccaataaatagaattccccagtgaatcttatcctttgcttatttcacgtcaaatatgtgcatagcacctctttgacggtggctcagagtatgtttgctgacaactggaggagttaaagtgggtggttctctgtttttataaccttcttttcctgccttggggacacacgttacccagaatcacactggcttctcctgagtatgctaaactcttttaatttagactgcttctactttagaaactaatactcacacatttgtatttacactatgagaaaacaaaatccttgccctcgtagacttacattctcatgggagacatgggaagcaaacaatttttttacttgcttggtgtctctcacctgagtttaaaaatctggacacagctccactttgtagatttgatgcttttttgtttttttttaatttggtataaaagctgtactgtgattgtgagacacagcctcagcacaaagaactgaatgtcttcatccctattggtccaggtgggctcctattctcttggtctcttgcagccttacttgttctgtggctcctcagagcagatataagcagtagcaatgctagtgcttcaggaacaagggtaaagattgtgttaacagatagaaactgtttgtttttctttctttctttctttctttttttttttttt

SEQ ID NO: 70631 - DNA, 1013 bp, Homo sapiens
tgctgtatttggggtttgctttaaatagggacagtgaacttcataaataatcaagatttttagggagctaggtttagcaacacattgagtcacatctcttctgtcttctgtttatccctgctcagctgtgccatggagtagcacagctggctttaaaatatccaacatcaggtgtcactgtcttgcttttattagacccctaggctaaaatcaccttgatcacttgttcctgctgttctcgagggctgctacagtgagaatttctctctcttggtcttttcatcatctttttgaatgagcggctctcttaagccaataagatagaaatatataccctgttgaccttgtggcttttcttttctgttaaagaagcattcaggcagataccagatatatgaggcggtcctttcagctgctcatcttttccactcatcacttttgccctcctaccctcaggagccaggtcattctccgtaggtgagctgtgtaaaatctattttatagacgtatataaggagaaaataatttatttctgcagtcttcatattgtcatgccagtatgctagctgaaaacataatggcttttttttttttttttgaggagaagttttctggttttttagcaaaagagactgaccatgtgtaaacattctttaaactgtttcctcactgtggttttactgtgtggagggctaaattttaaaagtaaatataatgttataacaatttgcttattaccagcaagtttttaatattgaccaatgttttatgtattgggtggcttaatggttttaactggagaaaactgattaggaagacagttattcacttctgtttgctgaactggaaggaagtcataaaaaaagaaaacttcagaagctgacttttttcaaagaagatatgagaagtttagatataacttgtgaaatttaggtctctctcatgagattgccaaaggcacagttaaattctctgggaggcccaattgattattgtgtaaagctgtttaaatt

SEQ ID NO: 70632 - DNA, 1049 bp, Homo sapiens
atgactttcactgtatacatggctttaactctatttaatagaatgttcctgtgaagctgaaaagtaagtggatcctgtttttgacttagtggtagagcttgcagtttaaataattccactgggaatctattaggaagcaaatgagagcctcctccagagatctttgagagaggcttaaggaagcattcctctgttatttgttgtgctatgttcatctggttctaagtcaagataaatattgcttcatttgtatagttgttttcttttgcaatttgctcatgagtgaaatctctttaaaacgttaacatttgattaaatatacttgaatgcttacaaagagtttttcatataatttatcttgtttatctttatagcaacattaagggactggtagatatttatgttcctcttggtgagttcattgaagagcaatctgaggctttatataggttaggaaatacactttttatattttgggaatccagcctgtacagtgcttattatcaccatttctgcagttatgaggttactcttgaagacaagaaaatatttattaatgaattttcaaattgctccttatttgtatatttctctctgcttaatgctaccaacatttccactctttggcatcaagtgttgataattcttttactgtcttctgtgaatatctcaaaaccacatgcaaatgcattgcaaaatgcacagtcagattttacatcttgcaaaggatgcaggattccatgaagtcagggaaagtggctcagtaagatctgcattaacatataaacccctaggcaaattggtatggcaggattggatcaggcaattatcaccatagataatgacaagagaagcccttcaagagtctgattgaaatatcaaaggattacgtgagactcttgggaaatcaaaacccttgactatttttggcagaaacagtgtttttgttcagattttactgtaagttgtatgaagtaagatttgtgtggtcctgttatcacttaagaaatataaattttaccttattttatatttataaaagaatatga

SEQ ID NO: 70633 - DNA, 1014 bp, Homo sapiens
aaaatgaccaagaagctgtcataagaatttaaaggaacatttaccctcatctttaaaatgtatcttaaaagagagataagattctaattacaaattttgaacagtttattttctctctatgaaaaatttccaagaatgatacaaaagcacttttatgtgaagaggatacactggaacattgaggtcttgatctcattttagtaactctctgatgtgattaattcataagcactgagttgtagctcattccttctggcaaaattccagcacttgattgttaccttataaacttttaataagagtaattttaaaaactgcacttgactcttgctttatgaaaagctggaaatgtaaaaagttaaaaatgcttgacaatttttctgagctctagtcagaaacagtggctatgcccttttatagatgacagcccaaaggcgagtttgtaaaacgataaataaattgtaaagatctatcgagtggcaacttggatggtttaatgcctatgggttagaaacccaggagttaatgtttaaagtgatttggataaatgtgaacatgtttaaatctttagtattattcctttaagccaaatgtgaacgatagttattttgacaaagtttgggttacctcgatagcctgatttttacagaagtaccgtgtatctcaaattgttaactgatgaatgggtggtgctgctggattatttcctgtgttttgtgtttttcttagttttaatttctttgttattcaagttatactatcacctcgtccaaagttgggtctcaggattagattaataaactaaccaagtaaatttgggaagtatgactaacttacataaagaaaataattggggttatttttttgtattattattttaaaatatgtaatcagcacttttgagaagctctcattttgttgaatctctaggcagacctttgtggttaagcatcatcctggaaattttttctgacagtcatttgaccaggtctttctgtttatactcagtgtcaa

SEQ ID NO: 70634 - DNA, 1086 bp, Homo sapiens
ctaagccttcctgaagatcctcccttgcctcttgtctccttctcatataaaaaggggttggctggaggcaaaccttcccttttgttgccattgatctgacactaggatattttgtagtccagtgagtagaaatgtgtcccagctgtaagattctgattgtggatttttcttcagtaggttactgatctttctttatgcctaaattcacattcttctaagtggaggatttacatttatgatttcatctgggtttaaaatctggccggaagcatggttatgtgtttaatgcaaatccgggggaagagtgcttcctactaagttgtcatttcatgaagaatttagcttacttattttctccaccatttgaaggatcctcaagggggtgatttttttctcaagggtacaagcttctgcagtaaatgaagtgaaggaatggaggagcaactgggaagggtggggaggaggaggatcaaagcagcaatcaacctcaaatggttctctcctagtcttggtttgctcaattgttgaaatatgggattgcacctctctctgcctgctatgtccaagattgtgatacatgagaatgtttataacaatattctacaagttgtagaatggagtacatggatgatgagaattctgattatagctatattttccattaattattagcagacatgaatatgtagagtgggcctgctgtaaactggagtggttcttttttttaaccagttcacatcatcattccaaaacacatgtatactacatatatatttaaaaatatacacaaataatacttgaatagtatattttgaatattgtaagtctaaaataaatggaaacccgaataatgtgacagaaatagaagttccagatatttttcccataccccagttaattattttgtgcaactctttccttttttggcatgtggaagccactttgaaaggcattggctaggggactatatcttagagaaggtgtgttgggagaacctgcatattaagtggaaaggatacatgaaattgacatggtatattatggttaagtatatctcctacatggagttgggtattaggtctcatg

SEQ ID NO: 70635 - DNA, 1093 bp, Homo sapiens
acattcatggctggcttgatgtttgcttctcaccccattcacacggaggcagtggcaggaatcgtgggacgagccgatgtcggggccagtctcttctttctcctctccttgctctgctacattaaacactgttctacaagaggctactcagccagaacctggggctggttcctggggtcaggactgtgcgcaggatgcagcatgttgtggaaggaacaaggagtgactgttctcgcagtttcagcagtttatgatgtctttgtctttcacaggctgaaaataaaacagatattacctaccatttacaaagtaagtgattgttggctcttgagcattggattactgagtaatctacttgcttactcctttgccaccatttaaaaagcaaatttattcctctgcaagcggaatttaaaataagttcctttttgatcttcagtaagtggaagtgtccttttgacctttgtactaagcagggttttagtcactgattgttttatttctctggtttcttactttcatgatttcaagggtggtagaagaataattttgccttgtaaagaatatgcacctttattatttattgagttcttatttctatatttctgcacaaattgtctataatctgataaattgtctataacgtgtatttgtaaaaaataacacggctgataatagagctagatgctagactttacaggggaaatcctctgccatttgttaatattacttttcctgagttgactttggaaaacaatccttccctttagtgcactgggaagtcaaattcttaaacaatgaatcatactcacctttttctcgtgatagtgcataagaatagaaaagtcaaaacagaaaatggttattattgagtttctccctgtggccaattaagacctttgccttagggcatatttgttctcccgtattcccttagtggtatccagtacaaagttgtttgaaggccacagaagcattttaggatccccatacacttgaagagactgagcagttttctgctagagcattaaggagaggcattgagcggacggggcatcttgagaaattgtctgccttcccatctccccatcct

SEQ ID NO: 70636 - DNA, 1065 bp, Homo sapiens
tctctcagtaactctgtctgcctttctttttgtctttcagttagcattatgcccctaaattatagttgtacaatattgtcaatccagtctatccaaatacttgtgatcaacattgtgaatcaccaccaatgtttatcaaaatgaaaactactactgtatcaccatcataatacgttggaatcatagagtggaaagggaaaaggaaaaagagtgggaagaattgggtttgggaccgagcagtactgcttaccgcctttgttaccttgaagaactaactttattcttcagggtccagagatctctggatcaatatggggatcagttaagatcgtataagtatatatgcttcaaaaaatataaaagtagtaaacaaatgtaagatacctgtcaaataattaatggaagacagactttctgacccactaagatagaggaagatctaggggctttgtatgcaatgcatattggacaaataattgcatgagaataaaaatgacttgtctggcttaaagattaacagccaactgttttcactagggaaattgcatggggaaagcaggtaataaattaacatgaagataattccaaaatattgcaatggacagtaatacatgtgactagtttagagattggcattatctccttggaactgggtagatttttgtcagtttcaggcccgtaaggtgcaaatatgcctgggaatgcatttgcccccacatcagaaaaagtttcgttttggatagatagcaagaaaagttgacacatgtgtcctttattcatcctgtgaatatcagtactggcagcaaggaagatatgctatttttttagtctttctataagtgaagaaaggaacaaatatatttagtctgtgaagtagtagtgcctgtgctcaaatagagctgtataatttgctgcttaatgataaagggagaggatagtcaaaggaaggcaaattccttccttctcattttgtgaggatgaaattagactttatcttggcaagaggtagaattactatgctgaaaacacagtatcaaaatgaaatttccctgtattatcagaaag

SEQ ID NO: 70637 - DNA, 1095 bp, Homo sapiens
tactgctttctattggtcaaagcaagtcacaaagccagcccagattctttgcttacaaacttgaagcaagtacaatattttatgtatgtgcaaagaaagatagattactaataattattattttcttctttaacaggcatctgaagaatttctgagctatccaacatggggactggttgtttgtgtctctctggttgtctttgcaatactcccagtccctgtagttttcattgttcgtcgcttcaaccttatagatgatagttctggtaatttagcatctgtgacctataagagaggaagggtcctgaaagagcctgtgaacttagagggcgatgatacaagcctcattcacggaaaaataccgagcgagatgccatctccaaattttggtaaaaatatttatcgaaaacagagtggatccccaactctggatactgctcccaatggacggtatggaatagggtacttgatggcagatattatgccagatatgccagaatctgatttgtagctgggggaaaagtcagtgggttttatttggttcatttttaccaatgaacattggccctagtaggagaagcattaggcttcacttatcagagggcaatctcaggtgttccgtggctgtgatctttaatcctaacagtatatgtcagttcaacttgagcattcttttggattctttggtttacatttgtgcagaaaggattgcagacaaatcttaggagggctgaggtacatgtttgccaggatttttttttaagtacctttggtgtattttcaaatatttctatctcttaaaaaaatggtattacctcagtttctaataatttctgggtttagtagtgttgacaattaaaaatggtatacattaaaatttataagtttgccttcagggtaacttccagtgtcacaatgagcagttctgtaagtgggtgcctctcagcacatttctatgaatatattatgtagataggctgtattgattttggtagcattgacaccttcttaggcaattagttgaagaaaactgcaaaatattttcttatgtaatagctgtatagagcaatagcaatcaaagcatgagaaggcact

SEQ ID NO: 70638 - DNA, 1050 bp, Homo sapiens
cacaaaacatggagtgttagtgaagcaactattaacttttattggtaattgacctgttttgctatggaaagaaaaaaagacataatgggaaatgattgaggataattaatttttcttcatattctcatttcatatttcctttgatattcttaaaatatttaaaaaccaccatgtaagtagaaaatccccatgtacttaaaatctccatgtaaaggactgatcaactttcttactcataattatttgtttcctaaaaatagatgtttatgcttaagaacatattatttcccgatttaaataaactttggatgcataaatatcattgtatactccataaacagtaaattccataaaaattaattattctgaaacattattttgtagctgattctattatgtttatttttaaacagcttgaaataatgctggagcccaaggtctggagagaagctgctactcaagtgttctttgccttaggtctgggatttggtggtgtcattgccttttcaagctacaacaagagagacaacaactgccactttgatgctgtcctggtgtccttcatcaattttttcacttctgtcctggcaacattggtggtgtttgcagttctgggcttcaaagcaaatgtcataaatgagaaatgcattacacagtatgaatattaatttccatttgccttttttcttagtttttatcttgttatttatacttttattgatacatgatagctatacatatttatgagatacatgtgatagttcgacacaaacatacaatgtataatggtcaaatctgggtaaatgggatagtcatcacctcaaacattaatcatttctttgtgttgggaacattgctcattcattagcttataatggcatagtcgttcacaaactatacaccaaagaactcttatgtgctcatttgtatgttgttttatttttcagaaattcagagacgatcatgaaatttttgaaaatggggaacattagtcaggatattattccccatcatatcaacctttcaactgttactgcagaagattatcat

SEQ ID NO: 70639 - DNA, 1050 bp, Homo sapiens
catctctactaaaaatacaaaaattagctcggtttggtggcgggtgtctataatcccagctacttgggaggctgaggcaggagaatcacttgaatccgggaggcagaggttgcagtgagccgagatcgcaccattgcactccagcctgggcgacagagcaaaactcggtctcaaaaataaaaataaaataaaataaaaataaataaataaaaattactttgataagaggttcacatattcttactgcaggactgcataagaaatatttaacaggatacatttctgtttgttgcacagttgaatttttattgttcattgtgaatttacatgctgctatacaatggtagtacttttctaggaagcattaagaattcacttacaggtttattggaaaagaaattgtcgcattgctctttatattctgaaataattgtgtgttacttttctttctacagttgtagaaccagaatgtgaacaaagttctgccaccacctattactggtacagggaagcactgaatatttcaagttccatttctgaaagtgggggcttaaactggaagatgaccatctgcttgttggctgcctgggtcatggtttgcttggctatgatcaaaggcattcagtcttctggaaaagttagtatgttagagcccttcctcattctgctaatcaccatttctggattcatccctctctcaaattctgttacagatttctgtgggcaaatcacacataacacttcattctaggtagttaaatattagtgaaaagtgacacttcaaaagtgtgcttacatttttaaaaagacaaataaaaacagtgttttatagtgaaatctaaggttaattataatctttccttatttcaacaagatctttaaaatttttgtgaatacttaaaagtcctttctttttgccctttattcaattagtcctaatgtttcagttctctaattaccaattagttaaattatggaaattggggaaagtggtaaaatgagtaattcattcattttgtttgtttgatatcatttgtttctctctgctgt

SEQ ID NO: 70640 - DNA, 1588 bp, Homo sapiens
tcaacgttaatgccataaaatctcattcactctaatttttctgatttagaatgcattatttcaatgagtttgtataaattttaataaatgagttcataaacattgtgtgaataagatttctaggagtttgtgaaacctgccccagaaaagaatgaattttaaataatcaattatttttatggaaaatgaaactgttttactctttaaataaatttaagctaaagctattcattaatattcttaattttatcctaattattttattatcagaaactctttgtagaaatcaaattcaagtttcagaatctagaaagtgcaaagtaatgaaattgtgtcttcttcagagctctccataattgcactatatagtaattcaaatattatctttaatgggataaactgaactagtgtattttctactgtattgaaaatataatctattttttgttgttgtttctttaggtgcatatcttttaccatatttaatactacttatggtaataggtattcccctttttttcttggaactctctgtgggtcaaagaattcggcgaggcagcattggtgtatggaattacataagccctaaactgggcgggattggatttgcaagttgtgtagtaagtttccttttgttggtgtatgctgtaatctttatagggtttcaaattatataattaacatttaaatgaaactttggagtgtgtgttaataaacaactcttttactatgttttagaaaacgttactggcatatggattaactataaatattaatatagctcaatgttgttaatgcctgttctaagtcctgagaaagacattaactttttagaaaagataatgtgtcccaaataaataataaaatgaagaggattttaaaatgttaaataaaattttatgcatttgatctcattcttttaatggaagaggtatgagaggtttaatgggatatcattttattttgcaggtgtgctattttgtagctctctactacaacgtcatcattggctggagtttgttttatttttctcagtcttttcagcaacccctgccttgggatcagtgtcctttggtgaaaaatgcttcacacacttgtaagatatgtataatacagtgttttggtatttaagcattataagagtggcaaaggtacaagctttcaagatttttttctttttaaaataatgtagaaacatcattcaaaattatcattataacagactttgctcacattcaggattgacatactcttagagatagacttttgggaccatctaatttttttagctctttccaagttactttactatgccctaagatattagggtaaagtattataagccttcacttattaactttgataatctttattttgtatgccctgattgatgccttacattttcattaaaactaacagaaaggggacagaaataagaatttgaatgaaaatagttgcttttatgtctttggttctgttgtttcatacttttcccatcatttttttaaatcccataatataatataaatattataaagagcagtcacctatagtagtgatgtctagtaaacatagattgtaatgcaca

SEQ ID NO: 70641 - DNA, 1051 bp, Homo sapiens
acatgctgttaaaataagtgtggctgaaaataaaatattccataagtcatgcatttcaggacacaaagtatataaagaatattttggtatttgattctagtttgtgataattttattgactggacaaaaatatggtttatttttaatgtggttgtaatctacaaaccctacatcaaataaaataataaaacccatgcgtatgtaaattttttcctggccactgaaacatgaaactctaagatgttatggtgacaaaatatgtttaagatatcttttagttaattcaaacaggcacaaaacaaaaggtttggaaaaagtagtccatttggcaaatctgccttagaggtaaagatcgaacgtagagtcagtgacgcactgtgcatccctatactgaaaatctccttagctagccagtaacctcacacatgaattatttattaaatcagctgtaagcaactatgtactatcctgctttttgtttctcacaaatcattccatttgccaagactagcagaatatcaattctggttttaagacttttttgccttgtaagtcgtattgaccacactattaaggaggatagctgatttggctgaaaagtcaggttgacttccatttagtacaatttctgtcttgctggagagtgctaaaagattttatatgtagtaattggttcttagcacaaatggctcctccttcttatttccatatattaaaaaagtcaaaatatcttttctagtattatttcttttctactaaatggaaatactagaaagcagtagtgtacatattataaaataccaaccgatttttcactttagaatggttgttacagtaccaaagattgtactcaccattcagtatggcattgagtcttctaattgttggaggaatatcttctgactaaacaaccagaagatagtcctctgcctcaggctatcaaaatcttattcatgaatcacttaagcactttttgagtaatagaaaaaaaaggtaatagagtcaatataaagtttatttgcctagtgatattatccttttaaaacacaat

SEQ ID NO: 70642 - DNA, 1080 bp, Homo sapiens
cttcaaaccatgaatatgttgtttatttctataattatgttatttcacaaatgttatataaaaattgttatatatgtatttctttgaaattggcatttttatattgttttcactgagtatcatttcctttaggtacatgcaagttgttgcatgtatcaatagttcttttttactgctgagtagtggttcatggtgcgaatgtagcacagtttaaccattcacccattgaaacgcatactggatagtttccattttttttctattataagtaaagctgctatggacatttgtgtacaagttttgtaagtttttttttatttttctgtgatatatctctgaaatatagttgctggttactatgagaagtctttattagtgttaaaagtaaccaagttgtttttcagagtggctgtaccattttacatttccaccagcaacatgtgattgatttagtttctacatgtcctcaccaatatttggtgttattaatttaaaaaacaaagtttagccattctgataggtgtgttatttgtagcccaccttttgggaaaaaaaatatacatttaatgaagtataaatagtgacttggtattgttatttgtaaaaaaagttcccttccttttgattggctctgtaattttttatttgatagctcagtgcaaaaattttatgtaaaccaggatacaatttgcaaaatacatttcaatttattgaattctatattgttaaaaatatttcatattattcatcaagattattatttcagtatttcatgaaatctcttgatgaaaatatttttcctctataattataccataactataaactaattggcatacggtgacaatttttcttgagcattacagtatggtccaaattttgattttatttggatggtctttatttttgtcctatattagaaaatagaaaaatgaatttcatttgaatctataaataattaaacatttcatattcaaattagtttgtatttaaataaaacttttttttcagtgaaattttaagttgtcaaagacagggagataatttactagtgttctagtgctttattatagaatacta

SEQ ID NO: 70643 - DNA, 1243 bp, Homo sapiens
cacccctgcagggctcagtgaccaaggaagaatcagagaaagagcaaactgccgtggaaacaaagaagcagctgtgcccctatgctgcagtgggagagtgccgatatcgggagaacttgtgtgtatatggagattcgtgtgacatgtgtggctgcaggtcctgcatctgatggatgctgcccagagatcacagcatataaaatcatgctttgaggcccatgagaaagacagggagctctcatttgctgtgcagcgcagcgaggaaatggtgtgtgagagctgcatggagatgatctatgagaaagccaaccccagacagcaccgcttcgggatcctctccaactgcaaccacacctactgtcttaagtgcattcgcaagtggaggagtgctaagcagtttgagagcaagatcataaagtcctgcccagaatgtcggatcacatctaactttgtcgttccaagtgagtactgtgtggaggagaaagaagagaagcagaaactcattctgaaatacaaggaggcaatgagcaacaaggcgtgcaggtattttgatgaaggacatgggagctgcccgtttggagggaacggtttttataagcatgtgtaccctgatggccgtagagaggagccacagagacagaaggtgggaacatcaagcagatacccggcccaatgaaggaaccacttctgggaactcattgaggaaagagagaacagcagcccctttgacaacgatgaagaagaggttgtcacctttgagctgggtgagttgttgcttatgcttttggctgcagttggggacgatgaactaacagactctgaagatgagagcgacttgtttcatgaggagctggaagatttttatgacttggatctatagcaaccttgtgtggcgtgtgaactggtctgctgaccccagacagcagctgttccctgtggtggtgtggcagtgcctgtgttctctcctaggcaggcctgtcaactccaggtgctggcataagaatttttacccagggcctgtcttttcaacccctcacctttccccaaggagtgtgttgttttccctcttgaaaaaaagttagaaaaataaatcttaaagttagttttctgaaaaaaaaaaaaaaaaagaaaaagggaactagaaaaataaaaaagaacaaaaaataaataaaaaagaaaaagggaacttggcaaacaataccaatcgattattaaattttagaggtttccttagagtcaggaa

SEQ ID NO: 70644 - DNA, 1053 bp, Homo sapiens
tgggtgcggctgtgttcatggaaaactatttacaaaaaaagtatctgtccagacttgacctgcaggtcatagtttgctgaaccgtggtggagagtacaccaaggtggaatttagagttattggaataaggtgccagtgcactgggttatattctttttaaggaaaccaaccagcctttctacctttattcctaagtgtttcaaaagactttatttgaagaggtacgttttctagttctgaaagttcctttaaatgaatatggctaatggcaaattttcccacttagggttagggagcaagaaacatccattacatcttcttataccacatggagcatttcaaataagaaatctaccttcattgaagcacaatgatctcgtgtcctggtttgaagattgcaaagagggtaaaattgaaggaatagtgtggcattgcagtgatggctgtttaataaaggtaatggcaaaaatagctccggtggggttatgtcatcttatattcctacaatagagtagaagtgacactaaaattctctctacaaatggcagcaattcttatttgcagtaaagaaatttaattttctcatcccatgtaccaccattttttaagaggtaaaacagtgcttcccagtgtgtattgtgtggggcatcgatcataacaggtgtgcttcagaattaaagtgataactatatatcccctgcgtggaaattcatgttgcacagtagtgctctcagagacatcttgtactaacttaactcagcatctcccagacttgagtgtagaatctgttgagtaaaaagagtgccaaggtagcagttgatatatacagaatgaattatcttatactttgttccctttctgtctcctggacttgtctgtttgatttctcacaggtacctgaaattcataatattcaaaactgggcctagttgtaactctctgagtccacataattcactgaagtaaaaacttggatattaattttaacccctcttttcattacttcatacatccagttatcaattcctaacagttctaatctatgtacttctt

SEQ ID NO: 70645 - DNA, 1525 bp, Homo sapiens
cattcatgatctggcccctacttaatttcccagaactgctctccacctctgcccccgcaaacacactcacactgtgtttgctgtaaccatatttacatgattgcaattagagcaaaaaactccattctatcatataacattcctttcaattagaatgcctccttgcccacatttttcaggtagctagtctgtactcagcaacaggctctatgattcataacattttatggagcccctgataatgttcctggcatgtttccaggtgctggacatacacagtcaacaaaacaaggtgtctgccttcatgaagctcacattctaatggggaagatagacaataaacaaatatgtaatatgtcaggagaagaccagctataaaaaaaaaaacagtaagataaagtggagtcttacccagtacctggcagacagtgggcactcaaatatttctaagtgaatgaagatagtatctgtatgctaaagctaataccttttttctctttccaggtccatcgccatcatcttggcttatgctggccaattccagatacttacatgaattcaagaccagttattatcaacatgaacctgaacaaatgtgactctgcctttgatattaagtgtttgtttaatcattttttaaaaatagataatcagaaatttgttagactcaaagatataatatttgatgtataaaatgcaaataaaattagtttatcattatattctaatcttgaatattctaccatatttaaaaatatctcaaggtttctgttcattatgaaacatcaatatgttttctaccatttgtgaagaaatgaattttccagtttcaagtacctattcaaaattttattaaaaaccagcaaattaattttaatctctagccataaaaacataagtaatagtaagctcctaagcttggacaaaggctggattctcttcactataactgagtggtaatttaaagacaacaatttaatgtcactaattttcaaaattaaatagtttaagctcaatttaattttgctagatatttaacaaaacatacggctcaacctcataacctatatgtgtgtatgtctacatctgtgtatatatcataggatttgagaatcttaacacatgtataaataagtatatataaactccaattttaaatcttaaaattgctgaatttaccctcatattctttaaaaaacttaaagcattatgaatgtagagaaattcaccagagctcactgcctatttgatggctgtaacaagtcttcaagtatatacttttataataagttgaaaatttcatataattttatttattaagaattccaatctaagtataaaggtacaaggtagtgagaaggaaatactacagttcggagaactgcttatttccaagtatatttaacttataaagttaataaatagttaaatgaaacaaagtttataggtgacctttagtaaatggggaaattaacaggactttcttcttcatcttcaaactcttcagaagcagcaacagggctag

SEQ ID NO: 70646 - DNA, 1050 bp, Homo sapiens
taaatctccttgttcaaacgtaaaatatgtatatttcctatatgcaacttttaaagataatgtttccattaggaggaaataaagaagctgaaaaaagaactggaaaattttgatccttcattttttgaagaaattgaagatcttaagtataattacaaggaagaagtgaagaagaatattctcttagaagagaaggtaaaaaaactttcagaacaattgggagttgaattaactagccctgttgctgcttctgaagagtttgaagatgaagaagaaagtcctgttaatttccccatttactaaaggtcacctataaactttgtttcatttaactatttattaactttataagttaaatatacttggaaataagcagttctccgaactgtagtatttccttctcactaccttgtacctttatacttagattggaattcttaataaataaaattatatgaaattttcaacttattataaaagtatatacttgaagacttgttacagccatcaaataggcagtgagctctggtgaatttctctacattcataatgctttaagttttttaaagaatatgagggtaaattcagcaattttaagatttaaaattggagtttatatatacttatttatacatgtgttaagattctcaaatcctatgatatatacacagatgtagacatacacacatataggttatgaggttgagccgtatgttttgttaaatatctagcaaaattaaattgagcttaaactatttaattttgaaaattagtgacattaaattgttgtctttaaattaccactcagttatagtgaagagaatccagcctttgtccaagcttaggagcttactattacttatgtttttatggctagagattaaaattaatttgctggtttttaataaaattttgaataggtacttgaaactggaaaattcatttcttcacaaatggtagaaaacatattgatgtttcataatgaacagaaaccttgagatatttttaaatatggtagaatattcaagattagaatataatgataaacta

SEQ ID NO: 70647 - DNA, 1043 bp, Homo sapiens
catattttgtatacatatatatcacacatatgcatacatgtgtttgtatgttcatatgtacaatgtacatatcctcattatttgtggattctgtattttctaaatcacctcctcactaaagtgtgtatgtaatcccaaatcaacactcgcagcacatttgcaaacatccacagagccttggaaagtttgaataatccaacctacatgtccccagcagaagtccaacaaggcagtgctcagtatcctcatttcagttttcatagagaaatgagcagaggatggagacagtagagggcagcacagcatagtgcaagaagctgtggctctggggcctggtggaagggatttgaatcccaattctgaggcttgttactgctctagccttaggagagtcatgtaacacttctgaatcttgttttcttatgtaaataaatagaatttaccaggatgagttatctttaggatttaagattatcatctgtgtgagatatgtaggtgtatgtatatatatgcgtgtatgtatatatatgcgtgtatgtatatatatgcatgtctgtacatatttcccgtagcagcagtggtttgatattcactaattgggctaactttatagaccaaaactactatggatagagaatactttgtttgcatttacgtatatatattttcttggcaagtaacataaaattgaactaatactatacacatttctagcatatttgcctttaacagtttatcatggacatcttttgaggtctgttcataaattatctcatccatttaataattccatagtgtattattgcatgtataagcacatcgaaccatttatgttttgatggatatttagtttgcttccaagtttctgcttctataaaatatgattaatctattgacctaattatgccattgtgataggatgatagagatgccattctctccaaaggattataccaatttatatctgaactatctttgactatctcttgtagctttttcagtatgctatgtagtcctattactaatttgtaataaaagccatc

SEQ ID NO: 70648 - DNA, 1067 bp, Homo sapiens
ctctatgaaaactgaaatgaggatactgagcactgccttgttggacttctgctggggacatgtaggttggattattcaaactttccaaggctctgtggatgtttgcaaatgtgctgcgagtgttgatttgggattacatacacactttagtgaggaggtgatttagaaaatacagaatccacaaataatgaggatatgtacattgtacatatgaacatacaaacacatgtatgcatatgtgtgatatatatgtatacaaaatatgtgtgtatgtatatgcaggaatgaggaatgattagtaatcacttttgaatgggaatggaagggagcagaaagattttctttttactttgtaaacggaaaaaaatataggcagtatttacttatttgcagtttttaaaaatgttcagaggacttgaaagagcctatacttagaaactggaagcaacagatttagtattcattgcttagcactgtattgtgattaaatctgtaacacccagatggagaacaaagagaagaacacttgggtacttgctactctatagtataaacaacacaaagagaaaaatgggaatatttttatattaatagcacagagagacaaaagacccaaagcttatcaggaattcgattttacagggagacaatgatcagaaatctgagccaaaaaaaaaaaaaaaaggcaaacccaaattcaaaaacttgggggtagctaacatgttttttaaaatacattaccaggtatggtgctttcagctccactttggtccttgttagcttctatctgatggattaattctgctttctctttatccagctgatgattagctaatctagaacacaatgataatgtgttaaaaaaataaagcagatattgcttcataaaatatatgggcatttcttatgaactagtgatgtacagtaatcagaacaagctagcctttatcgaagtaaacatttactctcaatgctacaatgtcaccattctcaaacaaaaagcctggaatacaaaagccttcacgtttttcttaatatctgacctgatggcatttgcaagtgtggtt

SEQ ID NO: 70649 - DNA, 1050 bp, Homo sapiens
gaatgttagcaatctgttaattccactggtaatgatatagttaagctatgtcttgcttctcacactttatttatttatttactcagggcactaatctgccattttttcgcactttttttccttttttttttttttggtactgcttcttattctggtttttacattgatagaaccaatgttagacgttcatttgccttttgctgtgtatatttgggtaaggatctatatgtgcaatatatgggacagttaaaatcagaattctaaatttgtattattgcatcaggcaataatgtgggaaataccttgacatttcatatacacaatattcttgtattaatttaacgtcttagttcaaaatcttccttgttaatatagagaccctattatttggtttggcaatacagttgaagagattgatggttcttatgaattgtttgccttttcttttcaatggctgtagctatgttaaattattacatgtttgcttgttatctttcagaatcaagtcagagatttgaaggaaatgtgtgaatttcttaagaaagaaaaagcagaagttcagcggaaacttggccatgttagaggggtatgtgagaatttaccatacatttgttttggtttcagcagtgataagccagaaatgaaaagtttagatatgttgtaaaagtactgatatgcctctacaagtgccctgtagtttcagtgtttattctgcatctgtaatataaaacagtaagcatttctatgtgtctcaaagtattttatcatctgttataccttacatactttcatctctctttttattgaatatgcctccataccttgaaaacatttaacttccaggaatccttttgtttatggaggtaactgctaactggtccttggtccaatgctgccattttgtaaccatttgttatgatatcttcccagcttggtataatgttttataattacattgttcctccccctctttttttgtgttcttgtaattttctccctatgttattttgtattcattttatataatgaataaatgttgcttatgaggtc

SEQ ID NO: 70650 - DNA, 1105 bp, Homo sapiens
agctcggcatgcccaaagattctaggagttatacaggttgaacatctaatccaaaaatctgaaatgctccaagatacaaaattttttgagcaccaatatgatgccacaagtggaaaattctgatgtgacctcatatgatgagtcacagtcaaaacacagtcaaaactttgtttcatgtacaaaattattaaaaaatattgtataatactacctccaagctatgtgtagaaggtgtatgtgaaacataagtgaattttgtgtttggacttgggacccatccctaagatatctcattatgtatatgcaaatattccaaaaatattttttaaaaaaatccaaattctaaaacacggctggttccaagcgtttcgtaagggatactcaacctgtatagcaaaatgaacatatttacatattctctaggaaatattagtttacaatttttctaggcaaattataattgataaatcataaagaaaatttaaaataacactggtaattttcctacctccttcgttattgttacagaatgctaaagaagaattaattaggtgggaagaaggtaaaaagtggcaagccaaaatagaaggaattcgaaacaagttaaaagagaaagagggggaagtctttactttaacaaagcagttgaatactttgaaggatctttttgccaagtgagtttaaatatcattataaaactaattatgtgtaaaatcctttagtgacctggaaattatatagctttatcatagttgataatatgagaaatggtctagtttaaatgatcatttattatctatgatttacttactttttattttctttaaaatctgttttaaatatattgtaacaattatagatggattttcctgtgatctcgttgtaaattagcttatgacaaatatagggtgttacaattattgtaatttggtttggtaatgagtatgcaattgaaaagccaaacactgaatggtatatttcatgattctatattaaattccacagagccgataaagagaaacttactttgcagaggaaactaaaaacaactggcatgactgttgatcaggttttgggaatacgagctttggagtcagaaaaagaa

SEQ ID NO: 70651 - DNA, 1036 bp, Homo sapiens
aaacgttgtcatatatattgttatatacttgtttgtttaattaattcagccaaaatgaaacgtgcatatttgataaaattttgtttgtgggtgtttgttgaagatgaattgctttacactagttttttttttttttctcaaagtcgacttttttcctcaaggtagacttgacatgaatatggaaaaatatatgtagtttgtggttattttttttctcttgtgtacttaaaaattcagactgaatttttcttataatggtatattttctgttttatgttccttttatcattgatacttcttgaagagtcatgaataatacctttctttttctcttattagacacaagttgaagatttaaatgaaaatcttttaaaattgaaagaagcacttaaaacaagtaaaaacagagaaaactcactaactgataatttgaatgacttaaataatgaactgcaaaagaaacaaaaagcctataataaaatacttagagagaaagaggaaattgatcaagagaatgatgaactgaaaaggcaaattaaaagactaaccagtggattacaggtaattttatatttaactctgataatgtctgatttacaatatagaggtagtagtttatttctactttatcattttatctatggtatttgttaaaactgactttcaaatcactttgattaatgtaattaatttcttttgtgacttctattgtgtttatagttctagagtagcatattagtatgttgtattaaaatgcagaagcagctaccagattatcttatgtattaagtgtcatttagaaagtatggtcagtgatagcttcagaaagttgctattatataattgaaatatttactgtctattttgttttacatttatttgtaaaaatataaagttacattttattttttagggcaaacccctgacagataataaacaaagtctaattgaagaactccaaaggaaagttaaaaaactagagaaccaattagagggaaaggtggaggaagtagacctaaaacctatgaaagaaaag

SEQ ID NO: 70652 - DNA, 1027 bp, Homo sapiens
tttttgtagatctcatgtgccactgtgttaaaactttgcttagtaaattgtgaattttaaatctgtgataactttcactggaaaaatttgaaacttactacaaatatatattttttttaatatcaggcacagtctgatgaaaagtcgctcattgccaagttgcaccaacataatgtctctcttcaactgagtgaggctactgctcttggtaagttggagtcaattacatctaaactgcagaagatggaggcctacaacttgcgcttagagcagaaacttgatgaaaaagaacaggctctctattatgctcgtttggagggaagaaacagagcaaaacatctgcgccaaacaattcagtctctacgacgacagtttagtggagctttacccttggcacaacaggaaaagttctccaaaacaatgattcaactacaaaatgacaaacttaagataatgcaagaaatgaaaaattctcaacaagaacatagaaatatggagaacaaaacattggagatggaattaaaattaaagggcctggaagagttaataagcactttaaaggataccaaaggagcccaaaaggtaaacatttaaacttgatttttttttttaagagacagtatcttgatctgtttcccaggctggagttcagtggtgcaaacatagctggaactcctgggctcaagggactctctagcctcagcctcctgagtagttgtagctggcagtacaggtgcacaccaccatacctacctaattttttaaaatttttaaatttttttgtagagacaaggtctcactttgtcacccaggctggccttgaactcctggcttcaagtaatcctcctgctttggtctctcaaaagtgctgagattacaggcatgagccactgtgcccagccaattttaaattcattatcttcaaaagagttacatgataatttcttaatatatgcctatatgaaaaatgcttaagatacaaattccaattatgattcattaatttagattttataacttagcagtg

SEQ ID NO: 70653 - DNA, 2260 bp, Homo sapiens
tagacaagattatatttggtagaatctatccatcatatggcttcagattttacttttcagcttggctttgtgagactttaaaaatcaagtcattgcacttatattcacaaagtcacattgctttactgcattgcttctcatacagtttatctcctttcagtaaaatgtttacttgccatttttaaaatttcttatatgtgacacttctacactaagtcctttatgttgttagttccacaattctgtgaggaataggtttttttttttaatcatttgattgatgaagaacattaagttccacagagattaaatggtacaggcatcacacaggcaggaagtaacagagctaagattagagtccaggtctgatggaattcagaaagctaatgtgctttccatggaactataatgctttctaatatacagcatctaaaatatctgaggtaattttaatataaacagcatgagattgacttaaatattattgcatgtaggtaatgaatctagcatggataaggcaaagaaatcaataaccaacagtgacattgtttccatttcaaaaaaaataactatgctggaaatgaaggaattaaatgaaaggcagcgggctgaacattgtcaaaaaatgtatgaacacttacggacttcgttaaagcaaatggaggaacgtaattttgaattggaaaccaaatttgctgaggtttgatattataagttttatcatacaattatagaataaagaattagttttggtagacattgtattattgttaagtggtttgtctggatctctgaaatatcttattaatatagtgcctatgttttgtgtaataaataaataaaagatttaaatctgaattgtttaaaaggaaagcagatatttctgtaagtttttctcaccaatgttatattattagatttaatttatgaaatgttatttactaaacaatggaattgcctttcaccaccatcccttcatttaacaaatatttattcattgcctattacatgtcagaccctgtgttgggactggcagtatagcaagaaacaaaatagacaataatctctactttcagggactttacattctaattggtggttttatatatttttgatgtggtcagaatcattaaactgtgtggcagtaaatatagtttgcaagtatttaacaatttatgattaaacacaactcttacagtgtttgcttaccttgagatttaatatattttcaaagcatttatatcatttttgttttaactatgtcactaaatctatatgagtaagattttattaactcatttggatttatttatagatgatacaattgaagtaaaatataatgagcagattgcattctaagcaaagtaagaatattgcaagttcagatattattagataatgagttgcctaataaaaatgacttttggtggattggaatataaccagagtttccatagtttgtttctgattctttcatattttttaccctccttcagtctgttcttaacacttcacacttaatataatatgtgaactaaggccaagtaaagaggattgcagtactttaaaagctaaattacaaagaaaacctcaccaaaaattgatgtatctgaacattttttgttacatttccttagcttaccaaaatcaatttggatgcacagaaggtggaacagatgttaagagatgaattagctgatagtgtgagcaaggcagtaagtgatgctgataggcaacggattctagaattagagaagaatgaaatggaactaaaagttgaagtgtcaaagtaagtgcatataagcattttagccatttgactagatgtatcttctttaatttgtctttaagaaacccaattacaggtatacaattcttagtagtaattgatactgatttctttttataagaacaggattaagtaatattaagatcggttttaacagggttaaataataatattgacgagaataatattgttaaagaggaagtgacctctcaagatttgcattttttagagttcaggaatattattgcagaaaggtccagttcctccacatattgattttttggggaaggggtgatggaggaggaatggttgtttattgtatttaaacttaagtttcttcattttaataagggagtaatagtacctcttctacctgtttcataaggttgctgtaagaatataataaaaaattcagattttgatttagtttacatttatcgggcatctactatgtactagtcacggtgcaag

SEQ ID NO: 70654 - DNA, 1065 bp, Homo sapiens
ttaacagttatggcagaaggggaagcaaacacatttttcttcacatggtggccggaattagaagaatgtgagccgagcaaaggggaaagccccttataaaaccatcagacatcgtgagaacttactattatgagaatagcgtgggggaaaccacccccacgattcaattacctcccaccaaatccctcccatgacatatgaggattatgggaactatgattcaagatgagatttgggtagggacacagccaaaccatatcagtatgtatatgtatacaagtattatatatatatgtatgtgtttgtatgcatacatgtattatatatggaggaaattctaattttgtaaaaaactggattgtgagttttaaggagatgttatataaagttaagacaatgtcattttgtggtattggtctgaattacaatgtagtttcttagtgatatttttcctttattcagtgtgaaaacatctccttaaaagaacaagtggagtctataaataaagaactggagattaccaaggaaaaacttcacactattgaacaagcctgggaacaggaaactaaattaggtaagttttatgactctgataatataaaatgattaacatctaataatgaatatttcttatttaaagttccttttttatgctagattaaaaggaagtattttgactaaaaaaagaaagaactttctgcctaataatttaacttaggcagatgaataatcctgtacttaaccccaccaaagtttagttttcagtccttaagttagatttgtttctaatgaaatcatatatgttaaaaatttatgactaagtattagctactttgaaccgtttaacaattaaaactgatgatattttattaatggtattatgagttctttcactgagtgcaagttatattagttatatatcacttgatatttttaaattaaaagataccaggaaacagcaaagaaaatgtgaaaagaagttgtatttctcatagttttactactatattactgtatatttttgctcctatatgcttacatattttatatattttaaattattat

SEQ ID NO: 70655 - DNA, 1059 bp, Homo sapiens
attttttgtatttttagtagagatggggtttcaccttgttagccaggatggtgtcgatctcctgaactcgtgatccacccgcctcggcctcctaaagtgctgggattacagatgtgagccaccgcacctggccccagttgtaattgtgaatatctcatacctatccctattggcagtgtcttagttttattttttattatctttattgtggcagccattattcctgtctctatctccagtcttacatcctccttactgccacaagaatgatcattctaaacatgaatcctaccctgtgactcccatgtgactccccgccttaaaaactgtcaaaagctaccggttacctgaagggtaaaagtcaagtcccctacttacctcatgtcatctagagcaagagatgaactagctgagttttctgaccacagtgttctttcttatgtatgttcttttgtacgtgctcttttctatatatagggaaccatttctctcttccagttgttttgctcagtgaatttctattcctgtttcaaaacttgttcaggcattaccttttttttcttaagcatactttttttaatggaacaaagtcactcctgtctacactagttctgcatcttatacataggttttgtacatagtacatatttatatcacatcaaattatatgtgtttacatatctgtcttccttaatggaatataagtcttttgatataaggaactatttaatttgtttctgtgtgttgagtatctcctgtttggcacagagttcaagctaatacatgagagtgattagtggtggagagccacagtgcatgtggtgtcaaatatggtgcttaggaaattattgttgctttttgagaggtaaaggttcatgagactagaggtcacgaaaatcagatttcatgtgtgaagaatggaatagataataaggaaatacaaaaactggatgggtaataaagcaaaagaaaaacttgaaatttgatagtagaagaaaaaagaaatagatgtagattgaggtagaatcaagaagaggattctttttttgttgttttttt

SEQ ID NO: 70656 - DNA, 1048 bp, Homo sapiens
acattctctgttttctaatctgctttactcctaattacctctgtactgtatatacttcagtctgtcactatccagttgatttgccttgctgttttcattgtgagagaatgttactaatatgaattttttgtgagaatatataactcctttttcttgtgtgttcttcaatcaaaatgaagttagaacaccaaatttaaaatactttaatataaagcatagtttaagttaaggcagaagtatgccttatatacgtgtgtatatgcacgtgatataaataggtctgtcatttaactcaactattcacgttggatttatagttgaatttttttgtatgtttatttacatttggatttttccaatgatgtctttggtatatgtgaaatatttgtcatctgtatagcatagtgtaaattgtgaaaaagatctgatcatccaatgagaaaactgtgtaattacagtaaaagaattagttgaagaaaataagcaacttgaagaaggtatgaaagaaatattgcaagcaattaaggaaatgcagaaagatcctgatgttaaaggaggagaaacatctctaattatccctagccttgaaagactagttaatgtaagttatttttttcatgttaatgtttttcccctatcactttagagagattttctgctgtgtacagatctccatagtttctgatgagatatttttagtcatttgaatcattgtttccctgtatgtaaagtgtagtttttcttgagctgctttcaatacttttcttctaccaattggataattgttattaatctgtcttcaagttcactgacattttcctctttatctgtgttcttttggttcaagggtcagcttgagaccttgaggagttttttacaccgactttggagctcgtttttgctgactcttttcttattgggattttcctttcacttatcccatggctttgggctgtatcctgtggttttctagatgagaaagatgatagatctctgcaattgcaccctgccctatgactaaatctttaaaaatggcaaagtcaatctt

SEQ ID NO: 70657 - DNA, 1583 bp, Homo sapiens
ttctgattatcatttggttctactgagccaaataatgtttgtacattgtttattctgatagaagttcttaagtttctaacataattgaaatattatttgttttggtagataattagtattctttctttggttattcaagataatatgcatcattttcccaaaatttttttgttttctttagtttctgattattatttttaattatgtattacctttctcatttctaattaccgttttcctgtccttttctgtagaacaaacgtctaaagaaaaaggtgaggctttaagtgtggtgaaatcttgggaatttaaaatatgttgtgagagcactatttagaggatatgattttgttattctgaatagttttgtaattgaatgttgtgtttggttaccttcagaatgaacaactttgtcaggatattattgactaccagaaacaaatagattcacagaaagaaacacttttatcaagaagaggggaagacagtgactaccgatcacagttgtctaaaaaaaactatgagcttatccaatatcttgatgaaattcaggtaaaatggctagaagtcaattcagagcaatggttcctaaaaactttaatttcattacaatgtaaatataatatttagccctacatgtaaattccctggtataaatctgtcactatgtacttgtaaaatgtgaaataaattacatctttgaagttgcaactttttagccatttttatatttgcctgtcttggtcattaagaacaattgaggtccttatgtactattttcttgattcaatttgatttaattggtcaatgccaattagtaaaggtctataaagaattctctttttttctagaggacacttatggctgcgtttaattttaatttggtttaaatttcagtttttttaaaattactttttaattatagtgtctttaacttttttagactttaacagaagctaatgagaaaattgaagttcagaatcaagaaatgagaaaaaatttagaagagtctgtacaggaaatggagaagatgactgatgaatataatagaatgaaagctattgtgcatcagacagataatgtaatagatcagttaaaaaaagaaaacgatcattatcaacttcaagtaagaattacttttagaataacttatttattcagacttcatattatctcattactatttatttgacactagaaagtactttttctaggatgtgaatttttgtctgtctttttaatagtgtaatatcttgtcatgttggtatatttgtccatatgtgtttctccaatcacctcacaaacactaatttttgcaatttaggatatataaatgatacttgaatgaatgtgtagatagcagtcattatggggttttctataaaagactactgaaaatcctgtggatcataacatttcattttatcttaaaataaatacattataaatgtattagaaaccaatacattgttcagtatttatgtggattaaatttgtttaaaaggtagaataatgtttaaaaataaaattttctagtaatgaaagataattatgcaattataagatgcagaaactattaaatg

SEQ ID NO: 70658 - DNA, 1045 bp, Homo sapiens
ggcaggttaaggcactcagcttcactgactggggtggagattctgatggtttgtactcaggttccagatccctgaggctcaggaacctttgcagtttagtctggttacctgtggcccagtggttacaacagaatgattaacagtcaattctttgcatctctgggtggctcaggaaaaatttaaggagttattagctgtgaactaaccttaagtaagttaaattaaaaaaaaaaaagttcttaagctaatatgattttaaatatctgcactgaagtataatgcaaatttaaattcagcataattatttgcttgttgttgactcatttgaacctcaaaatataatgggattaatttatactttgggtttattactttaagatggctcagcagtctgcaggtggacgagatactcggtttttacgtaatgaaatttgccaacttgaaaaacaattagaacaaaaagatagagaattggaggacatggaaaaggagttggagaaagagaagaaagttaatgagcaagtaaagcactttttttttccatgaatcttcactgttcaagttacctggctttttattattattggtaacaatatcaatttttatattgtatgttatatttgaaaaatgatgtacacttatctctaaggttttatatcactgttcattttgtcatcaccaattttaaaatataatggtacttctagtgaatatgacttgaagattaattctttatatttggaagtacatttttctcaggacatcaaacttgttacctaaaattaatgcttttgtctggaagattggtatcaagtaactaatagattttcataaagaagtgatctttctagtgccatagtttattttgggtaaaagttatatttgttcatttcaatgtatttatatgattagtagattcgcaaatgaatctttcgatatattcaataatggttaattaaatatcttgtttttggttgtaccttattttatgtgagatatatatatatatgtatagtttttgaaaagttgtgttcatgtcagcagt

SEQ ID NO: 70659 - DNA, 1050 bp, Homo sapiens
aaggatccacccacctagaccaagcctggcaaccagcggaggcctctcactaccgcaaccaccaagctggacccggccgcgggccctgacagatccctatcgcggttccacgcggactctgggtccagccaaatggtcccgagcaagccaaagcggcagcggctgctaggcgacaccatccccaactccgccaaggccagaataagatcccggatgccaggagagcctacagttcacgaccgtgggtgatgctttacgtttagattctccgccggagtcccagagctcggtgttcaggatgatgagaaggcgtggaacgaggacttcaaatcccagagtgcagttctgcctgaggcttctgcatgctgggaactgaagtccctgagaagaggaggtaaggcgctcccggcatgcaacgcgtaagactgcgacggtaccggggcggcggggaaggaccgagaggcgggaggagcagcggctcaggcgcctgcaaactggtggcctgaacgaggtagaccatgactgtggtttcagtggcgtcactcgctgggctgctcttcctgaggttttcctaagccatcccctggcggaaccgcccccaggtgaggtcgagctgtcggtcagcatattgggaggaattgaggggagcagtcctgggttagagaagcttctgctattggggccgtagggcctggtcccattctgaaaaagtgggaacaccctgccttctcttcaggcgtttgcaagcggcgtccagggtagtgccttctgtaagaaggaaaaaacaaaaagttttagccttgtttagtatcagaatctgtcttgatagttagagtgagagccgcgcagccgtgatcctcgtttgggggcgagcgaagaattgacaagaggtctcggcatcccgaccccgcccgccttacctgtagcaccattcctttcgcggatcgtggggcttgatggttgtggagctagtataaagtcaaggctctagagaggagaggttagtacttgtccggaccactgccgggggtggagagagaagggatccaa

SEQ ID NO: 70660 - DNA, 1027 bp, Homo sapiens
ttcacattgccatggcatctgtaaactgtcatagcactggtgggagtgtcttttaggatgctaatgcattataattagtgtataatgagcagtgagaacgagcagacgtcccacctttctcgccatcttggatttggtgggatttggctggcttctttactgcatgctgttttatcagcaaagtctttatgatcagtatcttgtgcccacctcctatctcatcctgtgacttagaatgactgacagacatcctgagaatgcagcccagtaggtctcacccttattttacccagcccctattcaagatggagttgttgtgattcaaatacctctgacaatggtaggaatgaaatttaatagttactgagcacatgttatgtcatacactatgctgactactgcgtgtttgttttcataatagaagtctgttttctctaacaccttttcttctgttttttttttcattcgttataacttatttttatgtattcacttacaagtttcgtttgtctgtattactcttttctacccttctgccaccaccctcttgctcacattcataaactcaaggtgcctggtctctaatggtaaattttattctaatttttcagaagtgagaacaagttcatagaagttaagtaataattgatgaagctaagattgtaacctagatctcagtgacaattgtaactaaaagcaaaatcttacctaaattttattctttaactcattctaacagtattttttatcctgtttcctgtgctaggcactggggatacagcagtgaacaagtcagctctggcttgaacaagtcaactaagtttttatgcattgtcgtctgtacctaagtgtgagtcaggaaatttaactcaggttctagttcaataactcactgtatatttttgaggaaaattggcaaaactattatttttcgtcagattttctgcacctgtcagttttcatcaagaaatgggacttatgtgacaatgttgtaagtggccttgttataagaacacttgtctggacc

SEQ ID NO: 70661 - DNA, 1034 bp, Homo sapiens
ctaataaatgtctatttatgtaagattcacaaattcaccacctgagggcacccaaagaatgtttaagaaacaaatgtgcacttgaaaagttacggaaattaaagtatttttaccattatatatagtaatttttcaagatattctttattaatatgaacccccttcatttttcctttctaggtaacaggagttgttggaagagcagaacttttgtcatctatcttttttctagcagcttttttgtcatataccagatcaaaaggaccagacaattccataagtacatgtctcacatttgatttttttttaatagtgctaaaacttgattaaggaatttttatttactccaagtgcttcttataacacattatataccacatttgggatttatctttatgtattgttttactttagcatatgtgaaaatatgaaatatgtaacattgctagtatttaggaagtttgtgtataatttatatttttatcttgagctaatagattttatatgatctaattttaaaaaccaaataaccttagaatagaagagttttagagttagtcctagttccatcttctgttatctattaatgatatagattccagtatttcagttgtctttggataaataacacctggtagactgtcatattgtttaggtaaggttaaaagcctcctagaatataacttttattgtgtgttgatcatagctatttattgagctcctaccttgtgacctaccctggaaagtgcttcgaatacattagctcattactcttaatgattcctggcattatcagaaaacaagttctaggcaataaaaatgatttttttcaagtgtgggcacagtgggcacaaacctttaagttcttggggaaggggcagattttctcactgtagttccaaggtactcatgacaagaagactagttttatgtgtggaaactgaggttcaagaaacacatgatttagccaaacatcttaagagtgttctggatttgtaatagtaggtttgcctttgctgctctgcataatgcct

SEQ ID NO: 70662 - DNA, 1074 bp, Homo sapiens
acttactccagcctgagtgacagggccagaccctgtcttaaaaaaaaaaaaaaagtatagtaccctacttttcccaatacttttaaattttaagtttttaataatttatcagtttaataaggtataaagatatctgtcataatttcaggaatttgtcttcatttcagaatgatagctcattaattatgacacacaaacctgtaaatttctcttctccaaattcaccaccctacctttgttttaaaagttagtatttgatgaaataatttttctctttgtaaaaaatttcagttcaaattatacatgttgatattttgctttgaatgtataaagtaaaaattattaaatttaagtatattttaaagtatgtactactaattaatgagaaatagcactcatatggatatggaatcacaaagtttaaaatatctttttttgatattataaaattgttttctgaatttttatattttctgttctcaaattgcagtatggactccaattgccttgacagtgtttttagtggctgttgcaacattatgtaaagaacaaggaataacagttgtaggaatttgctgtgtgtatgaagtgtttattgcccagggggtaagccaaactataaatatataaattttcttattgatatattttatcctagttgaatcaaattttatttatttttattttctaaatgtatcattatgtaaattaatgtgtttaccaataataataccagaaatcatgttttatcctcatacctactgaaaattacttaacattttatgatactttaagtgttttaagaactgtgttttaaatttcaataatggaatcattaggcagcttggaaaagtatgcaatagtactgtacagtataattcattattaggtaagactgttgagctcagttttattcattattagcttcacacattcttccacattaattttataattatacttgtatctaatcttgcaattagaaagtactacagtattgaaaacattgagatatgtcgttatttgttgcttaaaacatttcttttctttttcagtatactttgccattactat

SEQ ID NO: 70663 - DNA, 1174 bp, Homo sapiens
tataattaacattttttaaactgcatatatttaaaatttatgtactgataatttttgacatatgtatacacccttaaagcccccacaataaagataatgaatgacccatcccaaactggttaagtgttaaggttagtgttaatttagtctcctatatccttagtgatttttgtctactcattctgtcagttactgagagatgttgaaatctctgactatacttgtagatttcgctatttctccttgcacttctgtcggtttttgttttgtgcgtttttgaagctctgctattaggtgcgtaaacaactaggattgtcaagtcatcttgaggaactgatccctttgtcattattaaatgagcttcatccctagtaatagtctttactcagaaattcactttttcttatcacagctgtctttcgttagtgttaggtggtgtatctttttccatctttttactttttacctgtctatgcttttatttataaagaggatttcttgtagcatccatacaatttggtcttcttttgttgtttggtcagataatctgacttttagatgggatatatcattgatttatatttaatttgataattgatatagtttgatggaaatctttcatcttgataaaattgttttctctttgtctcatctaatctttgttccttttttctctctttccaccttcctttggattctttttttaatatttcattttatctccttgttggcttattagctataaatctttgttgttttagtgttgctttagggattttagaacatcctctgcttatcacagtttaccttcaaggaatattctaatttcgaatatatatataaaataaaaatatcagtgtatatatagtataaatatatgtaatatacattttatatatgtaagaacttaacttttgtgcagtttgcatatgttttccttgaacatacattgctttaaacaattgtcttggaggaatttaaataataaaaaagtattttacattaaccatgagtcaccatttccagtgttctttattcctttgttggataagatttttatctggtactatttttccttttacctgaaggaatttctttagcacttctgattaaaaatatcaggttttgaaagataccttctctgggtggagaattctacactggctttttcatt

SEQ ID NO: 70664 - DNA, 1072 bp, Homo sapiens
gaagattgaattgtttatataagacttcggatttccttcttagtttcattggttttctgttattccttttagagaatttgaatcaactattttctatttccctatctacagtctaaaaatatagtttataggtgtgaatttatgtatgtgttagtaggtatgaatatggtgcttatagcatataaatattttccaaataaagcatttcaacattgtgtatatatgtttgtgtatgtgtgtataaattctattaccctctgaagttggatttaatataatttgatttattttgacattaactctttctttaaatcagctatcctaaataaactgtaatttttaaaactaaattccgaatagtgaattataggcaaaaagataactttttattcagttctgctggttattttgagaattcaagttcagactcaagatttattattttatctgaaaaataatatgtaagttgtgagattccgtatgaaaattttgaaatgatattatttgttcaaatagtatttatttttatcaaatatttgatatgttttcagaaaatcaagtcaaataagtggcagtagttgattttccttggcttactcatcttaaaatgagaaaatgggtcttttaagtactatatattataaccaatataatttagaacacagactaaactaatgaaatgtatatatgttgtggcctgggaaaagataaactatgatataagcttatattagtatttactaagagagaaagtagaacacaaattcttacacaggcctacacagttactactttgtactagaaatttggtttttagcttcctaggagtcaaagaaaagagggaaggaagctaggtgatatggttttctctctccatgacagaagaaaaatatacgaattttttccaggaagcataatttttaattagcatttagctctaaaagaaatgtctcatgtaggaaagcattggtgagtgttttcaaaagtgattcatacaacacatacaaccataaatcttatacaactttttgttactacttttaatcaaaaggtttaatggaacacttttgca

SEQ ID NO: 70665 - DNA, 1076 bp, Homo sapiens
gcatttgtggttttgttttgttgaaaaacctattagcatatttcattatcatcttatttttaccacacgcacataagttagatgtgtaaaatttttatttatttaatttgtattcctcctaactgaagttttatgccttttgaccaacctctccccaaccttctccctccaaccctggtgaccaccatgtactgtacttctgtgagttcaacttttacaaattctacatacaagtgagatcatgcgttgtttgtctttctgtggctggcttatttctcttaacatggtgtcctccgggtttatccatgtcagaaatgacaggatttccttctgttttaaggctaaatagtattctaaagtgtatatgtaccacatttttttcatccagtaatctgttgatggatacttaggttgttcccatatcttggctattgtaaattgaataatgctgcaatgaacaggggaggtcagatctctcttcaacatactgacttcatttcctttggatctatacccagtagtgaggatgctgggtcacatggtagttctatttttaattttttgagaagccttcctactgtttgcttaatggcaatgctaatttacatcccaccaacagtgtgcaagtgtttcctttacgttcttgccaacatttgttatcttttgactttttgataatagccattcttacaggtgtgcgatgacatctcattgtggttttaattttcacttccttaatgatagtgatgttgaacatttatatacttgatggccattggcatgttgtcttctgaggaatatctatttagctactttgcccattttttaaattgggttgttttcttatgattgtttgagtgtgttattttagatagaatttcaaaaagtacttccactatttaactggatgaacctttattgtttaatttttgcttaaagatgtgaatatttacatttattaaagtttttatattttactatgcaagcatattctttacagaaaaccagtgagatatagctaattatgcttctcaaatttaaaatgctgtaatggtttagattttaatttcaaggag

SEQ ID NO: 70666 - DNA, 1143 bp, Homo sapiens
cttcggaagcttttgcaaagcctcctggccttccaagaaggtttgcatctttccctataactttttcttacaacttttcccaccaccctgaccaaactcctacaggaggtggcaaaaaagtgatgtataatgcagggaagaaggctgaaagagaatggatagcaaatggctctgtaggtatatttgttcattgggcacgtatttgagaatttaccatgtgtcaagacactgttttaagtgctggggaatccagaagaaataaaacaaatttcctcccttcgtggagtttccattctaaataaaggcataaacataagtaaacaaatacacaccacatgtaaatatatatatatatacacacacacaaaatatatatatacacacacacatatgcatgcacatgtgtatttatatgaaagtgataaaagctataaaaagggcatagagattagaaattttcagagaaagtctcttcgagatgataataaacagagcaaccttcgcacatatactctggtgtaattttaagtatcactggctatgcagaaaacagtgaagaaaagcaggaagatcatttagaaggcttttgcagtaacccaaagacatgattgagttgtaattttttaatagcaatcttgaagtacatgtgacatacaatagactatacatgtttaaaatacataatttgataagtttcggcatatgtatattatctgtgagaccataattacaattaagatactgaaaatatccatcaacccctcaaattccttggatccttttctgatacctccctcttaccccttttcaccccagccttctctaagcaaaagctttctatcactacagataatgtgctttttctaaaattgtgtatgaatggaattatactctatggactctctcttttttttttttcttggcttttttactctgcacagttattttgatactcattcatgttgttgtatgaatcaaaaacccataccttggtatggctgagtagtattccttcacgtagatataccacagtttgtttatccatttacctgttgatggatgtttggattgttcacagtttggagctgttacaaacatggctgttacgaacattcatataccagtctttatggatatatgttt

SEQ ID NO: 70667 - DNA, 1094 bp, Homo sapiens
gaaagggtagaagcagctctgtcttagttgcattttcttcccatcaccaaaattgttcttttcctatttaaattaaaacttgaaacttacattttataatagttacttctaatatcaaactctcaggaactttcttgtttttagagttgattggttattgatgcctttgacacaaagaaaacatcttggttctcagcaaaaaaaaaagttttctggcaccacatgttaaaacttcatttattttctcatgtatgtgttatcatttgtattacttttgaggaaaaatgtgtttttaaacttcgttttgtagcctggtccagaaaactaatagtaatttgtaacattttttcctttggggaaagtacattctgaatttaagtttttgagataaaatctgtttgtaagttggggttttctttgttccgccgtgcctattgagtttattagcagggttgtatctataaataacacctgtcatgtattaattcataaagaactattcaacaatctctacattaaaaaaataatattttggacaaacattcattctagaagtggttttaatgagaatattaattgttgttccttttatttctgtgctgatactataggaaagagtagtattataagaacaactctcatatcactacttaaatattatttgtacatatgtaaaaataattctttaagcaaaattactttttaaaattttctaacagaaaatagaaccacactagaaagatttatacaatggtttcttaactggtcctcaattctaagtgtgttcctcaaagttatctacaggtcagattaatccctcccactctacctgttcagcttttttttagtcctttttctgtttgtttgtttgtttgtgacagagtctcacattgttacccaggctggagtgcagtggtgtgatctcggctaactgctacctctgcctcctgggttcaagtaattcttgttcctcagcctcactattagctgggactacaggcgcgtgccaccatgcctggcaaatttctgtatttttagtagagacagagttttgccatgttggtcagctggtctccaactcctgacctcaagtg

SEQ ID NO: 70668 - DNA, 1056 bp, Homo sapiens
ctctggctagctgccctttttctgatgcagtttagtctgtctcctttttaagataaagtcaaagaatatatttgctctgtcctccttcctggattcctcctgataggttgccctctgaaatcaggcataatttttttcttcttaaataatatttgaaaatatatcaagccaaatatactgaactaaggagttcagatttgaggacagtttcaaagagttgttttcgaaagagagttttttaagagtctgagttaagagaaaaaaaagctgtatgtggaaaggcttaaaacttggcaaaaattgtatctacaaactgagatggtaatgttgtaagtaaagcttgtgtttgatttttccacagaggagaattgcttttaaaaatgaataaacctcttaaagcaaaggaagcatatcttaaagcactagagctggacagaaataatgcagatctttggtacaacttggcaattgtacatattgaacttaaagaaccaaatgaagccctaaaaaactttaatcgtgctctggaactaaatccaaagcataaactagcattattcaactctgctatagtaatgcaagaatcaggtatgttttctcaaaatatttctgtttatataaattgtagtttataatataataagaccttaatttaactttattacccatagcaaacactttatgtattgacagtttatagcaatactgtgcttaactgatttatagaaagaatatttaaaatacttgaagtaaactattttcaagtaacatgcattctaacatatgataatactgatttttaattcttctggcatgtgttaagactaatttttcaggcagtctattaagcaacattaactattttgtcattttatatacataaacataatgtaacttatatataaactctccaaataatatgaacttgtgaaattttttacataattggctgtgaggagccaagagcatatgttttcaaaaaaatagcattttattttcttttgattcataagagcaaatacttttggcaccattttatatccagttttactacgt

SEQ ID NO: 70669 - DNA, 4340 bp, Homo sapiens
ggagttactcagatactaccctgatcatatcaagggcctcattttaaaaggagacattctgatgaatcaaaagaaagatatactaggagcaaaaaaatgttttgaaaggattttggagatggatccaagcaatgtgcaaggaaaacacaatctttgtgttgtttattttgaagaaaaagacttattaaaagctgaaagatgccttcttgaaacactggcattagcaccacatgaagaatatattcagcgccatttgaatatagtcagggataagatttcctcatctagttttatagagccaatattcccaaccagtaagatttcaagtgtggaaggaaagaaaattccaactgaaagtgtaaaagaaattagaggtgaatccagacaaacacaaatagtaaaaacaagtgataataaaagtcagtctaaatccaacaaacaattaggaaaaaatggagacgaagagacaccccacaaaacaacaaaagacatcaaagaaattgagaagaaaagagttgctgctttaaaaagactagaagagattgaacgtattttaaatggtgaataacattaatatttatcgtgacaatggtatcaaagaacatcaatccgtatcatgtgattgcttttactgggagctttgaaaaaaagttcaagggttcctaatggtcaatcatgagctgccttgaagtaggatcaaaataagattttcattaaagacctgtattatcccaggatgtatattatgtatcgctgttttcagagtgtgggtgaatatagcagaaatattacagcggaagtgacaaatttacaacttttattatagaaagaaggtgtttctggcaatgtaatctttactgctctcaattaaaaataattttgaggcctgaatgataatcccttgaggacaaatccaacatgtgctggtttattctgttaattcccatttatttgcctacttcatttttcttgcacctcttagaatctaactatgaattgaaaacacttaagtaattctgtttaatcaagggatttacactacaaaagaatgctggctttttttatgttgtattccttagttgagttttagaaggaatgcttgatgaaacattttaaaataagtcatgacatgttagcttgagaatgtattttcataattgtatacttgtttttaactttaaatgtaatttttaatcaggtaaagtttgacacatgtatagctacatacacacatttttaatggtgctcatatatactgtattttttgttgtttagttttacttattgagagtgtcacaacatgaatcacataatcatgattttttttttttacttttactccccaaattattcatgtttcttagatcgtagtcattgagaagtcccaataactctaaacttttgagttataacgtagtaaacttctctttcatctttgtgttagctctgtagtcttaacctggattttaatttttttgtttccaaagtcacaattgaattattcttagataccttaagccactgaattcagttctgtttgactgaaagcaaaacaacgtgacagtttattttcaaacactaacttcttgatattttgttatggtatatctttttattaaatatttattttgactaagctttcataaaatatttgaagctattttaatcatcaagtatggaaaacaaattactattgcattttcctatatatgcatatattatggattaaccagaattgtatcatttttggcctaatgtctggatataaaagataattagcctactatagtattaataaatttttcagttggtttgggcaaatttaaacctgaaaaataggttaaaaagtagttacaaattaaacttactaatttatacctgattttttttcttgaattaaagtacattttaaatgagctttataataccttaaaaagttggttctaatttaaaatatgaaagctctggctatcatcctgggatagtaatttctaattatatagtatttcaaaactatatattttttagttcctttgagataactaatttctaattatatatgtttcaaaaaccatatcctgtattttttttaagaattgttttataaataggtcataagatacaaggtctgcattagaagacccactcttactaggttccctaaggatctgccatagatttttttttttttttttttttttttaggtagtttaaagcaagcactgataccagtgggagttggtcttgatctaggagattctgttaagcatccaaaaacaatgcctaatttcagttcttaggttatggcttgtgactccagataaaagatggagaatacctcatgtactgtgacttgaaaatgaattcttaaaattcttaggctctctccatgtatctttcttaaggaaaagtttctgagtgtgatctctcttttgccatagtatcaagtggagggtagttcagaaaagttaataggaaatcttttgtgacagcagactataatagaagtttgagtaatattttaataaatttatataattcaaatgataaaaatgtatcaatgttatccaatgatttttattaaaaaattaccttattattagaactgtgcctattacataaaaagtgctcatgtatttgaattttaaataatttatttaaatcaagaccaccataagtcattaataatttaataattgttttaaatcagtggttttcaaccctcacttcatattagaatcatctgaggacttttaatatggaatccacctcataacaattaagtctaaatttctggaagatggagccatgcttgtttttccaaaagctctttgagtgattctaatttgtagtcagagttgaagaccactgctctaaattagtgcaggaaaatgcttttatttctcccatgttaacttttaaaactagtaatgtacccagttaagttttgatggtttaaattccactaaagaacatattcttctaataactagcatttattacatgaaatttaagagtttaagttccatcaaactagcccttgtgtaagattattatttcttctctataacttcaaaatagatatttcattcaaactgttcaggtgagaaaacataatggatttttttttttttcctctggagctgcctgttcagtgagatggaggaggtgggcacatttaaggtcagttcactaacctatggttcagagttctgatcatatggaagtttggaaaagagagcttatcacaggtttgtatgctggtgaatggatagttttaattctcactgtctcaaaagagaatcagctctccagcagttctagaaaagctttgacaatccccaaggggcagtgttaccttactccttcactgcttcttagaaggtagaattaagtttctggaattgcacctacatgttttcttattaacattcagaattgggaatattaatttttccagtgagtagttttctgaaattggtaacttggagagtaaaataacgtattttgcttttcaattttgtgtttgtttacttttatgtaaaaatttgatatgtgaattacacagttctaataaaacctcatgccttttcattacatctaatttgaactctcaacttcatgttacagaatgctttaaagatgctttaatgaaaagtattaagaaaatatatagatttgtatgtcagtttatacttcagaaatccatatatttgtcatatttatttttttagaaacctcctaattggataactagatggtatttaaaatgaatgcccaaaaatatcttgtacctttgtccaaaagtttatctgttggaagccgccagccattcatgtagagagtttataagaaaataatttaaaattgtatgcattttatattactatggtatctgtgtaccatatttctaagtattcattattaaattggtacttcttaaaaccataacctggcttgccttttagtgttaaaaaaatacaacattgtatatagagatttcttttatgaagaagagctgacgtaatttattagcagtgatctgagaaagacattaaataagtttctgagagtgatacattttcaaacatgaggagtgacaaccaccaaattaagaaaaggaaacaactcagacttggaattttatacgaatttcatttctatatgtgcctggtattgcctctggcataacttagaggaaattgttctacctatatgtcctcagtttcttcatctacaagttgggaaaaacattttcctcttaaaattgtgaagaggatttatatatttatatgatatattgtatatattaatatatttaaattgcttagagtttctag

SEQ ID NO: 70670 - DNA, 1040 bp, Homo sapiens
tgatctcggctcattacgacttccgcctcccgggttcatgcgattctcctgcctcagcctccgtagtagccgggattacaggcatgcgccaccacacccagctaatttttgtatttttagtagagacggggttttaccgtgttggctgggctggtcttgaactctggatctcaggtgatctgcttgactcggcctcccaaagtgctgggattacaggggtgagccaccacatccaacctaaattcatgaatcattttgcttctcatggaagagccaggcaggatcaagaaaggtgtcccaaaccaattccatatatgttctctctcattgagtttcttatttagacgtagtatgggacaacactagtgccttcaaccattccccttagtgttagtcttaagctttccaacattaaaagtccaaactcttagtccgttgcacagtggcatccgacaaatgtgtgttgaagatatgaacgtggaaacagccatgattctaagcatgagatacctaaaaatactataaccacagtgcacatacaattatttaatattttcaacagtccaaacatagctgaatgcatacagatcttgatccaggttgtaaaatgtcatgtttaaaatttctgagcaagctgtcaagagtgagaaagcaaaaagattttagaagataaaggcatgggagatagatttgcttgatagtataagtcattttccccccagaaatatattaagtctgtgttccatatgtgtcagaattacccaagccagatctctttctgtctctgtgatttctttcttttttaatgcattcatcttttggagactacatggatttatattgccttgcaaaagcaatattcagcagaaaaatcaatcttttgaatactttaaacagatataggtccagaatgtgttacagaaacagttaaaaacaaccacagcataagagcaaaacttctagaatggatatgctgtattcatcagtgtgttctttaaattatagggaaggccaaaaatccccctggagactccagccta

SEQ ID NO: 70671 - DNA, 1091 bp, Homo sapiens
ttctgggtctaagggtgatactgacacacatttttccctctgcccaagatgtccttcctccaatatgatcagttgaatcatattcatctatgaaatggcatctcatattctacttccttcctccaagaagtcttcttaattgtcccaggatgggttatatgtttctcttaaactggctgtaacacttactgtgtgactctaagtgatttaacctctcagcacctcaatttactttcaagactgccgtgaggttgaaagagtcaatacatgtggaattttagaacagtacctgacatgaaagaaatgtgaacaattctattattatatattgacatagaactctgtgcttactcctatagaaatatctcatgtgattctgtttttatgcacattttcctcttccagtagataatatgcccttgaaaggacttaattttattgaatttggtattcctaacgcaaaacccaatatatattacttagtaggtgcttaataaatgtatatggagtaaataaactgcctcttgtggagttgaaatttaccactggaaatgtttatgctgtagcctgtgaccacatataaggaaaactgctgggagactgaactcagcttttcagattcttctgactataagcttttagaagattatatagagatgttagaaccaacccagaacaacaacagggtggcataaagaataaatattattcaattggcattcctacccagaaattagatatgcttgcccaagacaccaactctatgtcctgttgaagatttacaatctgatacttatttcattatgtaatgatgtatttgttttcatatgagccagagactctgtcagacattttttcaagggctttgaggccacacgtttctgggcatccacgatctagggaatatgtgccactgttttccttaattggacttatttattctgatgacttgcagataagcagagctcaagaaatatggtcaggagaagggctgtcatgacgcttgcttgattatgatcataaaactgctctgcagagtcctctccatcatttactcaactggttgctaagtaatttccaatccagtccca

SEQ ID NO: 70672 - DNA, 1008 bp, Homo sapiens
gtaggagcatgtgttctttagggccttgtaaggctgtttccttttgcatctggaactgactatataattgtcttcaatgaagactaattcaattttgcatatagaggagccaaagagagatttcagctctgtatttgtggtatcagtttggaaaaaaaaatctgatactccatttgattattgtaaatatttgatcttgaatcacttgacagtgtttgtttgaattgtgtttgttttttcctttgatgggcttaaaagaaattatccaaagggagaaagagcagtatgccacttcttaaaacagaacaaaacaaaaaaagaaaattgtgctcttttctaatccaaagggtatatttgcagcatgcttgactttaccaattctgatgacatctttacggacactattatcactaagaccttgttatggcgaagtctttagtctttttcatgtattttcctcatgattttttctctttatgtagtttgactatgccttacctttgtaaatatttttgcttgtgttgtcgcaaaggggataatctgggaaagacaccaaatcatgggctcactttaaaaaaagaaagaataaaaaaaccttcagctgtgctaaacagtatattacctctgtataaaattcttcagggagtgtcacctcaaatgcaatactttgggttggtttctttcctttaaaaaaatttgtataaaactggaagtgtgtgtgtgtgagcatgggtacccatttgataagagaaatgcatttgattgtgaagaagggagagttaaattctccattatgttcgtggtgtaaagtttagagctggaatttattataagaatgtaaaaccttaaattattaataaataactattttggctattgaatgtgtgtttttaaaaactcagttatacctatgtgtgaagtgacacattttagaactttttcattcagggattgattttgacttgtaggcatagtagggcaaggttcttttaagcttttcctagaacg

SEQ ID NO: 70673 - DNA, 1080 bp, Homo sapiens
ctttttttcctcccctctcagtagcacggagtccgaattaattggatttcattcactggggaggaacaaaaactatctgggcagcttcattgagagagattcattgacactaagagccagcggctgcagctgggtgcagagagaacctccggctttacttctgtctcgtctgccccaaccgctagcctcggcttgggtaaggcgaggcggaattaaaccccgctccgagagcggcagcttcgcgcgcggtgcgctcggcctatgcctgccccgaggggcgtctggtaggcaccccgccctctcccgcagctcgacccccatgatagatacgctcagacccgtgcccttcgcgtcggaaatggcgatcagcaagacggtggcgtggctcaacgagcagctggagctgggcaacgagcggctgctgctgatggactgccggccgcaggagctatacgagtcgtcgcacatcgagtcggccatcaacgtggccatcccgggcatcatgctgcggcgcctgcagaagggtaacctgccggtgcgcgcgctcttcacgcgcggcgaggaccgggaccgcttcacccggcgctgtggcaccgacacagtggtgctctacgacgagagcagcagcgactggaacgagaatacgggcggcgagtcggtgctcgggctgctgctcaagaagctcaaggacgagggctgccgggcgttctacctggaaggtacgcgcccagggaactccgcgcgcggggcagggctaggggcgcagggctgcgggcggggcgcgtggattgaaaatacctctgctccgctcagctggagcttcggagccgcgctgcccgcctagggaccggcagccggcgaggtaggggccgcgaaccgcgcgttccgcaccagagaaccgggccggctcagaatccactcgcttccggctgcgggtaccggcggtttctttctaacgggttctgcgccttcttagccagaacatcctccaccatcaccctgttttctatcgttcgattttgaattaagatttgcaggacgggagagattgttggggatgcaaattggcacatcttagct

SEQ ID NO: 70674 - DNA, 1096 bp, Homo sapiens
tatgtcccccgcttcttcctaggtaagcgcccttagttaaatcatttagccgttctaagttgcagtcttccacgtcggcataacgaagataaaactatctgcttcatagggtccctgtgacgacaaaatgggtacggtgaaacgtcctaaagtggtggtggggtgctattagccgttggaattaatttttcattctgaattgaggacctgtaaaaaggcctcggcttggggacacggtttgggcatcccacagatgccccttgaggctcgcttgacagcccgcctggactcgctcatctgcagcaaagccctctgagatactaccctaaccgatttaatccgttccaattcagctgtcaagtaaagggggtgttatcgtagaccaggatcaaaaatcctttagcacagttatcagaatggacccagctacatttctgatttctccctactggtcacctttggaacacgctgttctccagccacagcaaactgatacaacaatgcatattgggcacttaactgcatgatgggtaccgtcttgtttctgtgtttacttgcataatttcggacagtcttcagaaaaaacatgtaaattatcccatttacaaagattaaagaatttgcccaagggcacacagtagcaacagagtgtcaagacgtgaggccaaaccctttacagactcttaaggatgcccacatgcacggattacatagagtgttatggacactatattcacctccacgtggtattccctgcccacatgtgaagaatttcaaggtcagcattttgaattttgacctccaggctttctccagcctcacgttttctgttgcatcctccatgtcaaagatcaaaagcgaggctgctttccctgctccttttacacaccagtggttttctttgcacgcaacccttcatcagtcaaacattcactaaatgttgcatattttatctctcttagaatatgccctagatcctaatcttcacaagtgtcattggttatctagtgcgtcagcacagcacataagcctaggttcaaacctctgtcactcagtagtagtctgggcctcacttcattcattcattgatgcattt

SEQ ID NO: 70675 - DNA, 1074 bp, Homo sapiens
tcatgagtgcagagaagcactttcatagattcttgtttcttcctctgtgtgtgtgtgtgtgtgtgtgtgtgtatgtatgtgtgcaccgagcacctgtgcttgtgcttgaattcctcctggtgtttccccctggaaagttccttaaaaattgttagttaaaaaaaaaaaatttttaaagcagtgtattttggttataaaattttctctaggccatttgagaaacattccacttttgcaggaattttcctgagtttgagggcacttgagatttataagatgcaaatgggctagcatgacctttaatcttcttggaataatctctgtgaatacaatgacatttattaacacatcatgtgaaaacagttaaacagattttcagcaaataaggagagttttggaagttctgacttaaaatgtaaatgcatttaggggtcccaggtaggccctcaaagtgacagtggctttcagtgcagctaaaacttcaaaactgaatttaactgtatttgaaggatacacctgaaatagtatggcttaatgtaaaatgtatatgggttgcacaaaactgtccctaaggtcttctgatgagtgcttttaaaagataccaagaagttgtaccacaacagtagcaaccgagaaacacaagaagcctaaggaactgacagtaggtaacatgacttacaggcagtgataggctgtgagaaagccaaagggaatttcaaatagcccccaattaaaattccatgagggcagcccctgggaattgcagatccaggtttgcaatcaaactgcttctcacgtggaagctccgtgcagcttgccccatgatgaggagctgcaagggcttattgagcacgggttaatgatttctccaaacaatgcgggggaaggggaaaggcaggctaggttagacctcaaggcagaggtagctggacagcaacaccagaatcacacccacaagcatatctagggggagattggagcttccccatgaacgagatggcacattcacgcattgccaggatgataccacctgaagaaaaacatgaactattgtgaaattcagaccttagccaa

SEQ ID NO: 70676 - DNA, 1026 bp, Homo sapiens
ggtacttgctctcagtccatatcctggcctacccgacagggactctgattcggaagatctagggatgggctcaggcaactatattgtagtccagcagccagcagtggcttatacaggtggaccaaactttgagaagcttccagtgacatcccagatagtcagattcctcactcatccactctgttcagcaattgtagaaatgttcttgaagtaactggaaagatgagtcaaatagtattctttagacacaagcatcagaacttcgtaacaggaaaatgctgtgtcaggcataactaatctgcttgcccttgtaaatgcaactcttgaactggtatgcactctgatgagttatttactggtgaaacctgtcacaaagcgttgggagattacaaagaacagaagaaggtatcttggtggcagcatcgtgtgtttattgaacacccgttgtgtgtctaaaactgaaatgactgctggggcttatgaaaatgagtgagattcaggccctgctgtcacaaaaaaatataagtctaactggggaggttagacatgtgcccaggtagctagaatgtaatgtaataaatgtggtcattgcagtagaaaggaagtgctatgggaacaagaggaggaaatggttcatctaccttagggtgggaggtggaaggtagaggtggggtgctgggaagtgtcccaggggaggcagcatctgagttagattccccagggagcagatttctcactgtccccatccagtgggataggagaagaaccacacacactctgggcaagacagaaagatgacatgagctaaggtttggagggatggacatgtgtgaccagtgcagtgcaggtgaatggtatggaaggcaaagattggcagagaatacaggaaaggtagtgtagtgccagatggaaatgggctttggatgtcatggtaagaagttttgaatttttctttaggtgaagtcatcatagatatttatacaggggtgtgacatgatttcaggatataattctgtaacaaagggg

SEQ ID NO: 70677 - DNA, 1289 bp, Homo sapiens
gggtgaattcaaccttaccaaaatgatcttttcttatacgttgatagaattggtaggctaacatttagcttaaaattttttttatccatagtaatgaatataccaatatattttaattttagaatatattagaaaatgccctccaggtttttacaaatagtatttggtttcttatggtatgaaaatctcataatttttttttatgtatatacacagattaatccaaagcttgaggtaatcgatttgcagatctctactccccctgttatggatatcctttcttttgattctaccacagtaagtcgggtttttttttttttttttgacacttaagtggcatttaatcatttggcataatccattttcctttaaaaaatgttgggggaggagataaaacgtggcctatgtagcctaacattttagtataggaaaaactttatagtcatatttacaatgcatctaaatagtttaccacaaggggggagcagcaacaatttccaggaaagcttttttttttttttttttttatactttaagttttagggtacatgtgcacaacgtgcaggttagttacatatgtatacatgtgccatgttggtgtgctgcacccattaactcgtcatttaacattaggtatatctcctaatgctatccctccccctgccaccccaccccacaacaggccctggtgtgtgatgttccccttcccaggaaagcttttactttgaggtccctgagctcagtctaatccatacccactgtctcacgtattaagatgccacccaggtaacatttcacatgctgttgcagagcagattccctattgtgttatttgtccttcagaggtgctaaacttacttctagtcttctcattagaagctgtaagaaaaacagcactgccgttggttaatctcttttgatggattatccataaattaagaagtatttctaatacttacaattttgttgatagaaattacatatataaaatttatttattcagtgttttcaaaattttcaaagattaagaattttagcctttccatttaggattctgctaattctttccaaggcaaatcactgccacagttgatcctgctagtcagtgcaaaactaatcgtaagaacaaatgggaagaacagcgtggtctttgacgacactactgctatgatgtcagtttagttaaatattttgggtacatttttaatttgtagccaaaataaaaccctgacattatgacattacaaattctctaatagatctcaagaatagtatttattgtagaggaa

SEQ ID NO: 70678 - DNA, 1011 bp, Homo sapiens
aaatattatttgttgtaattcttatcaaaatcaatgtgtatctttcaatggccattaaatgaatcttctcctgctgtctttatcagtatgttgtatagattgactgggtaaatggtgatgggtaagtagattccatacttcagatccttccttcatgtggaggctgtcccgcttagccctgacacccagcctctcacacctctccctcactccttctgctaatttgttggtgggtttaggagaaattgggtaagcacagcctaacaccttctactctcctgcctttgggagtagccattcttcactgtttttctctgatattccttgtggggagacctgcccttgtctagtgttgcctgtgactcattctgggcatccgttctagaaagcctatttgtgttacacataaaagccacattctctttttacaagcatttattagaaagaaaggtgatatttcgattcttatgtgctgtattcctttgtcttatttctcaattggtttagaaccaagtaggtaagaggggtgccttttattgagcctgttcaaagatccctccctggcatatagatcaattttttaaatttattatttctttatttttgagatggattcttagtctgtcacccaggctggagtgcagtggcacaatctcggctcactgtaacctctgcctcctgggttcaagtgattctcctacctcagccttctgtacaggcgcaccaccacgcccagctaattttttgtttgtttgtttgtttagaagagacaaggtttcaccatgttggccaggcttgttttgaactcctgacctcaggtaatctgcctgccttggcctcccaaagtgctgggattacaagtgtaagccactgtgcccagcctagataaatttttttgagtatataaactagtcttttcttccagacaatattcaaacttctctgaattttttagaatgcatcctctttttttttttgaggtacttccttttaacaagtataagctgttta

SEQ ID NO: 70679 - DNA, 1004 bp, Homo sapiens
tggaggttcctgcaggatatccaaaaggggatgcccagcaagcagttgtactcatgggtggagattccaggaaggaattctgggcacatagatggtaaattcccgaacaagtaattttcatggcatgcttcatctttttacatatttttcatctgctttttgtctctcagcagttgcagaaatgaatcctgctactgtagtcaacagatggtttctcttctaatgctgaccaacacttaaaaaaaataaatgttttgcttattgacttgaacttcaccttcaatctgtaaacatcaaattctatcagcgcaaactctgagactgccaaatttttagagtctgtgaaaattttagggctgattcaatccagactccttcattatacaaataggaaatggtggccattacggttgtgagtttacaagattacatagctggacagttgcagaactggccctagaattcaggacttggtatttactgagcagtcttatttccactactttttactgcttcctcctactactgaagagctgttggcttcagagttcctcttactaatgatttgtgtcttacgggacatgaaatagtgcctgccctgtttggtcccagagccctgagtgctgggaatgtgtttttatagaaaatgtattctgaagataagaaatagccaaaggaaaatttgaattttttataaaagtgtctgtctgtctgtctgtctatctatctatctatctatctatctatctatctatctatctatctatctatctatctatctattgagacagtctcactttgtcacccaggctggagtgcagtggtgcgatcttggctcactgcagcctccgcctccctgattctcttgccttagcctcccaagtagctgggattacaggcatgcaccaccaggcccagctaatttttgcatttttagcagagatggggattcaccatattgcctaggcttgtctcaaactgatggcctcaatgatctgcctgcc

SEQ ID NO: 70680 - DNA, 1040 bp, Homo sapiens
gatctggtttaagaacactgccactttgacaataaggaaaggatttttttttaattgtgttctcaaaggagggtactaaattatggaaagaaataaaaaataaaacaattgtggtgggtcaactggatactcataaggaagaaaattaatcttgaatcctacactttataccacatacaaaagttaattccacgtagaaaacagatctaaatgtggtacgtaaaacaataagcttttagaagagaacacagaatatcttcatgaccttggggtaggcaaacactgctttaaaaagacattaacgtgtttgttgagggcagagccaatggccgggaagtgttgttggcgcacgccttccagatcgcagctcttgcggcggccatcgccttcgacttaagggtgttgcttggccgccgcctggtagtccggcgattcatttcttgctcggcctcctggagctgtggtctgtgtgggcttccacctcagacacctgcgctggctcagcggggccggaacatggctgtgtcgggtctggatcatctcaaaaatggctacagaagaagattttgtcaaccttccagggcacgtgacattaacacagagcaaggccagaatgttctggaaatcttacaagactgttttgaagaaaaaagtcttgccaatgattttagcacaaattctacaaaatcagtgcttaattcaacacgcaaaataaaagacacttgtattcagtcaccaagcaaagagtgccagaaatcacatccaaagtcagttccactttcttcaaggaagaaagaagcctctctgcagtttgttgtagaaccaagtgaagccaccaacagatcagttcaggcccatgaagttcgtcagaaaattctggcaactgatgttagttccaaaaatacacctgacttgaaaaaaatgtgaagtagaaacataaatgatcatcacagtgaagctgatgaagaattttacttatctgttggctcaccttctgttcttttggatgcaaaaacatctgtatcgcaaaatgttattcc

SEQ ID NO: 70681 - DNA, 1096 bp, Homo sapiens
ggctgagatgtctctactaggtgaggtttatgggaatgtttgtcatttgccaaagtcttagctaatatattatgatgcttttctcttgactttctatcttgaaggagtgcagtgctctcagccggggatatggtgcgttgtttcagaggccccgcctttcttggtatagtaatcccaagatctactggcaaaactttgatctgacttatcaattataaattcatcctctatcaacttcatatcatcgggaggacacgaatgaggtggaacaattcctccatgcctaacaatgggactggattcactttttcgttttactgtttctaaaaacaatgttgaaaaactttttttagcttgtcattgaatttcatattctgaatgtcgtattctattctgagatgatcctgatggttttctttcttgtccttctgatgttttatcctctttatctgatactttattatctatttctatctatttctattttctttaaaataactttatcttcaaagtttaatctttttttggttttaagtgaaacctctgtacttgaaggcagcatatttactgaattttcaaaagtgtaagtctctctcttttgggcactagatggaataacattttgcgatacagatgtttttgcatccaaaagaacagaaggtgagccaacagataagtaaaattcttcatcagcttcactgtgatgatcatttatgtttctacttcacatttttttcaagtcaggtgtatttttggaactaacatcagttgccagaattttctgacgaacttcatgggcctgaactgatctgttggtggcttcacttggttctacaacaaactgcagagaggcttctttcttccttgaagaaagtggaactgactttggatgtgatttctggcactctttgcttggtgactgaatacaagtgtcttttattttgcgtgttgaattaagcactgattttgtagaatttgtgctaaaatcattggcaagacttttttcttcaaaacagtcttgtaagatttccagaacattctggccttgctctgtgttaatgtcacgtgccctggaaggttgacaaaatcttcttct

SEQ ID NO: 70682 - DNA, 1062 bp, Homo sapiens
ataatctatttgctgtcctcgccagtactccaaaggtttcaaacgtgttctcttggtcctgcgaacatttggtgtgttggagggcaatactagtttgtgatggattctgttctttggtatcactttagttcgttttgagtcatctgaacttccaggaacttcctcatcatccacatcattattattctttccagacattaaataattattattgagcctggaaggtccactttcctctaaaactgaagtcttatgctctccagaatccaagtttgactctgttggtgtattacatgtatatccactggtctgaggctttaggggaacattctgtgcagtcataatattatcttcattctttgagcttcctgtagatctagaacaatccagatttttcctcttagccaagtctgcctcatcactttccaatggctcactcaggaaacaactggaaatttcatcatgaccaatgatacctccagaacctttagcatttaaaaacttctgtactctttggctgtctttagttgctgtcttctgccttttaagtggaatagtttttttcccaatattcttagatgactgatttgttttcttagcagatttttgcctactgttgtgatgcagtggtaattcatttcttattgaagaattgctataaacaggactctcctctgattttaccacccaccaattagacggatgcctggaaattcttcgacttctcgtgacagttgaagtcacttcttcagacacaagtttgttcttggactcactagaaaagcgcttctttttagattcttccttatcttttctagtgctacttttcttgcttcccacaggtggcatctgtattttggaagcacaatcatttcccatctcttcacgctcttccatatttctgtctgaatttctttgaaatttgtcttgggtaatatgtgacatatgtatgttttcatctttagtctgtcccacatcgagctgttcttcagctggtttagccataaattttcttctctgtttttgttttatagtccttttgcttccagatgatttttctgc

SEQ ID NO: 70683 - DNA, 1049 bp, Homo sapiens
taacttttgtgatattcttgtcaaaattatatcttcaatctaataaaattaacaaacatgctaccaaaataacaagcctatagtcttcaagaacatcaaggtcaataaagacaaagagcaacctaagaactcttctgtaatttttctgtaagcttaaaattatcaaaataaaaatttaccaaaaataagagggaaaagggaatgaggcagctctaggtattaacaaaacattgtctccaacatatatcatgctaagtagactgaggaagcaagatagagaggcaaaatgcagaatagcaagaataatatactaccatttgtataaaaagcatatgagaatagacacacacatttgtataagcacaaaggattccccagaaattagtaatgctggttgcttctgggaaggagaaccaggttgccaaggactagaaggagatttcattaaatgctgttttgtaatgttggaattctgtaatattggaattctgtttcaggtacacatattaccaactgaaaagatacgtaagataatttgtaagaaacaaaaaactggagacggtaacatttcttttcagaaaatagtgttccagacagagcctctaagtaactgcagctgattttggtcaaatcaatgagtgagaaagcttgagttgactcaaggaagttattggtacttaaggtgacacaaagacgggtggccatttggacattgtgtgacagacaaagagcaaacatgttttccatttgttgttctttgttgtcacctccagagacaaagcactgacctaggtaagcatgggctttgttctttcttctgccaacagggatttcttgaaacaatggattattgttatagaacataaatagtttttttaaactggtagattactagttaatgttttcccttaatttcctcccttttgacattttatctcgaaatagacccgttgaagatgaatggtacaagctttgacattttaaattatgtggtaatgtttatatagggtgtggtttaatggaaatgtatgaaagcaaattccaagttg

SEQ ID NO: 70684 - DNA, 1057 bp, Homo sapiens
agagggaatgtatttcaaatgtacaaagttatctaaaatatgtactgtttggccaggcatggtggctcacgcctgtatcccagcactttggggggccgaagtaggcagatcacctgaggccaggagtgtgagaccagcctggccaacatggtgaaaccctgtctgtactaaatacaaaaaaaattagccagtgtggtgggcacctgtagtcccagctgcttgggaggctgaggcaggagaattgcttgaacccaggaggcagaggccgcagtgagctgagattgtgccactgtattctagcctgggcgacagaatgagactccatatcaaaaaaaaaaaagaataaaaacatatttcttcctccagtgacgaaactaatttgttgctgaaaatatcaatagcaaaaactgcaattttgcacaacctaataattgtaaaactggacaaaatatatgtgagttagctgttttcaggcactgacctacagagagtgtgaaaactatgatctttgcaagaaagaaaacatgcaaggtgatgatctccttggctttcttcctgggagcacttttcctgctgcacagcagagaggtagagcagcctcagagtaacagcctggctgagctcaggatgtgcagagtgggaaactgtgagactaccagggatctctcactgctagactgagagctgaatgatactaatgaccatgcagggctggatgtctaggtctctagctccaacaaagaggaaatctctctgagcacttcagacattgagttgagacaccagaaaggccaggtctttaggaatcaggaccacacctgaaagaaagggccatgccctaggactaatttccaagctcaagcagacccatgctaccaaagaacaaaaggaagtgtacaagaacaaaaaggagccacctataatttaattgcctcccagttaaaaaaacgaaacaggctgggcgtggtgactcacacttgcaaacccagcattttggggggccaaggcaggtagatcacttgaggccaggagttcgagaccagcctggacaatatgc

SEQ ID NO: 70685 - DNA, 1057 bp, Homo sapiens; identical to SEQ ID NO: 70684

SEQ ID NO: 70686 - DNA, 1073 bp, Homo sapiens
catctaaaaaaaccgattccctaattcgaatttattggtaccaaagctctctttggctatagacaattaagagttgaccttttaagttaatgtatatgcttaaaaacagttttaggaaaatatttggtagacaaagagtttcaactttaaatgttcactatgtcatttagtgtccaactttacggataggttgactatctaaataggcatttttagtcattaaaaaaaatctagtcaccaggaggatccctatgactcaaaataacttgtttgtaaaagaaaatttgtttacttacccattagtaagttcctgcatattcattataagatggcaaatcaaacttttctaggatgaagacagcttatttttaagttgtatagtcttagttggtttagggtctcaattttaattaataaaatacttggtttttatttgcttgtccttttgaattcctgttttaataattttaaaatgagcacaaagaacgttgaagttcagattaatctcttctgaatgatgtttttttcctctgtgatgagttgtttctgacttttttccttttgtatttgtaatgttgattaagatgtaaaataaaaagtgtgcctgattatttttgcaaatagattgtgattattttagcctatgggaacatactcctatgtatacatttataatggcaatggaagtaagttcagcttgcagttcttttacttatttgaaaattcagacagtggatatttaaaaagtcaaaattcccatattattttacaacgtgtcattaatcagcaagtattctgaaggggtgttagtaccattattttattaactactcatgagcaaactagaaatgatctgggatctctggggcccacttggaccactataaaaggaagcaatgggcacctggacatattagcaccaatttcactaccctgggtggaaaacaaaaatgtctgtcctctaaaccacatatcctcatatttccccggtccataaatgaaattcccttccaccagtggcctgtctcttcctctttagtgattcctaaatccctatacccctgtctctcctt

SEQ ID NO: 70687 - DNA, 1023 bp, Homo sapiens
agattataattctcctgacaacaaccccacaggtgctaacctttcactgtttggatgccatggtcaaggaggcaatcaattctttgaatatacttcaaacaaagaaataaggtttaattctgtgacagagttatgtgcagaggtacctgagcaaaaaaattatgtgggaatgcaaaattgtcccaaagatgggttccctgtaccagcaaacattatttggcattttaaagaagatggaactatttttcacccacactcaggactgtgtcttagtgcttatcggacaccggagggccgacctgatgtacaaatgagaacttgtgatgctctagataaaaatcaaatttggagttttgagaaatagagcacaacagcactttcgtcatgagctgacagtagtgtcaagaaagtcaaagagccttaagagcctcagtgaagattgtattttattttatcaaaagccacctagcagtcatctgtggagcactggaaagctggggttcattttggtatatcacactgaaactgggtacccagagtgctgctgtttaatatttcacaatgccttacttattggttgttttatataagagttttgtcaatatggtctcttcttaaaagaagttgactatgaattgaaacacacaaaacatttaagtgccagacttaatattaaagaatgtaaaggtccaagtaaaatgaggtatgatttatgttgatgtgtaagttcaccgcacatcccactttttaacaaaactcatgaatgtgcagtttgagccattgctattttgattacatagaatttgtatttcttttttagccagcacattaaattttagattttattttttaatctaatttttttctaatcaaaaagaaaattgagcttaaggcaaaaggcctggttttagagatatgtgtaattggaagagggcatttgtttgagtgtgagtttggaggcctttttaacatgcagacatacccatatttaaatgaaatggggagatatttacattccgtact

SEQ ID NO: 70688 - DNA, 1057 bp, Homo sapiens
gggcaaaagagtgagactctgtctcaaaaataaaataaaataaaataaaataaaataagataaagctcttttgatatttaccatgagactaattgaattcatttgaaaatagacccaaaaggaattatagctaatagctttactttaaaaacaacttagctttttatgctttctcttttgaaacattgctttcagcattgaattggtaaccactttatatgggaaattttgtgttatatttcttatgaaacattcccaaatataaatatctttggtttttatttcagattataataataatctgtgctcactattaagttggcaaagtatataatgacaaagaaaactaccattaagcatatcacacagacttaaaattttggtgtatatatttggaagcttgtgttctctgtgtgaataccatcattcatatctagccaaaccattggaactgtacacagctggggtttcagatatataacattcagttgatggatttaggaatgggccactgcaatttaaattgcaagatgggacaagaaacacttttttaaaaagtttgcatatatgaaggtataaggcatgggccatcaatctctgaccaggctggctgagaggaagagagcaaaggatcttggttcacaatgaggctgtccctgagaaagaaagaagtgagagtgaaaatgctgtgtgattaatgtcctcagcaactgtatgggaagtctgccttctccccaaaagggctataaaatgaaacataataagcagtggcccaagccattcttctgtgagacccccaaaagtggagagaaggacataaacagagaagccatttctccatcactcagagagagggagatgatgtaggctaaataggaagtgcatcaaatgacaatagtcccaaggggcaagtgtggaagacccaagttgagtggcaatggcaaggcagtgttgcagtaacaagcagccttgttactctaataactcaaagtgatgctttggattctctttcagaaaccattgcacatctcccctacgcagggactatgctaggcag

SEQ ID NO: 70689 - DNA, 4466 bp, Homo sapiens
ccagataactgtagtaattgatttaagttttaatctgttacagagaaaaacactaaaactttatagacaaatgatagacaaatggcatatactcaaatatttatagctgtttaatggcattttatagacatttatttgggttttgttcttatttttgtttttaattaagggagtagtggggtagatgtgagttcattgtggcattcagcttatatttgcttggctttttcatggtcggtgacaccctaattcctagcatgataaatagtaaccctttgtgcttgattttgtttaacttatttgagttgttttcaaaatacattctttttaatttaaaaaatcagctaagcttgtgtatggttaagtttttgttttgttttgtgtttgatttgttcttttagggaaaaaatcctataaaatggctattaaatttttagccaatgacaatgagattttcttaatattactttgaattctttacctcttaattcttagagtatgtggttttgttgttctgtagtgtcttactaaaatattcatttttttacagtgtattgcaagttccactgcattacatgcaaatatgattcactcatacctagctgtttgtggattcaaactcataaatgaaccatttttaagttgttaatagtgtactgacatatttctgtattttctgatatttacagattcgagtggtgaatgcatttcgtagttctttatatgaagggttagaaaaaccggaatcaagaagttcgattcacaactttatgacacatcctgagtttaggatagaagattcagagcctcatatcccccttattgatgacactgatgccgaagatgatgctcctacaaaacgtaactccagtcctccaccctctcccaacaaaaataacaatgctgttgacagtggaattcaccttacaatagaaatgaacaagtctgctacctcttcatccccaggaagcccactacatagtttggaaacatcactctgattgtaagctgaatgttaacacactagctgcattgtaaagaaacaaattgaaactgggtcttttcacatattgtgatggacaagctagtattcttgtctttggacttcaacagaagacacacttgtacgaatgtagatttatttttttaaaaaaaaaaaagcaaagctttctgccagactgagggtgctttttggggggtgggagaaatgaactgacagataaacagtaactcagcgtaagtgacctgtggatcatcagtagtacccaagcatggtcctgaacagtgtattagcagagctttagtttatctcagtcctggatgggagagagagggaggagtaaaactgggcaagacaaagagccctggatcgttgaattgatagtttaatttctgctgttggctgttaataatttggattatttatgtttataaatgatacagatctgtttacaaggtttgtagatactttttttgttcctgttcatagatgggaagcttccttataactgatgcagagaaaaattagtccttcaaatactgctgtattttcaggaaaaaaaaaaaaaggggtgtttctattgaaactgtactaaatttttgcctacaatttaccttgttaaatattgtagataaattgctaatactaatagccaaatagataacactaatgctttgtttaaaaaaacgaaaaaaacaaaacaaaacaaaaaaacatgagcagtggtgttctaatgaagttatgacatctgtcctaattagtttcttaaatacatttactacttaatggttttgaagcaactgtttaatttttaaaatttttgaaaacttgctaataaccttttgttcagaatttagtagattgtttaatgcaggacatcaactacataatgaaagatgcttgaaatgcttttgttatttcaggcaaatcaaattaaatcagactatcaaactacaagagaaccttagtcttttttgtttttgtctaaacatgttagtttagtgatgtcttggtgaactgtgagtgaactgtattgatttttctaatctttagagaccttcacacagcatgagggctgttggcattttgaaaaaggttaataagtagaagcatacatgttttccttttgtttttgaaacttgtttgtaaacataaataaatatgcccttttattaaataaattcatggcaatgtttttttaaaagacatttcagcttctttactcagttctgcatatacagtgcatcagtctgttctctttgaccacaattggaatacatttcaagatggtaacagccccatgaagtaccgctttaattccttgctggtaatctaatagaatcagattaagaaaattaacacaattttaccatttgacatactcttcattgaatttagtttgtctaaaatagtctcacaggtaaaaaacataacaacaatgaccaccattgtctttgatacatttattttaattcttaagtggccaaataacagattaggtaaaatgagattacatgaaaaggttctaaaatgatatatttagatgcaataattaaccatatgctagaatgcccacctctaagccaattggattctttagctctctttttctttccttcatctaccttcttctcttttttgcctctgtctttaccctttagaaactggcatgtgttagggcccagatttcaccagatacacaatcctcaggctgacataaagtttacgaggactgctactataactgagagtgctgaccaagcaaagaaacatttagttgatggtgcttgatatttttggtgggtgggggaaatctttttctcaccatcaaatctttgcagtaatcctctgcaggtcttagaaacacattggctctgtcagcatttgtaattgtacatttattcatcaggtatttatagtgaatcatactgtaaaaaagaggtagcatgatatgctggaaagcatattagactaggagtcaagacctggtttctagtcttggttttgccattaatgtgctgcatgatcttgggaaaatcatttaccctaaataagggtggtggactatcttgaagaaccctttcaactctaaaaattgaccctatcaactggagagcccacaaggcatagggaatagagaaaagggaaatgttttcagttttcttttttattttggttatgcttaaatatgaatgtaattaccaaaagatttagaagtgcatgtgctttggaggatttgtattgagcttttacagtattcatttttcaactcaaggcaatggctttctacaccaactctaatccataaacgggtcttatgacatctatgaagtagtagcaagacatgcttagtgtgtatttctctctttgagacactgtaatttctaccagaaatttccagagcattatgtaggtagaaaaaaatgcaagcaagctgttaaagatcttggatcccattatatagtatgtatagctgaaatctgtaattcaatcactttttctcttttatcctctaaccaaaaaattgtttaattttgcatcccaaatgtttttaatctttgtatattttttaaaaatccttttctcctcatcattgccttttttgtggttgtaaatagacttacttgcactttgaagatgagttactccttgtcatcttacaaatatgtgatatggtaattttcataacagatgtcagttttgaaccaagaattggtgatttgtttataagaaaaaaactggcttcatttctgtgaaattgctctttgaaaatttctttttacacgtgtaagccaactgagataccgtgatggtgttgatttctttcaatgatgcttaccatctattttagccactgagccttttattatttgtctatttgtaaagtttatttgtcttaactcatttaataaatatactgtttatctgtttctgaatggggactgaactttttggatattgatattgatttgaaaatattttggaattttttctacttgaaattttagaaatctaattgaaaattctataatgtacttgaaatgttatggttgtgttacagtgaatcactcttctaataatatgcatgatcttgcctctaaaatgagagtgggtacattgtccctactctccaacccactgtcctcaacccttatagcacaatagatcatttctgcagtctatgggaatgtaatctgctggttttagtacagattagtttttcacattagctgtaagagcttatttttatttcattatccatacttgtcaataccagttatctgaactctatggtaaaaattaataaaattatccatagttgttttttataataagttattaatataaactagcaactttgttgaaatactgagtaaactttaaatgatgatgaataccatatttttcagttagtataaatcattagtaaattattgagtatacttaagtaccatatttgtgacat

SEQ ID NO: 70690 - DNA, 3546 bp, Homo sapiens
gccgggtgcggtggctcacgcctgtaatcccagcactttgggaggccgaggcgggtggatcacctgaggtaaggagttagagaccagcctggccaacatggtgaaaccccgtctctactaaaagtataaaaattagctgggcatggtggcaggcgcctgtaatcccagctacttgggaggctgaggcaggagaatcgcttgaacccaggaggcagaggttgcagtgagccaagatcgcgccattgcactctagccagggagagaagagcgagacttcatctcaaaaaaaaaaaaaaaaatacattgtcattttgttctgtaatttaatccaatatgcagcataggaaaaactgaccttagagaatgtttttataaaaataatgttacctggaaaaaggggtcacaaaatgatgttttagatttgaattgaatagctttaacagtgtatatatgaaataaagtgcctgaaataagagatatacctcatatttactataggcagcttacttgcaaatgcatgtcattattttttaaatgtgacagtgatttatgcattgttcattttaagcccattactataaaactaatttatagaaaatctaacattttcatagatgaaggttaatatatattatggcatataatttgcatgagctaatttattgtcattctgcaaatcagtgaaaccagactttcaggttttccttaaatgtagcccaatctttacatctttgtgtctcttctttttcttaactatgtttctagattctgaggtttcttatctattttgagtacctcattaatagagatcatcttttaagtaagacccatactaagtgtaccatggtagaacaagcactgcctttggtggtcaggagacctaggttcctagtcactccatgagcaagtcactttatgtgccttgaagcctatttcaccttggtgaaatgaggtgggtgtactagaagttctccaagcagaattctgtagctgactacatgcttgtttctccctgataaacccaactgctgccttagagaatggatgttaacacataagctaatatacgtgtattggtgtttcttgtatcctttgtgttttctagggcatctgtttttgtttggcgtcatcaatcagtactaatccaattttaaactgttgcattttaaaaaaaatatgtaacaaaactattttcagtgtaaccttaatgatttttttaaaaattttatacattttttctcattgaactctgacagcattaatgaaatgtaaacgtgttttgcatctagtaagaccacctgccattttcattgtattcaaaataaataggactttttaagtaaatacatatatcagagcatggttttacaatgtactgtcttgaatgtcctgatgaaaatatgaaaaatgtaatcaggttaatttccatttaggaaaactttttatccttcaaactcaaatcttttgtgtagctaagagaagaatgtattttgctctgggagagaaagactaatcaacaggatcccattacttcattggtaaagatagtcggatactctcaccacttttaatacctttagtattacagttgatcagcttacctttacttgatatgatttatttctaagttcattcccctgtgttgtagcttatttcaacaattccaactagccgtttaaaattcctcaaagaagctggtcatggaacacaaaaggaagaaatacctgaggaggaattagcagaggatgttgaagagattgatcacgctgaaagggagttgcggcgtggccaaatcttgtggtttagaggtctgaacagaatccaaacacaggtatgggcctggtagagaggtaggagagatgatgggagccagggctttttgacctggggaggaggttcgagtgtgctccttaaacttcctctctagccttcccaacccacaaattgtattctcttgaaaagtaatactggtgcctggaatgagtgagacttttaactgattatgaaagaatgtgtctatatgcccctaagctccttttttcctagctcccccatcccccacttcatctcaaaatgctattcttgcctatatgctgtgtaaaaagtgcctttttctttttatatgttgatagatggaatggtcctttctcttgttctctctctctcttgctgagcaagctgtcacaatctctgattccttgcagatggatgtagtgaatgctttccagagtggaagttccattcagggggctctaaggcggcaaccctccatcgccagccagcatcatgatgtaacaaatatttctacccctacacatgtagtgttttcctcttctactgcttctactactgtggggtgtgagtgtgtgttcctaagtgcatgaaattaacatttcctacttcacacacctaacgtttctcattttctccttaatgtttgaattcattgttcaggctttttcataaagctttcttttcgtaaagtggattgagacctcaaagtgttgtcgttgttgttttatttcttagagggctagataacaggtggaacaattgcaaccaaagattagatgcaatctgtgagcttgtctctgtgctaactctgatagttaatatggggaataaaattgtagcttagaacttgtgaaactactataaatttttgagtatatgcctttaaacatgtttatattgcatgtttcctaaaagcatgtgatttgaaactcatctaacagaaccaggaaattgcattttcaaagctaagaataaatttagcattttgacttttgtccaatttggaaagtaagttagtagcctgaagacaagttttcagtatgtatagccagttgcttgccttcttaacctgaactttgccttgctttgattttttttttttttttttttttttgcttggttgtgcagtggtttcaggggaaatcactgtgtaaatttaaaaagtttctgtggtatttatggtttggggtgttttttttttccatttgtatagacaatttagttaaaaattgcatcatagataagaaatgttctgttaagtttcagtagaagtaggaaaagtatactattgattaatcgttgaaccaataaatgttgtaattttcaataattgactaaaataacattttctttcaggtttttagtaaatagcaaactttctaaaagccttataagctataaatcttactgagaattcatggcgcattctcaatatattggaggcattaaagatgtaaaccccaaaatttacagagctacctaaggttagccttgaagtagacagagacctatcttttccatttggtctccagccagcgaaggactagaggaaccttgagaagctgcagagaggatgaattaagggagaaaacagtgcagactttccacttaatgcctgttttttccgtatttacttaagtatattttcatttgatattttttaaaatgtggtgaaacaggcacagtaagaactgtccctgttttacaggtgtgaaaactgccttagagtttaaataacttctctacgactaa

SEQ ID NO: 70691 - DNA, 1238 bp, Homo sapiens
ctttgggaggccgaggcgggtggatctcttgaggtcaggaattcaagaccagtctcgccaacatggtatattaaaatcctgtctctactaaaaatacaaaatagtgggtgtggtgatgtgtgactgtaatcttagctactccggaggctgaggcaggagaatggcgtgaacccggaaggcagagcttgcagtgagctgagatcgcaccactgcactccagcctgggcaacagagcgagactctatctcaaaaaaaaaaaaaaaaaaagtgggacattaaaagtaaaatattcacattgggagctggagactaagattctaaaataagattgtttcttcattgagtattttgagaaaggtttcatctgaacttcatgtttatcaaaacaatgtatgcgtagcatttaaaaggtcaagtagttctataagacttaatagcaagttccctgccacataccaaatttttggctcccaaaggaaactgttttagctgcttcttttacttagttatgtacctttatatctctgaatcacataattctggtgctttttgatttttttaatataaggctttaactactgactttcattaatgaaggtgaggacttagtgctttcacaagcatatagaccacattcaccgcatataccttcatgctcactacctatcccatcatctgccagcagagttatatcataatttagatttgatcaatattcagtccttactgtgacttactgtgactgtaaatgctgtttcaacctgatctgtgtggtctactgtaattacttttccttccttacacagctttttatgttccctataatttgttgtcttttacttgctttcttttaatttttatttggtttgtttgaatttttttggcttagtttttctatgtacttaactaattcatccccaaattctctgtttcatacatcagagacctttagcactcttaccaattttagtgtctaagagatacgtctctcagcatctttcaacatgctttaatctgcactcgctgtttgctagccttgctgcacagctgtcttcttggtctccatacctgaggattttctttattctcctttgtgttggatcttgtacttcatgaattcagtggcatcatcttctttggtttattcccttatctggtggagtcatcttctccagctgcttcctgagaaagggtttgtctttgtccattttgtattgtgataacagaatatctaagac

SEQ ID NO: 70692 - DNA, 3185 bp, Homo sapiens
gtaaaaccagaagggtagaaagccaaccagaaaagaattgcctaatggttgcctggggaaatggtgctttaaaaagccttctgtaaataaatactgcaaacaaattagtagatgacaactgaaaacgaagcctgagctaagtctggcagtggaattggaaagagattattgaaaatagtgcaagaaatgttgagtattggaaatgaaatcaatcattattaagtcattgtatcattgtcatcatttgggggactataaattaatgcagtcgtgtgcagtgaaatatttttccttctaaaaataccaaattaactttgtaatttttttttttaatgtaaaccaggtgccagatgcaattaaaaagtgtcagagggctggaattactgtgcggatggtcactggtgataatattaatactgctcgggccattgctaccaaatgtggtattttacatcctggggaagattttctgtgcctagaaggtaaagattttaacagaagaatacgaaatgaaaaaggagaggtaaagatttattattattttgtttttggttgacagatgtttaatatattaggaatttaactcaacaaacacatattgaatatgcactgtgttaggcaccatgcatgaaataaatgcagtctataccttaggaagcaaaatactagtgttctaagggataaaagagagaagtaataaattggtactaaagggagtaagcatttcttgctatgaatgctatataaaagtagcagcagtgaatctaggccaatttcagaagtacagtatgtataagggagtaatgggagatgagttggaaaggctgatatggagcatattttagggggccccaaactctctgaacttcttatgctaaattaaggaagttctattttcataggcagtagggggattttttaaatttggtctcataatgatatataaaaacagtggcttttaaacttgagtatgcatcaaagtcacctagcaagattattaaaacacagattgctgggcctgccccacagtattcgctaagatagatctgggtccatgcccaagaattcacgtttctaacaagttcccaggagtttctgattgttctgtggaccacactttgagagctactgataaatatgccagatagctcattaggatttaagaaactatgtttgggcatattttaactttgataaacacttatagattgagcaagagaggatagacaagatttggccaaaacttcgagtacttgcaagatcatctcctactgataagcatacactggttaaaggtaagtagatttttcagttatttcacaatttcttaatacagaaatgtgttctgcttcccagaatagtaatagatactgaatattagattgagtcatggatatcatctgttttaataaaatctaaatacatttcctttgataccttaggtaaattgtgttgttaagtgattatcttaagtgtttaaaacaggatattgctctgaatatacccatagtttctgaagtaggttctcacccaacatctaagcaatttccatttttatatttgtttatttatttttaaccttgagtctataaaaccgacgtcaggatattcttcagaatcatcttattaaagagtaatgtttttataacacaaatatttgcttgtatttaaggtataattgacagcactgtctcagaccaacgccaggttgtagctgtaactggtgatggtacaaatgatggcccagcactaaagaaagcagatgttggatttgcaatggtaagaatttactcattcaaatatccaaacgtaatttactgactggtttgtttgtttgtttgtttgtttgttgactaaattactatggattttaaacactgtccctcaagattagttcgagggataattaataagcttaaattggtttataagtctaattagtttatgcattagctttatttgatgtcatgaaatctgactagattgtttcttttgagcaatttaataatattgtatgttggctttgtattctgttaattttttaatgtctgtcaactcaactgaaccttttaataaccctttaatgcaggacacaggcttagaatagttgtgtgtatttaaattaaaaatataattgaaactcttccattcatctactcagttactcttcagttatttaaaaagtaattgaataccatcattttatatataatctttttttattgaaaaaaatcctacctacttgttttccccaaagtcctcaatttaagtattttattttctttgagtttcattttatttttggaaaatactggttcataatcacaattctcaaatctagaactatcaggaaactgaaatttttaacctaaattttgcagcagactcatttgattgcaaaatttgttctgaactgatgtgaggctgttatttgtcctacttagtgtgaatattcatagccattgtggagattttaatgtgatttttatggggtgctaagctcttttgggaaaattgagatataaggttatgtgtctcattatctttccaaactatgagagactgaattccgaatcacagtctggccctaaggttttcagatgagagattgtttttgtgtacaaatgtttatttgcataatttgtccccctgatattttgctgctaaaatggaaatttagaagatctaccatggtggcagcctttcaacaggagtgagagagatgaggaaaggaaattatgggtaaatttccctcaatcaaaagcagggaatccaaagatcccccgccctaccccatcccaaatttaaatggttggcagctgcattggtaggagcttctgaagacatgtgaagcatagctgaagaggtctatggaataattaagtgctcttccttttgctgtaggcaaacaggctcattccctttaggaacataggatcactcactgctgctcttgagcatttagcaggattcttattgctatttacattctgacagctgaccagaaaggcagttatgtaaaatgaattttaaaataaaaaaagctttcttcccaaaacttgaatgtaagacagatacaatgggctttaaataaatacaggtaaatataatcaaacaaatacacaatacaatggcttgttggttagtgttttttaagctcttcatggttttaggcccagttatac

SEQ ID NO: 70693 - DNA, 1507 bp, Homo sapiens
atgaacactttacaattagtttaagagacaaatatataaataaataactgaaggcagcatataataaattggtacaaagtttttgggtgagagatcacactgtagggatgtggcatttaagatagattttggtatgaaatgagaacttcgaggtggggaaaccacagcagaggaaaggagatgagaatatgcaggtcatactggggaggggaatatctggttgtatagttcagctgaatagtgatgggcttttgtggcacacaggccatatacagctttcttcttgccacagtacactcagttacctgatttcattgaaaaggttagaaatctgtttcaaccctggcttgctgggtagtagatagatggtttaggagagaattttttttagtcaaaactgatcaggcattgactctttctctgcaactaactagcttctggatatggggcagatttttcccttacttccatttttctcatctgagaaagcgggtgatgaccaccaactctgtggcacttaaatgaagtaatgcataccaactgtctagtgtgaagcctggtggacagtaaacatacagcaagtgttcccacagtaatatttgcattttgttgtggagactttttaaatgttgggctgagcagttaaaattgaagtaagccagataatgcaaatgaggtatttttttcttcaagtagtagaatcatcaaagctgtgattaaagataattcttgcatcagggaacaaggtgggttagagggaaaaaaaaaatcaactagagacatatcagttaaaaggctattgctattacaatagctgtagctttgtagcttgaagtaagaaccagaagaaagtagtagcaggagaaataaaaaggagtggacacattgaggaggctgttcagaggagaaatgtataggacttaggagctaatagtagagagatgatcaggaaaaataagtattaaggtgaaattttagacttacatcaaaatgattagggtaatgttgatgcacattacatgggcagtgaagaggcagcttccagtctttcatccattaaggtttaggtactgataaaacatctgggtagaatttttcagcagtgatggaaagctttgaaaaacaaaacagaagatgtggatttgggaattacctccctagaagcaggaagagatggcatcatcaagggagaggagtatagagaggcattatgaaaaacaaactttaaataggtatatagtatgatttttattcattatgtaatgaaagaaaaggtagtagtgtcactgaaaataacttttggcattaactctcattctgatagaatgcttattttaacaataagttattttttttctttcatggttaaaacaatataggtgatgaaacaacatctcaggtaaggggttgactacgcttggctttttaccttaaaagaagaaaacatttgtgattttggtattatttcaaactaatgtctgattctgtaccaaaatggtgaagtata

SEQ ID NO: 70694 - DNA, 1074 bp, Homo sapiens
ccataaaaattggtagatttaattttgaatgatttagtataaaagttaagtgaaaacaggaaaaggaaattaaaattaagttccactctgtattaggaaccaactataaacttcatacatcttatatcacttaattttggggtcataagtgctcctattttacagatgctgaagccaaggaccaaagcagttgggtaattgtcaaatttcacgtagctagtaactggcaggactgagattagaatccatgtcattctcaccccaggctcctttctaccttacttttctatatccttctttaaaatgttgatattagacaattgctttgtaattttattttagaatatcgcagtctgttttacattataaattaaacgttcttagagaaacgagatactagctactaaatgtttttctcttatagccaccagagaaagagggtggattacctcgtcacgttggtaataaaactgaatgtgccttgttgggacttcttttggatttaaaacgggattatcaggatgttagaaatgaaataccagaagaagcactgtacaaagtctacaccttcaattctgttaggaagtccatgagtactgtcctgaaaaattcagatggaagttatcgaatattcagcaagggtgcatctgagataattctgaaaaagtaagagtaaaatgcttggatgaataaattgctgactatagttgctttatggagtatctactgtgttgttattgttgttgtctttttgtgaacatcaggcatttgataggacctcagagttttttagcatattttatggtatccagatatttgcccctgctattctgccattttcacactctagcttctcttatttcttagcattttgttatagggaaaataagctcattacattcaatctggtatgtttaatgaagtatactttgatgtttatttttagaagtcgatttacttgttatttaatatgcagaatcttgaaaagcctcctgggaagaaaatcaagtttatgtctttctttctttctttttttttttttttttatttgtttaaggtggagtttccctgtat

SEQ ID NO: 70695 - DNA, 1045 bp, Homo sapiens
gacaattttgaactttttttttttcaaaatgatcttgcaggtaaaaaattataaccaaacaaagaatgctgcttttgtaaattttcaaatgttaattactagttctctttaagaaacactgctgacagtgagcaatattaattaattagtcatcgtttctacctttgcactcttcattattagacctgtcttgataagaattttttttgcttactgtttgagtttattttcttttcaggcatttaacaactttcatttcaaaaataaagtaaatgtatcaaagtgataagatacagtataatcatctatctgtccttttttgatattttaaagtaatttgaaatatttggggtaaatacaagttttggacacatagaacagtcattttaccgaactgccattagttcattttgagtagtcattaatgatactaatttttcaattgattagaaagatactggtaggattgacttatgctttttgaatagaaaattaataagaacaagttaactacttttttaagcctttattagatgtttatctagctctgttaccaattactgttcttttcacagaggtatagtctttatggattctctgttagtgtttcacaaaactgaacatggtttctttactgcagaacttcatttttctaatctttaatatgtaaatcacaagtaatttaggaaatacacatccgtttttcacatattttttcaaggaaccagtttttttgcagtatcttgcaaattagtcatcacaaaaaacactttgtaaaataactccatatagtttttaacccattccacattaagtgctgagaactaattataaggtattttaacttaaatgccctgtgagactactgtgaaaactgttggttttttagaaatgattttttctgttgtaaatgagagaaagaagtgagatgcagtttgatgctaaggatgaaaatgccaagtctgccagcatatagaatagctaaaaaatgactcattctagttttgatatgttaactctatcagagttaataataaaaaaaaat

SEQ ID NO: 70696 - DNA, 1030 bp, Homo sapiens
gactcaacttaagtatttcaagtatttgaacgctggttattatatagttagtagcaaaaatgcataagaaacaaaatatatagcataaatgttactgcatttatttaagagtcatatatgcatatttctatatgcatatggttatacataatctctacattatggtcataaattataggggagggattatgttgtttagatgttacctaacataacacacaggaaaagaaatttagtattctttagttctcagtttaaggaccctgtatgcctcatcctcattacctagcacaacattttcaaatatggtacaaagtttcacaacctaacgtcactattgtcttattttctctgtgtagacacacacacacactcacaaagctgaatgcttatacctttactggtttctgtaagaaactgatttttaaaatttctttaaaatgttaatagtgatatgtgcctttaaagtatagtgaagttctatttgctcttaaatgtagcaaaagcccaggatggtgcagccatggaaatgcagccattgaagagtgaagaaggtggagatggtgatgaaaaagataaaaagaaagcaaatttgccaaaaaaggaaaaatctgttttacaagggaaacttacaaaactggctgttcagattggcaaagcaggtatgatatagagaagaaaataaagtgttttatttttaagtatgctttctgcttaaaaattgtcttttgacacacttaaggctggaaattgttgctttgtgaatagaaggggagtttgaaatattttcagttctagctacaatgcaccaggccctttgagttactataggtacttataatttgctaataagtggtcgggttaggattagtgcctaagtctgtccagttacaagcctgtgcactcatctctgaatttctgcattaagtggagaaaaggcaacctgtgaggttatttagtaaagatgaactaattatattttaataaaatttcatcacacattttgctcatctttttactggttatggga

SEQ ID NO: 70697 - DNA, 1921 bp, Homo sapiens
tttccccctgagtcttatacactggttttattaatctagtctagaacattccccagaaattaacatctaatttgttgactccctttttttgttgttgttgttttttttttaaagaacagggcaacattttttcttctgtgggcctccagcccttctcccattcccttgactgccttagcgattactcagaagcagtccggggtaatgtgtctcagttccctcagtggcctggactgtggccgtctggtctctccaaacttgagctcattaaaagtagctaggtattatcttactatctcctcatcaatcttgagcttctattccttcttgaccatgtttgttccatgttttccgtttgaagatagttctcctcgataaagaagctagaagaatataggatgaatggttctcctgctctttggcatttttaatattgtagtgcctactccagacaataggcctgtcccttcattactttattgcttcagatatgctcatctttctgtgttttccaaatataagctgatttggagagctgccttacctggtagtcttactggcttattctatacattcgtattctagttttactaagttacctctcctatcttttgtacatattttgtcctcactctcatcaacactctcctgtgtgccagttgtctttttttttttttttttttttttttttttttttgagacggagtctcactctatcccccaggctggagtgcaatggcgtgatcttggctcactgcaacctccgccttccgggttcaagcaactctcccgcctcaacctcctgactagctgggactacaggtgcatgccaccacacccggctaattttttatttttagtagagacagggtttcaccatgttggccaggctggtcttgaactcccgacctcagatgatccacccaccttggcctcccaaaatgctgggattacaggcatgagccaccacacccgactgcccgttgtcgttttataacatcccttcctcctccctctctacccctgctcttcctcctccctctccacctctgcccttttctgctttcttggggttatatttgtatttagttttaaaactttttgtatcatatttaggtttattacagcttataaaataatgaagtcctatggaaaaataaaacaaatatagacaccctaaattattttgcggtattctcccgtaggtaagacttagggagtgattgacccagcaggtcatcacaagtcaaatgttttctaatctgtagacacacacaccattgtgtaacaactgttatagaaatgtgaactacttctgcataatttagcatggctgtattcatttcttttggaaagctttaattcccattttgttcctacagataagaaacaagatggagctattgagaatcgcaacaaaggtaaatttaggaggacaaaagtacagtgagcttgttttcattatatccaaaaatctactgtataccatatttattcaaaagtaagatacatgtggcagggaaaatcaacaatatacgttagcttgggttaacctttcttcctgccggtgtcttagtcatgtcgtcactgcaatgttaataagattttaagtatgatttgtggtacaggttgagtatcccttatccgaaatgcttgggaccagaagtgtttcagatttcagattttttttttttttttttttggattttggaatatttgcatgtacataatgagatatcttggggaagagacccaactccaaacacgaaatttatttatacattgccatatacaccttctacacattgcctgatggtaattttgtacaatatttttaataattttgtgcatgaaacagttttgactattccgcatcacaggagatcaggtgtggaattttccacttgtgtcatgtcagtgc

SEQ ID NO: 70698 - DNA, 4868 bp, Homo sapiens
ggaggctcttgtagtaacctcattgtgatagcttgaactaagttgaactaagtaaatatgaaatggaaggggtggtgggaaaaattacaagttcgcttccaaaacactgaatgagagaaagctatagtatcacaaattgacccccaagtcatattaattattctaacttttaggttctggggttcctattcttattttcccagtattctatatggaatttatgaaattgtctatcagaactgtacttgtcagattgaatttatactagagttttgggaaagccaaatgtagccttctacatgtagtcttctgtcattgtcaggtgttgatagattgccaacattttatacattgtcagatgattgctgctgaaaccagagtcaaacctgtgatatccacaagggtcagttaagttagaatcacaactttagagcaaaacctaagtttaaccataactttttaagatttataaatgcatgccaaaagaagcttattgcaaagaaccagacacatttatattggccagaaaatcctattgcaaaaaaatcagagtaattacatttataaacaccattataaataggataaaagttccaattctaatatagacttaacgtttcatcaaaaaaaaaaaaaaatcttgagatgtgtataccttcagtatcctgtgccacttagaacattaggagatatacgtaatgctaaatgacgagttaatgggtgcagcacaccaacatggcacatgtatacatatgtaacaaacctacacattgtgcacatgtaccctaaaacttaaaatataataataataaaatttaaaaaaaagaaaaaagaacattcacaccctgtttggatttttctttgtattggtgtggttgtcatttataccaaatagccagaaagagcttggatatataaatataatgtatttaagtataatgtgttaactcattctacttaccttgccatgcttctaaggaactgtagttaatgttaaccaaataaaatctataacctttccaaaggagagggaagctatctaatcataccttaccatcacagattaaccagaccacaatgtgtaacaaactaagatagtctcctgtttgctatgtatactgcatggacttttatgtacatctcacttatttacatagtgcttagctcttcaggttgatttcctttaactgaactttggtcctttctgttttaacagagatgactggtaagctttatgtagactcaggttcctaacacaccaagtataccaggagaactctataaattttccacatttaagaaaagactgaaataactttgtagagtcccttatcgcagtatgggtgggaaagtttttctgcatttatttccctattccaaaaatgtactaaaaaacatgacatgcatttatttttaaatttactctcatgatgccatctctgactgctgttcttggcttcttaagtttagatttttaaaagcagtattcagttagtggtggggatatgaccaagacttaaaactgtttactttgcctgagcacattcactgccaacatctgattacctgtggtaaggcaaaatagaacctaaacaattggagtctggagaaaaccagaattgttaaaagaaataaattatctactttttcactatcttgaattatatttcttgttttccctgcactttcactggcaaagaagctaataactagtgaaataatcaatatggatttttaaaagcaaggaagcaaaggcctaaaaaacaatattggataagttactcagtaattaatagccaaatatggattcttaaatacttgagtaagtacatatattttatgagcgtacttagcaaataatccttgagcatcaacttggttcataagattatggtagatgctatgttcactgtgctccagaagattgtaaacaaggaaataaaatacaaatcaatgataacgtgtaaaaaaaaaaaagttgctttaaagcctgcttaaaactaacaaaaagattagacggattagaagccttttagtgaataagaaaagatatagagatgtggatgtacaagtcggagaaccgtaagcagacttatcagcattataactgaagaagaatatactctttatcctctgacagagctggactgaatctttgccttgacatttaatagttgtataaccttcaggccgagcacggtgactcgcacctgtaattccagcactttgggggctaagacgggagacaattatggagaccagcctgggcaacacatactctgtctctacaaaaaaaaaaaaaaagttgtataaccttgggcaagtttctagaaaatgagaatagtaatgcctgccaacttccaaaattgttttgcgggacatagaatttaatccatgttcccatctctgattcctagttttctgtaatgaaattttatgttagagtagtggatgagtaagtttgtaagattgggtcggtctcaaggtgaggactttggactcaatccagtaggcaacgaagaatcagaaatttttgagccatgagaagtatatgatgaaatcacaattttaggaagattaaaatggatttcaggatgaactgggaagacacagagactaggtagggggctattgcagttacaaaggcgtgctggaatgaaagcttgtgttaggtagaggttatgaggttgggtgtgggaaatgtgacattggttgtcattgatacatacgttgtttctttataagcagtgtttttctcagagaagtgtccctcataccttaggttacaattaatgagcattcattgaacccctacaaattctaggcagtatgctaagcactttacatttataggtttatatgagaaatgtaaatctcatatttctatgaagtgtacagacagggaactgagttgttaaaatttacctaatattacatggtaagtgagtagtagattgagctttgaacttggatatgactgattagagttaaaaccttaagcacaagaaataagttttatttaatgtcttactaaatgtattttattgatcaagacatggtggctcacatctgtaatcccagcactttgggtggccaagacaggaggattgcttgagcccaggagtttgagaccagcctgagcaatatagtgagaccctgtctctacaaaatttttttaaaaaaattagcagagtgtagtggcgtgtatctgtggtcccagctactcgggagggttacttcagcccaggagatccaggctgtagtaagccatgttcacaccattgcactccagcctgggtgacagaccaagaccctgacttaaaaatatatatatatatttatatatttatatttatatatattttttcctaaatgttgaggctgttaaaaacaatattactgaagtttgaaatttggtggtagcaaggagatctatcagtatttttaaaaacaaactatgtttttggttataggtactcatgtaatggaaggctctggaagaatggtagttacagctgtaggtgtaaattctcaaactggaattatctttaccttacttggagctggaggtgaagaggaagagaagaaagatgagaagaaaaaggaaaagaaaagtaagaataacaattttctataattggtatttggaaatagggcaaataatttgtaagaactagtaccttctttcaagagattctggtatgaaaaattctacaaaaagttaaaagaagatttttctattagacttaatagcatgggcctttagagaatacatcagtcccctttaccatggccagagaaattcagcatctacttgaatacttccattggcattcttgcatttattctctaggtgtagaatctcccatcatctgatcagcaaaatgaattgaactctcacggcggattttttctgctactttagcagtggctttctttatcagccatattatattttggtttcactgagctttcttttaatcttcttcacatttctattctactatacttaatgtgcttggtttttgaacacaagactaggacttcactttgacaccttacatttctcttgttatattcagcccatcattagatatcaaaatctttttaaaatgttgatccattgtatctactgtccctccaagtgttctgttatcagaaaacttgataatcatacataccatttatctgcaaggatcttacaagaaactgttatacacaagagacatctcagaatctcctagttaggggcatgccacttttaaaaagccctccccaccctgcttctaagtgtctgctataccacccttccttcacactcaggattacccctctggagtcttttccctttaggttgacaacattttacggtggtttagccacttagatttatttgatgttatttaggatagtaaacccatattgttgtttctcacatgaatattttgaaacattctaaaataactgcctggctaaaatcctggtttgctataactacagcagtgtttttaatatttgagtggtttgttttgttctttgagttttgctgttagctataaaatctctatttcgaaacaaaaatgtatgtgaaaaattctggacgcagatccaggtggcaagccccccattctaggttttttttctatgtcctccttgaagcagttctcaatgtgcttccatacgtttcttaaggctgagtagaacgcagtttgaaaaccagcacagtaatgattccatttattgaatgttttacatgcactatctcattaatcctcacaactgtacaaagtaaagacttattatttttttactgataagtaaactgaggcttacggagattatataatttgctctagatcaaagtgcta

SEQ ID NO: 70699 - DNA, 1405 bp, Homo sapiens
taataattaatatggttagctcttggttgagtgcgaagaaagccttagccactgctgtacctactttaccagtatcctcacatttaatcctcacaataactctggaatagctggtggtatcataatttgacgatgaagaaaccaagtctcaaaaattaagtaacttgccttaggactgatatttcatctccttcagtgtccttactcttaactagtaccctacctagactgcctccctctactgagattaagaattacagaagcagggaacttgaaagtgacatagagttcttatggaatactttgaatttaataaagtatttattgctataagtaaaattgataaacataattaacacaaaaatatgatttagacgtactatatgtatgttgtcatcaattcagaatctttttgataagcattttctttctttccaaatagtttgtggagaagtttctgttggggaggaagaaggtgaaggtgaaactggttggattgaaggagctgcaatcctcttgtctgtagtgtgtgtggtgttagtaacagctttcaatgactggagtaaggaaaaacagtttagaggtttgcagagccgaattgaacaagaacagaagttcactgtcatcaggggtggtcaggtcattcagatacctgtagctgacattactgttggagatattgctcaagtgaaatatggtaagtaagtaaaaagagcagtacatctgacactaaacataaaattactgtaatcttgtttataagtttagtatatcatgctttttattttaggtgatcttcttccagctgacggcatacttattcaaggcaacgatcttaaaattgatgaaagctcattgactggtgaatcagatcatgttaaaaagtctttagataaggatcccttacttctatcaggtaaaaatttcatttatatctttgaacactttcctctttcgcaactatgtaccattgtcagcaaacaccattttcctaagagtcaataatataaagaggaatctgtattttatgctaccttctactgttgtaatccttgcagactttttttggtaagctgacaaaaacattagaaaactttgaatgcagagctatattttacaaatgagggaccagagtccaaaaaatcaagagatttgagattcagcattcatgctagtgtaatgataaaactgaaatataggcctaatgatatctcttgagttggtctgttattctgtatcatgactatttttaatgcctattgaagtataaaattaaagaatgaatatatgtttaaagcaaattaatgaattctctgtgatgctctacaaaggacaggttgttttttcttaagaactggtaaaatccttaaagtttacctaatccaactcctttaactgctgaaga

SEQ ID NO: 70700 - DNA, 1433 bp, Homo sapiens
tatgtgtataaggtgtatatgaaacataaattgatgtttggacttgggtcccatccccaagatatctgattttatatatatgcacatattcccaaatctgaaaaaattaaaacatttttggccccaagcatttcagaaaagggatactcaacctgtacagagtatcctaaccaatagagaaatacattatagcgtggtagatttgctttaacttgtggctacaaatgtttttttctcctatctttccctttctcttttaaatttctttatctgccttttaaaaaatttgtttaaaattaatagttctgctggtagattctgtaactggtaggaaatctagcatgcattttggttactatatttaagtagctgtaatataaaacaaaccagtagtattttatgtatcaaaaggctgattcaccaaaatatttttgtgaaagcttcattcctataccctttcgagttgtgaagagatacttgctaactctaaaagttgggtaaggtaattatgttagtctgtttgcattgctgtataagaatacctgagactggctaacttataagaaaaggttctgcaggctgtacaggaaacgtggtgccagcatctgcttctggtgagggcctcagaaagcttatagtcatggcagaaggcgaagcaggagcaggcagaacacatggagagagagggagcaagaggtggccttgaggggccaggatttttcaaggacctgctcttgtgtgaagtagtcaccatggggagggcaccaagccattcatgagggttccacccccatgatccaaacacctccccttaggccctgctttcaacactagggatcatatttcagcatgagatttggaggggaaaaacatccaaactctatcaataattatgtaattatttataagatgtacctaggctcacgtaagactgtattctttctctttaaagaaatttggacacagcataaatcagtttttctgagattggtatagattaaggtttcttagaagcagcacgactgacatattgagcggcaaaattatttgtcacaatattcattctgcaccccacccccagtgaggcaaccaaaaacgtctccagattttgctgtgtgtcccatagggggcaaagttgcctctggttgaaaatcactatagataaggagaggcttagacaatattcttgtcactgttgagctaaattattttttaaacttttatttatttttgctaaataagtagtacctattttactgtttaaaaaaaataatgggggtgggggaagacagtccaaaggaaataatattcactggaaatcccatttcttagagattcctgctatacccttttatgtatatatcctttaagattttaaatatgtatccgtggtctatgtgtctatgagcactaatatatgtaaaggtatgatg

SEQ ID NO: 70701 - DNA, 1961 bp, Homo sapiens
tcctacatccagtccttaagtacgttgtctgatctccttccaaaatacctggcaaatccacttatccccttctgcctccacttctaaaacccaaatacaagcaccatcatctatactttataagcagcaacctcccaactggtctttttccttcaatcttgctctcttcaatttccttcagatagcaatttatgtgatttttctaaaatgcaggttagttaccactactctgctttaattgttttcattgcactttaaggtgagaatgccattctcctctccctagcccccatgttcttacctttggccactttttccattttgaccctctcttctttcctccagggtcactgggttttactacagtggctttgcttctggctagtaaatcttctaatcttgttttgatctctgggcctttgtatttgcttttgctgctgggaatgttctgctcgaaagtcttctcacccttgacccctggaagttcagacagaagccaaatgttagctccttagaaaggctaatgtagcccactaagagagttctattggcccttttttattgtcttcattgtacttgtctgtagttattttaattgtctactgtctacctccaggatagtataaacttattgaatgttcttgttcacactgactcctcagcatgtagaacagtccctagaagtagtaaatattcagtaaatatgtattgggaaacagactattgttacaaaactgttcgttttattatatttagattgtgtaagtttattaatagaaattaattgtccccaaaattgaattaataactatagtgttcagtcagtttataatttgtgttccacttatttaacttaagagttgccctgtttatgatttatgaactgtgtataccttctcttttggttcttcaaaacaaccttgtaagtttggccaactgatattagtgccctcccttgacccccaaagagttaagtgacttgcacaagatttcagtaggtgaaccggaacctaggtcttctacttcctataccagatagttttattggtatagtgtcctaggtgtgtgcttttgtgtgtgttagtagtttagaggaattataatagcatttaagacctttacttcccatatactctccaagatacgttttaaagctatctttagctctgtggctgttcttttcagtggtaacataaaatattggtccctgttataaccaatatgttaagatttggccaattattttttagtggtgataattatcaggtgttacaggtatgtcatatatatgcaattaatggtagtctttatacagtgtgagttaggctcatataaccactatctccatttttttttctttttgctggtaagagcattcaaacacaagacaagacaaacctacgcatagactaatctcatccttattactgcagtccattgctgccttgctttctattgactctgtcttaaagattagagctctttggaagctttcaactgataagtcttttttttttctttttttttttcaactgagaaatctaaaatactttccgtattgcccagtatggaccctgttatagttgcaagtgagatcattttctgaaatctttgaatcttgttgaatccttcaatgaagtaaataattactttaaagctatatgttcatttctcattatttattctaatgtatttatattccctcttctactctttgcctgcctgagcagtgagattaatagttaaagcacttaaagctgagagccttaacagtaatctactgttttcctgtcttcctcctttgatgttctcttggaataggctcttgccaaaaaaacaaattgaagttaggtttaatatgagaagtcaaaaatgatgttatcctggttatctctgccttcttctctagcattctttttctttctttctttcttttttttcggaaacagagtcttgctcta

SEQ ID NO: 70702 - DNA, 1220 bp, Homo sapiens
ccacctcagacatttcagccatttgttagctgggcagaaaactcactttcttgaagtctgctcttatcactagaagaagaaggagtaacacctcatgggattaaattgtaatgattaagtgagagaatgaatttaaaacaactagcatagtgcttggaacaataacagtaatactgagtggatcataaaattcagtcatgtgaagtgcagttttatttaataatgtaatctaatgtcttctgatgtacagttttatttaaaagttgtactttgatcttttatcatgcaaagcactttaaaagcacaagactggagttcaaaaatatttatattattaaattatctactttagctacctggtgacatttagaaaatatgcttacatgcataatactcttaagatagattttattaacttttaaatattttcttcttacagatgtgtatatctcatgattgatatggagaaactagtcatgggccaaaggtcaagatacttctctgggaaatgttgctgctgatgctgctttacaaagtcatacaatgagtgtttggtttaagaaagattttcatacttaaaagattttcatcttggaaatacatcaagtgaaaattaaattcttttgggaaacattttccttctgatatattatacttgtaatgggcgacatggcaaacaactcagttgcttacagtggtgtgaaaaactctttgaaggaagctaatcatgatggagactttggaattacgctcgcagagctgcgggctctcatggagctcaggtccacagatgcattacgaaaaatacaggaaagctatggagatgtctatggaatttgcaccaaattgaaaacatctcccaatgaaggtgagttttattatgcttgtttttggttctttgtgcaaagagttctatatatttggcttataaatgagcatgcttatattatcttggcgattgtatgattatgacataattatagtgacattaaaaatgggttagttatcagattaatacagttaaagtatttttatattaacacataaatgttgcaaattaatttatatgttttagattggcgggatgaaatattttgttccattatatatactactgcttcctgtttatgataaaaagattgtcttccctttgagctatagaggatggaaccaggcttggatgcctcccagggatttggtggaaataaactctcagatca

SEQ ID NO: 70703 - DNA, 1034 bp, Homo sapiens
gccctccgcttgaatagcaggtagagaatacagatcaaagtcttagaatgaaggtcaagagtgtgtgaaaccagagagtttgaaggatcaccaacatgttgtgatggagtgggctacagttcaacacatccctgttgcccatattctttgcactttggtgagttaaccataaataaattcttgtctgatatcctcttaaaatagaatttaccttattttccaaccagattatttaaatgttttgcagaagtgagtattgatttactgaactgttctttaataatcacagctggaaattgcaaaagatcatcaactatgaaactatataaatagaacgagataaagaaatgggaaagtgccttcttcccttagttctctattcagttggtgaagaactgtaataaatcttattgaaatctagagtttttaattaagaaaacagaaagctcatgttaaatttacagataagagttatgcctccctcaatattgccaactttatttttgtgagctcttttcagtgacataatgagcatcctgtttccttaagcatgtaagtgtaggttcttgtgaattgacaggatagaagctcttaagaactgagtaggccgacagagcagctggtgtgacattcaagtgttcatgttgccttctagctcctgaacagaaggaaaaacacagttttaatttagaaatctcttctttgactatagctgaaaatttcaacaccagtgagactggaaaatgatagaacatttggttctcatatttaactggagatatagtatgttcttatatttggtaaactgcacaggattatataaaattaactttattttttgagcttttcaaaagcttattttactaggaaacttactgtaaagatgaaaggtttctaaaatgcctaaatagaacaatagaataggagaaaacaaagtagtttattttctgggagagcaaaagaaagtaggtacctaagattctctgttaaacttttaaaaatttaatttttttaggtgtttaaagtaatttaac

SEQ ID NO: 70704 - DNA, 1030 bp, Homo sapiens
aaaaaaaaaactgccttgggaaacagactctcaggtcttggctagcacattctcttccctgtagatttaccacatgggaaaccacgttataattaggaggttgcttagtgagtatgtaggcagaacaagcggtatgtttggaatgtgtgatggactcaggcttttcttaacttctcaaagaccggttagttacctcatctggcaattgggggtaataatattaaatactacattgcatagggcattgggaagattaggcgaaaggatccatgtagagtgtatactgcaaattgctaaacacagtgtctggcacaggtgtcctcctcttaactctggtaagtagtcaacattttaatccctcagttaggatacaaatactactgtaacctcattgtgaacgtagaaaactcttccttctaaatactgcttgaatgagaaaggccagattttcttttcctcttctaatgatcgtccttagaagacgatgtttgaccaacccatttctgactgttaaatgctttttttctcccattgagttaaactgactcattcagtctacctaatgtcagatcttgagtcctgggctccattttgctctttttaggttgcccattttgaatgttctgctcaatccattttattaggttgagctctatgaaattgctgatattctcctggttttcatccacaaaaatggcagtgtcatatggtttaacctgatataatgtataatgattttaaattttaattcctttcagatgatcctagcagttcctattccaagtcagttgatgaggtctgagcccccccaccccttttttttttttttaatgtataaggcctgaactgttatacttctttccctgtgatcaggttccaagaaggttcttctgttgtatgtgggcatgtgtcttttgtatagtgtatcatttttccttttctctttacatttagatcagaccagcattaaccaggcgaatgattacttgtacttccttaactgatagtttacgttttgcatttattatta

SEQ ID NO: 70705 - DNA, 1030 bp, Homo sapiens
aaaacctatttaactgtactgaacacaaaacaccttttttcacagcacaactattaacatactatgagatagcttctccagctcaccagtttggaagtctagtctagaggaatttggaagttcttaataggaatagagtttttgtgtttgagtttgaggataggaataagattactgtcaagattttggagatgaaagataaatgaagcttagaattatagttttgtaaattcagctaagtggaaacaagaggctaaacttggaaaggaaaatacaaatatccagttgtaatcctgaattgcatgtgggtctttcagacaaggtacagtatttcagtacctcaagtgtatacagataaccgcactagacttaatatgattcacagtagttgggtaatgaagggtacaggtagtgtttataaatataaatctatagtcataagtttgagtgccagtgagatgaaaatagaagactccagactctactgtggtgggtgtggagatagtggttgggtgggagagaggcagaaagtacataggggagccagtcagagacacagagaaggaagggtcagataaatagatataaaattagaattgtacacggaaggcaagagacgtgtacaaggcaagaggatttcgcgcgataggcagccatatgtgctagataagaaaggaatagaaaggaatatacatacatcagagggcccagtttctttttcttcctttttaaaattgtttttattttttgagagggagtctcgttctgtcacccatgctggagtgcagtagcgtgatatcagctcactgcagcctctccctcccagattcaagcaatccttctacctcagcctcttgtatagctgggattacaggcacccgccactatgcccagctaatttgggtattttaatagagacggggtttcaccatgttgaccaggctgcccttgaactcctggcctcaggtgatctgcctgcctcagcctcccaaagtgctgggattacaggcgtgagccactgcaccagcca

SEQ ID NO: 70706 - DNA, 1041 bp, Homo sapiens
agaagaaaagaacattggtatgaagtttggtatcaggagaaataagcaaatgaaaagagttgaaggaaccagtttatgtatttttatggaagtaagtagtagtataatgttacttccagtacagttttcctttgaaggtagtagaggaggatgcagagaagggtacatttgttctgtggcattttcagttgtaaaatgagtaaatcataagtttcattataagcttggtcttgtgttcttccatttaaagtgtggtgaatcagatattgccattagtgaattaagaggagaatatttgaaggacaaattaatctcagttggagactattccttaaaatgttcattagtgtgctagaaagatttgggagaaggtataatcactacctcccgcttcccagcatacaattgaaattaaactcctgtggataagtcactcaaaacagctgggctctgcctaggagtatctcaaaagctgggccctagatccatgtaaaatacaaggtgtttaatatcctacagggtctgtattcagtatcatttggcagtgacaaaggaagcttctgtctgctgatccttgtgtatccctgcacatatacagagtagttgttaatctttaaaattgcgaaatgcttttcaggatagcactgtgattgtttttgtttgtttctttgtttggtggtggtggtggtggtggtggtgtttatttttgagagagagtgacttctgaattttttggtccataatgcatacaagttcctacagagttttcttctgaggaaagaatttgatttgccaccgtgtagaaaaggctcactttttttgtgttctataataataactaaaaagtctgctttataaatttgggaattattcttttaacaatgagaatttagaaggataagtatcttgtaagactgtggagccagaacgttttgttttgtatgtttggcacagctataaaatgaataagctgtatctatttgcaatttttatactcagttaagtaaaagtgtcttcccttagggaagactgcattcccca

SEQ ID NO: 70707 - DNA, 1055 bp, Homo sapiens
tgcattggccaagggagttttgttggattttggcatttatttctctacttacaggtaatttgaagtttgtggtactccacttgctgttaatactggaggctacctatggttttatttgtacttcttatgatattgtgctttttgggggaaaagagagattgggatcaggctactgccattatccttctggctcagaagttccacaggagctttttaaaatcaagattaagtcttggtcctggagactgattccaacggtatgaagtgaattttttaaaagactagttccattatgtggatatagagctaattttagcaactggttgccttagaccagggagaggccaatatttttgtaaagggtcagatattaaatattttaggctttgaggactatctttgttgtgtattcttcatttttaagcctttaagatgtgaaataataaaataaaaattcttagtctttggctgtgcaaactcaggctgtgggtgattttggccaacctctgccttagaccaccttcaaaagtccttttttttccaaaagcttggcttaaaagttattgtaatgtttacctttttctgagagcctaaaatagtgattttttttttaatgccttaagtagctttggatctactctggagcataaaccaagaggtacaaactagaaaacatagaagtaacaatatgaaatgggaaatgtaaatgtagttgttaccatttagatgcttcagcaacagaggaactttatattattcctgtaaaacacctaactttacgaacactgtggatgcctagcatattgaccaccacaatgagtagcagctagtatgcatgtaaatgtgcgaatgagaagttcttggagaataagttgcaaatggccctccagagttgtttaaattttaaaaatttatgtcaaaacgattttgacttttgcatggctgaaattgagcctttctggcagtatacaggttcaattgcttcttaaggcaagtcttgatttttgttagtaagacacatgcaaaatagcttcctatttgccatggccagaggg

SEQ ID NO: 70708 - DNA, 1236 bp, Homo sapiens
tagactcaacatggaaaaaggggtggactttcctgttttgtgggctaagaatgctgggaagtggaaagaatgattatttgagtcggaaatatggctcttaagtttatctgtttgcaaatctgtctccctagatagactcagttctttgttgggacctagcatagtatgtgacatgtattataagtcttaacaaactgagtaataatcctgagtgatcactttctggttaattatgtttgacttttacaaattatctaggataaattatgtggtacattgacagaagatttttgtgtaaagtatttaataaaggtttgtctttataatgacaagttttagcttatggcaaatatcttataacccaattctggtgaataaataagtgtttttgacatggagaagagtttgagtatcatactaataacagtcacagacttcaaaccattgctttccttaaagaaaatggagttggcttatagactttaatatttgaggtcataaggataaagaatctgattttcttttttagttagaagaggactgattgtatcagaagcatgttgcatgtaacagttggtatcatttaatccatataatagccctctaaataggatgatgatttttttttccctgtagacagagaaatgaatcagtttacatgcccaaatgctgaatggcagaaaggcatgtgggcccagctgtctaactctagtccactgctctttctgctgtacacagttgagcctctcacatgttactagaagtttgaaataatgtcaaaaactagatcgtttttcctttttggaattaaaatgttcttggatgattcttaaagtgcttgcctaatttacccaaagattgatggaaaatgtacaagaggctagggatttggtttattcttattgattctaaatattgactgcaaaaaagccagatttaaatccagttctccttaggttgtgggaatattgtgccactcacttaaagtgacaagcagtgaagatttgatattatcctgattttaaagggagaatttatactaccagaagttttaggagaaaatagtaattcttgattaaatgtggtatttccagtgatagcaggggaaaatagttaaggtctgtagtagaaaagcacaataatcaagatcttagaaagcattcatgtcaaaattagtaagtggtaagtaataaatggtaaaatacgtgtttattagttttttttttttaaaaaaag

SEQ ID NO: 70709 - DNA, 1041 bp, Homo sapiens
ctcccttcctgaagtatacctgtggccctagatttaaattaaatgtttccacaagtgggaactgtattggttgaaggccttatttccgagtggagggaaagctcttttgagcagattctttggccatgccccttcaatgtatttgataccaggtaacccccccataagcagataccctaaggagttgaaaggaggaaactttgagtggtttgggggatgttgagagattatagtttaatctagatctgcacatgcacagaaggagtttgaggttgtcattaaaagtcatagattatagtggcattggggattttttaaaattaaggtgacagctgtaagtgggatatgagagggagagagaataggacagattatgtagttgaatataacttttttatatctagttagtagatacacatctttctctatatatatgtatttgaacattcagtgcaagtgtttcttttggctactcaagtaataattacttagaatagttatgggtataaaaggacgaaatgtatcaaattaattgtaccatgacattcctctaattttgaggtcagtggaaaccagtcttcttgtcctggaatgtaacttagtggactaatcgctatctggaatgctactggaatggggaggaatcaaagagaaagcagaaatagaagaagaatggagagaggtgtaggataatttttctcccagcctaaggctattatttatccagtttcctgaaccatgtaaaacaaagtagagaaccaggaaattggcagaaaagccctctaagccgccagaagttcatgaatcaagactctcagcaccttactccactttaggtgtttacttgctgtatttattcatattttaaatacattttgataactggtttgccagcacactgcagatgaaagagagcaaatttcagaaactagaaagactgtttagaatcaagcacaagtatcataggaactaattgaaaatttacattttagtgatggaaaaggaaggtttttaaagtaaaaaataagaattcacaaaact

SEQ ID NO: 70710 - DNA, 1042 bp, Homo sapiens
actagcatttaactctgcctcttgccaaacatatactaaaatgagaataagggaattcttttttaaaaaagccataaatccacaagggagaagagaaacccacaccaaaattttagaaggcgttgacttagtagacttaaaaagctgatctctaagtaatagaaaagcccagaaacaagtcagtttatagaattccctgagagctcaaagctgggaaaacatgggacccatggtgaagaggggacaggggggcaaaacgggagaactggttgaaattttaggaatttgatacccagatatctttccctctgtctgtactctgtgatctcttttccttcatccttgcagaaggctggaagcttgctttctggagaaggctatgcacactgggaatacagttgaaaaccagggtaccacactcaaaaccgagtgtttacctatttatgttaagatcaccagtcttcttccctcacccagctttcagaattctggccagaatagaagtgtcttatctaacctgaccagctcaaggtaaaagacctcaagaatcggacattggctgtgtctgtgtctccaaagaaaatgtcccagtcagctcaccctactgtgaaacccatattgaatccagaacttctatttagtttgtgtcctttttttctcataaacaaatttgttatagtcttactaagatataattggcatagaataaactttacacttaaagtgaaaaacttgagttctgaggcatgtatatatttccacagtcgccaccacagtcaggtaatcattcccctaaattttttgtgcctccttatcttccttcccttcccctaccccagctcctcctttcctcaggcagccccgatctgctttctgtcgctatagaataatttgacttttctggaattttatgtacatggaatcatacagtatgtgttcttttttggtctgacattcactcaccataattgagtttcatccatgttgtgtatattagtagttcttgttattgctgatgaggattcactgtatagatacacca

SEQ ID NO: 70711 - DNA, 1149 bp, Homo sapiens
ctccagaaattattcattttcctatgattagcacagctgagaccttacaggtgcactgctattgagtattctcccaaccttttaaattttataggtctaattgttggtaaggtattgtggaaggagttctaagacttgctcctgctttaattgacgttgcaataataatcataataaaattgttggtcaaagagtagcacaggagtggttttggtagtgaagaaaataaaaagaaatctgaaggtagagatgaatggaatcagcaaaagtgaaattggttagattagtaagttgtttttctactgggacactcatggatgatactgacatatactccattctcccttgctaatatctagatttttttagtacctctaatactaagagatttttaatttctttgctatacttctgtccttttcttctctattcatgctcaaaagaaagtaagtgctataactactcttttttgtttgcttaaaaaatgactcatgaacttaaggtacttaagtgtggacactcctgacaactaataccatagcggagaactactgagttaaagggtaccagtgcaaatagagggctgaaaacaaggaaggtcagtcagtgaatgggaaagaaatatgacaaagcctaggaaagggagctcctctagcatcaaactgtctgcatgtcgagtctcagaaaaacaaggattcgtcagtcaacccctttctgcatgcacagtggatttagggtaaagtttatgttaccctgtctttggccgagcgcagtggctcctgcctgtaatcccagccctttgggagactgaagcaggaggattgcttgaccacaggagtctgagaccagcctgggcaacatgacaaaacctcatctctactaaaaaaaaaaaaaaaaaaaaatttagccaggcatggtgtcgtgtacctgtagtcctagctacttgggaggctgaggtaggaggatcgcttgattctaggaggtagaggttgcagtgaactgagattgtgccacagcactacagcctgggcgacagagggagaccgtctctgtctcaaaaaatagatgaccctgcctttgagcttaagcactactgtttttatgtacataatttaatgctggaacttgatcacctccggccctcctgct

SEQ ID NO: 70712 - DNA, 1627 bp, Homo sapiens
ttagtttaagagaaaaaagcctgcgcccccacctccctttttgaggaaggagtctgtaggaggaccgcgttccagtggcaggggtgtggggtgggggctgtgctctctttatcccatcctgcgggagaatcctgtggctaagctggttagcgacccctggttctgcgccgcggtcaccagccaggttggtctctgtgcgcatttcattcaccagttttctgcgggactcgcagcgctgggagtgctcgcaccctgtgcgctgcttggctcggaggggagggcagggcgtccgggtgggttaaaggggtctgcaggtacttggagggctcgaccctcctcgacaggctgatatttaccttttctttgggttagagcgctgcagacagccacctttcgcttctgtgcccgctacttttcttggtttattaataatctaatggcttctgttggtatcgattgctgttcgtgataaattagctacatagatttttttcatacgtgtgtaggtatatgcatatatctgaacttgtctgcctgtcaacatggaagcctttgttgtgtttaacctcccccacctgaggacagtcttattttaaaataaggcttttgttcagcgtgggtgtattttataataagaagtacttgtaagggcctggtttgtatgaggctctcatctggcagagggtgtgtaaccctttggatggtggcccacgtgagtgaatggagggccttcaccacttgccccgatgccagccttcccgagactccctgtccttgtgtgtggcaggggtggattgggggaattaagagggattggaggagaatctgctttttgtacttgtgcgtttcatttgggtcctcctcctcccctctctttttctttatcctcctggtgagttcaaatttgaagtaaatagaaacattttttttttaattgggaacctttgatagctagtatatgaaatgggcttatttagctatgatttcaggaggacgttttagtttttaccttgctttagataagacagctaaattgctgtaattaagggtggatctctgtcctgattttggcttgggtgtaactgcaaagatctttgaaaagtaactgttaatttcctaccatatagtctgcaaaagtgagtcacattcgggtgagttgaggacagagcgccacctttaatttaaaatttcgtgattttcttttattaaaatggtgaaaattcggggtacgccttcttgatttttatcgcagctgtcattattggcatccccattttgacgtgtaagggggaattgtcttcatttttctgtattctctcatttctcttttgagagaaatttctgcaattgtatgggaaatcttttttttattgaagcttgggattttagcattctgagatgagatgagaaactagttttgatttgtgtttataataatattgatggtctggatattcttggtaaaagaaggaaagtaatagctgcttttaataggtggtttgaactagccattgccaccaaataaaggtacctaccagtatgacagtggctttacaattttttttttttttttagctgtaggcctattaacagattctaaaataaacacgcaggatcagatatagta

SEQ ID NO: 70713 - DNA, 1088 bp, Homo sapiens
aatttttattggcagcaagggagaccccttcctgaaaaagaaagaaaaaacccaaatctatgtctaattcttaaaatatgtttcaggttgtagattttagcaatatttattattcaagcttgggaatatgacctcatttgccatggttgtttgcttattttaagaaaaatgcctttctacttcttgttgcaagccatcaggcaaccatttaaacatgcaagcaaaaagtctggatcatgggcatatttaaaaatctggaagacttcaataagttgtaaagatttacgattccatcgtgggcttgcagaaggggtttgctgtggccttctgtgagcaagggcggcctagtatatggtgggcataggccaaagaacttaccaaaaattctaccagagtgaagggagcacaaatagttttgggggaaaactttccttgtcttaagcaataccgtatacagtgtttagaaggaatgtcacctaggtttcagaaggtgaatttgaaaggctgaaataaagtactttagaaagaggtatctttttctttccaacatcaatttgatgcacacagggacagattttgagaagctctgtaattgctcccaggagttgagttaggttgaggtagtcaaccagctgctaacaatttagtttaatatgcagtcttagtaaattaaaggaatctgataaattgagacccagcatgattcttatttgtttgctatggcataacatgttgaacgccagcagaaattaacccattgaaatttttctactcaaggcccccattttattttctcactttcctgtgtcagatgtttttgctccagacttggtcatctgagcaattccttagttttatgcttatctacttaaaaaatatatatataacaataatacaaattctagaatcatgcttattttcagttttctctctgtgtttgtatttaaactccttgaaggtaaaaataaataaataaatgagtctgttactcctcttgtgtgttaacctttctacttcacatgtagatcatcttaaacatgcttgatgtagattttgttttctgtgggagctgagacacttgtgggagg

SEQ ID NO: 70714 - DNA, 1373 bp, Homo sapiens
gaatgcaatagaaaaaaaagggtctactaccacttttagtttctgtagtattggttaatgaatatgatactcctctctacagcccctctccccaacatccatgttttatggcaaaagattataggctcataaatgcagctggggccaataattgatgaatgcaatattttatgacagattatgcatttccttagacaggtaactgttacagaaatattgcttcttgattataaccaatcagataataaaaatatgtttcagttttactgagatgtttgattttcttaggtcttgttgtgccacaccaggaataaagcttaattaaggattcatttactaattgtttatcataaaagctatattcaagggaaaaagttacattgaatccatagttttctgggaggagaacatgggaacagtctgtttgtgacctgtatttctctgccaacttcaggacttggtaacctatacaggtttcctatgtgagaggttaaagtgtgggtccttctgtttcctaaaaaggaagcctataaagcaccacatcatcttttaattattttccatacaataaagccagtttaaggccatgaaatggcctatgagctcctatgtgttatgtaacattttcagtggttactgtagcaacattttgtcctttatggcatttcatttccatataaagtaatctgcattgttatgggatgctttgtcccatagtgatgaccataaaccatgctcaagggtctcaaacactgactccccactcccttttgttctacctgaaaggcgcctactaagcttcttcttttagtgactattaaagggggaaggatgccctgaagaggttcgtccgctgtccaacagcgacccctagaggcacaatgccttgaaagtggccaaaacctccaaaacttcaatgcttttctccaatcaagtgctgctgtaatttgcttaccttgagaactatcacagcattaatcaagacctgcctttactctgaaaacatgggctgcttttggtgcccaaaaacgaaagcccaaagtttcgggagctttactacctactatctactacacatacatttgttttctctttgtgagatttaagggaaccgtggaagaattgctttttattcatcatcaaataagcataataacaaatttgggcatagtcaagatacaacgcctttgatggcttttcgttagttttttgtttttgttttgttttgtttttcgcttgaaaaataagttaaaatctcaggaagaaagaaagaaaatcctagcgctttttcttttctgagcttgcaactgtttgtagctcaggcacccggatgattcatcccatgaaagccttgagcgctccatttgttttgt

SEQ ID NO: 70715 - DNA, 1016 bp, Homo sapiens
gtgaagaataacataaaagtcagaagggcttgctttgttaatgctaattaacccatttgtgcctgaagctgcaattttttgaatttttgcaatcagatcttggtgatgaccttgagcagcaggatataaataactcccagatgcttagcgttccaataatggaacactaggcataaatggatcaggacacctgtcctaattccattataggattgtactgaggaacgaatgcagtgataaataacacagttgttagaaaatataaactatggtcttttgtataatgcaaatctcagatatgttagaaatggcttttgtattatttatcttaatctaacgtagttttaactccaagactcaattctaccatattgccaagaattcctctagccttttcaaaatagcaccagagactgggagccttaaatcttcatgaaaatagggaagaagctgatgttctggctaacatggtcacttctgattttttcactatccagaagatccccttgacatctggcagttctcaagtgcttgtgtaccagtctcaggtgggaatctttggtcatgtttggaacgaacccagctgtggtcccatctcctggtagccatctctcacttctgcgggctcctgacatctaatattcaactctggagtcatcctgccttctcccacattcatctgaggaccagggctgtggttccactgccctagggcctatgaccaatgagcctctctcctctgggggaagactctccacccctggcttctacaaattcttccttgtcttctttactgcatgggcaggtgggacaggatgatttctttccatttccccatctcttcttctctcactgggcatcctgatggtggcacaggggcagctaggtgtcagggctgggacttgagcaactcaatagctgacaggctcagggagatagggaaatacatcactgacagcctcggcctcttcctctacaatcacctcattctatttccaaactcaatgctggactcc

SEQ ID NO: 70716 - DNA, 1077 bp, Homo sapiens
ttgtttgttgagagaacaaatacattagcaaacttgaagtaatgtttcttgcaatgtatataacaatattaagtaaaatattctttacttcatttcatagcctctgatctcaaggatcacaaaacacattgagtattttttatgtcactgatcactcccttttagttttgaatgtaggtattcatttctcttagaagggaatttgagacccataatccataaacagatcatgcatatgcataaaacaaatgtgatctccatggtaccaaatatacagggtatctgttttcttcagtaacttgattcagtggttttacatagccttaagattacatggtcagtcagaagtagggcttggatgtctgactattttccccataaacagaaggacaatataatttatagtccatacttgggacacctttgagagtgaatggggtgctattaattatgttgtaacaagagatgtaaacaaaaaacattctgggacatgtgcgacgtatagtcaccctactctatagaactgtgactctaattctcctataggctacattaagttgtttgcttaatatacacccaaaactgtaattccaattgatttcctgtggtttcttgggtcactgtattgagaaagatattaaggccgcttccagatgtcacagaaaagggtgctgtgtttcactggtgatgcctggtggctgacaaatgtgaatgaaaggacaatggtaggagtgcccctcacttatgattcctgatctagaactgagaatccacagctgtttgcacttctacactaggttcctaggaagtagttatttcctcaatattgactcctcctccattttggtgcttcagttccctttgtgaggatctggatttcatatgacttaggccattcataaccaagatttgctgctaactttctagactttataaatttgctacttaccatttccagttctagctgtgctactcaggattcttgatttcttgtctatccataccgtcacaattatagacttttttgtaaaatcacttccacctaattttggaattactgggcttccagtcctcatg

SEQ ID NO: 70717 - DNA, 1392 bp, Homo sapiens
aatcagtagaaaatctggctttgcctcacatagtaatatagaattttaatgataaactcatgaattaatgggcatttcaaatttttttttctagaagaattgaagcattttattttaaatataatagattatatcaggtatataataaggtataaggtgtcttgattatacatggtggaaaggttacttgactattttttatagttttatctagacaggctgccttcgtttgccattatattttcaacttcaaaaacgtttcattaagagtgttccagaaactttatgtacttagaatacctctaaaaacaatttaaaaatatgtctcataagggtgcttggaaaagcagttaattcatgtcaaaggctatatttttgctactttggaaaatgttttcattgtaaatctcttcaaaatgtatttttatgatagaaaatactcatttaaaatcaacaatggtaaacaattgtttaaatcatttagtaatattttaaatactaaaaaataaacccaacaaattatagttttaagaagataaggacagtaactcagttgataactaataactgtagaaatagagtaaatctgaacacagtagacagcatagaattttagagagtatttcagcctgtttctcagtatgtttaatagttatttcaaaaactatttattatctgtatatgaaatttaagttgatagcaatgttattttttccttcaatcactaaacaaggaaggaacatgaagtggccctgggtaatttgaataagacatttctttcctgtagggacaagtaaacttttaacagtgttgtttttccagttgctttcatcagataaaagcagcttcccactgtcctccacactcttgtaaaacctcatgacctagtttggggccaaatttaatctgtctaaatactacttaagaactggggagaaatgatcaagcagaaacttttgcttaatgttctcaatgcacttgggagtttgaagctcaaaatccatcccagctgcttgaagttcagctctcacaaatttcccatggtcactgctcctgaggaattctttttggttcccgtttcccttcctccttgtgtttgtacagggtcttgtgacaacagttctgtcatacacatactaaggtgaccaacctagttctcatttgccagaaactttcctggtcttaaaactggatatctggtgttcccagtaaccccttaaggcaggggcaaaccaggacaattgttaccctaacccagttcatctccaattccatattccctgttactcaatacaccttcagtagtagaatctgctgtggtataagaaagaaaagaaatggaagactaaatgaggacatgataatgaaagataataaagaagattttgaaag

SEQ ID NO: 70718 - DNA, 1003 bp, Homo sapiens
aattgatattagccaatctttaccactggccccatgttggactccatgttggccactgtggctactctgttgatgtgcccattgaacttgttctggggcacaggggttcaactaaaatgaataatatggaatcctgggtcaattatcaattatcaacagagtagccatagtggccaacgtcgagtccaagcttgggcccaacagcatgaatttttacttatcaaggccactaactacttccacttctaaatgactaatccatccacagtagagaccaaaactgagcccttatgtgccattattccttgagaagatcaacttcccacttggctgaacattgacttgattgagccctttctgtatagaaagggccagtggtttgttattccaggaatagacacccattctaggtgggtttgcctttcttggctgcagatcctcatccagcaccactaacagactcaaaactctgcacaaaataataaaagatagtttacttcacagtagagaagtacaggttgggacatgaagacaggatacactggttatattttatgccacatcatttagacactgatagtctgatagagctttggaatgaccaactgaagtctgaagctgcagcaccagcttggaagcaatgctctgcaatcactacatgcaggctgaatagactatgaaggccatggagaaagccctggggcagaaagactgagaacagcctggccagtgttgcagttgagatactggcagcagactcaaactactaaaagtcagaagtgagctgggctgaaaccagatggtttcactgctatattttaccaaacatttaaagaacaactaagactaatcctactcaaaatattagaaagaataggagagaagggaatacttccaaacttattctgtgaggccactattacgccaataccacaatcagacaaagaaacatcaaaaaaagaagactacaggccaatcaatatccctgattaacactgatgca

SEQ ID NO: 70719 - DNA, 2206 bp, Homo sapiens
agagtagctttcgtgaagatcaacatcctcacatcctgataaactaatctctcttagcaggaagtaaaaggaaactggaaagaggatgctgtctttatcttccacaagcgtaatgttatttttgtgatagcaggagatagaagggagccagggtgagaaaagggaacctaattctgcactatgattagctgaatgtgagcttcttgacgtaagacatcaaagagtatatgtattttattcctcataattcatttgcagaagttagaagttgtgcatgtgtttgcaaaagttaaatgtgtacatgcgtgtgtgtttgtgtatgtgttagaaacctttcttaatactggcaattaggtttttctcattagaaaaaataaatagaaacatagattttacataaaaacaatatcacagctatgaaaagaaaagaaatataatgacaagctttatttcaagaaaatataaagatgcaagaaacttttttgtcaaaataagataaaactggaagataataagataaaggataaaaagataataatagaggaagagtgagaaaagcaaaaaattgtgagaagtttattacaaaatgggtattgatggtttctttaatttcatacttttggagttattttgtattttgctgaaaggtttagctgtttgaacaaattattgccatgactcttatcagtcagacgtctttagggcagtcatggaggtatttggctcagatctaccttcaagagaaaacctgtcaaaaggaagacaaattagataacagcctccaggtgcaagtatgcctcaaatttgaaccaagaccttatgatacccagacatttttcagccaatgagtatggcaggggtacaacagaacctcaattttcaggcacaggactcctcaaagagcagtcctcctaaaggagatccccatcatgttggctgggattttgtcagagctgcagtgctgtgtgaggctcatcctatccaatcttctggcttccttctcacctttcataggagccaggcctttactacagtgtgaaagcttcctttggatgttcctgccttctttgcctttacatgtttaaaaggtattattctccaataattttttttttgcacttctaactcaatcttggctttccctttctagaaaaaccaagtgacattaattgatactggacacaatctgtgatatcagtgattaagttggagttatgcaagtggatcatttgccaccaaccagaaaataaggattcctttcaagtggatgtgggatatgaatattttttggcacaagacagtagttcaattggtaaaaatttcatcaatggtgactttggagaatgtcatgttgcaggtgaatgtcctaaccaggacaatattcatgcatttgaaaaatccagcgtgagaaacatagaaaggtaatgaaattgactaattattactaagttgcatttgtgggacaatgaaaattgaatacgttgcatttgtgggatgatgaaaaattgagcattgttaacaaaagcccaaatgtaagtgtaaaagccagaaggcatcttgggcagcctataaagtgtttttatcttttgcaaagagagagagtggccatagctggagaggaaattcaggatctgctgtttagggccactgagctgcaaagatgattggatgctcatagaggaattttcttaggctaaggtcagagatctgcttgggaaaacttgaggcattaaaatattggaagaggacatctgggtaaatttccccaaggatctacaacttgagagcctaaagaattgacccaccattctctatgaagagctagacattttctcatgcaagaagatacttcagaggccactttcacataagataaatggtatgtttatcaggaattactcccactttttctctaggcttctaggctaaaaatcatggctaaattccagcataacccagctgagggataaaaacatactgggactgataagtaagaaaagagataatcatttcattaagttcaataattagctagtatgtgctttcaggattcagaatagtatccatgagattggatgtttgagtatgccgtggtttgaatgtatccttcaaaattcatatgttggaaacttaagtcccagtgcaacagtgttgagaggtgagaactttaaaaagtagttagatcatgagggctgtgaaccctgaa

SEQ ID NO: 70720 - DNA, 1735 bp, Homo sapiens
ttataaaagtcacagaggagactctcctaagtggaagaataccaatatcactcaggtccaggatcctgtcttctctaggagaatgaaaagaaaagccataggctgggaaaaaaatacttgcacatcaaagacgtgtatccagactatagaaaaagctttcaaaattcaattattaggaagcaaacagcacaatttgaaacaaaacaaagcggaccaaagatttaaatgaatgtttctccaaagaagatgtatagtaagcaaataaacagaagaggaaaataataatgatgataataatttaaaaatcaacaaatttagaaaataagagctataagttaattcttgccgagttaggatcatctaactttgcaatctaaatttagacttcgctctaacctttggtccagaattcatcaaactgtgggcttctgtcaaattaaatataactattaatatatcctccctgcgatcctcttctgctgattttattcataggttttatgtttgtagtagcaaataacaaagtcaggaattatttggtttagctaagcatagagaatgatttaatatttgctttgggaagatagaaattttatctacttggttttggagttggtttacaatgtttcttagttgtaaaactgcagcggtcattcccatggtgggggtagaggagataggatgaagttgagtgcttcttgaataaccagttgagggggaaccaaggaatttttatgttgcactcttatcccaagtaaaagatggtctgattaaccattggacccatctgatttcttttagaaatatcatgcatctcagggattaaaggggaggttccaagagccaggggtcaggtccagagaaaaataagttctggagtgaactgagaactccatgagaaaaagcagaaaagccagatggcatccacatgagtcgaagtcttaataccttgattaggcatttagcgccaacagaggaaaggggcaaacagtttatgtattcatacaaagccttttctatgtttggcattagaagatgggggatacaattgtgacaagacaagacaatggtctgtgatttcacaagtttacaatttgcagtcagcatttgagatcatgaatataaggcttttatttttagtatctttcttacttaaaatcaggttgggtggctagaacttaaactcacagaagctagtcttaacatcaggccacatcctgaaaaccacaaatgattcatatacattgaggaatcatccatgtttccagagaaaagaatattgtcctagattaataaggcccaagtctcttccaaagtttctctcctggccaaagagaagatccaggtctttagtaacctcgggaacaagtcagaagtacctctttagggtgagcagactaattcacccacaaaccctttaattgtcttttagcaggcttgtatgccaaaatattttaaacaaagcctgtgtactgtgtgtttcaaattgttaaaacttcttgtatatctctttggatagaaaaatcatgagataaagagatattcagatgtttccatggcttcaggaattttcttctcatctcctttcactctatacaataatttggatatacatccattttatttgattgatattaatattaattattattttatttaaattactcaatggaccccaggattcaaacatttatttcctttaacatatttgtagccagtgattactgctgtaatc

SEQ ID NO: 70721 - DNA, 1027 bp, Homo sapiens
ctaaaacttcaaaatttagcatggtggcagttgcctgtagtcccagctacttgggaggctgaggcaggagaatcgcttcttgaacccagcagacggagtttgcagtgagccaagatcatgccattgcaccccacctgggtgacagagactctttctcaaaaaacaaacaaacaaacaaacaaacagaaaacttaggaaatgattgataatcaagattgattagaagtctagtaaagaacattatgcaagaaggcagggtatgtcaggcatatggggattataagcaaaatgcaaataatatactccttgcccccaaatgaagttattttattgatttttgtcttccttgatcaacaatgttctaaagagaaaagtttcaattaaatgcacatttcctttcagttgccaagtctacaaaaggaaacaagttgaaatgcaaatgagtagcactttcttggaaaaatattaacaaggaagctgtatgttgtatgctagcagtagccagagacatctgacaagccacttccaatcatatatgtataatatatatataatactttatattgttatatgttaataataaatcagcctgtctatttttccaactttatgtgtatgcacagcactttatattgagcagagagaaagcaagccagcaactagaagctgaagcaaatcctaccaacagggcagccagagtggtgagctaactgttccacatgtggcagattctttcttgaagggacatctgagccaagcctgatccaccggcactgaatcccaaataaaatatcaaactattgtcctgatttcacatcaaagaaggtgttgcaatgaacgacatcacataccacacaatccaaaagtaactggactcagagagctcgaacttctttctaaagacccagctgaagcaccagctcagagtgctggtggaaatggtttgaaaggattgtgtttattcccctaatcaacaaaaatttactattttataattttgtgtcaactgggctaaatcactttccaa

SEQ ID NO: 70722 - DNA, 2554 bp, Homo sapiens
gatttgcagctctggaaataacagaaaacttctctgaatgtcatagtctcactttagatcaaggattaaaagaaaatttaaataatatatacacttagtgatttttgtaaaacgctttattagaaaataaacatagaccattataaatatatgctattttgtgcacaagtgagaaacaaacatttgctgaaaatttcccaacttctaagatctctatgatcaaacattttgaggattttaaaaatacatacaattctcatagcactgaagtattcacggtggagatctctttggcaaggtaattattgttttcctctattatcaatataacagaaaaatagtaatcagatttcataaaccttactttgtgctagatacctttgctgggctttttgtatgtgtatgtcttcttatatttaattttgacaaaagcactaatatgctttttaagctccagggatcttagcttcctcttttgtaaaatggggataataatattacttgcctcatagggctattttaagaattaaagaaattaatgcatataaggtactaaggataaggcctgtgccatctgccaaaccccaaatggaaccgctagaaaccagctgagctagcagaacctaacttattaaacatactgtggtcaaggtcaataccattctagtaggataggagaatctcagaatgggaaatgtcagaaaaaaaaatatatagaaaatgacagaaaaatatatagaaaattttctatatagaaaatatatagaaaattttctatatagaaaatatatagaaaatgtcagaaaaaaatatgtcaggaaaaaaatgggaaatctcagaaaaaaatatataatatgcacacacatatatatagttttggctgatggttctattaggaatcttaaaaagcaggagactaattaggattgggcagctgatgacttgagagttatggattggtagacacagtaaggcaaggacattggtacaagtattaatgaataagtaagtagttggtcttataaaacaagttattttagttcatttatcttccagggacaattattttctgccccatgtttatgtatttcttaccaggtccccagaatcttttaacacaaaaacagaaaagtatgttggtttcagttctcacgtcagatgtactaagttcaaatatgtattagcaattatcattgtcatttttatcatcatttttttacagatgaggtagctgagaccttgaacgattgggaaacatgcccaaggtcatatagtttagatactgtaactgctagcatcttgttcatatctcagaaccttcatgttagtgtggaattaacaaagtctgtactataagcatctacttgctcaaatgaatcttattcagaaaaatgagaaaaactgcatacaggagaaatgtactcttgttaactataatgtgtcttttctcttggaagcagttaggtatgatggaactgaagtggcataggaatggtatgggtagcagtgaaagagtgatggacgagtgctgtggctatctcatcaactctaccaccatcctcccccttccaaaaaaacacacaaaaaatatatcaaccaggcaaagtttcgtttatcagacctactgcagtacagtacaggacaacattacctgtatggttagttctgtctttgaaggagaaggtcagatccaaatatctatcaggtttgagatctggttataattgatttaaggtaggtctttcaggatagaaaattgatgggtattggacaaggtttgtggcatacagttggtagacacagtgaggcaagggtcttcaagtagttctggtaagtaaaatgtttgataagtgagctatttgctaggtgagcaatctattgtcctgataggagatcttttgtttaaatttgcaaactatttgcccaaattggtttgacatatttcatgaaactaatagtaaaattattcattggccatattcatatctgccttggtgagaattctcctggaccaaacatgtaagtcatgctgacacaaggaagcttagttctgagtcctaataattaagatatatggatgtaggtggtttcagttctcaaagcagacaaagtgatggattatagttgtgctgattctcattcccaaggttatttatttttaaaagcccttttggtacaccagtcctctaatcaggcaaattatctgcatactaaaaaacataaaatataattaggctaaacaatgttatttaggccaacaattgtcttattattgtttaactttatccgcaacattgttaatttatgacaactttgttaacacctctaccttacaaaatgcaagtgtttattcccctaatcaacaaaaatttactattttataattttgtgtcaactgggctaaatcactttccaaagcaaaatactccctagtcttttcatttaaatatatctatgtcctttacttatatagttgtccctccaatatctgcaggtgattggttcaaggactgccacagataccaaactctgcagttgatcaagtctcctacat

SEQ ID NO: 70723 - DNA, 3102 bp, Homo sapiens
tctcttggccgatagtgctacatgttgttgaaggtctgtgagacacagtctttacttacacacttcacatggcttgtgcccttgcagaattaaagcacctttctgccttaattaaagctttacattgcagtcttcttgaacattgttattcacttttggaagtggtaggtgacttttcatgcaattattcttcaacaaaaaaactaataaattgatttcacaattacaaacaaagttctctaatggtgaaaagctgagcatgagtttccatttaattgcctatacctgaagatatatcccttcccttatgaaaggaagacaagagctggcacatggcagcctatggaatgggaaaggagagatctcgttaagagagtgagtgcttactcagaatcgtgatctcatcgaattaaatcttttcatactagtcattatttttgtgcccattttactaagtagaaaactgaggctcagctaacctcatataactaaaatgggtcaaagtcaataatggttgtgttccctcttctgtcctatgctgcttttagatccttaatgtaaagggtgagtgtgtcacttaagggaaggggtggaagaaagagactaatggttcacaagacagaatatctcttctttcctaggtcagtgctgctccctttaactaggagggcagttttggaagtctgaacacagcaccagtggggaacgaatagaaactgagtgagcagcacataggaggtaacatgattaagaggctgccccaacagctattgatccagccttgaggagacagactacctctttctcctcccctccagattgatgtaaatggattgaaaaatctgaagctgcctttcagatatgttttcccaggtatcacccctgtgaatcttccatcttctgaggttcattaatgacttattacattggctcatatcaatacaatatgaccttcacacttgtctttcattcactcgacaaattcttgctgcttaccaacttatgttccatgtgctatgctaagggcttggacaaagcagtcagtaagtcagccttggttcctgtctttgtagaggctatcctcaagtcactatagcaattgcacttgccaaaactggcttgtgactttttgtgcatttattttacatttttgtgtaactatgttacattttgcagtatgcatttttggagaatattaacaagattccctattttatttttgcattccacccttcctccattcttacacacacacacacacataaacacacacagtcctaaaacttattctccaaacagctatgaaatttgtctttctcactgtatctgatagtgaccataaactccagactccatagtgtaacctacaaagtccttctctatgtgactgtggcctgactttctagattcatctctggccattcctccttccaccttatactctatgtcacacaaagacactctagattcttgccaattctctttacacagaatgccttgcttacctttttcattagggaaacccttactgacccaattcaaatttccctttgtctaagaagccttcaccctgtcctccaggaaacaggtcttctcttccatgatttacatgtgttatagcaaatgctgcattgtattgcaatagtttgcctaactacatttcaccttttgtttcttgagttcctgtaagagaccagatatctttttgtttttgaactttcagtgcctagcaaagttcctgaaccctggtagggaatgaataaatagctaaattgatttcatttgaagtaagactgtggttaagaaaacttgattttgtttgcatgtgatgagcattaaccccatgcagaaatgttatttcactaaataagggtaccaggttcacattttttgatgactaagcatttagatgaaaatctagtcaggataagtcaccttaggataatttcaaataggcaattctcaacattttgttaattctggggtcaatgactggacaattaaaaaataaaatatgatgagtgacagtgcttaacattttagcatttcaaatgccatatgtaatttacctcaaatccagggcttggacaaaagttgcagtagagctaaatgaaagcccccacactcttttaaaatagctgaatgtagcccactcctgaggctgtttatttttacatgatatacaatgaaaacactataattaagaatgggtaaacccagctgtgctttgggttgatcaaatttcttaaagttgctttttgactgtttggagtctgtgaagacgaaagtctatgtttaagaattttccctcaatttttaaatcagtgtttattttaaaagaagtataatccatatggttttgattcctccacacttaactcatccaagtgcagttttgtaagaactatttgaagtcaaaagctttttaaaatttttatgagcttttttgtcttttgccccctcagaaaaggaagcaatacttgccaagtgtaaacaaagttaatcaccaaacagttttatattctaaaataatgaaaccacactgggtgctgaatttgacaaaacagttcttttatcctcagggaaattgttgtctaagctcgtagagtgactgccttctctgaagaagagccccaggtgacatcagcattgtattattagattctcagatcctcacagtaaagtagttgttgttttccagctagagtttactcacaatatctttattttgtcacagaagtcacccaagtacaatattaaatgtcatgactaccgagaaaagttagtgatagcgtatctaaatgttgatgcaatgctgtatctatgaatgagcatctcagggctgtcagaccttagcaggaaatcaaagaggataaaaaacacatgaccccatggaagctctcaaagtcacatctagaagagccctcagcaaactacagctcacagactagaaacagcctgccaactgtgtttggaaataaagttttatgaaatacagccacacccctacatatcactcacagctgctcttgtgctacagtagcaaagtggaatagttgtaatagaaaccacatggtgagtaaagcctaaaatatttactac

SEQ ID NO: 70724 - DNA, 1033 bp, Homo sapiens
ctctcaaaaaagaatcctgggcaacaatacatctggcactctgctcgaggaatttgtcatgtcattgacatgttcagcctccattgtccacaccaccctgacagcaggtcctttatatttcaaagaaattgcagcctgaattaatataattagaatgtaactgttattcactgcagaaactccttatttccagaagtaaagatctgatagcatgtctgtacttaaaatctttcccatgatggctggaggggagcaagcagataataaaatgacagaatagatgctatttcacgggctttttaaagtattaactaatggaaatatagggggagaagaaaactgttctacccttggcatgtataaatggaaacatcttttaagtttactagcctttatagtacttctataaaatatgttctgaaaagtaactaaactcagagaaataaattaaatcagaaaaattagctatctccaaaaaatatgcaatgaagcatgaagtagagtggctaattcatagacagaattacagatttaagagatggttgaataactttagtcatttttccctgcttccctttgaacagttgatgtcactaactaggcaactgtcaccaagttggtaacttgagtgctggatttttgaattttattctttgttagcattctgtttctacaaatacatgattactgatatagtggaaactgacattggcatttttcttttgaaaataagattgattcacattcttttaaataagttaattttctcactgggaatgactcatttgagggggaacaatggcctggcatatcaatgtgttggctggtgcttatggcctcttctctgaagaatataatgtttatccttgtacatgttatagaccgtttgtgtccttctgaaatttatatgttgaagccctaattcccagtgtaatgatatttggatatgcaagcctttaggtaattagatttaggagccttgagggtggagctctcatggtggaattagtgtccttataagtagaggaaaaaa

SEQ ID NO: 70725 - DNA, 1062 bp, Homo sapiens
gtgatccgcccgcctcagtctcccaaagtgctgggattacaggcatgacgcaccgcacccggccgagaaccttacttttaatacaattttatgtttactttgtctactcagccactagtcggttcttgctgacgttatttcaaaggctgaagaaataaatttgtcttgcccacaattactatgattctttgtttttgtttttttaatagaatccacactttcctctttatttgtaatgggtttcttggttctacatgacacacagcaccccttcccaatcatgttgcctcaagaaagaaatagagaatatgtagaaaattaaagcacttacatttggagttgaaagaaaagaaggcaattgcaaaagatctctccttattctgtaatggaagagtgcaaataagcacatttttcctgtccttctctaagatgctcctggcccacacaatgcgcttgagaataaatcagtaattctctatcatcagcactgcatttactcagtctctaggtatggcacctcaacaatgagcaaagtctgagcttcctctcaaacaaaattgaatttaatacgtttttgtctctaagattcctttctgaattttgaatttcttctttttttcaatctggttgttttaattttgattttagtttgaaggtaaatgtggctcctgtgtcttctctcttatacccaaaacatgtacatggtaactttctgaagaacatgggaaaaaatggctccttgttgagggatgtgttcaatagaaaaagaagcctggacatggaaagattctataaatgaaaggatctggaggatctctttaaaggagcctgtgaggtttttaaactttattttaagctattgtgagcctatgttagccagtccaggaacattcattgtaactaaacctcttttccttttttttttaaatttgttttaattccctttttatttcttccttctttttcttttggagatggagtctcactctgtctcccaggctggagtgcggtggcacgattttcactcactgcaatctctgcctcccaggctcaagcattcct

SEQ ID NO: 70726 - DNA, 1045 bp, Homo sapiens
tatgctttgaaaagcaatagtgatattatgtgaggtttcatgcagatctagaaattttatccaaagcaaacatttaccacaggtgccatgacaccttttttttctttttaagtcatataaatagattcttcaactgccaaacttgttcttgtaaatgctaaactgtcttgtctaattatctcaaaattatcttcagcaccaatatatctatttttctagtgataacagacccacaaccaaaaattccctaatgttaaatttgggaacacaagtaaaataaccatgttaatttgaaactgggtaccatggatacggatagtgattatagccttgtgaatctgctaataatttgttgtaataatctatggcatctctcccagaagatctctcagattcatcaatgcagatcaaagtttgtcctttatcaaaatgctggctatgattctttggctctgaaaggtatttttgcccttctcttttcatgagaaaagtcctaccttcatttcttaatgagtatccctttgtttttattcttcccacctactcacactgaacttgtcaacttagataggaaaatactctgccgtgtagaatgaaattaaaacatccaaatgtgtagttggacaaagttatttttaaccttagtcatttagtgtaacactttatgttaggcaatcaagttacgataaaggtaattgaaatgaggttgcttagtagcctatttcatagctcaaggtttttagggtattgttgagtaaaaatatatttcaataccttgagtacagatctctggtctaatatagtttgttttttcagtgggaactttcactagaaatttatttcaagggaacaaaatagagtcttgtgtgtatgtgtgtgggtgtgttacatatgtgcttgctgcgagagtaggacgggcagagttagcactggaaggaagaaagtaaaattcaagaaatggtgcaaaaggaagatttctgcatacatttgtgagtcatatgtatatgcctttgcccttcttaaattagtgtagagaaagtaatgt

SEQ ID NO: 70727 - DNA, 1050 bp, Homo sapiens
caggccttgcatcttattttatagagctttcctgagctgtgtgcctaacattgtggttttcagagctattttctcagtaaaaaaagagtccttcagatcctttgtctatattgaagacaccttaagttgagagatggagtaatgcaaccgaacatatatagcaatgtagccctgtacaaagcatgtttgcttccattatgttttttaatcctcacaacaaccctttgctatatgaagttgacttttcccagggtttttagtccttcaaaccattggtatttggccatgcttttgcaagagattttcaaacagtgatttttaaacagaactcagtggttctcaatcttcttaatctagagtggtgtgagtatttcctttactgcaaagaaaagcagcctttttataaattgtcagtttgaatttgagtttcttcctgtgatgtaacctgatgcaatgtttgcctgaatcactaataatgtaactgatttcccctagccagtcataaatgagtcagtgatcacggattcttttagtttatactcaagttgctttttctgtgtgcagatatcctcattgaatagcttgctgttgggcttgtatagcattatggtttacatcagggaagtagatagccagcagagctttgtgctaatttattttgcaatcctataggaaacaaaggacccattctttgttgaacctgaagagacttctagggaaaatcagcctctgaccctttcagaagtcttgcatcttaaagctcgtgtgtggttcaggccatgcttgaacctatgtgtgtagccttataagtcagtcagtgtgcccctataatgtttaagattgtgatgtaagaataagagtttggaacccattaaaacaagggttaggtggccagtgttgtcaggaatatttctctctctcaagccggtagtcattgttacaattaaggatggagctcttaggtaatatcactagatacaagctctttttccctctcagattcttgcacttttttccactaccctttaagtctttcagttattttttaac

SEQ ID NO: 70728 - DNA, 1290 bp, Homo sapiens
tacatatatttgacatacactaaaaattttgttgataggatgcatgatcagaaacatttagagactatttctttaggttttcactaaagtagatgaatatttgctctccccaaaataactcataattatgttctttaagtggtaagtcttaaaatgacaagttagtgtagcaatacaaagaggattgccttgtataagtttaacttatttgcataagtctttataataataaaactaagtcatcctttacagccaacagatatccaaattgtgttacaccaatttgaaatctatgttcccatatattcaactatgtgttgctgtgtgttgaaattcacatttttgtttctcagaagtttttttttaaatcttagggtctttgtaacattgatatgcatggttgtaagagaactgaattatcgaagttgtagatgggtgatttaattattttagtagttatggcttagcaagaaaggccctgtatcttttccctcttgttctgagccatccctaaatttttgaaggaaaagatgactaacaaattggactttatttgagaagattccataaatgaccataagccataaaatgattagacttgacaattgctttatgagcagatttgagtacactttctagtagttgtcttgatttatggcagttttgtcccaagtcagtagactaaatggagttgtatttcccacaaattgtacttgtgagtcttcaagttatcaatatatattctaatttgaccttccaacaactggatgaggttggcaagtgggtcagtattttttatcttcattttatggatagaaaactgaggcttagagagcttaagtaatttaccctaaagccagacagctcgtaaacagctaattcacaatttgaattcaggcttttctgatcacagaatccaaactcttaactattgttacattgtgatgcatgatttatctaccttcttttacactgttggaacatgtattttaacttctcattgtgagttggccatctttggttattttcagccttgaaactctttcactatgttccggaggcatatagcagtctacaattaggctcctttctttgagaggcagttggaatttagcataaagaatactagtctgggactcagaccaataagttgaaatcttgacttgtaccaacttgtgactttggaccagttgcttagcctctctgagcccatcattccttgtgtaataatggagacaagtcatttgttgtcaaggtaaacatgaaatcatatagctagtgaatgtttgg

SEQ ID NO: 70729 - DNA, 1053 bp, Homo sapiens
gataaaatcctcttgataggctatatggagaacatttgtcaatagttttatctatgcatggaagtcttcaaaaagtatatcttggattgtctaaaactgaatagatttcttatttatctgaaggtatacagactgccaacattttagacttatctctcagtctctgccactgaacttttatatatggctgctatcaaaatataaccggtttattttcatatttggaactaatataacagtatcacaaaatcttttacagtaagatagtttgtaataccagccgacccagctgcttaactgagtccttaaatcatttaatatatgggactgtaaatagagaaatctgtacattatgagatctgatttctggttatgcctatagatctttattttctttatccctatagatcattttcttctgatgttaagtgttatatttttgaaatgctcctaaacaagtaagccttagattgtattaatcctgaggattgataccatttcctcaacactttgtggagtatgattgacaccagtttttttttgactgcaggtttaacttggcttatcacttttcgtattgctcagtatgtccaagataggaataaaaaaatgtagttcaacttctgactgttatttatgagccttttcatggtatttatcattttagtattgaagatgcagtgttcttttgggaattacgtatgcttagaagagagtactgatgctcaaaggtgaaatgatttgaatctagagttggataaaaagggaaaggatggggaaaatgaaaactgggaagctaaactgagaaggaattgcaaggtttggtgataaaaattcatttgctatggtcatagttgtgtatcgagaggtttgcacagcacagtctcttggcagagtttaggaatctctactctggggattctgcagttcatgaatcgtcagggagactctgcattcaatttgtttctgtgaacatgcaggtgaaagtggtagtacaggtggaacttcatgggaactggttttgggggaggtgtggatggaaagcacaaatgt

SEQ ID NO: 70730 - DNA, 1020 bp, Homo sapiens
tatgtaaacatgttgacactggaaatacgcagtctgaaataaaattagtaattacttgaaattagtaatctcaaataacttttaagaagttatttctacacccaggaataaattattctgattttgtagacaacacaggaataggccactgaatatgcaggtatttagagtacaaatgtctgtggatattattggcacaccattctcgagagttagaattcgtagacccgcaacacatggactacccttgccaattgttatggttttatttttaaacctattctgtgaaaaagctcctcggtatttcaaacttgaattacaataaaaacaccaggtagggttgtttttaaatgggtctcaccccagtgctgactactgttgtttaccaactacatttcatctggtaactccattgaaactaagtacctcaaccattttttttttttatcataaagccttttttcaaatggaaagttgtttttgaagatcttgacatcagactttttcaatctttgaaaatgatggaaacagttaataaaaatgtttattttagaattcaggtgatgtctggcttgtgaggagctgtttataagtttgtctttgaaaaaggcttgcacacatcactctgagaccagctgtttcctgtgactttaaccttaccttccccagacaattgagctgaacctgtatctgcggtacagtagctgtttgtgatgtatttcttgttcactgtttctggggaatgttttgaaatattttattataaatccttttaagataggatgactactttcaaaattattgttgcctttggcaccaggaattcatagttgtgattggcagtaagtttgaggagtgttactttctaagttttaacaggtagttttgaaattatttccttttttccaaatttaagtagtgcctccctctgtaatgttgaaacaaggcttcaagtggattgtatagcaagagttaccctggttcatgcaggataatgcggctgttatctttgtcatctgg

SEQ ID NO: 70731 - DNA, 1006 bp, Homo sapiens
ctggccgaggctgcgcgcctgattcctgttttggcggctcaaccggttggttcctggagattgttttgtccggtactactgtgttatttctaaaaccctgcccgctttttccatccccgcacatgcacaacaacggatgcaatcctggacattttaaaaagttgatagttttcattttcgctcctcaaaggagcctggggtaggaggaatccgcagtgggagctaacgatcctaagcgttgtttctctgttcttcttttcttctatagaacattataaacatcactggttcccagaaaagccatgcaagggatcgggttaccgttgtattcgcatcaaccataaaatggatcctctgattggacaggcagcacagcggattggactgagcagtcaggagctgttcaggcttctcccaagtgaactcacactctgggttgacccctatgaagtgtcctacagaattggagaggatggctccatctgtgtgctgtatgaagcctcaccagcaggaggtagcactcaaaacagcaccaacgtgcaaatggtagacagccgaatcagctgtaaggaggaacttctcttgggcagaacgagcccttccaaaaactacaatatgatgactgtatcaggttaagatatagtctgtggatggatcatctgatgatgatggataaatttgatttttgctttgggtgggctcctcttggggatggattatggaatttaaaccatgtcacagctgtgaagatctggcacaagatagaatggtaaaaaaaaaaaaaattttaagtgacagtgccatagtttggacagtacctttcaatgattaattttaatagcctgtgagtccaagtaaatgatcactttatttgctagggagggaagtcctagggtggtttcagtttctcccagacatacctaaatttttacatcaatccttttaaagaaaatctgtatttcaaagaatctttctctgcagtaaatctcgcaggggaatttgcact

SEQ ID NO: 70732 - DNA, 1367 bp, Homo sapiens
ccagacattgccaaatgtcccttaggatgcaaatcaccccaagttgagaaccaccagccagagtaatttcagtagaaagattaaaaataaagccagactgcagcaggtgccatcatggcagacacaagtcaagtcctccttggttctggtctcaccatcctgtcccagctgctcatgcgggatataagcctcttcctccaaaaataggatgcaatatttttggatggcaagtatttcaacttcctggtctcttttgttacactcaacacattgccagtatcaatgagaggtatgggtttttcacaggcttaactccaagactgtgttcgggaggccttcaaactgtggcccatggaaaagttttacagcattcccaggagtgtgatgaggacctggaaatgtgcataaggaagtctcatcttcctttgactgagttatcaaggagacagcttgagagatgatggctcattctgctgctatcctcatcacatatcccttccatgtgatcactctgagacctgtggtacaattcattggcagaggacctaagtactgtggactttgtgacttcatgaccatctatcagaaagagggcatcctagggtttttcccaggactggttcctcacctcctaggtgacatcatttctttgcggctgtgtagctcactggcctacctcatcaatacctatgcactggacagcagggtttctaccatgaatgaaatagagttattctcaagctgtcacaagatttttgctggcatgttgacctgtccctttgtgcttgtctctaatcttatggctgtcaacaactgtggttttgctggtggatgccctctttactccccaatgtatactgcatggatagattgttgatgcatgctacaaaagcagggaaatataagcccaggaaatagcttgtttttccagaagttcctcttaaggaagacttattcgtgtgatttgaagatgtggggcagagacagtgatatttctatagtcctagatacgcaaaattatggcagaaaatgttgatttccatacagtgtgatgcacttttataacaatcatttaatcttggggaaaaaaacagaccgcaaagggttatgagtgagcaggtagtgcaaagtgaagtcagcaacttagctggaaaaataaagaaggagagagagagatagtaactagaagagaatgtatgattaatggaggatttgggttttttttgtttttgttttttaagatgaaagaggctagaacgtgcttaaatgatgacaagaagatccaacaaagaacgtgcttaaatgatgacaagaagatccaacaaagaacctatatttgaaagtggctaacagatggagcaaagtct

SEQ ID NO: 70733 - DNA, 4113 bp, Homo sapiens
actttataaaaactttttaaatgcctcctctggttcttttgagagttccataataaattctatgtaaaatgtttagcatagtgtttgataaataggaagcattcaatttaattataacagagattaagttaacatattgaaacatatcattaaataatataccaatgacttgaaagctaatgtaccttcataatgtagttggtggtattcatgtagtttcataatacttttggtatagtttttattcttgaaattgtttaatttttgtcatttacagcatcactgccgacagtgtggaaatatcttctgtgctgaatgttcagccaaaaatgccttaactccttcctccaagaagcctgttcgtgtctgtgatgcatgtttcaatgacttgcaaggataatgggttatcacaacttcagagtaatattacactaacattagatttttaataaatgtacttaatagaggtcttggactactatttggtttggacactggttgcaatactagaccaaataggaattagtatattttggaatgttatggatatcaagtaaaactcttctatttttgtgagacttgggcttatcatctttcattacttttttcccatttagcccctggaatagctttcatgccaagtttagaattagccaatgaaatgtaaataaactttggacagaaaatagcaatgtatttttttaatataatttcattattcacaaatgaagaatgcaattccatagcttacttctttctcctaaatttaatgtacaaaaatgtacatggatgatattatcacttgttgctgtttttgttgcacaatagcacattaattatattaaatattctctttgtgaagttatgcacagaactgtaacactttcctctgcctttttctcttatatgtgggttcatggttcagttgcattgttatgttatgaatttactacttgggtgttctaaatacagtttatcttaaaatatgtagtaatatgaattcaaaaatggtttttgttttaacaatattaattaaattttcttgggtggattttataaaaacctctgtaaaatcaatttgtttacttatagttatctggggttgtattgcaaagaatagggttaatttttctttttgtctttttctgtctctttcttaaactcccacgcattgtccatttagaatcttagaaagcttcttaccctcgctgtcagttggaggatgaataataaacattgtataatgttcttattctcggtttcttgtaagtgggaagtcttttgagatcagccttcatatcatacccttattttgtctctctagcatcttcaggaacctgagtttgctttttacatagatctgattttttcctttatttggtttaacattttcaagcatagatcagcttcatgtatttgttttataattttgcatcttaaagctagtaactaatattgctgtggtcttattggtgaaaacaaaatataaaatgataagaagacattaaatattttactttctatttcttaccctattgggaagaatttttaaaagttgtaaaattgacttaaagttaaaatggttctgaatttggtgttccatgtcaactgttcccagttttaattttaactttgcaaaaataatgttgtgaaattccctttaagtaactaacacctagaaatagagtatcaccaaaaacaaatgtatttaggaatcccagttacaataaaaactgaaacagcatggctaagcatcttaaggataattaagaaattagcttatttgtatgctgaacaatggaatcgaactttaatttagcatagtcttattaatttggaaaattgtaaaacatctcaagagagaagttattaatattggtttattaatctttctagagaagaagtgtagttatacattcattcagtgcaatcattttataacagtagttaatatttcatttataatagttcttaatatacatttgctttcaaatattctgaaatgaaattatattcatgctatacctacagtgtatgtaaactaaagagatcactacatatttgtttaattatttaaaaaaaaatttaagtaaaccctgttgtcattagctattaagaacattgattaagtccctggacttggataaacatatatccttgaacatatataatgaagaaatacagtggctctttattaaaaataatagttggataatataaactgaactatttatgcatttttatatacttataaatccttccaaatagttttaattctatccttttacatataaataacttaataagtgtgctggaaaaacacagatattcacagcaccactgttttttttttttttttgagataataaattccatgagaaatctgggtttgaatatttgtttactttgtctcctaattgaacaccactccaggccttctgtctgtctcccctttacccccaaaatactcacaaaaaaattttaagacaacaagtaaccatatataggtgtttgaatgattttctcatttttatctaatttcatttcataagtcccgagtaatttacctaccataggctactatactgataatataaatgaaaccgaacattttttgctactaactctccccaatttaatgtgttttcgaaataaaaatttaaatttttttccttttaattaaaaagtcatctttgaagtccttattggctgtacattttacatgtttgctggtactattattttgtcagtcagttaaagctggcatgtacagctcttggctttaatgaaaagcacattgacataatgttagtaaattccaaaccccggcacagaatgtgagttaaaattaagtcttgctgggttagtgtacaataaactatacctacagacttttttttaatagaaagaagacaaagctgctggtataggatttgttcctttgaagaaaaaatgagggaaacaaacacaaaaacctcaatgcagtgtataaataacattttgttcaactacctcttaatgtggaattatctactttaatagtttcctgacagtaatgttaaatagtaactgccaaatttgttattttcccatctctcttaaaaaagtctttatgattattttatatagttttgagaactttaaagccacttttttttaaccttacatttgcataaaaatgtttagcttttaagtagagagcaaattatgatcatatattttgatattcatgacctgtttgactataggagtttttttaaaaaaatgcactttggctataaaaccatggatgatttgatccataagatttaaatgtgccaccattatagtattcctagacatgagcttgatgaatggtattctgtaattataacgtgccacacattattgtgtcttaattgcccttagcctgaattttaatgatcaatttgttattgttgcagatgtgaatattgtgcataaacttactaaatttatgtaaaattgtataaaatagaattagaagtcactaagttctttctgtgtagaagtaataaatttattgtaacacaatgcagttgtgtatatgacattctgtaattccttgaactggatcatatattcataagttctgtagatacttatgcatgaacattttctcatttagtttttgggttcattatttgtattgtgtttactacttgtgatcatgtagttgtgccttactttgtgagaaaggttagctcagtaaatactgcaatttctaaactcagtgattggaaggttattaattataaatgtaactgataaagtacgtgacagcatttaaatctgtataaagaacaatggaaggatccttattgaattgttgcttttttttaatatgtttaaatattatattaaaaacatttctttctaaactagttgtattctgtgactataaattgttttgtctaacaaaagagagaacactgtattaaccattttgcattaatttatttacagaatattaggactttgcacttggatatagacagtggtgttttaatgttgttcaatttcgaatagtaattaaattcctgatctcaagagaaattattaatgccattttgccttagacattccatttaatat

SEQ ID NO: 70734 - DNA, 1102 bp, Homo sapiens
ataatggtttttggcagactgatagagaaaagaaagcatatggaattgggacgaataaggaaatttcagctttgtctctagggcaccttgctatccctaaccatatgtgtctttcctgctctggtggagaagaagaaagatctcacattgtgtcactttagctcaccatcatgatggtcactatccatcatttcagcattttgacctttgagccaattcatattacatagatgcttgtggaatcagttttattaatgtgtaatgaaatatgttctcctgcctccattcccgaagaagcaaattgccagtattttaaatgtaataaatcacttacatttattttgcactacttttgtaatagatttccccccaacttttcctttttttcagcattccgaaataaaagaaaaggaagtaggaatgaagaagcatgaagaaaatgaggctaaacttaccatgcagattacagcattaaatgaaaacttaggcactgtgaagaaggagtggcaatctagtcaacggagagttagtgagcttgagaaacaaacggatgacttacggggtgaaattgcagtattagaagcaacggttcagaataatcaagatgaaaggagagcactactggaaaggtgattgatatctagtaaaattagtttatttccattgtaagtgataaaaagattgtcatattccatagtttttaaaaatagaagaatcttgagaaaagtgcataagcctctataggtatttaagtagccatttaaaaattaacctgtaaaacaatcagatagtcaaaattaatgtatcatatattttaaattactaaagtagtccattatctataccctagaagggtctttaaatgattttctaaaaaattaattacctctttgcaatctattccagatgtcttaaaggagaaggtgaaatagaaaagcttcaaaccaaagtattagaattgcaaagaaagctggataatacaactgcagcagtgcaggagctgggcagagaaaaccaatcacttcaggtcagtcacctatggatatgaagcagttttttagtctagaattggcttattagtgaaaagcatatttttaccttt

SEQ ID NO: 70735 - DNA, 1395 bp, Homo sapiens
ttttcacattacccaatgaagcaaagtaaccctaagagtttggatctcattgaaatgataatcaagagatgtattgatttagaaaattatgctcacaggtagtaaatttcaaaatatgaaagagtttagaagtaagatttaaagggattgtttattcaattatttttcttcctaaagtcctttcataatctgttatttttaacattttacctgttataagcatagatagggtacccattgaagaaaactaattgtctattatttgctttgtaaaatactaatttcttaaaaaaaggttagattctttcttgagagcactcataatgtcctttatgtctgtaagcatactttcattttggtttataattaattatctctttatgttcctctgtcctctagaatgtgacttccttaaatcagggaatgtgtataattcatctttatgttatatccccagaacgtaactcagtgtgtgataactaaatgatgaccagtaaatgttaagtgaggaaagggaaaatagagagtacagtttgtttttttttctccacataatcaaaacgtatacatttttgtcacctggatttaaatgattgttgagcaagacatactataatcttgtatctttttaaccaattctttaaaatactgaactttaagaatttcataagtgggtaaaacctatatttgatctattgtgataaattgcataaattttagccaaattttgaaatatttactatgaaggatgatttatttttggccctactttttcaacaggagataacaaatcttaaagatgctaaacagcttctaattcagcagaaattagaacttcaaggaaaagcggactccctgaaggcagctgttgaacaggagaagagaaatcagcagatactaaaagaccaggtgaaaaaggaagaagaggagctgaagaaagaatttattgagaaagaagctaagttggtcagtgagttaatcgggggaagtgtgttttgcagtagagctttaaatcaatccagtgagaggactgttctacttataagatctgattgaaatgctttcctaacattttagtttttgattaaggaaggagatctgatttatttacatagctgacatgtggttggaaatattttaccctgtaaccataattctgtttttataagtgaacattgaaatgaaataaaattaaaaaattttttttgttttttaagtgtcagaagctaaacaaccccacaactacgtagatctggtaaatggtgtgaatgctagtcatgttaaacccatttgttgggtcaaaacgaatgttgataagggggagcggaaacttgagtttgaaattatgatgaacaaagtctgcttttcctttcctaagttgcacatgccaaatgg

SEQ ID NO: 70736 - DNA, 1052 bp, Homo sapiens
tctgcagtgtatattccctgaaattcttggtaaattctaaatggttcagttcctgaaatttaatttaaaaatgttctgtgggtgtggtgatggtgaagctggaatgaaattcatgatttgtgcttcaagtttagagaattctgacagaactcttgttcataaggccaggtttgatggctcatgcctgttatctcagcactcccagagaccaaggaggagggattgcttgagcccaggagttcaagatcagcctgggcaacatagtgagaccttgtctctattaaaaaaaaaaatttagctgggcatggtggtgcacacctgtagtcccacctactcgggagaccgaggtgggaggatagcttgagcctgggaggtcaaggctgcagtgagtgagccatgatcataccactgcactccagcctgggtgatagaatgagaccctgtttcaaaaagaaaaagaactgttgtttataggagtttagttgtgtgagctttagatcatacagacttgctttggttttggctctatctctgatagattattttatgtctcttaaacctttgtttcttcacctagaaaatggagatttaaaagtctacatatactagagattaactgagataatatcctaactagataccttatataaagatagtgatagtaataaaataggagttataagagtaagaatcgtagttttgcagtatcattactctgaccaggtacaatttatctcacaatattaactataactatttaatctttacaattattttattattgttcacactgtataaataaggaaacagccaagaaccaagagagggtaagtaatttgcccaagttaggtagaaaagggcagagccagtgtcatcaatagtagcagtcatttttattacacccattttcatttaagtatttgctttaaaataattttaaaatatatcatttttctacagtcactgaaagaaaaagaactggtaaatgagaagtctaaattggcagagatagaagaaattaaatgtagacaagaaaaagaaatcactaaact

SEQ ID NO: 70737 - DNA, 1822 bp, Homo sapiens
tgaaattcagtaacttagaattctctttacaaaagatgatttatagctggccaggcgcggtggctcaggcctataatcccagcactttgggaggccgaggtgggcggatcatgaggtcaggagatcgagaccatcctggctaacatggtgaaaccccgtctctactaaaaatacaagaaaattagctgggcatggtggcgggagcctgtaatcccagctgctggggaggctgaggcaggagaatggcgtgaaccccgagaggcggagcttggagttagctgagatcgcgccactgcactccagtctgggcgacagagtgagactgtctcaaaaaagaaaaagaaaaaaaaaagatgatttatagattaatgaataatttgcttacaaattctaaaacaaatgttttcctaaacaaaacaaatgtagaattatgtcaagaaaaatttggaattacaaagaaatgtttataaaaagataatttttctaacatagttgaatcagaagtattatttttgttctgtgattttcttggctctatgtctttttttctgtttttgttgcttagtcaaagcacacatcttgtagctaattttgctgtaaacttaatggttgctcttcttacttttaagtctgtctgtcatcctctcttataagtactctttttttttttttttttttttttagtgacagggtcttgcccttgttgcccaggctggagtgcagtggcgtgatcttagttcactgcagccttaaactcttgggcccaagcatgcctcctgctttagcctctcgggtagctaggtctataggtgcataccgccatgcctggctaatttgtttttcttttggtagagatagagtcttgctatattgcccaggctggtctttaactcctgacctcaagtaatctttctgtctcagcctcacagagtgctgggattacaggtgtgagctgctgcacctggcctctcttatacatacttttatcatctctctggacactgcttttccatagtatatttctgtttgataagtaacattagcttactttttcttagacaaatattcaagaacctttattgctgcgtttcccatgttggggaacgcagcaataaagatctattatcccctgtgaaataatagggttttgctgtcaccccacctgaaacttgtttgccttttccttcatgtcttatacatttatatagagcagatggcatgtatcatatgtatgtattccatgatttttcccattgcttttaaaaccaggctcaaacttcattgtatttagatgatcttaactagctagctccccttgactttgctcattttttaaaaaaattgtgccttaagaaatttgacacacttttctattaacccattctgactcatgcattatgttttaactttcttagaaggtttttgtggttgttgtttgtttagttgtgtgtatttcatttagagtatattttgtttaaagcatgaaggctttgattgttctttcctatttcagtgtcatccccttccagcacactgcatgtaagtttgtacactaaaggtccactaactgactcaccaggtacttacagtagcttcttatcctggctggatgtcttacagaatttagttaaaattctgatccatgttttttgcttaaatatgtttacttaaaatgtttagtgttaatttttacaaccccactgagaccaggctttgacattagattaggttggttgatccaggtctttgattagaagtgttatttttgtgttttatacttgatagcattgaaaaatgacaaaatttaaggcaggtgattagc

SEQ ID NO: 70738 - DNA, 1065 bp, Homo sapiens
tgctttaatttttgttttgttttgttttgttaggccacaataagccagctaaggagtgaacttgccaaaggcccccaggaagttgctgtatatgtacaggaactacaaaaactgaaaagttcagttaatgaattaacacaaaaaaatcaggtgagaattttaaagctatatataatagcaaattgattttatgtattttaaatattaatcttacatactttaaaaaatatattggcatagtacaatgtgacttattttttttttttagtgtttaatatgttcacattattgtgcaaaccaatctctagaacttttttcattgtgcaaagttgaaattctataactgttaactctgcattactccttctctctagctcctggaagcttccattctactttctgtctctaaaatttgactaccctaggtgcctcatataaatagaaccatacagtatttgtcttttaaaaatgttgttttttaaattttttcaactttgggttactacatccaacagtatttgtctttttgtgactgacttatagtgtcctcaaggttcgtttgtgttatagcttctgtcagaatttgtttttaaggctgaataacattttgttgtatgtatatatgttattcattcatctgctgatagacacttggattgcttcaatcttttggctgtaatgccactttcaacatggctgtacaaatatctctttgtcacgttgctttcaattctttacctgtaagtggaattggtagatcatatgataattctatttttaattatttgaggaactgccatactaatttccatagtggctgtaacccttttatattcccaccaactgtaccagggttccagtttctctacatcctcaccaacacttactttctttttcttttttgagagtagccatcttaatgggtatagggtggtggtatctcattgtggctttgatttgcatgcccctaatgactacgttgttgaacattttttaatgtgcttgctggccatatgcaacaaaactgggtttcattgttgttattgagttgtaggagttctttat

SEQ ID NO: 70739 - DNA, 1052 bp, Homo sapiens
attgacttctttttgcctgggtatttttgaaggcatatagaaaatatctcattctaaagcatttgaaaattctttatagataattggctgttttatggattggaaattgaggatttaaaggttaaaaagtatatttatacaaatctacattattgaaaatatctaagctgtaatcaacttatatttggtgtagtatttaatggaaatgatttttaaagaattttacttttttccaaataaactcattgaatcccagttttaagtgctaaaatgttcatgtagatatggaataagtatgattatacccatgcatagctatgaaagtatttaaatatcttttaaagtatgcttctttaagagactagatgtgtaggcatgtttggtcattttaattatgtgctcagtgtgtacttttgtcagtcttgtctgccacctttcatccaccattttgttattactttttctgctttctaatggagatgcttaaacttgaggtaatgtgattttgggaggctttttaatattaataatacccttaatgtgtcaccttcaattgttatatggcaattttatgttttaaggcaatcttagagctttgaagacatgctcatttttgttttgctaatcatgcatagcttcaaccattttaaaatgattatttacttatagttgtagcatattaaaacaataattttaattctaatgcaccagcaggatgtttgcttgaaatatctttccttattttgtaaagttttttagtaaaaattcagtattgaattcaataacatttcagaaaaccaaggaagtgcaaactttttataggatctaatatattgtttccttggaaataaatatctattatctctttggaggtataattactcattcctttagtgagtctttttgggtcttccaagtgtcagggactactttaggtgtggggattaaaatactgaataagacagaatgcttgctcccataaggcttaatcctttgtggaaatcaaacaacagactgtacaagtacactgaatcatgatagaaagctaggta

SEQ ID NO: 70740 - DNA, 1090 bp, Homo sapiens
cccattctatgactagagttatgaaagatagggaggtgaaagaatttagtgtctccctccatcgtctcctcctgcaaacagggctttgtaagaaatggtgattttttttttttttctagaaaaggtatttctaggaaagaaggaaaatggcttagaaatcagttcttcgtgttttcatttaaattttcataaaaatttatcttttcaagtatttggaaataaatttagaaaggaacttatttgtgctgagtaactgaataggtgatttaatatttcattatatttttaataaaataataatacttattacctatttaattaatagatatgtagtgatgaatgagaccttggctatgttaaaatattttgaataactttaggaaatggtaacttaagagtcagaataatattattattagaaacaaactcttactcttttgagcaccagtaggttttggatactatgttaggcacttaaaacgtggtcgcatttgtttcttataaccctgtaagttaactattaagtatgttttacatgtgaggaatctgagaggcaatgagattaagtaaattgttcaaggtcacacctaatataaaagctagggttggaactcaggttttgtccaaagcctgtgtcattccctttttattatgttgtctcctaatttaggtggtctgatgattgccttttaagtaaatttgtgctattaatcttgtcctaaaacttattgttaattacttttctaattttgccatattgtgtgttgtaatatttgtattgggtaatagcttaaaatacttttgagttgtgtcataccatttccatatgaaaaaaattactaattacttcatctcatttatttgtttataactgcatttgttttttagcttttccttaatctgaatatatgacgttttattaatttattaaaattcaattctagttattttcaattaagtatgttagtgaattataggacttaatacaacaatttttattatggatgttgctgtttttaccaaacctaaatattggcatcagaaacaaaacacatacaaaggaattaaagaagctaaaaatttattttta

SEQ ID NO: 70741 - DNA, 1057 bp, Homo sapiens
gctcatatttattcggagtatttctcttccaagataaacattttcagttcttctactatttcttacatgacatgactttggcctgtaaatcccttgtataatatgtcagcatttaataaactctaagatgtataatacataaatgtgcttaaaaatcctagcctttgtcctttttactttattataggagacattttgttatgactactgttatttgtagtctttaagctcccttatgtaaagtagacctctgattttcatattttcagtttaaaaagttgttaccgtaacattttaatttgaatctcttccttagagttttgtaactggtgatctaaaagccactctattcacaaatataacatgtcatcaagctttggggtataagtattatagataacccatgtctaattcatttttaaaaatctttctttatcttatgggaagagatggtgaaagtttgtggatataacacacataggcatgtaaggccttatgatgcctaacactacactctctaacttatgatatttggatgcagtttttccaaaattgacactttgtagcccaataacacttaattccaaaaattttcaaacaatttcaggtggttcatgaacttactgaagccagttaaaagctcttgtcctactggtattattaatcagcagaagacaatgataaatctataagtacaaatgtgaaatcaaggagaggctgaatcaaagaagtctcatgaggaaaagtgctattcagatgttaatgtcaaaatacctaaaccagggtgaacccagtcatttatttctttgtatcagtaagaactatttttgtttagatatgtctgcctattggtatttctcaaattaaaaaaaaatacactcccttttgattaaaaaatatcttaaatgctatttgaaattttaaaataaatgtattatggtgactaaaacagaaccaaattaatgtcagttttaggaatatgtattttaaagttgagtcctctctgacttattccagctgcaagttttggagttatgcatatactttttaaacaaat

SEQ ID NO: 70742 - DNA, 1386 bp, Homo sapiens
attaatggaatttaatgatttcagagttgctatgtaaattattttgtttgtcctctagctgcctgccttcaaaggactggtgtttctttgtagattcttcttgaaatttagagaagatacattttcttctgtggcatgcttaaagattaaaaaggaacattttaaagaagtgaagtaaataatgtagtataaatgtaacacttggttatactattacatatatatgtttttaacatgtgcttttaggtaaaatatgtgattaagtacattaaaatgctaattattaacttaatgttgagtggaatttatgtagacagttaattttaagttcatttcatgtaattagaagtataaatttactgtatatatttatggttatctaaggaatgtgaatttgaattagagtgatatacagatatgcagagtaatatatggaaacttataaaactgtcctccccttaaactaatatttatataactatctttaattagatataaagtcaaagtatgatgaagaaaggagtcttcgagaagctgctgaacaaaaagtgacacgtctgacagaagaattaaacaaagaggcaactgtaattcaagatctgaagacggaactggtaatttaggaattatttattgagatgtactcttatacctttctaaattaaaaataaaatacataccctgaaggaaaatgtttaaaaatataatttgagtgaaatcaggaaataagcaattccctatattctaccacctgcatatatattctgtatatgatttttaaaataaaaatggaatgttatgatacgtaacttactaccttaacatttttgttgtttctatctaaatatcatctgtcattttagtagttttcatatctgcatctctgatcctggtcttctcttgcatgtttgttttataaatccatctgcttttagggtactttgtgttgaatttctagctttaatttcaaattcaacaagtataaaatcaaagtaatcatgtttcctcattactgtatttctgttattggaaccatacatctctaatactctcccaagacttaataatcttggatctgtccttgactttctttcctttatttagctctcaataaatatataaattaactacatccaacctggagcaaactctatgctttcatttgctccttcatttttattaccagttttgtaggatagaaaaagaaggaatgtagcattttcaagtcactgttatgaccaatagatgtagtttgtgaagggaaggaaaacaaataaagtagtaaagataattgtgaatttactatacagcaccttgagtattaatactattaaatatgaggtaggatgggaagaggaagtggcttattgtgggagaagatatcag

SEQ ID NO: 70743 - DNA, 1117 bp, Homo sapiens
acatatcagtatccccaataaacagtgagccttgattctgccacataatgtgcacaaataataaatgaggatgtacattttttggcatcagcattcaaggagcagtttttttatttatttatttttagtttttacgtgctcagagtacttattgcttagctcattttctcccttagaagattttataatctgtaagctattaaagatcttcttttttttggccaatttttgcactgccatgttcattcatatttcagtgaataaatatacaatatagaaaaatatagtatgtttaaagtaccacctgtggccattatggaaatatggatgaaaaaaatccaatatgctgtgtattacagtgagtataggaacttgacaagctaatgagggtgctcctggagggaaaaagcagtatacgcaaaggcacagaaatttgaagtatgatggcgtgctcagggaaacgcaggtattttagtattgttgaagtatggtgagggagtgtctggagatcagactgcataggttgttaggggaatggttatgcagaaccttgtatgccatattgatgataaagtttgctgaaggatattgaagaatctgttttagaaagattcctctggcagctctgtggaagattaattaggaagagggaagactggatataggagcactgtttctaatgttattgcagagtgtggacaagagatactgagtatccgaacacgagcagctgcaatgaggatggagatgagaagatggaaaggagaaatgtttatgcttaatgttttattagaaatgagtgagagggagagtagtgagtagtttagccaaatttttaggtttctagtttaggtgaaaggtgggcgttgatgagaaaaggaggtttggaaaatgagtcttgcatttgttgtatttgagatgcctgtgggatgcaggtagagatatatgttgttaaagatccagaagaattctggagtgagttattggctagatagatggatttgggagtcatcagcatgtcagtgatagctaaaaccattgcattgttatatacctgggagaatgctgagtcagaagaggaggaggtcaatgagagagccctggggaacagtgatct

SEQ ID NO: 70744 - DNA, 3100 bp, Homo sapiens
ggtgggcagatcacttgaggtcaggagtttgagaccagcctgaccactgaggtcaggagtttgagaccagcctggccaacatggtgaaaccctgtctctactaaaaatacaaaaactagctgggtgtggtggcatgtgcctgtaattctagctacagggaaggctgaggcacaagaatcgcttgaacatgggaggcaggggttgtagtgagccgagatcatgcctgtgcactccagcctgggcaacagagtgagactctgtcccgtccctgccccaccaccgccaaaaaaaaaaaaggaaaaagactttgcatataaacagttattgtccctattcaggaaaatatacagcgttagaacttgaatctcagactgtctcaatttttgttttaacacccctagacttgaggaaggtgacagaatgacatactctcataagtaacagtggatcagtccgaaaatatttctcagtatttcccagtatctgaggctgcacgtaacaaaggctgaggaggggagcaagttaggggaagcgctgcccattttcaggctgaaaagaatttctcagatgatcctgataatgtgttttctttgaaaatcactatggtattccaaaaacaaaggaaacatagcttttaaaaaatattttataaatcttataaaataatgcaaccttttgcaccagaaagaccaaaaattacttttttctatgaggtaattatgtatataagaaaggattcttaacaacatttagttatttgacacattaatggagtaccttttatgtggcagatattttggcaggtgagggagataataggtgaataaggtacaatctctaccccaggaggtttctatgataggtattatttgcaaaaagtgcagtggctaattcagcataagaggaactcaggaaaaactttataggaggacagttaaaccagagattttaactgtggtggagaaaatgggtgcatgtaggatgataccagttaaactggctgaagcagtgcaagcaaagctggaggcataaaagattcttgaaaatctggttagcattttatcacatgttatccttctggaccttgtgggtcaacttttcttcttgatggactagccaaaatcaaaagtaataatctcacctactctgcacttaaaataagggctttccttttttttttttttttttttttttttttttttttttgaggcagaatctcactgtgtcacccaggctggagtgcagtggtgcaattttggctcactgcaacctccacctcccaggttcaaacagttctgcctcagcctcccgagtagctgggactacaagggtgcatcagcatgcccagctaattttttgtatttttttttttttttaagtagagatggggtttcaccatgttggctagggtagtctagaactcctggcctcaagtcatcggcctgccttggcctcccaaagtgctgggattatgggcgtgaacaactgcgcccggccagggctttttcttttaactaaaaggatacttggtacaacaggagtaccttaagttccagttaaggtaagttcttagttgcagtggatatgagaaaggattacagataaccaaactctggaagtattgaatatattgttttaaatcttaagtaaattgtgttttttggaagttggtgacaaatttgaaatgactaagggaaataaatgtagctggctagttttagtgtgttattgttagctaacagcctttctctggaatttatctatctagcaacctcgatccccttggacatcatttagaaaaaaatagaggagtctcttatatcaaattggttttcaaagtccatgaactaaaggtcatgcgatctgttcatgggacatccctgaggcactcattctaaactcattatacttttattttaaatgaatgatgggttttaataaacttttttttttaatctacccatcccatttattgcaagttagcattcccagagctagtatgctaagaatttttagtaatgactgttgaaatacagagcaggcaaactataaaatgtggatataagaattaaagaggcttgccagaattaatagggtagaagacatcttttcagtgataaatatttatgtcttggaggtattagacaaaggtttaatatcatctatttgagaaggtgcggaattatatgtattttagaaagatttatttttattagaaatgtccccaaatttaagttttatttaaacaaggaaatcttaatcacatggaaaattcacttatgtggaatatttctataatgaaatgtatgttactgatttctgaaatttctcattaggaatgaatcatttatttcagggtattaatctggtaatttttggaagttgtaagaaggtatggcatacctcagtgtgatcattagctttctggcacacttaggtatctggagcccaaacctgaaagtggagccaatagtcaaaaagccacagttgtgaagattaaatcgtgtaatagggatgtagcttctccgaggaacactttttcatttgctttctagttattagcagaagttgagacacaaaagagaaatgacaggctaaacattatatgggtacatgtactgttgcactaaaggcatatctactagtgttgtacaacagtgggtaggagatctaagaatgccaacagatggttttgaagaaaaggagaataacagcagctagactaacatcctgactgggagcattcattcattcagaagacaatgttgagtaccatatctctggagcctaatggcattactgtattctgatgtccagaggcacatcctcaatactaccgtttgctcatttcaggagtttcataggagattattgcatttatcacctgttgtgcccctgcccttcattctggctctgtgatcagaacacacctagaagccttctgtttcctaaatgtaacatgactattcatagtgtttcctgcacctttgtttatgctcctccatttgcttagaatgcttttctctctgccaggtaaactcctatttattctttcgtactgaattccagtgactgtgtctctctctctctctcacacaca

SEQ ID NO: 70745 - DNA, 1241 bp, Homo sapiens
acatttaagcaaagcaaagtgatttccttaaggtcatataatcaggcattggttgagacccaagacccaagtccacatctatttttgacactgacactcatgatgttataacatttcatgcttattgctgtcttcattttatttactttctccctgatgctttcaattctagtctctcatcctattattcttttttttgtttgagacagagtctgactctgtcacccaggctggagtgcagtggtgtgatcttggctcactgcaacctcccccctcccgggttcaagccattctctggcctgagcctccctagtagctgggattacaggtgcacaccaccatgcctggctaatttttgtatttttaggagagatggggtttcaccatgttggccagactggtctcgaactcctgacctcaagtgatctgcctgccttggcctcccaaagtgctggggatgcaggcatgagccaccatgcccagcccctcatcctattattcttatttgacaaaacctcaagccatacatacatcagtataacagcccatattttaaaatatagatattgttaggtatatgtaatttaaaatactgtttgaagatggttttatttggctcagaaaattacaaggaagaatcatctgctgggaattatgggtgtggggaagaatgggatctcaacctagtggaatatagtaaagactaaaaattactttcattaaattactttcaaagagaacttctttgttgaacacattatatgacataaaagtatttgttatacttgccagtaatttcttgatctcggctgggcgtggtggcccacgcctgtaatcccagtaccttgggaggccgaggcagacagatcttctcaggttaggagttggagaccagcctggccaacatggtgaaaccccatttctactaaaaatacaaaaattggccaggtgtggtggcacatgcctgtagtctcagctactcaggaggccgaggcaggagaattgcttgaacctgggaggaggaggttgcagtgagccaagatcgtgccactgcactccagcctgggcgacagagtgagactccgtctcaaaaaaaaaaaaaaaaaaattagctgggcctggtggtacgcgcctgtagtcccagctactcgggaggctgaggcacaagaaccccttgaaccccggaggcggagatggcagtgagctgagatggcaccattgcactacagcttgggcaacag

SEQ ID NO: 70746 - DNA, 1031 bp, Homo sapiens
taatgcatcaggaatgtcaaatccagccctctgagctctcagtgactcaggaacccaggccttctgccatgacatccttggcatcactgctttgattatttcacaagctttgtctgcttgtctagaaagtggaaacctcccagaagaagggtcagcgaccacgctgaggcaggaggtagtgctcaggctccaagacctggcaataaagtgcagcctctctaaagcctgtagcaaattgaagttaggctgaagtgagatttgatctagattggtggtatctaaaattcatgtttatttcactcatgtattcagttggcttaaccttctctgacttctctgaggatgaaagccttacaatttcatcatttcgggtagtgggtactgtctcctggtatcgacaaccaaatggagacccctcatatccagctcctctcattttttttttttttttgcctttggccagagattcattttgcattcttcatctttagtactttattgaaattctgccactttctacctgttttggataagccttggtgtggtggttgctactattcttggacaggatacagttattgcctcctccatctctaaacaatgtttgtggttttttttttttttttcactcatgagtaagatacctgtctctttctgaagtgtgcctctgatgttctctagccatctttattgaaacataggctggatgcagtggctcatgcctgtaatctcagcactttgggaggatgaagtgggagaaggatcacttgagcctaggagttcaagaccagcctgggcaacattctgagacccctgtctctaaaaaaaaaaaaaaaaaaaaaaaaaaaagggaaaaaaaggaaaaaaaaaagaagacatagttacacaagtaatgttccttcttcttttttttttttgagatggagtctcgctctgtcacccaggctggagtgcggtggcacgatctcggctcactgcaacttctgtctcccaggtccaagcaattctcctgcctcagcctcccgaatagc

SEQ ID NO: 70747 - DNA, 1030 bp, Homo sapiens
aagtacttaattttcttttattcagtgtatttatattgagtttcagtaaatgccaggcttcatgctaaggggtaggaaacagttgattaagctgtgggtcctccctttagaactcacaggctgtttgggaggtgaacatttaaaagtaatgacagtgctatgtaatagaataatgaagaggacagaggacccaggaggcactctgtgggaggtgagggcaattaggaaaagcttcagggacgggggcatattcacagctcagaagagggaagggcatgtcaggcagagggaacagcaaatgcaaagagatggagtcataaaaggcgcaggtagtactgtgaggagtgtgaacaatgaagcttaggaagtgagatggtctgtagcaattagtaagagatgaagctaccgtggtggctagagaccaaattgtgagaggacgtaagagtccctttgaaggagttcagcttttatcttgtagttgggtcagtgttaatgctgagtatttaatagggacattttgataaatgtcttaaatctggtgatttactagtttagaaggtagaatatatattttattaactctacaagtggtatttaccaacaagtataacttgaatctttaaattgtgtaacatggcaacctattttacccctccctgctaatcttatttctcagcacagatattaagctataagattaaagctattgttaatttagagatttatttgaaatggactctgtgctttgaaattatgtggcattccttggctgggtgcagtggctcattcctgtaatcccagcactttgggaggccgagacgggcggatcacctgaggtcgggagttcgagaccagcctgaccaacatggagaaaccctgactctactaaaaatacaaaattagccgggagtggtggtgcatgcctataatcccagcgactcaggaggctgaggtaggagaatcacttgaacccgggaggtggagattgcagtgagctgagattgctccattgcactccagcctgagcaac

SEQ ID NO: 70748 - DNA, 1072 bp, Homo sapiens
tagttgttatgaggtccaaataaaatagtgtataaagtagctcccagtaagaactgaatcattattacttctccctttttagttgctgaaattcaggtttgtgagcttacgttgacttttaagcatctaaatagattttccattttacatagatgaataatgattaaaaatagcaaaagtaggattagatgaacacctgggatgaagcaaatccttaaaggaaaataatatgatctcaggatcttgaaaacatgtttgcaagatacatttttccttgagattaaaatcttagacttttgttatctcttccaaatgaaccatttaatcaatgagacagtttattggacaaatagatgttttccttgcactgtgccaaaaaacagatttgattgattttacaattaaattgagggaagtggctgatagtttttgcaaactcattccttgccctttattgatttttgtttaaagtttagccattgaacattacaataaagtaactaagcaagccaccttgaactgacaaaacaagggcactcactaagtgaaaacaccacacataatgataagacctgtcagagcacttatggattctgcatctgatcactggaatatgacgtctagagtactaggattaagaatctcagccttgaagttaaaaaaaaaaaaaaaaaaaggactcttaaccttttcctggcacagtggctcatgcctgtaattccaacactttgggaggccaaggctggaggactgcttgaggcctggagtttaagaccaggctgggcaacatagtgagacccctccccttcccatctctacaaaataataaataaataaataaataaataaataaataaataaataaataaataaaagaatcccagccttgaggttagctttggactatcaaagctgcctcaactattgctcatttagagagctcaaaagcttttttaagaactcgcttatttgtttcatttcctcttctgaagattttttttgcagatccagactttgaagaggctcctccctcctgccaggctcacttgcccttgtccttgctgtgacaaat

SEQ ID NO: 70749 - DNA, 1107 bp, Homo sapiens
ctgggcaacatagtgagattcccatctctaagaaaaattaaaaaattagccggacatggtgatgtgcacctgtagtcctaacaactgggaaggctatggcaggaggatggcttgagcccaggagttcgaggctgcagtgagctatgatggcaccccagcctgggcaacaaagtgagatcttgtctcttaaaaaaagatagagtgtggctctcggccttagcgccattttttttggaaacctctgtgccatgagagccaagtggaggaagaagcgaatgcgcaggctgaagcgcaaaagaagaaagatgaggcagaggtccaagtaaaccgctagcttgttgcaccgtggaggccacaggagcagaaacatggaatgccagacgctggggatgctggtacaagttgtgggactgcatgctactgtctagagcttgtgtcaatggatctagaacttcatcgccctctgatcgccgatcacctctgagacccaccttgctcataaacaaaatgcccatgttggtcctctgccctggacctgtgacattctggactatttctgtgtttatttgtggccgagtgtaacaaccatataataaatcaccttttccactgttttagctgaagaattaaaaaaaaaaaaaaaaaaaaagatagagtgtggctcacgcctgtaatcccagcactttggaaggtgtaggtgggtggatcacctgaggtcaggagttcgagaccagcctggccaagatgatgaaaccccatttctactaaaaatacaaaaattagccaggtgtggttgtgtgcacctgtaatcccagctactctggaggttgaggcaggagaatcgcttgaacctgggaggcagaggttgcagtgagccaagatcgcaccactgcactccagcctgggtgacaagagtgaaactccatcccctccatgcccacattaaaaaaaaaaaatggagtttaataactgggaagaccacattagatgattttacatttgattgcatattgttagaacacatttttgaatatattaatgcatttaaaacatgaataaatgatactttgcatgtgttcctttttccccacagaccaatttttttca

SEQ ID NO: 70750 - DNA, 1818 bp, Homo sapiens
cgccactgtactcctgggcaacaaagcgagactccctgtctcaaaaaaaaaaaaaaaaaaaaagaaaagaacatcagatatatagaaataagtgtttaaagtttagtactggaggctgggtcctcatacctgtaagctcagtttttgggaaggccaaagcaggaggttcccttgagggcaggagtggaccagcctgggcaacatctccagacttctacaaaaaaagtagtattgagagccaatttcaccaccagtaatgatgaagctctagttctagtcttctgtttaacttttaaatgttttgtcttatataaagtcacttttgtgttggactgtacaactgaatatacttgcctgtgctgggaaatacgctatgctaatcagcagtatgccagactaatttttttcccttggaaaatgtgtccatggctagctcctgtagattaaaatgcatttctttttatattcaagcagaaccaagaccgaaagcacagaacatatgtttatgttctaacagtcactgaaatattagaagattgggaagattctgttaatattggtaagttcccttttgttatctgaatactctgttctaacagaagattgggaagattctgttaatataggtaagttcccttttgttatctgaatactctttgcttatattcctgtgtccagtttccatcctagatttttttttttttggtcacttttcatttagagcagggaagataattcaaatgtagagatgcatattcatcttaattattccccaacatattgttgtctaagtcatttatcggggagtaagtggacattacttatatggcttactttttaaaatggactgtcttgtaaccaatgtcattcttttctctaggaaggaagagagagtggttcaaagtagaagatgctatcaaagttctccagtgtcataaacctgtacatgcagagtatctggaaaagctaaagctgggttgttccccagccaatggaaattctacagtcccttcccttccggataataatgccttgtttgtaaccgctgcacagacctctgggttgccatctagtgtaagatagagagaactgggtaggcctctcccaccatgtgcagtctcatggggagaggcttctttcgtttcctcgtcaaacatctgattgacgcttgcaaactgtctgaatttgccatgcaaggttttcaaacaatttgcatgtttttcagatgctttcaaatctttttttaaaaaaatagtgtaaaatattttaataagccaaagccatgtggaatttttgtttagatgccttaactgtgccacaccccacaaccccctatattattttggttgtctatttctcacagcatattttcagttttttgtccatttgacatcagtctgtggtttattttgtcatcagattacttgtgggtatacctaccccaaaattgttttctcattcacagcattagcatattcagcaaatccatctgtggtgggaattaaaaatattattggtattaaagaaatccattcaccccaaaacttgttttacaggattacaattttaattcaaaatttccagatttgggctatttctgtatgatccaataacttattttgtcacagggcttaatttgccatttttggggatttgtcgactcattttgtctgaattttcacaactggtattatgtcactagctacctgatacggctatttcccttataactcaatagtaccttaacacaaagtataactctgtagagttggtgaatattttagggaaatattagcaaaatgcatgtagtaaagacat

SEQ ID NO: 70751 - DNA, 1659 bp, Homo sapiens
ctcaactcaccgcaacctccgcctcccgggttcaagcgattctcctgcctcagcctcccgagtagttgggattacaggcgcctgcctccatgcctggctaattttgtatttttagtagagacagggtttcttcatgttggtcaggctggtctcaaactcctaacctcgtgatccgcctgcctcgacctcccaaagtgctgggattacaggcatgagccaccatgcccagccaaagatcatttttttatatagacttcagccctttgtaaatattgtaactggggagtatagagtagaaaaaaagtatagttaaaacatttgttctacaaattaacctttaaaaatataattactgctaaaaatagagtgctgttacacttaaggaaaattagtgccattttggaaatgagatcttgtgccataaatacagctgaactgaatataaatgttcacaaattaatgctgtcaaaggaatgagtaaagcagaaaaacttttaaccagcaacatttcaagtacgtagtgtgatcaaacatgatcatccagaatttttatatttttttctttgtacagaggttacatattctgggtgttcttttataaaggaaacattttaaatcccacaaattgacactttctatcttcaatggactaagatttttttggtcagtaatctctgaaatttccttaaattatatacttaacatagcagagaaactggattgtttttgtatataagactgcttccacctgaaatgctgtcataagtactgggggggtgggggagtgcccatcttgtacatgatattcttagaggtaataaggtaatgatgcatgaatttattttataaactcttggactatgtatttgacatgtaaaatatgtacagtattaacgtcaaccatctctttaaagttagcctataaatattgttgtataattttctttggtcagaaacacttggactgaatagtgacactcggtaaggattttcagtgccatttagcaaaacgtctttagtctatgcaactagcaaaaatctgcataatgcaacaacacagttttcacacttcaaattttacatgaggggttcttcacgattctcctggaacccagtctagcaaaatgagaggaaaggccctagggagatttatttctgttaaatagttaactctgctgagtatgacaaatagtgtctactatctcaaccctccaaaatttgcagagtgttgggactgtcatttgtgattttttttttttttttttggtggggtagttgaataaaattgggcagctaaatttttcagttccatgtgcctcccaaataaaaaacagaaaataagtagtttttgtgaattgacttgcagacaaagtagaaactgtgctgcatgatgttattttgtaaacagatgacattttctgaccaggcacatgccatccaattttctgtcaatcacactgttgtataaagcagcagaactgaaggggaaaaatgattgttgtatacactgaattgctttgcatggtctcatttgagataattgatgtaagaatcctgacttttttatatttggaaacatcaaataaaaatggaaaaaatgatcatggctttaaaaaaaaaacaaaaacacacacacatgaactcagatttgcaaaccag

SEQ ID NO: 70752 - DNA, 1974 bp, Homo sapiens
gacgaattcctcccctcacaaaactgttctttcccacctctctccatatctaattcctgattcttgttatttttaagtcataaatgtagccagtcataaatacataaatgttaaccttcgggttgcaaccttgtctcttgcagtttaaggtaatggatattgtagcccatttgaattttcttcactcttattctcgtaattctggagtttcttcagattgtggtgtattttattgtgctcctatgtaagatgaagaattaactattaaaattacattttcaacatacaaaagcttttgatgactggtaactggtatccttccaaataaatgcattgcttggtaacaaatgttagcttaattcagaatgaaatagttaacaaccctaatattgtaaaatttgaaaactgatagcagctgtcatttataacaattcttgggctgtttaaagggtacatttgactatagctaaggaaattgaatctcactttaaaaatgaaccacacaaaacttcaagaaacgaaatagaaatcaacatttactgcccgtaatattgctcatggttatagctagtatcacatagtgatttacaaaccatgaaattccagatttaaatctgttgcactacaaaaatgtctaaatgatgtctgctaaatttgtgagttatagaagtacagaaataagtcattttcatttcaaatgcagtgaatttctaatttcatggtatcatatttttttcctttgcagttttggtaagactcccccattactttgctaagacttgctttctcaaccagtgggatgaaacgagtgccagtgtgttgactgagccttcttaggacttaaggggctctgggagaggccaaggcagcagttgaaaactgcagcttcacctggcctttgggcctgttttccctggcccacacagtgtggctggttaaaacattctgaatttgatgccaacatttttaaaaattgggagatttgcatgaaaatccagaattcgggtaacttttgaatgatctgaagatctggcaacagtagacctgacccacctttgtgcacgggacttaactgagaggatctgagtagcagacaccctaagagcatgtcattgtcttctcaccagttactctccagttggctagagtcccctccgagcacacctgctagtccttcccccttgtaagcctttgactttgtaatccctgggctaaaggaaacacattattcaacaaaagtgtttcatgtttgcccactagttgttggggatgattaggtggtgagtgaatggcatggggctttcctttggggaccatatactctaatggggaagggggacagacaaatagttgtaactctgtcatggaaaagagaagtaacttggacagacttttggattcaggccagatgaacatctccaggcagagggaacagcagcatctgcaaagtcctgggagagaagaaaagaatctgaacattaagtggcttcctgaaaatcgactgcccaggccgggcacagtggctcatgcctgtaatcccagcactttaggaggccaaggcaggaggatcacttgagtccaggagtttgtgaccagcctggctaacatagtgggacccagtctttatttaaaagaaaattgcccgttaagaggcttttctaaaatcttgaggtgttgataggagctttatgttttttgacttgattgttgtagtctacttcgctgcgatttgcttctgctctagttatccttcatcctctcaaaggctgtctagcaagatcttaggtctaaagtaaagtcatctcttggtatttgtcgggaactggttctaggacttcctttggatatccaaattcgcagatgctcaagtctctggaataaaatgatgttgtatatgcatacaatctacacaaatcctcccgcttatgttaatatttagattacttataatacctattataatgtaagtgctat

SEQ ID NO: 70753 - DNA, 1048 bp, Homo sapiens
tagataagtgaaacagtaggaattttagccctttacttcttcacttaaagaaatcatactgtactctgtctttccaccaaagaatagtgtaaaaccagaaggtattttagttagtcatgtgttgaatagtggccggaaagattttatttcctagccagtttttgcctttttaggaaaaaagttgacatcagtttctgtggttgagactttttcagatgctgccatttcagacttgtttcatttagtttggattttattccttttttcccctcccacagtttatgctgtgggtttgttagggaaaccaacagtttagtgaaataattatgcatgtttttgtgtcagtccattagaacttgagagcagcatatattataaggactatttcaaaatgttttctacacacgaaagcttattttagaatgtgttccaattaaatctaggcttgatcaggtcacatgatgtgcttaatatgtacattctttacaaagaatatctgattttgagggtgaactgaagatgagaaagtaaatgccatacctatctctgccactgtgtattgagagtgattttgaagctattttgggatacgcttttggaggcctttctgtagctttttatagtagatacagagctgctactactttgtgtaactggtgagtggtggattgggactcttgggccctggctttcttttttttccagtcacccaatttatggctttctaaaaacatgaagacctggggtaaaattaaaggatggaggtgaggagagcccagaattcaaggaattttaccatccagttattttctcatttttctactcctgctattcatccctaatatcttaacttttttcctaaaaaatgaagaccagcctcttttgttctggtcacatgttaaaggacttcccaaggtcagaggcttcattattgcctcttgagctttttaatactctaaaaatgttttagtttgaacctaaagaacatgtcagtttctcacttgctcttacatcgccatgatcaaaacaaaaaactagtcttaaaata

SEQ ID NO: 70754 - DNA, 1004 bp, Homo sapiens
agtttcactcttgttgcccaggctgaagtgcagtggcacgatctcggctcactgcaacctccgtctcccaggttcaagtgattctcctgcctcagcctcccgagtagctgggattacaggcatgcagcacgaggcctggctaattttatatttttagtagagacagggtttctccatgttggtctcgaactcctgacctcaggtgatctgcccgcctcggcctcccaaagtgctgggattataggcatgagacaccacgcccggcctgacattactttttgtatagaattttttgaggggaaaatagtgatgctttaaagtttctgtacaaaattttacctattatatgaaataaattaaattattcataatgaccaggcagtaacattataacatgattgtcttgtgtttcactctccagactaatttgggagccactaatcattccatgtggctgttgagtagttgaaatatgactagtttaaattaacatgtgctacaagtgtaatttgcacagtgggcattgaaggctatgataaaagataaaatacatcattaatttcatactgatttcatgttgaaataatattttgaatacatttttagataaaatatattaaaattaattttacttgtttctttttacttttttatttggctactagaaaatttttaaatacttacgtggcttgtattatatttctgttggatagcagtgctgtggagaaaagtactcatcagccatttttatcttagtgtatctctaggtggccttatgatttgtaaggaagtagtgtaatggggagcttgagcaaaactttggttctatttctaatcccagctagaaaataggcagtcagttttactataatgagacattatatgtttctaagaatgttatgttatacaaaatcatgtagtaaaattcacagggcttacagataaaatgaagcaaggggtatgcacttgaaaatgtccattgatgataattaactttttgtttt

SEQ ID NO: 70755 - DNA, 1892 bp, Homo sapiens
ccccacgctaggtacaccaggctgcttagttgaatttaactgtctaatgtgaaattagctcctcctctaaaaggttttaagtagaagttctttgataaagagattggttgacttgtatgctctcctcttttgacttcatttaatcccaaagagttatttagcttcttaacgtatttaccagcccccaaccccctcctgccttggtctgctaactcttaaccttttcttcacttcctttcctattgagtttagacttcattttagcaaccaacagaagccagctttggctagtttaagcagaaatgatattaagagttattagttacctcacacattcttcaggagggccaaagaaaagagggagccaggaacaaacttcagaatcacatcacgatgatttcagtgctcacactgtgtgcaacacattctacagtgtgtgcggtgtgattattgatgtcaagcgcagaatgctaccactagaactctgctgctgtcttagtggtaactactgcagttctctccagaatgggttatttctttgcttgtgatgcgcaagaagtgctggatgcatactaccaacctcattttgccctaaatgcttccaggcagtccttttgtgtgaccacgggtaagtttttctttttctacaagttacttaaaatttttacaattttcttatctcccagctccaacattatactaaagagtgggagctaaaggaacatatgaatgagtgggggaatttttaacattgtttaatagttaacatagacaaatgactaaaattacacataagggcctgaaatgaattaccaacttgaaaaaaacaagtaaaattttatgaaagaaaaaacccacaatctacatcattttttacataaaagctggatcaaagaaaaaaaccaagttcactggtttttgctaataaatcttattattttagtgttcaccacataaaacaggcttttaaaaaatttccctaattttaattcaagatgaatacagaagaacatttcctacctcacctactaagttatatacccactcccagaacctaaaatatgcaataggtttgttaatagtgcctcgaggaccatggcacacagcagtcccaatgaactgtgttactaagctaggtcctttcttttcattcagcattctgagacatctctgtcaaatcattcctgagataacagagttcattaagatagacagctacattatttaaatcactaaagtcttatttttattttttgagctggtgctaagaaaagttcaggcaatgaagtgttatgtcattcatcaaatcaggaaccatagaaaatggagatgcttgactgccacgagtctactaattatagtgctgaatattcaaaggacatttttaccaccaagaacttcatgagtgttttatgaaggaatagttgacaccatctttagctgtgatgccaatatttggaaatctttgaaaaaacaaagagggaaaaaagatggagacgaggtttttaatctttccagaaaactttaaaaatgtctttagaaataaacaagaacataatagccctgtaatctggttctgctcttcatatattaatagtatcctaactcacacctcctgtaccttaagaccttgactactcacaatgaaataaactgctggatgccaagaagttttactcttccttccagttatttaataccacaatgccatgaacaaaatagcaatgagtaaacatttgtaagtaaatttatatttcaaagtcacgaaacattttagagcatgttgatctcatgcactatcaaagataggcaaaatggtttaccatctgataattccaagtcaaaatagtatataccaatttttcaatcaaatcagtttttttcctattttt

SEQ ID NO: 70756 - DNA, 1050 bp, Homo sapiens
aaatgggatgttttgggtaaataacattttgatttcattaaaattatcatatgtgtaatccattttccatgggttaggtaataataaagttgatctttgcaactgctaaattgaagttttattttttaatccaaagtatttcactgtataacttcaagaggcgccatttatgcagactgtcatacgaatggtcctctcctgaagctgtgcggtatggttagccctgagagaggatgcttactgtgtgggagacaaccctccaatatctgcatgctttcatgtttcctaatttatctcagagttagtatgcagagtgtgaaagactgttttaatttttctttcctgatggtttggattttatacaaaattgtgttactggtacaattggattgagaatgcaaatctgagcgaaatgtaacttgtttttttgtttgcttcgctgaaaagttcaactgctctgcttccatctgttcttgtcttgccttacctattatggagtcctcaggcattaaattttgttgtgattgctgcatttgaaaccagaagtaacctgaagaaaaagggtcgagtaagtaaatacatggtagctatactagtatagtcactagcttgtaggccaggaaaagtacctgtttatgccgtatggtttttaaagaatattgatttgtctgtaaatcaactagccttgaggaaagtggctgcagtgacacaggagtgaaaaaatgtaaacatattaaactgtttttaagggcttttgtctttatcagaacaacaacaacaaaaaacattctagaatgttaattggattttggttattaggagaatggctaattttatttagattaattttatgtatttctttaatgagcaagtgaaaaaaacttgggaaaaaagcaggtgcccttagcaacaaattttctctttatttagatattgaacgttggcataaataccaggatgacagttcataatatccttctccttcagcagggaagactaaaacagtaattataggcctaaagaatgttattacaaaaggggaccttccag

SEQ ID NO: 70757 - DNA, 2144 bp, Homo sapiens
ggggcagccggacagcggggacccggggcttccaggcggctgcccggcgggccagggagtgctgtcccacgccccggcggagggtggggcggcaaggctgggggtctctgggcttgggcgcgggcctccatagcttctgagaccacccccccgccggaggccgcgggcgcgcgggaatcgcggcggggctcgggcgcctggtggggattgtggcccgacaaggtccctcggcagccaagcccctcttctccgccccgacggggccgcggaggtgcggcaaccgcgggtgcagaatgaatgaaccgggagggtcaggccgggcggggccctgcgccccgggaagtggctctgggaggcccgcgcgtcctgccgcggtcagcacatgctcgcccctggttgccgcggctgcctgggtcccgggacgtgggggccccgcgccccgctgcccttgcttccgcgatctctctcttctgaatacgtttccgctcgtttatctctgcgaagtgattttactctggttggcaaactctttcagagctgttccgaggaaatagttttaacacaaggctgggggagggccgcagttatgggggattctctttctctctcctcttctctcctctcctctctttttcgtagatatgaggcctcgctatagtgcccaggcggcttccaaaactcctggcttcagagatcttcctaccttggcctctgtgggggatctcgtgaaatcttttgcccctcaattttgtgcgttttaattattaattggctgtttatgaatactgtgttttgacaagtatgtatggaaccatgacattttcgattctttgattttgtaaagtcttaaggaaatatcgacaagtcttcagacgtgagatattccttgtcatcacaacaactaaaccttaaatttttgtgtcggtttttatgaaggaaattagttgcacatttatgtgactaaatgcgccagttaaagtgactcaattgcagcatcattttgcttgatataacctggtgaacgtgtatgttaatcttgctcattcttgtgaaatctgtggggagatgcatactaagtggaagacctgttaggcttcgaggatgatgtactgtatactgcttcatccaattgcatttaaatatatctgagatgagggagatgtcactgacctaagggtgctgatgtagagaaataagacgtttttgtatggtagaaattcttagaaatgagagaagtagaacagattgtcagggagcactggagtctaataatgtgaatcttcatagtccgaaatttgttgtgtgtggatttatctaggattctgtccaaggagttttaattgtcatatgtattggcaggtccgtacaacgtggttttagttataatgcagtcacatggtccccaaaggtcatgtttattgaggccccagttgaaaaatgaatagggagtgatagagccatacatcaaatatccttgttttcgttgttacttaggttattgactaagtacataatgcaagttgacattcatgataattctctgaaatacatagtgaactaaacatttaacacgcatttttctatttttgattatgaagatatgcccagtaatatgaaagccttggatgaaaaaataaattctgtggaaccttgtttataaatttacagaaatggtttaaggcaataagttgaagtcctcatgattcaatccatttggcacacagtaatttacactgggcatttacattttgctgttgaaactaagacagtaactcatactgtgatatataatcttaattttacggtatcttgttgacaacatctatctaatgaatgacaccttgatttgggttttatcttactagtttagtgtcatttatagcttaaaaggatggttttctctaatccttaaacagaagactaaaagactagatttttaaaagtgtccatgcttgtgttatgtaggttgttccataatcagtgacaatgctttaaaaaaaatcagaatttatttttaaaagttgcctcttttctgtcaatcactatacaaacttctgtgtggtggatgggggtaacggtattgtcctgaggcaatagggacatgactttgttgattggactgttaatttgttttatttctgggt

SEQ ID NO: 70758 - DNA, 1523 bp, Homo sapiens
tcattgaagactattaaaaacaagatttaacaatggttatttgtcatttattcacaacaggccatgaagattgtggttttccccattttgtcattggagaaactgaggatcgtttagttaatgacttgtttaaagtttcccaatttggcagtgactgactctaaagtccttggaagcaagacgtttaaattttgtactttagtttcttcatgaatcagaataaagatacctcacatgattaatacgagagcaaaatgaaatggtggtgaaagtacgttggaaagttaaagactttgtacacatataagatggtgaaattttatctgggacttgagggcatttatgagttcctccaattgagtaataggctaaggataggccttgtttgatatttctttattattattattattattaatggctcagggcagacaactatttcatttaatcagaaacaggatagtactgtaaatgatgtagtatcttgtgtatggaaccttggagggtgtacacagccacactagcattaaaagaatgaatactctgtgtaccatttgtgagtgactgtttcaagagtaattacacatttactgagtattcattaagtggaaggagctgcactgggtcctgcagagaagtttgtatctaagataaatagtaatggacatagttccagtggttctgatcttatattctgtccatgtcgctcttcgtcctgttgttcaatcatgtggaattgccaagttgtttaaaagcattgcttcagttgacttctaggcagtgattcttaccttgttcttgtggtgtttaatataacttaaatttaccataggtagcactgatttttctttatctcttcagcaggagtagaaattggtatgcttagaagcagattctaaaagcagtttctcttcagaacatcttttttcataccacttgataagcatcttgaaacaccatggctgtagctgcagtaaaatgggtgatgtcaaagagaactatcttgaaacatttatttccagtccaaagtaagtgaaattttttttaatgtttaaaaacttttaaacttttaagaattaagaaaatttaaagcatttagttattgtatatgcctgtaatttgcaggagtgtttgcagcaatggaaagtgggagaaaacctaaatgtcagtcagaaggggaatggataggtcagatgtggtgtctcatgcctgtaatcccagcactttgggaggctgaggtgggaggattgcttgaggccaggggtttgagaccagcctgggcaacatagcaagacccccacctctaaaaaaaaatgtgggttggggaggggaatggataaattatggtacatctgaactgtgactgtcatgtagctgttactgacatggaaagatctccaaatagaaacaaaaaaagcatgtcagaaccacatctatatatatctatcatatgatcttatttgtatgtttaaaagatgatccatcatatgcatgtgtgcatatgcataaatgcagaggtaaaa

SEQ ID NO: 70759 - DNA, 1049 bp, Homo sapiens
aggcctgtttcatactaaacagtaatgttggttgaatgagtaaaactagctttaaatttatggagaaaatatgctcaaattaaccaaatctgttttactgtttggggtttttgcagatggagctttatattgtgtttgtcataaatctacgtattctcctctaccagatgactataattggtatgtattaaaattcaattgaagaaataatagtcttagctatagctgaaatgatttaattttatttcttgttttgatgtctgatgctttcttttctcattattctttccttaattttgtttttaaaaattattttaatgattttatttacccagtatctgggcttataaacattttaaataaaaatcattgtcattgtgtttcattgaatatttaatttgttataagacagacatgctgtttagaactgctatcttttcttcctgaagcatgctttagctttttggaaaagttaattagtttttatagggttcatatctattagcttaagccattattatcttttcttttgtttgatattgaataatcctaaattatacatacttaatttagccaccatttatttggtacttattcaatttagtcactatgataagaactaggaataacatatgacattgtcttttttctctgcagcagagtctgatatgcagaaactgcaacctattttcttaatctatgttgtttttattacaaattataataaaaatattttttcttctctcttgacactagttttatttttattttgttttcgagatggggtcttgttctctcgctcaggctggagagcagtggtgtgatcttggctcactgcaacctgagatggggtcttgttctgtcacccaggctggagagcagtggtgtgatcttggctcactgcaacctccacctcctgtgttcaggagattctccagcctcagcctcctgagtagctgagactacaggcgcatgccaccatgcctggctaatttttgtatttttagtagagatggggtttcaccatgttagccaggctggtctcaaac

SEQ ID NO: 70760 - DNA, 1048 bp, Homo sapiens
ctctatatttttaattgtaaggttaggatatgtgcaaacaaattaggaaaccatctcatagccctgtgccttaaatcattaaatctcattatattctgagatttctttttatgattcttaacatctcaggtttatttttgatttatatcacattatccaggtatttgagttcaaaccttgtttcaacttcttctgtaatggctttcagtacctgtttctttcctgcatgttccatattgctacaatctgttttaagcattcataaccaaatcactctaaaggtatgtaacttgacggagacaagactgaagacagggagactaggagtcttaaaaccgagcatgttgtctttagacatttgtgtctagtaccctatgtttaatcttatttacttaatcttactgctaatcagcttttgactgctagttaatttaatctcctgatattttttcccatcaaaattactaggcgttttttaattgtaaagtgactttaattagattatcccaatatatatcctaataaagagcttggcagagaaaccccagagactagtttatgtgtataaagagaaattttatctgtaggccttgtccttgtagatgtatcatcttgctgaattttaaatatgcctatgtgtcatcacttatcattcaacacatatttatttgatatctacatatgtattttggattaatgtgagtcattttcaagtgttggtttctggatgtcagtggccatttctttctttttgtctgtctatctgtccatctgtccattcatccattgattcattcattcattctcagcttgttttccctagtcagaccatttcattttaaacctcatttaatatatagaaggatgatttactaaatatttcacagttcttaagttacagcagtcaaaagaatgggactcattatgaatttaataactgggggtatataacttcttcttaaataagtttttattaaaaggtataaaacacattttatttttatttttattttttatttttctgagacagagtcttgctgtgtcgccc

SEQ ID NO: 70761 - DNA, 1063 bp, Homo sapiens
ccaccccccgcaaaagtgcggccaggagggtcgcatcgagggggcgccgccgggatgtttagaggaacccacccccgtggcaggccaagggccaaggatcgctatccttccctgaacccgggcgctcagctggcccgggtagggggcaggctccggccgccgaaacggggttggctgtagccggtggccggggagatctctagcttgcgcccgagcaccccggggtgtggggccagaggcaggccgaccccggcgtgcacaccgcccgccctgcacccgagcgctctcacccggtcttccctgaagcctgtgtattgcgaccgagcctctttaaagcagtagcggggcccgcggtcacgtgaggccgattcctggaaagttcctggaaagccgcctccgcagcagccgggcggggcgcgagcggagcgctgactggggagggaggcggggagcaagggaggcgcgtcggtctgggaagtcgcgcgcactcgctgctcctgggaccgacgtttaactcttgccaagtctcgtcgcagccgccgcggctggcgggccttgggcttcccctgaagcatgagccctctcgcccgcagccaccctcaccgcgtggcccgcggacagtgcgcgccggggtcccgggtgcacagcctcaggataccccgtgcccgcagctcgggcgcccgcggcaggtaccggtagtgggggaagcccgaaggctccgccccgaggagagttaccggggagggcggcgaggcgcggccgcgtgcgccggggagcggcggacggcctgggcttccgcagctcggagcgccggggaagagagagtccgaaccgcggctctgccccgcggcctagcgttgctgcctgctttctccagccccttctcggcgtctggaagtgtctggagtttcttttttttatttcccctaaactgccattcaaattaataatcctcctaataacctgatctcccgctcctccccaccggcctgcctcccgccctcgctccttcctccctccctccctctctccttcccacctccagggtcgcagccggagggaa

SEQ ID NO: 70762 - DNA, 1034 bp, Homo sapiens
cttttatttctaacttctgatttttttctaatttacctaaatctttattttacttaaataatgttaaaagtgtcatgcttcatcagccagtgtgtcatgctgcagatgttcttttggttcattagaagaaaatcttaagaagagcttcagaaagttgattttttaaaaaagaaagaaaactggctcgccgtttgtgttcataaaatggacccaaatttttattaaattcctactgaaagtatttgtggtggcccggtaaactttcgctcacacaccaccttttttttttttcttttttagagctaaaaaaattattgccaattacttgctctgttctaagaattcttataataactgttttaccctcttttctttttctttttgaacaaaaaccccaggatggtactggggaagtatgactgttaatgaagccaaagagaaattaaaagaggcaccagaaggaactttcttgattagagatagctcgcattcagactacctactaacaatatctgttaaaacatcagctggaccaactaatcttcgaatcgaataccaagacggaaaattcagattggactctatcatatgtgtcaaatccaagcttaaacaatttgacagtgtggttcatctgatcgactactatgttcagatgtgcaaggataagcggacaggtccagaagccccccggaacggcactgttcacctttatctgaccaaaccgctctacacgtcagcaccatctctgcagcatctctgtaggctcaccattaacaaatgtaccggtgccatctggggactgcctttaccaacaagactaaaagattacttggaagaatataaattccaggtataaatgtttctctttttttaaacatgtctcacatagagtatctccgaatgcagctatgtaaaagagaaccaaaacttgagtgctctggataactatatggaatgctttctaagaacagctgaagctaatctaatttaaatttaacagcttgaagaggtagctaggtgtttaaagttcctcc

SEQ ID NO: 70763 - DNA, 1296 bp, Homo sapiens
caggcctcactgcaatttgatatgcctgctgatcagagtctcttgggcattttatattttgcattctgatgtacctaggagttttgttaaacagatgatgtatgtgagtatttatcccattttatgcaattaaccaaatcaaccaaaaaaagtgaccatgaagtcctgtatttgtctttttactacatgtaggaactctcatgtgaatgagtactgtagtaatccattctatgggagccttatttcagaaatatttcaaactggtgcaaatggaaaagactttctcttttcctttaaagctaaagacaagaatatcatgctatacaggtgcaactcaatccccgttaataaaaaccaatgtaggtataggcattctaccctttgaaatagctgtgtcccaacctgttgccattgattttttggaaatggctttagaaatatccaagttgtccttgaattgtctaaccatggacataaacagttgtctcccttctactgtgtagaatactttgacttaattttcttccagatacagggggatacctgcctgtttttcaaagtgtttatttactgctgttactatttgattagaatgtattaaataaaaaaaacctgatttctacaagttgcacttattgagttctagagaacgtacactttcatggtaatagaggattgccataaaaacttacgtcaagtgaaataagccaattattcaacaaaaggtagaacattacttgccattctgtaaagttatgggctgtacctgccccctttgcaatttggaaagcatggtttagaaactacaggcattgtcaagtggccgggtcttttataatttgaataggcataacactgatgtcctctgtgtttccaaaaacatggtttagaaactacaaacattatgacatggccagtcttttacaagttgagtaggcataatactaaagaaaaatacaaagttttgtggccacttattttttgctatgttagtctgcataactgttataaatgtaccatcttttctagagtccagacattatttattttatggctttaaaattttcctgcatagctacaatcctgtggtgtgtcaccataaaggtggaccctgtgtgaatgagaaaattcagttataaattgtaataaaacctgcttactggatatcttaccttattttcatgaagaagttgaaaaatggttttgtgcctggcaggaaacatactatgtatatccaaacagcagagccaaacacaaaagattgctaggtgtgcctcaggaagagtttacttgtgg

SEQ ID NO: 70764 - DNA, 1068 bp, Homo sapiens
gatttgccctggagtatgcggctttgagtcacacagattgcacgcttccctttgaggagcggcttccactttgggcaagttggggtaactggcacagattctcttctcaggaaagcaagaggtcgcggtgcagcgggcacaaccctgaactaggaattggaaaacttggggtccactctggttctctgaccttgggccaaacattgaatctctgttatctgtaaattgaagagcctggagccttcaggatttttggtcccttccaaggaggtcccatctgcccagatgtgatagtacattggggtgagagtgctcagaggagaggcaggctccacctatcagtggagtctcagtttctacgtagattgtagtacagattttacctctatgctataatatattctcatttattttgaaaatatacttccttcttaactctgggttttgtttttttttttttttttcacagccagctgttttttatcctggttagaagaattttgtgttttcttttagctatggatctttgaacattaccctatgatcgaagagttttgagttgggtttttagatgttggttgtcatggagaaacaggaatctggtgtatgccagccatcatcatcatcatcataaccctttggatgaattttcattatcaagggatctggaaggctgtcttcgctctgcttcccagctaacaaacagatgtgttcccagaagatgatgggcatagggtgtgtttttgcaagtcatttttcccatttacgtagattattcttatttccaattgatcctcaatagataagagtgccattgagctttattttcatctgtcaggcaattaagaaaaaagtaaaggaaacaaaaaagctataatatactaaggaaattcttagattctttggtaaaattaaaagaatcttggtgcatgaatgatccggccctaatctatccatcttgcacatttgggttttcctggatctctcttaaagtggggcacatctctggtcttgatagtcaaggaggagggttggggtaatcagatgtctcaagcagaggtgcatcat

SEQ ID NO: 70765 - DNA, 1132 bp, Homo sapiens
ttctgggcaggcagtgccttgcagtctgcgaccccatcatatatttttcacagttgatgttgaatacatgactgatagatttcaaaggcatttcctgttttgaggtcaccatgtacaccatattctagttacagaaattataccaaccttgacattctgggaattttttttttaaattcccatgggttctatcatttgtcttctcataaaataatacaaaatgtgcaaataaaaaaatccatatgcttgggcttcctgattgtttttattaaagtgagtttagtgatggtgggttaaataatgctgtaatcttaagccagaaattgagaatatggatttgaaatgtccccattccctttttttgtttgtttttgttttgttttgtttgctgttgcatgttcttggcagcagtggttgatgtcagtattgttgcccatgttgtagactgcagatgttgcagtgtagcttagtactttggttcgcttgctgaaattcctcactgtgcttcttatgaggtccaggaacatatagatttgcagtctgatgtattttgatgattgccagataaaactgatgtctggcactttttccaggagaaacacatgtagacgtttccaagttgatttgtagggacttagtgttattagaactttgtggcaaaactttttctcaagtggcagaagaaataaaggaacttcagttttgagggctgttaacagcacttccattagtggcaaagctgagatggttgacaaagtactggattgttgagatggaccttccaggccgggtgtggtggctcacgcctgtaatcccagcactttgggaggccaaggtgagcggatcatgaggtcaggagttcgagaccagcctgaccaacacgatgaaactccatctctaccaaaaatacaaaaattggcctggtgtggtggtgcgcgcctataatctcagctactcaggaggcttgaacccggtaggtggaggttgtagtaagctgagatcgcgccactgcactccagactgggtgacagagcgagactcagtctcaaaaaaaaaaaagaataagcaagtactgtatttggacttttaagcattactgatacagtaaaatacagttttagctaccgacgca

SEQ ID NO: 70766 - DNA, 1402 bp, Homo sapiens
aaattgttttttgaaataaaaagggaagaacaaatcggtttctcagttcaggttgtttttaacacttcacacacatccatttttataatcccaattcagaagacaatgaattcaagttaataatgtatttaaatttaaggataatgcagagaatgtcaaaatagaaaattgcaatagaacagttgagctgaactctgaggctccttttcttattttgactcaagttgaccttcaatattatagtactttcatttttacagctctttacatattctgtaaaaaagcttttaaaaagtgaaatgaagatgtttcttaactattaaatttctattgcctaactcttttaattttttgagtccattaagactttagaagatattctttctcaaatgtgtcatttaattaacaatttgctaatggccttgataggatttttccatttttgttttccaaatcaagaaatctccatgttccttttattattttcactttgtttctttagatataattcttgtttttcctggataattagtatagaatttatttattgtagagaactctgttctgacagctgataatataaatatatgtttgacccacattactagaaagaatgttatgtaagggagtttgtcagggaatatcagctctcgaacactgggagttcagggaaagaaatgaatttgtaggtcattgatctttgtgttttaaataagaattaaccaagaattttatggttacataaccagtacatgaactagtttttactacattttgttaatacatcgaattgaataatccaattcaaaacatagggtaccaattcctcttgtcagcaatactttgaaagtagggatttattgagagttcttttattgccttgacttccttacgtttgtaaactatgtgatgggtattacacttagatttattagggtacttaaaatcttgccaaaatgaaacaatctctttttgtcataagtattgccgacttaaaagcatttgtgaggggacggggggtgattttgcttttggagtcttactcgttactgaaaataaaatatgctcagctttttctttttctagtagacatttattttactgagttccacactgatagttaactttaggaaatgcttcacatattttaactaattttatgatttaatttttaaaaaggaggtacattttagaattttttcccccttttagatacctgacttacgtgtttctgaagataaattgcagatccagtcactataaattcagttgaaagaccaatctttctacccttctttgttgttctgatttcagaattccaggccagtttgttgtcaactttaatgtaccttttgagaaataaattgagtctcacatttcttgcatgtgtttgtgcccctag

SEQ ID NO: 70767 - DNA, 1135 bp, Homo sapiens
ctgagagttcttggcctccttgggattaccatacctcatcagtgtttgcttgatttcatcacaccttttaaaacaattatccagcaaggcactttgtggtgtgttctttagagttgaaaacaagcacacatttaattgtttttgtttttgggacagggtctcgctctgtcacccaggctggagtgcaatggtgcaatcttggctcactgcaacctctgcctcccaggttcaagtgatcctcctgcctcagcctcctgagcagctgggactataggtgcccaccaccacacccagctaatttttgtatttttagtagaaatggggctttgccatgttggtcaggctggtcttgaactcctggcctcaagtgatccacatgccttggcctcccaaaatgctgaccttacaggcgtgagctaccacaaccgacccatttaattttgttcaaggaattctgtgacacttatttagcagtgggtagtacatttgggtgttgcctaatcagaactggggacctagaccagggaaatatcattctatagtttgattcagattatacctggcttctggttaggctagaatatgtgctcccaaaatcttttaaataaggacatcctttaataaaatatgtgttctttttctataacatctttttctgagccctatcttgagaccatagactatctcctacatattaataaaagatggcagattttctaggaatggttttatttgaaggagaaaaaagtagcattgaaaccagcttttgcttttctacatcctccaaccactggcatcttccatgaaacacaatttgataagggagtgatcccttttttccactcagagtacaatttccaagagatggcatgtgctgaaaacaaaacttaaaaagggaacctggttcctgagagttcacatttgacatttttcaaggtcatgccagataaaaaggatacaccccaggaagaagaacacaagatacctgctgtagccctctgcctttggaaacgttaaaattgaagtcattgcatggtgcaatactggagtaaggaatagggtgaggcaaatgaggcattcactcctgacagcaaaattcacaggggtgccaagcaaaattcacagggatgccaaa

SEQ ID NO: 70768 - DNA, 1077 bp, Homo sapiens
ccatatcactcctctcataaacctcaaaaagtaaggcagatgacatgaaggtttagagagtgctgtaacacagttgcatacaaggtacagtggtggatgaaaagttctggtgctatttggaaaggtaagaaggctgtaggggggttaaaacaaaaaaagcttgagttgagtcttgaaggatacgtaggggttctccaggtggatgaggtggagaagggcattctgggaagagaacagtatgttcagaggctctgatgtaaagtatcctgacctgcttggtaattgtgtgattcgttaggtatgtctggattttaaagcctgttgggaggttgcagtgggggtagagggaggccagcaagataaggctagtagggtgagctgtgctaaggggggaggactgagcacattcagcaaaggtagcgttctattgcatttatggctgcattcagcagagaccagacattaccttaagaagccttcaaggagtacattgttaagagagaacggcatctgtgggataaatagaaagaggctcattttactttaactacaccccagaaagatctaagcaatgatctcaggctggaaagaaccaaacctttggcagaaccgtctaaaacccaggcgctgaggatttgccgtggtgtccaccttgggtcccaattgcttctgttgttgcttttatcaggcctttttctcatggttactgagcacccagtatttgcaggcctgctttaaaataacaagatagagtatcaccactacctcagttagtctcattattgagggatttcagatacagggttctgacgcagagcaactgaaggtagcaaagcaaacaacacaatgtgctaagagagcagtttcccttttacaaaatagtaatgatatggaattattttcaccaagtaattctctttttttttttttttttttttgagatggtctcaccctgttgcccaggctggagtgcagtggcgtgatctcagctcattgcaacctccgcctcccaggttcaagcaattctcctgcctcagcctcccgagtagctaagattacaggcacgtgccaccacac

SEQ ID NO: 70769 - DNA, 1022 bp, Homo sapiens
ccgacctgcctgcaggtaggcctcagaaagatcactttgaaccagctccaaaatgttgtaactatgctctttgcttttttgtttatttgtttgtttgtttttgagacagagtcttgctctgttgcccaggctggagtgcaatggtgtgatctcggctcactgcaacctctgcttcctgggttcaagcaattcacttgcttcagcctcccgagttgctgggaatacaggcatttgccaccatgccctgctaagttttgtatttttagtagagatggggtttcatcatgttggccaggctggtctcgaactccgtacctcaggtgatccacccacctccgcctcccaaagtgctgggattacagacgtgagccaccacacctagccagaactatgccctttggatttgaagttgggatgtaaggcaggacaagggtcaatggttgatgaaagtgggtaaggatttgggactgaagggacatgacgttggaggaataggatcaggaggtggcattaggaagtgcagggaaggaagaatgaaccgtgactgggaggtgagggagggagctcagagaatgcatttagaaatgcttccaggaaacctggcatgtcacttgggaagcatgttctcatcagagagccaggtcatatctcagccgttggcatcaggagccatttggaaagtgcagatgggaaagcaggcattcggcctactgacaactgatttgtgaggtgccagagctaccagctggaaaaggtcagattcatggaggaggagacagcctctaggaaggcatgccctgcacctgtcccctgggctgtcctgtgtggccaaaggggattattttgaaggctgacttagtttgtttttaaaggttattcgtttaaagtgtcctttttagtttagctttgttcagacactggagtatttaattttgcaaagagcaatagtttggggagggtctcagtttaatttgaaggagaattggaagctggagaagagagaaacagttctggttctgtta

SEQ ID NO: 70770 - DNA, 1058 bp, Homo sapiens
ctaattttgtatttttagtagagatggggtttctccatgttggtcaggctggtcttaaactcccgacctcaggtgatccgcccacctcggcctcccaaagtgctgggattacaggcgtgagccaccatgctcggccataaccccattatttcttcagattcattcagagagttagaaagaattaaggcattttttacaaaatgatgagagttacagagaagctgaggaaaaatagctttttaaaaaagcaaacagaatgaagcagtacataatgggaaaaaaattgagcatatctgtgtagaagtttagaaaaataaggtttttctcaagatttgttaattctgtagaaggttggctctggaacaaattcgtacagtcatcttaattgttttactttttactgagtaacactgctattgaaaaaaacattctgaagtgagggtttgatttatatatgtctttgaataccttccacggtgacaatcacataaactcttttaaaaaagacttgtatttattaaatattgactattttaaataatattacaaaatataagtaagatatggagaataatggtacagcgaacacccgtctcctcatcactcagtttaagaaaaataatattacgattgcctttaaaaaccccgggcactccttcccaatcttgtctcattcccaacccccacgcagtgaaaagccctgaattgggggtttatcattcattcacttcttcactttatagtttcctatctcctaaaaatcacttttaaaatcttcatatgtttttgaaaatcctgtataccgtaagttctagaggtgtgtgtgtgtgtatatgtatatatgtatatagagagagatatatatgttttttgtgtgtgtgggaaggaaagggtggaagtaatggaagaaattatgcatttaaacttgatagttaacaccttctcttgtttcagaacttaaaatattttttacatgtttaaagtaatttaattggtggcaatattttaattctaaaattaaattgggatttactgaattggaaacctaggttttgtta

SEQ ID NO: 70771 - DNA, 1033 bp, Homo sapiens
ggaccccctccctgttccactgtgttggccctggctgtgggtctgggtgtctgccatgattctctgccttttgccccagtcttcctttaagcttgggagtgtttttgtttttctctcctccgttggtttgattcatgctttatgtattcttagccatggcgagagtgaagaacagagctctgggaacacagctcggtgcctccggcatcagcattggatgtctcaactcttgagcctgttggaatggctgtccctaagctgacacttgcttcaaccttctctgggcttgatcttgtcctccccatagactctgtgccctggactccctggctgctcttacaacagcagtgcgcaggactggctagtccatttcccctctacctgtgggctcaagggctctgcctgccccttgtggcgccagccttgagtgacaacacagaaccacacctgccgccctcctgagatacattctagctctgagttgcatacttggatgcatctaaagtcactgagctcttaatggcagatattttagatattgtgatgggtttattagagaggtttctagcttgggattcttttcataggttcctccaatcataccacgtaattgaccttgctctgcatgtaagttcagtgttggtctcagtgtatctagcttgcagtctatccatgtgcttccactgtgactgagtagtgtttgcctagtggcgtcctgtgtgctagagtgagaacagtgggtcagtatccatagcaagacccttccctcggtaaagggagagtctgcagagggcccaggtttctgtgtatacccagcccgattttcatatacttcctaaggacctactgaatgccaggtactgggtatataaagacaaatggaggatctccagatcagttgagggcattcatgcgttcatccagcaaatatttgctgagtcttgaccatgtgctaaaccagaggtccccagcctttttggcgtcagagactggttttgtggaagacaatttttcaaccaacgggagagttggg

SEQ ID NO: 70772 - DNA, 1051 bp, Homo sapiens
tctgcgatccggttcctaataggccacggaccggtatgggagttggggacccctgtgcaagacagtaggtgctggagatataacagtaaacaaaacaaagcccttattttcatggagttcaatgtattctagtagagggaggggataagggcagggacagataataagcaaatgaataaataacatttggtggtgaagagcgctatgaagagaagcggtatgtgtggtggtgggggtggtcagggaaagcctctctgatgaggggacactgagcagagaactgagtttggctgcagagttgatacagggaggagagctttcagatagaggggaccacaaatacacaggaagtcaagtgggagccacaggtgacaatgtggctaataagacaccttcctccctgggatgaatcacattccacatcagcagaggctcagtggctaccttttgttttgctctcaacatgtgagatgtgtgtgcagccgtgatcttgtgtggctcgtagcatgactttagttgatacgtggatgtgggattaagtaatattgaattacatgatgagaaagttatttcctttctatttctgtttcagttcggtaagaatgataggaggtcctcatgcttaaagccttctgtgggcaacagtatttagctagaatctagttgtattgctttttttgtgtcaacttaatgggttccttccatttatggcaagcaaaacttttctatttacgaagttccttttaaaaatacatgacttttagagactagaattgtggttattagggactgggaagggtatgagggaggcagggatggggaggttggttaatggatacaaaattacagctagatgggtggaataagttctaatgtcctagcactgtagggtgaatatggttaacaggaatttattatgtgttttcaaaatgctagaagagaggattttgaatattcccagcacaaagaaagaataaatgtttgacatgatggatatactgattgcccttatttgatcattacacattgtatgcatgtattgaaatgttac

SEQ ID NO: 70773 - DNA, 1463 bp, Homo sapiens
atccaggctttgcaactcttgatttaggactttttctgctgcgcaatcttggcttcccactgagtttgaaatggaattgtattatgctgcagtgttaataattgaaagaggctttttaaaaattgtactaatgcatttttttttttttcattttaagaggagaatttccaagggcctttagaggtatgctggaatgagatttcactaaaatattttatttttatgaatgctaattttaatcatttaaaaggaaatgatgatcgttcagtactgcattttgtcacaagatttttttcttcctacctctgcaaggctgacataaaggaaaagcggaagactttcatcgagtatttatgggactgatgaaataatgcatctgttggcagctaattgcaggtctttctaggaatagcaaacatgtgacaggtcttgccccagcggagatgcctccatttcactttaaaacatggatttggtattcttttcacttagaaattctggctatgcctttttttctcccttctgtggatgtatagaccgttcggctgcatcagacactgtattgaacatcagggttgatttaactcattgttgctcagctgtggctatgctttggaatcacctggggagcttttacaaaactactgatgcccaggctctactccaggtgaatccattacacaatctctggagggtgggttctgggcaatgggatgttaaaggcacacacgggcatgcccatgtgtaagtcaggcacacgtacaaatgcttcgtgaggtcatcttaaattgcagccggggttgagaaccttgagctctgaccagctggttaggagcgtgcctccttcctcactcactgcttccaagtcgtggcttcccaaagctgtgtacttgcttgaagcattgttcttattttcaggtagcaccagatggaagggtggtaggaatcagggtgtagagggatattagtttgcaaatccttttattccttgaatttcctgagcattgttgctcaagaatgttccagaatctcagaccccatacagggggtgatgctgctaccaacattaaaatccattagggctctatggggatatataggctacacacatgaggcaacaattggaggagtttgaattgctagtgaatttgaatttgggaattatttttattgctattcacattgtttggtacagtcattacaaactacatgcagtaccttgtgctctgtagatcaggttatgtccaaatggagacagagtctcctgctgaagaacgagttggatgctcctctcagttaaaaagtgagctgaagatggctcgaggatggaagagagaaggagagacaaatggctagttgggaagagtgggactggcttagtctgtcagactggctgtctgtctgctcatggtctttattcataattaaaaatgaatttcaggccaggtgcattggctcacgcc

SEQ ID NO: 70774 - DNA, 1051 bp, Homo sapiens
gggggaaggctagggtctaatggaagaccatacggtggggaggggtcatggaacagagcccctgaatctctcccatttcaacttgctactttgagagtaaaaaaaagactaaatctccttggctgtgatcaggagatagtgtgttggctcccctgatactggaatccagtcccacttttgcagctcttaaatcttgctatctaaagccctcagttccaataaccagcttttctggtggtgcagcttcagagtttcaccaaatgcttagcaaggtagtgttctctttttatgggtgtagttcaaacttgtaggctgctgttatagctagctgtgggaatgtttgctttacataatgttaataggcagctgtgtttatgcttgttcctcagtttaagcagtaaggagtgtatacatatgattctttgagggcatttcccccagactaaaaaaaagaaaaaaaggtatgttgtgttttttccaacagtaaattttaattgaaaaggaatgtagtttctagaagaagtttggggcaggttttactcctaggctttattttgttaatgttatgaaagaaactttaactccttctaagaagtgccaagttgacaattcctggaaatgttcatgttctatttatgctcagcaccatagcagacagggtggcaataccattaccaaaataataccgccgagatgtactaagtgacaaatgagaggcttctggttttataacctaaatacaagactttaaaagcatctcccaattctaccatttgttgataaggtctgtgggtgctgagtagtaatggtgaagttgctgtggagaattatagatcaagtagagcgtatctgcagtgacttgtcctgttgctagaactatagaaggttagagttggaagggatcttagaaacactttatagatgaggaaacgaagggatatccaagtctaacagcatgcatatgggttcttctgttcaaatagtagaacttcatgtaacataaaaataggaatttctctgaaatatattgggtagttcacaactttgaagg

SEQ ID NO: 70775 - DNA, 1021 bp, Homo sapiens
cccaaagagatggttaaacttgtgtatttttatgctaggtttgatggcatgtggatggttgtggggaaatgggattggaaaaagaatatgagctctaatgataatgaactagggtaaactttgctagggctaggtgttcctgttctctctgtgatctgcatcttccgaaataaggatgctcctttcctctggggatagggaaggcattgcacatgagagtcaccttacctgtttcaggggaaggtcagaaaatcctttctagggtttacaacctgctttaagggagaatcgggagaattgtgggagctgaggggaggtcagagtgacctgcctgcttatgctgtcttctcagattccaagtgccatatcttgggccagtgtgtcttgaatcccatcattactgttggaaattccgtttcagaagcccactctttgctaaactccagttacttctagaactggacactgctgctgaaatctggaatttcttatgtgatgccaaaaaaaggagaaaatttagaagattacgagtatgtgtgtgtttaacaaagtatatatacttttttcttcagagagtaaaacctctgaatcaacttgaagtagtcttttcaaattgttatcaaggcatgctgctatttcaactattagagagatagcaccggacttaaaagaccttctctaaatgactcttcaggaactaggaagagcatttttcactctgctgtttaaagtattttgtttgtctttctatgagtatactgtttcaaagtgtttcactagattataacctgatttttttcagtgtcttctgtttgtatgcttttaagtttctaaatcttttctcttcattgtttttccccaaattgttggactctgagtaagcttctgccagtgtcattttaaaatatatttatatccttcagatgctaaaaatagtttgtgcacttttaaatggttgaaaaagaaaagaagattacatgatgtttgaaaatcacatgaaatgcaaatttcagtgtctata

SEQ ID NO: 70776 - DNA, 2037 bp, Homo sapiens
cagagtagaagggagactcagagagaggaagacaaaaaggaagctaacatgaaaaagacattttcgtcaaatgctagttctttgaacttctgggaagaaaagagtttctaggagaccacaactttttactgctttgaagattccaaattcctgagaatatgattcagttagtgagtaacattctctatgctggcaaaggaggaaattacctggatctggacctatctttggaggatgagagaggagctgttatctctcccccactgatacaatgatgttgtaatgtcttttcagtaggcatttgcctgagctcttttttttggactataatttccccccaccccactttctctaatctctgcttctcaaaatcttatctattcttcagagcctaattcctttcttttcccagaagcttttccacattctcctcatctgggatttttttttttctttgaacctccacagatttttgtgatgatctttctccatgttttaacatagataccggtaaacttatctaacgcttccctagctccctctcaccatcgaatgccatccccttgagttaagtcagggactatgccttgttcacatctgctgcagccatcacagaacctttaaaaaagtaggttcttaaatcttaaatgagtgcatgctgtgagggaaggaaagcaaatagactttttggctcaaataaagaattgatgtgtttagaagacaggtaaagagaaaagggacgagttgttggatgatcttgatatctaggctttgaatctgggcttggcagggtaggtgcatgagccctgaatataagggagctggcctagggagagaaaaaaaaccatcacttcaactcctgtcttccagggtgttgacatcattaactgccccacatccaccagatttccccagatcttagttgacatagagacattcattctgtttctcaccttaagaaaatccatcctgagttagcttcagttggtgctgctgctaggctttatggtgataggctttgggaggaactgagaatcccaaatgctaggtggtatctgaatgtggcattacgagatataatgctctaaactctgcaatttctcttgtaagacggaaacaattcaacctgttctttgactccttttctgggttttcttggctccaggcttcttagaacactgatcacactgttccaccacccccaatctttacctccattctctctaccctcccagcccccaccaaaacacaattcttttcaggcaagtgcaccatacaggtgctctggtggtcccgtaactgaggatgtagttgccagccttttagcaatatcaagagttctctggaggctcttgagagctgtggccttggttaaattggacagaatcacctttttggtaaattcccttccgattcatttcacaaatggcttaaatcatttatgttgttttgttcaatccagtcaggaaatgaaagcattgccattttaattgttttagaacagcattttacacctaatatagactcccaaagccagccaaatgcagattttggctcctagatcgctgactgcatgctgactgtgttcttgagtgtggaagaaaacagatccagccaaagactgattaccttccaaaggtcacaaaagaagtttctctttatctaagaaagaaagtaggtgccattaggtgttgattttttttaaaaagtccttttaatttaaacaatatttgaataaaaattatggtatagtcaaccacaaatcagttgatgaagtctcaaattttggcagtctcccttggttctgtgttcttgggcaagtttactttctttttctttttcttttttttttttttttgagacagggtctggttctgttgcccaggcttgagtgcagcagcgtgatcttggctcactgcaacctctgcctcaagcattgctcaagcaaccctcccacttcaacctcccagttagctgggactacaggcgcatgccaccacacctggctaatttttgtatttttttgtagagacgagg

SEQ ID NO: 70777 - DNA, 1673 bp, Homo sapiens
tcagaagttaatatgtttttcttctcttattctggacttgtcttataaaaaatacatgtactcgtatagctgccaatgagacaagtgttgacattttggtttcttttgttatggttttattgttgttattgctaatgaatgatttttgaagcaaatatgtactttcaagcaaatatgtgcaaatatgaagttggaagatgatattttctcttaaaagcattttaccattttcacattgccatgcccttagctttcagggtgttttcttgagtcattattttcttttgttgattctttaaaatgtaccaatggtgagtgtgaattcatagtatgaaaaatgtgggtgatagactatgattagacatagttcaagataatagtttatatgaaaaattgatgctctaaagcatttgctaccaaaatttgtttttttgtgtgtgtgttacctttactcttctccctgggtccacttaatggttctgtatttttttggagagccaaatatgtcttgaaggtagtcggggagagggaggaggagcaacatgaaatgagtgtgctgttttatcagaagccacttattcacagggcctgaagtgatagctgttgggagaagtgatattcatactgatgggggtaaaactgcctactcattttggggagcttttgttttcataataaaaattgtttgtacaaataaaggatgttctaaaggagaggactatttgcaattgagtgttttctattctggcagcatccgattgaaaatcatttcagaaattcttagtattgcatgcaatcattgtttagtagctagatctttttaactttatgatagaattgtgcatttcatttctgttttaagtcctatccatgtatttaagtagtgtaataaattattttcttgccagcagggtgacttgagtgaaaaaatatgtataatttggccaatagcctaattctgtgacctctacaatccaaatggatgccgtggcttttactttggttacatttcaaatgactttaattggcctgaaattctattagtatgattgattcaggatacccattcaaagtcatctcatttgtctgtgtcatttgtcatggatcaaatctctgggcaaagcagtcattgaaccttggttaaacctcagactgtgtccgtctgtcaattttataaatgattgggaggaaggcactcttgtgagttctggatcagtagtgatataattctgtttctgttttttgcttttttaaatctactgctacataataaaccactccaaaacttggtgccttaaaataaccattttaccttggtcatgattttgtgggttaggaattaagaaagggctcagctgggcagtttgtctctgatccacatggtgtcagctgaggaatctggggataggggatccacttttgagatctcagactcagatgtctggtgccttgactggggtgcgtggctctgggcagggggcttagctggggcccagcatgtggtctctccatgtggcttaggtttctttcagcatgggagctgggtttcccaaaatgtgaggatggaagcttcaaggctgaaggtttctcaggatgtagactcataagtcccagaacaccagttctcctgcttattggtcaagtaagtcactaaattcaacccagacttgggg

SEQ ID NO: 70778 - DNA, 2359 bp, Homo sapiens
agacaagacaggaggagaaggaggttgggaatggcatttgtgtcagccaaaaagaacagggtctgccgcagatagttttaggtgtgactgagggcaccactcccaagtcaaacatcaagtgcttgggagttgagacatcatccaatgtcctttttttattaaaaaaaaaattctttcactaagtggttttagctgccattgatgattgtagccttggatgagttttattaaacaattctttctttttagagaagaaaaaattgaggacccgagaagttaacgcctttgatttctattgaaattactcatagggtaagagtgagagttcttgctttgccctttccaccttcctgacttcatcagcaaagaagagaatcttggttttatttttcattatctgcaaatgatatgtccataacagtagttatttgtcacaaaaatacttcacaagaacattggtaaacacatacaaatgttagcagttctgaacaggcatttattgtagaggaacctgtttatgatgagaaatatgaaagaattgagacagtgggcctctaccatagaggagggaagaaactagttgggtgaaatttagtgttaggatgttttgtcaaaaaactatttttgggaggctgaggcaggaggatggtttgagcccaggagttccagaccagcctggacaacatggcaagattccatatctacaaaaataaataaatagaaatttaaaaaaatttttttcatctttagcattaatggcaaatatttagagctatatttaatggaagtatatgtgaattggtggtataaacagatttttccaaactctttttacttgtaatttctgtggctgtaacaacttttactagcctcttaggagtttcttaaatcctttttccccattttctttggtctatgataaagaagtaatctgaagtagaaaaaaattatttaggctgggcacagtggctcatgcctgtaatcccagcactttgagaggctgaggcggggggatcgcttgaggtcaggagttcgagattagcttggccaacatggtgaaatacaaaaatacaaaaattagccaggcgtagtggcagatgcctgtaatccaagctactcgggaggctgaggcatgagaatcgcttgaatccaggaggcggaggttgcagtgagctgagattgtgccactgcactctagcctgtgtgacagagcaagactccacctcaaaaaaaaaaaaaaggaaaaaaattacttagatgagctaatttttgaagatggtcttataaagtttattttttattaatacactttattttttagagcagttttagattcccagcaatattgggtggaaagtatgaagaattgctatatactcccttcccctgcagatgcacagctcctcccactgtctacagttcccaggagaggtgtgacatttgttatcattgatgaacttatattgacacatcgttattacccaaagtccatagtttaccttagggttcattcttgatattgtacatcctatgggttgggacaaatatataacgacatgtatccacatttatggaatcatacagagtattttcactgccctaaaaattctctgtgctcttgattgttcatccctccttccacacaacccctagaaaccactgattgttttactatcgccatagttttgcgtttctagactactatatcgttggaatcatgtagtgtgtggcctttgcagattggcttcttttacttggcaatatgcattgaagttccccccatgttttttcatgacttaatagctcgtttccttttagtgctgaataatatcccattgtctggatatcaccgtttatttatccattcacctactgaaggatatcttgaatgctccaagttttggcaattatgaataaagctgcttataaacatctatgtgcaggttcctgtgtggacatgcattttcagttcatttaggtaaatatcaagaagcatgactgctggatcatattttaagaatatgtttagttttgtgaagaattaccaaactgtcttccaaagtggctataccattttgtgttcctaccagcaataaatgagagttcctgttgcatcacactataccagcatttggtgttgtcagagttttggattgtgaccgtctaatgggtgtatagtggtatctcattgtgttttaatttgtgtttccttaatgatatatgatgttgaacatcttttcacatacttacttgccatctgtatatcttctttggtgagatatctgtacaggtctttggccattttttaaatcaagttgttcattttcttgttgaattttaagagttctttgtctatttt

SEQ ID NO: 70779 - DNA, 1135 bp, Homo sapiens
tttatcttttactttttgtagtttgaaacgatagcctaggtatagtttttgttggcatttatgctgcttggtattctctaagcttcctggatctgtggtttggtgtctggcattaatttgggggcaattctcagcctatattgtttcgtatattttttctgtttctttctttttctccatctagtatttccactatacctatgttaaaccttgtatacttgtcccacagttcttggatattctgtttttcagtctttcttctctttgcttatcagttttggaggtttctattgatacattcttaagctcagatattctctccttagctatgtccagtctactaataagcctaccaaagacgttcttcatttctgttacagtgtttttgatccttaacatttttttttcttaagatttctatttctttggttacattgcctatgtgtccttgcatgctgactatctattagagcccttaacaaattaaccatagttgttttaaattccctatctgataattccaacatccttgtcatgtctgtttctgatgcttggtctgtctcttcaaactgtgttgttttgccttttagtatgccttgtaattttttcttgatagctgggcatgaatatggggtaaagggatcactcttaagtaggcctttagtaatgtagtgatagaagtgtgggaggagaggaagtgaaaccatctttgcaaaaattatgaccatgagaaaaattttggcataggaaagttatggcagtgaaagaaatctaacctaactgactccatgttgcttctcacctccaagctgttcctattcattcctgggcataggccaaacaaaatataggaggaatttactttatagtttaattttgaagcaaagatgataacagccccttcctgagacaaaccccctctttgcttagggattagaccatctttgtaaaactgaaacgttagccacaagattagaaattctggctcaggagtcatgtagccagaggccacaagattcctaaacttcccaattgctcctatagataacatcactattgtaaaacctaagattggtgtttgaggtatttttctgaccctgcattctgatgaaccaaccagctggtgccacccaga

SEQ ID NO: 70780 - DNA, 1057 bp, Homo sapiens
aaactagctgggtgtgtggtgcatgcctgtagtcccagctacttgggaggctgaggcgagaggatcccttgaacctaggaggtcaaggctgcagagagccctgatcgtgccactgcactccagcctgggtgacagagccagaccctgtctcaaaaaaaaaaaaaaaaaatttctgctccagtatgttgtgattctctgtatctgcctgtctgttgcttcaatttcagaggcatcagtttaccttgtgatctcacttttcttacagaactaagaagacttgttgatttttcagtttgttcagcctttttacttgttaggatggagtggcgacttttcagctccttaaatacagagctggaaaccagaagcctcttgacttttcattttttgcctttgaaaaaagtcaggtagttaatacttctctttcagggtgctgtttgaaaattctgttatgcaaaaacataatgtagataatttgtattcccaataaatgataaggcacattggatataattgttactgttttgtattttttagcatagttttagatgttttattttgctacaaaggaattttgagcagaagattgtgacatatatctgtaaagaacagacttattattattattattatcattattattattattttgagatggagtctcgctctgttgcccaggctggagtgcagtggcgcgatctcggctcactgcaagctccgcctcccgggttcacgccattctcctgcctcagcctcgcaagtagctgggacttcaggcacccgccaccacgcttggctaattttttgtatttttagtagaggcggggtttcatcgtgttagccaggatggtctcgatctcctgacctcgtgattcgcctgccttggcctcccaaagtgctgggattacaggcgtgagccaccacgcccggcccagacttattattttttatgttcatccccctgttaattatctttcactcacaatattccctttgcttttcctttttaccagtggtccagtatgggtatcagtggaacaatatatgtcttaagaat

SEQ ID NO: 70781 - DNA, 1047 bp, Homo sapiens
tccagcaaaacagaaaaaggataatatatcattaccaaatgggatttatcctggaaatacaagggtttagcatttgaaaatcaatgtaatttattgcatttattgaaataaaagagaaaataagagcatagctacaacaggaagtctagaagcaggcttgagtatacatggaaacctagtacaggttcacagtcctttatctgaaatgtttggggccagttatatttcaaaatttagggtttttagcagtatctcataatcaaattcatgtaaatttccacagcagaacagattaatacggacactaaatgggatgataaagaccagaaatagcctcacattagctcaggtcaagttttgccaccaaatgaatttaagcaccaaaccgcaaaaaacaaaagactctgttttcagagctttatgatttcagaatttcaggttaggaattatcaactctttaatgccagggtggcacatcaagtcagtgatgagatttgtaaaaggcattgggattacatactagtcatttagaggaagaaaaggataaagttaaattcctacttaatagcaatattgtttatgtttaaagattttatgttaaaaaactaaagaatctataaaagcacaaaatatatacttaatctttatttataatcttgtggtagcagagatctttgtaagcatgataccaatagcagaaactaaataaattttaaaaagagatcttacagccagccacggtggctcatgcctgtaattgcagcactttgggaggccaaggcgggcagatcacctgaggttggagtttgagaccagcctgaccaacatggagaaaccccatctctactaaaaatacagaattaccctggcgtggtggtgcatgtctgaaatcccagctactcgggaggctgaggcaggagaattgcttgaacctgggaggcagagattgcagtgagccgagattgcgccagtgcacttcagcctgggcaacaagagagagactccgtctcaaaaaaaaaaaaaaaaaatcttagattactaagcaaa

SEQ ID NO: 70782 - DNA, 3147 bp, Homo sapiens
tccatccatccatccgtccatccatcttctaggtcctaggtatagtagtaaaatagtcaaagtcccttccctcaaggagcttacattttagagattcaaagcattttcaaatgtattatttcatttgctttttaaaacaagtatgtgaattttgaattttttagtattttcatttgctagatgaggaaacaaaaatattttgagattaaatgacttacttgggataataatgctatgaataaaacccattattttttatttagaactcttttatctataccacttttgtattctaaacaagtttttcattaatgaaacatgttttcacactgtgtttttctcaatacttcaatcataggtagccaagggaattttaaagaacattaagtgcactcaactgagctgctttaacctttcaatatgttcccgctgctcttagaatgagatttgaaatccagaacaccactgcatcatcaggccagtgcttccttcccagctctgtctccggaccccgtccctcgtattgcctgtcttctgcaaatgctagccttctttcctgacctcagaggtattgtgttctttccagcttcagccctttgtatgcactgttccctcagcttggaatcctcttctctgtttccctccttgtccgtcttccccctatcttcaccaagctaatcccactcaactcacagatctcagctttcatgccacttcctaggggaggccttcctcatccccctgccaaggttaggtccctgtaccatatgtgctttctcatagcaccctgtgattttccttaatgactcacctatcacaatccaggattttgttgactgtctgcctccccttcctgtaaaggttagagggtaagctccatgggggcagaacactagttatgtcattttcaccgctgtttccctggctagcactgggcctcctgtaggccctccaaaatatgcaaataaatgaatgaacaaacaccctggcagcatggaaacccagagcggcacaagcgagttcaaatgcttatggtttgttccatctcacttccctctaggatgtgattttagcagtgtaggcagcttacgaaatggggcaggtttcttgtgttttactaatgtgtaaataaagatagagtaactcttaagatatggaaagtttgtaaagtggcagcaaaaagtgacaaggtgtggggatccaaatacagagcctagggaaaatagaataaaccaagttgtttttatgtctcttttccattagactgtgagcaagctgaagtcgagtcccagaacttatttatgtttatatcctcaaagagactatagtgcctggttcatcgtagctgtggaataaatgttgaatgaatgaatgatacacctcttacctttgaagctgacttcttgtgttcttcatgctgacattagaaataggaaaagtcagtcgagtacagtagttcaagcctgtaatcccagcactttgggagaccaaggcgagaagatcgcttgaagccaagagtttgagcccagcctgggtgacaaagtgagaccccatctctacaaaaagaaagaaaagaaagaaattggaaccgtattatttgtagaaaaaatactagatctagaaccagagacacctaggttaaaactgatttaaaatgagaataattattcctaccaagtggagttgttgggagggtggtatacatatagatggtgtatataaagtgcatagcaagctggttgtggtggctcaggcctgtatttccatctagtaggaggccgaggtgggatgatcccttgaaccctggaggcggaggttgcagtgagctgagatcacgccactgcactccagcctgggcaatagagggagactctgtctcaaaaagaagtgcatagcaagcaccaggcacatctaacagctcctcagaacatttaagctcccctttttttgcttctttccctttggtataattttagaaagacttttggggagcatgacatataaatcattaaaaaagagagagcctcaaagcagaatcatggcaattgagctagatttgtatttatcaaagcaagcatgatgctgggatgcttaaataacagtacagtacattgcaaaggaactagggaataatgttcctattatttttgtccatggtcagcctattactagaaaagagtgaccacattgatttctaaagtccttatattcaaaactttctgtgctgaccaccatcatttatgtttttcccatctctacttaaaaacgtcaactagccccaacttttcctctagttatttcttttattagatttattctgttctccacaataaaatctatcttctgttcccatccatgacaattcaagtagttataatgggtggatatagggtatgataaatgttggtaaatccactgagttccttgagttccacattgatgtcttttaggatgtgactaggggtaggctaaatattttctagtttctcagatcctacccctggtctaattatgatatagaggccagattagtgtcaccagtttttctttctcttctgaatgtagagcaagagcaaatgattgcagataacagcatgagaaacttaggatcaaccaccagcatctaagtgagtcttgtactaggctcattccagttaaaagctgtaaatcatttcatagccacatcagtttagttctcttttatagaactcattatgtgatacaaaatatgcaaggcactggagatacaaatacaattatttcctcaaggaactttgagttgagcaaacatggtactgtctggtgagaccagacatatgagcaaacatagtacttctctggtgagaccacatagagaaatgtacaaggggtagaggaggcagtgatgactactggtctgggatagttgagggaaggtggcataggctgcctattgaagaataaattagagtttgctatgtgaacaaggttgcagagggaatagtatatggaaaaacagggagatgtggacccatatattttgtgcagagatgtccaagtacttagatattactatattgcaagtatgaagaaagctttttttgagatctgacaatgccaaggtaggttatggactctctttggagtccccaaaataaaaataaaaca

SEQ ID NO: 70783 - DNA, 1022 bp, Homo sapiens
ctgtggggatgaggacctgaaggaggcccatgagacctcaggcatgggccctggaactctgcctttttgaagcctgttgacaatctcaccctaatttaaccctttgtggaattcttccatgagatgcagttgccatcatcaggcttcctagagaattgagcctgcccactctgttatgaagtctacccagaagagctggcagagtaggccccttcactgggactgcagcaacactgaccaaagcaaatccttctcttggaagaaacaaactcattcctcacacctgcctcaccccgctcccaccgccaccccctgcaccacacgccagcccttaataaaaactaaaactgatgtcattgtaacctttggttattcttttttgtgcgtaaagtgtcaacctcctgttttattctcataaataatggaaatcttaacttcatttcagaaaatcacaaaagataacagggaccctattcaaacagaataaaaataattagtaagtcacaaactctgactagaaagaaaaagagaagagagagagggaaggagaaagaaagaaggaaagagagggagagagagaaacgaggaaaggaaggaaggaagaaagtgaaagaagaaagtcctcttgttggtgttaaaatgtgtctttaaggggaaacttatcatttaggttactaatggtttctttcttcatcattttaatttccattaataaaatgtgactttgaaaggatgcagggagtttgggaatagagagttttatttttatttgtttattttttttccccttctcccagcaaaatacacaggtatctgactatgtagagacacgaagccacctatcctgaccaaacttggcagtggtcaggggataggaggaagtgtagtgccatgggatgggcaccagccctgatgaactcgactttctttccatttctctcctgcatccaaatgttgaggagactttgagtagtagtgtagcctcttttccttttaaaaatctgcaccctgcttatttccaa

SEQ ID NO: 70784 - DNA, 1086 bp, Homo sapiens
tgtgtcattagaacagaaatatttagggctgctaactcccggagttgtgtacttacccttattacagatgcaatgattttgtctgactgcattgctttaagatgagttttattgctttcatgcttaggcaaggatatttaattttatttgtgtttagagtatcttgttgtaatatacttctcccccatcttgtgctcctaaatttgggataagcatagaatccttttaagaatgtaggttattttccagtttactagaaagcatgacacatataaattagcgactaaggattatagcgtcctttcctaaaggttatcatgaaaaaaagttaaaatgtcaaagaagatcctactccagtaaaaacaatttactctgtaaaatcctgatacctcataggaagctttggatcttgttctcagctaccaaaattctttaaatatgaaagttaacatgacaggaaagtggaatacactctgtgctgaagacccactgttcaaggtgtgtggttattaatctgggtttgaatttacaaattatatggtctgattaatttgtagataggggtcggtggaggttagacgatgggctttagaacaaagaggctgataaaatactactcacaagcctttctgcttgtttgtgactctctggaaatgccattagatagttctcatagctatggtcaaaataagtaggcttagaaataaaagacattttctcccctgtaaaaggaggcggctggcctgtgctctttctaggctcttcccagagacagcaacctcggcttctgaacccttagtgctcattctatgctccaccgcgtctcctctacacgccatgatctttgttatctgatttgctagccattgttatggaaagttctcgactgtaatgcaaaaagctcagccttgggtccttgctaatgtcagcaacccaaaggcgcccctcaaaccacctcgaaaagaaaaatcctttaaaagatgtcaaactctcctttcatgttagcccaaaatgaagttcccgagcagcatctggcagagcagggtaattcaatctattttaatgcaaagattttccaagaaggca

SEQ ID NO: 70785 - DNA, 2672 bp, Homo sapiens
ggctgcctctgcgggccccggctgcccagcccagcgcggggaggcggcgccgactgccggggggcgcctgcaagacctgtttatttgcatttgtccaatttggctcaagtgaaaggtaaatacggagcgatcagcttgtcctcactccagcaaaaccagggaaactcagctccatctccaggaaacaaacccaacccaaacctgagtgaaacgtaaatcttgcataaacaaacacgttcttttgcttctgggaaggaacaccggagaaatgggcattccttccgactgcccgcctcccactgtcggtaaaaatgagccgtcacaggttgccggcaatttcttgttgtgtcccgagccattccgcggatcttgttttgaaggggcgagtcaggtgtttgtgcggctccagatcctgaacaggttatgcgctgggtccttccttatcaggaggggggtcaggctgccctcccattctcatcttccgccccagaccagaggctacaccaaagttcacttttgaaaagaaatcctgcagaattaaaaataaatgtctgccctttaaaatagtttcgttttagtattatgcatatttctgtttaggaacttgtaatgctaataatttatgttgctatgacaattgtcctgcatacctaatattaaatttaatgaattaatgtggcgtatagagtaatagtaacttaactagtactccgataatgccagtattccctgtgttactaagttaatggaatcagaattttggagttacaatatagaggttttttaggccaatttttctatgggattctagggatctttttataacatttctgcttttcgaagcagtctataccattgctggagagccgtaattactaggatgctatttctttttgtttgtttgtttgagacagggtcttgctctgtcatccaggccggagtgcagtgggtccaactcagttcactgcaaccaccacctcctaggcttaagcgatcctcccacttcagcctccccagcacctgggaccacaggccctcgtcaccgtctggttaagttttgtattttttagtaaagatttggtttcgccatgttgcccaggctggtctcgaatagaacattattccttatagtaagctgaattccctgtgtaattattcttactgtcccttcaataataaaagcctaaaattattcttactcatatattttagtgagggtggtgcatgcttgaagaccgtgatgagtgttctcttcttatattcagggcaactatgatcacatattgggctccagatccttgctttatgcatcttcttttgaattgtttagaaacaatggcaaaatttccaatttcaaggtagtgcttgaaattatgcaataaaatgttatgttagcaacatttttttttattttaaaaattcctttgattatttcacacttatatcctgttctctgttatggtagttttgttttctattttatttttagtttctatgtaatttattgtgctttagctgaaatcactaaataaagataaatgagtttaacagactcttatgtgctcatttttggttcttttttgctttaccccttgtattcgttttctattacgggcataacagattaccacaaatgtagtggcttaccatatccatttattttctcatcatttctgtgggtcagaagcttggcacaggatggctctcctggcttctgtgcccagggccttcacaaggctgaagtaaagggagcagcaggcctggacttgtacctgtaggccttccaggggagaatccacttccaggctcactggcagaatttagttccatgtggtagttgtactgggggcccagttgcctttcttggagagcactaactgctggctgttaccaagggtcttctagaggttgcccatctacatcttcaaaggcagccacagtgtgcagaatttgctttagatttccctgccttcccctaatgtgtttctcttctacttttaaagggcatgtgattacagtggcccaactggataatccaggctaatctcgctagtcaacttattagtaaccttaatcacacttgcagtgtcccttcatagcagtacctagttaagtgcatgattgaataactgggtaatgggacttctcgggagagatctttgacattctgcttaccatacccctctgggtaccactttgttgtgatggtaacctcataagcagccatttaaaagagattttaagcatcttaattttgaaaattttgcaaggtaaaattaaaataaatccaagtaacatcaaatattacttatacataattctagaggtttaataaaaacaataaacattcaccataagtagttgttgcttttaaaacccaaagtttttctaccttgcaaaatcttccttgattttcttgttttgttttggtatcacaatagatcagtttctagtaccaccactatataaaataaaaataataattgcattttaaaaagaatggttttcctctgcactctgattttaaccatggaaagtttttggtatattcaaatataattctattagattccaattttgaataagaaactgggttccctgacctagctgccacttactcatatctaaaatgtacttgaatttgcagcttccaagttgggcacatgtaaacc

SEQ ID NO: 70786 - DNA, 1104 bp, Homo sapiens
attaagtatacaattacttatttgcctatttatcccttctccaccttattacaaaaagatattgaggaaacttacacacatacacacactattaccaccaccacctaaaatgaatagatgaaattaaggtaaagggaaaataaggctaggagaaaaataaccatgctaggatgaatagggttagggcaaagaacatgtaatataaaattctatatggggctagagctaggctgtaaatttggctctggattttctagcagccaaaacaaaaagagagaaaattaatgagctacaggattcaccatattcataaaatgattaaagaagattgggattttcccttgaacccatcttgtttgaagtgggggcatttgatgctttctttctgctagaaaggttaactctgagttgcaataaaaatcataaaaacacaactttggcagaaacataaatgaacagtatgacagaatggaagcagttcacaggatttctaatattacctctcttttcctcggtccacattctaatattccaatatgctcctcagcacacagagtggtccaagaagattggccattctttccggaagttggacttccctgaagattatgtgggaatgggacgtggaacctgataattttttttgcagaatgaaaacttttatcatgaagaatttttctttattgcatacttttatacagttaggccccaacccgggaattagtggtattccaaaagttcctttttaagttgcttgtttgaaattaagaatgtatttccctccaaaaatgatgttggctacaatctaatttcagacttgcgatgaacccaaggttcaaagaggttaaatctgaataaatacagttctacaattctgtattcaaagccattgagaccagattttgctgaatttggatttttttttttttttgaagaaggaaagaaggataatattgtgcatgtaccagtcatatagcagtgtggtctggagcaggatcctataatcaagcacattaatatttctgcagtgaaactgatgaatattcacacgcagtggataaataaaaactataaatagcctcatgtcagttcaggtcaggtttg

SEQ ID NO: 70787 - DNA, 1490 bp, Homo sapiens
cctgccagaaagtcatattgttggagcttcatgagcaaaggggagaggatccaggattgagccagaccttgctgagccttataagtcctggacaggagaatggattttattcaaacaagaagcccctgaaggtttttaggacagggacatagtttgcacagaagagtccactttgcctctctagtggatgtcatgctatattaaaaactggcagagtgctgggcttcttcagtgatactccagcctttcccttgtttttaactcacttataaataattttaagtcacttttcctctttattttttaggttttctcttcaaatccaattaactatcatcattaattaaagaatatgtgagcagtcatgtctgtagtattgagcaattctcctgttatctgttttttgctttctattatgggttttatctatttatctcccaacacgcccatcatttgctgccagcactggcatgctttctcttttaagcttttctcttttcctccctgtttcagatttgtgatagactctttttgtgtttgtccatttatttcaagtccgttaggggcattttctcttgtctgtgctgatttgctttatagaacttggttcagtacaacaaacctaaaacagctccttgtacatagtaggtactcaggacatgtttgttacatgaatgaataaacctttaggggcaagatctcctgggcttttgtgaagaacatgcagactaatacattatgttcctgcccttaagcagactactgttttagcagggctacttcagaacctaaagccaatgtttgcaatagaagcctaataaaggaagaatgtagaagtgtgcaatgtagaaaggaacttcgggcatataaatctgactccagaacctcagatccagcctctattctggctttttagtaggcgagttcttcaagggagagggaagtgtggttatcatggacaactgaatcggggctttattcacactaggagaaatgacccggaacttggtaataagatgaaagaatgatctttcagagtcgtagtagagcgttgtctaacaagacctaaggctcatctgattctgtagaggatgtgacttcattttagatgttaacttagagaaaactgatatgatgcaaataatttctggcaggtagaaaagataactctaaaggttttgttttattgtcctatagaatattcacatactacataaaaaaataacaaaaaatacatacaaaaaattctaaattacatacaaaaaaacctacattttgtatgtaatttagaatcttattccagtatttttttttctaaaaccgactatatgtatcaatttcttagccaatttactgttttcattaatgaggtatatgtgtctttgccatgctcactatatatttgcatgtggattatacttttaacattttgaaaattatattttgacattcatattcagtaaagtctttagacatgaatgtacatgtca

SEQ ID NO: 70788 - DNA, 2506 bp, Homo sapiens
tgctctggaaaattgggctcatcagacatgtggcttctggagaaatgaggttttaataacttgtcgtttttctgttccaaattttgagagtagcagtatatcactgcttaaaatgtgctaatttttgagataacttttcttagcctggttctcattagagcttaagaaggagacaatagcaataggacattgtttgctcagcctctccatttctgtaggaaaagaattgttaggaggaggaagggtagggaaaaaaaagtgcaggggagtgtcatcatctggtagatagtttaaaaaaattcctctggctttggagtaggaaaattgattgtagaggatccaggaggaatcagagaggctgttgaagaggctatggtagctgtccatgtgagggacaatggcttggacaagggtggcagtggtgcagatagaaaagggtggttggactcagcatacattggaagaagagggcacaggaccctgtgtcagatattttggtatattcctcctatcattagagtttagtcatgtgtattcacaccccacatttgtttcttctaagaaatgaagtctatccgttaaggaaatgtcagttaatcctcattgctgctgttatcatggttggatttgctccaaaaggtatgttaccatatatagaattaaaaccagtctctaccctgtggggaagtaatgcagatgttttgagattagagtttagaatctattccaaagatctgccagaacacatgtttaacaatgagcatgagagttttccccattgctattcttactatgttgtttatcaaacaaagataatttgggggcttgtgtagaaactccacaatatttaagaaaataaacacaaatctctgagtcaataactaaatgtttctgatggtatactaagaaatataacttattttattaatggttattaatataaccatgacttttaaattaatattaatattaactgatattaatattaatgtaaccatgacttatattaatggttattaatataattatgacttttaattcttttaattaaaatatttgtggttctttatagttcaccacagctttgaataaaacaaaattgttttcatgttttaaatgcagtggaaggttttatgtttggtgttattcaattggtaaggcaaattgctttgttattagcttgatttacgtgaaaatttagatttaattttagatttggtagattttaatctgataccattttatattggtttatatctgaatgcttcattaagatcctgggtatacacagtttaacctcaagcatatagtcttattatattattttattataagaaacagaagtatggaaacttgaggctgggactgttcagagctaaatcttatgaaatgaaataagttcttgtaatcattttgcagccattatttgttgtgcttttgtggtattttgtctcttttgagctatcctcacaggtttccaggaattcaaggcctaagaaacattctactaagaacttgaaataccaaggcatttaatttttggaagtgtagaatgttttattacttttgaagttttgaggaccagcaaaatagagaagtgtattgtgttacacaatttgctatgttataaatgtttacttttagtggacatgatgtaactagaatggaaaaaaacacagaaatagtaattgttgatataatcttgccttggaggtagcgatgggtgggggaatggggagtgggaacatagcatgagaggagaaaaaaatctgttaccaatttatggtaaaattattacagttaaaaagagttgcatatatgaataataataaaaccttcacccagctttcttgaaagtttacaaacttcctttctttgcttagaactagctcgagaaaggaaaaaaaaaatcttctcttagattctttgcataaaaaactaattcctttatttttctcaccggttctcttcatctttcattttggtccccagagaatactgtttgactattttgaaatcatttctcttctccactttgttgcactttgccctctgggatcgtttccccagctcactcttcttcctttgtcctactgctccctttacccccacctctctttctatagccaagaaagaaacttgttaaccatgactttttcttttaggaaccaattcaaaaatccctttggtacacaggtttacaggcaccctatctcagtctgattccagaaaaaaaagcaccaggaaatacaggaaaatatgtagctattaataaattccacagataggcagaagttgccaaaggaaaatgggagaacaacaaggactgttcattggacttccaggaatagaaattgttgggagtctactcttttcaaaataaactgacatggggctgaccaccttgtcagttactcccatctgatggtggggtgtggcaaacaagggcaaaggtattgtttggttttcaaggtcaggctgctaattgtataattggattaaccca

SEQ ID NO: 70789 - DNA, 1009 bp, Homo sapiens
tctgtgagcagtgaattggaagtgacaagactaggggcagggagacctgtttggaggctatcgcactaaccctggtgagaggtggccatggcagagttgctggagggaagggggagaattctagaaatgtttagggatacaagagaacagggcttgatgtgggagatgagagagaaggaggactttagggtaacttcaacatttcttgtttgtgcagctggttggttggtggcgctttttggttgacaaagggtatacagaggatgatttcttagtcctcttattgatagattttaatacaataaagtcatctcgaagtttcagatacatttcttcatgctctttctaggtttttctttcttttacatgtttcatgggtgggggagggtttaagagtctcaattgctctggaaattgaccttcctgctagggaagagatggtggtatccttatgacagttttcttccaaattgtggaacgctttgtggtatttagtaatcatatttttggttttttttttttgtctacagggagtggaattactttcatagaaatatataaaaattcattttttctctcctaatttttttttgtgatacatttttctgtaaggaggaattataggacttaactttctatgagtgtggtaaagaggataaatacctctgtatcctctttatataaatgaaaggcatctatccagttttgaattatttggggaaaaaaatcccatggaggaatgaactcgagataattaaatttctccaattcagaaactctgaattttttttttttcttattaggaaagtggttgagatatggctgaatggaaatttaaaatcttgagcatggttatacatcagaaacgtaacatgtagtctaggtccattccagagagcaaaaaagactcaatatttttgacattattaatgaatagattgatgcatttgttatgcctgcagagaaacattattttatcacgagttgcctgcagctcagagagtaaagg

SEQ ID NO: 70790 - DNA, 1010 bp, Homo sapiens
aaagcacaactccagtcacacctgtggatggtaacaagatgctagactgagcacgataggctatttctcatttttttttcctagtaaaatttatttgttctttgttctcatgtcttctgttagcattctttggaaaggcattagttagtgccacaggttttagaaaaaaactaagggaaaaatactaaagctgagaatgttttattaagtttttttttttctgtgaattagtaaaagactgtcatgtatgattttagcagaataccttgatccagattgaggaactccaaccagtaatcctgggaggcataatttaagaaccgctaacagaagcattttgaaagtgattgaaattgacattccttaaaaaggtagtttattgccttctgaggaacatttgtttagctctttaaattattcatatttgaagggaaagcattctacaagaaatcttatttttgagatatagctggtaaatatggaaaactcaaaacgcctgcctgttctacttgtcatcgttcatcctctgacagcttacaccagtcaagttactaagtctctggttatttttgagactctttctccccaagcgttccttagtgaatcttaagattctgggatttagcttagcagacaggctgtgccaccatgcagtgtcttctttggccctccctgccccattgcaatgtcttttactacaccttatttagccaaaaatgtgcagtcctttagtgatgagaatgtaataatggaatacttaaagtaattaaagatactgctttttctgattgaaacaaaagctaatagacttccaattgtcacctgtcacagtgtacttttttggagttgccctttgagctgtgttatctgatttgaacttttcaagcttcctctggccacactgggatttttctctggctatgccctgcagtccctttactgaattggcagtgctcctaatgcttttctctagctttcatttgaccttcagtagaggttaaaattaactt

SEQ ID NO: 70791 - DNA, 1006 bp, Homo sapiens
tatcattttaaactctctcccagagttataataggttccactcttgtgaacctggagaataactcactgtattttccatttgaattttttaattactattgacagtgaactagttttcatctggccatttgtagttcttttgtgaatagccttttcatggcttttgctcagtgtttttatattttcctattacttaataattgctctttctataccacatataaccccttgtcacgtgtatttacaaaatatgtctgtgtgataaatgaattaaccagtatacgtttgttactggagtggaactttacagaagagcacaaaaagaaaaccttgttaagcctgttggaaatgtgattattccctgaatgtttatgtcctttgcacatttaggaatatcatagcaataatgaacttagtagtagggacaatcagcaactaaatgaagtagaagacagataatataattgcatgggaagaacatagaaattagatccagaaaactgggttctagacatgacctcactgctctttacctccatgatcttgattaaaccatatattctctctgagtcttaatatcttcatctgtatagtgggtgcacttatacttatttatcttccaggtctaagatgagatcatatatgaaaagcaatagtgcaaacagtgaaagttataccatagaaattataatgccaacaaatatagtgtaagtgtggcaagttgaatgtatgctttatttaaattatcgtcttttgaggtaacctaatttataaaatattcagcctaatggccatcattctgagtctgtggtttgtgagtttgtactaatttgcatgactccttttaaaaagaaatggtttgttgtttgaaaaaatcaagttgacatcctttgtgactgttcagagtgtgtttgtggtttattggcttctagggcattaggtttctgtctcccatattgacagtctttatgagctcgttagccactgttctggtaaaagccatttt

SEQ ID NO: 70792 - DNA, 1789 bp, Homo sapiens
agaaagaaactgacaaaaacccaaaatgatgatcaatgctcctgtgagcatttggtgctcacatttaccattcatcgataattttgtcaagtttttaccagtaaatgattaataaaataaccttccagatacagctcaaacatcaataagcaatattttatcacatgccagcaagttttagatccaatgtgcccagcaatttttggttaggtacagacccttagaatttgtaggggcaggggtaagatgcatgaaataacagtaaactaagtaccagtatgaagaggaagacacacacccgtgtagaggatgtgcaaacacgtatataggtttgcattaggaggcctggttttcagaaaggtttctgtgagatgtactatttagagctgagttttggagggctgatggacatgcttaggagttggcatctcaagtatagttactaaatagtggtgaaagagcacgggttactctatagtctggtgtagaggatttttggagaagggggatcgaatggaagttttatagttagtaagtggcagagcttggcttagtaccccaggcttgtctgacacctgtccttctcccatagcaccatagtgctttgctgagaatgtgggtaggagtcagaatcctatgatgctttccgtttggaggttagagtcagggttgccaggggtcgattatgaaacaggtgatgttcattttcagcatcattagctcctctttggtgtgtctcttctctccttggcattcattttctcacacccttcccagctgattcacagtagggtttcagaggactctaggacgtatttgtattattttaaaatatacattttaaattctaaagtatccttatagtaacaattcaagttgtacaaaaaggagataaaatgcaaagtgattttctctttctctaaaacctttaatcctcatctttaaaaaagtatcttttcagaaattttatatggacattcaagcacacacaatatatcctcttttatctgagagaacccatttaatatatgcattttctgtaatttgatatctttaattaatatatggaacagtctttcatacaattatatagttctactttattttattttaatcaacagaatagtggtccactgtactgcttttctgtgattcttatcgaacagtatttaaatttattttcttaatgtctgcatttattatgcactgtgttgcagagaacatccttatagcgatctgcaaacttgtaaaggggttatttgtaggggacttgcaatggaatttctaggttgaagagtgtgtgtatttaaaatttttttgaagactgtgtgtatttaaaattttgatagatattggggaattgtcctccagaaaggcagtaccattttcattgtatccgcagggtatgtgaatgcctgtttcctaaggctttttctttttaaagaggacttgaagccagagaagaggagacaaagagcagagtgggtactaaaagtaagtggcggccaagagaaacagaaacacaggttcacacaaaaacttgtgcatagcagcattatttatagcagccaaacagtggaaacagcccactgttcatccagtactgaatggataaacaaaatggggcatatacatacaatggagtattattcagtaataaagactacagtgtggataacctttgaaagcatgctgctaagtgaagtaagccagtcataagataccatgcatacttatgtgaaatatccatgtaggcaaatccatagagacagaaagaagatagtggttg

SEQ ID NO: 70793 - DNA, 3420 bp, Homo sapiens
ggtgggggaaggtgttctgccaggctatgctgagccaggtattcaggtggctgatgacaatcagctctaggggtggatggtggagttttttcccctaacagaatagagacaagaggcagttgatgccatgccctaggcagggtcagaactgaggttagtacactgaatttcttactcgttgttcttgttcagtccttcgaatacacagaagatactgttctcctggaaggcagtaatagtttcctttgctgacctagaaatgcctgctgtgctccagcatttggaaaaggaaggtcagagagaggaagctgagctcagctgctgagtcaaggaaaagagaaggaagacctaggggtcaccaacgaagatgaggccctcatttgtgaataagtgtagtcagttttaaatttagcaattaagctctttctatatagtggaagtgactgttcttttggaatgtgtttgctagtaaatatcataagaatgtttaaaaggaagttatgattttaagtgacctctgagttgtgctgatggataaaatttagctcaacggaatgagggttaatctcacggtatactcggaaagttaaagggaaatcaacacactttttcaccaaagcccgtttttcctggtgcttgcggctgtttgaacttgctctttgcttctcattccccatcatcgtggctccgtggcatacattaaatcaaaccatgacctccatacattaaatcaaaccatgacctccgaatcttcttagttattttcaggtacaaggttttcagcttcagaaaggacagaggtctccatggttccattttgaagatttttgggtggctactgcttgtttaccagcagtttggtatagaagcccaagacagtccatgtgtggttcagtattgacctaatagcagaataaatttggaccaaacagaagtccttttctttgtcactgtgtttgattaactatcctggatatgctttattctctaaaaacttcatttttgaaaataccatggttattaaacaactagtctttgtgcgtgattaggacataaacaggaatctcacccacttttaaacctttccaagaaataacttttccactgattttattttgaattgttaaaaaacttttagcagggagagaaaatttggttgatgattcagagcgcgagggaaaggaagcaagggattctggcacatgcgcacgagttgaatgacaactggtggatatttttatatttattgctattcttagcctaaggcctggagctgagtagggagtaactaagcttagccatacttattagacttagagattttactttgtttatgtcaatgtcaaggcctttgggaaaactttggtatgcttagctgatttcttgaaatacaatctttctctcatgcaatttcctctcattcagtacgtgaagaataaaatgttgacaggttaaactgcaagacaatctaagttgctgtttatttttgtctgttagccaaatcttaactcactattcatagccacacagggtgtttttttttggttggtttttttttttttttggtttcagtttgtttctcctaaatacattttaaagataattagttattgcctgtattagaatttctttttgtgttcttgtgttaggattctggaagtagcaatgaattcacaggagaactcaacaatgtaagagcaagatgtttccaccacttactgagttgagggtataagattttatcctttgccagcccctttagaaattgtgactgtgaactgccatgatttaacttcaaaacacagcctgttctcttgtcagtggagccaaagcgttatgcctgaacaacgattataggttagtatagacaagtgaaaaagagttttattttgctggattctgatactacacatacttaggttcagctaaatatcaaaatcgccacagccaagatgtagtcattgatgaggactttaattctacccaatgtctgatcaatgtttcattccatagaaacatagatgtttcaatccagaaaagcctttctattttttaaaccacagattgaggaggcaatgagatggaaatactaccctgaacttagttctaactatctagaaaaattttttattgaagtagaattgactaaaaccttgggcgggagtaaccatgatagtattgtttggtaacttcaaaagaaagaaaagttggacataaccaaatagtagtggtgattttaggaaaatatatttcaaaggaaaaaaacatagatttttcaatatatagagggatttttcaacatatagagacttgaaaagagtacaaaaaaataaaaagaagaaaggaaatagagaaataaaaagaaagtttctgacagcaaaatcatcttttgagggaatgaggaaaaagaaagaaccttttttttttttttttgagacagagtctcactctgtcacccaggctggagtgcagtggtgcaatctcggcccactgcaacctccacctcctgggttcaagcgattctcctggcttagcctctggagtagctgggactacaggtgcccaccaccatgtctggctaatttttgtattttttggtagagagagtttcaccatgttggccaggctggtctcgaactcctgacctcaggtgatctgcccgccttagtctcccaaagtgctgggattacaggcatgagccaccgcgcctggcccaggaaccattttaagatcaaggaatttttgatgggcttggatattaagagaacatgtatagaagattgaaagacaagcacatgatcagggacaaattcagaagagtggcgtaaaccggtaagaaaatatctgcaaagcacaagttcatactgagctgaagctgaagagaatgttaaagacaacaagaaagctctctttaaagctatgttcataacaagaaaaacaagtaaaggctaagctcgttgcttggggcagatggaataatgttaaaatatgacgaaaaacagacctactcaactatttggcttctctttctctattaaagacaatgatgttcaaactggaatgtgtaacataaacatagttaaggataaactgaagcatgcacgatagataatgataataatagttgtgactacaatttcctgagtttctattcaggactgagtactgtaaaagagaatttagttgctttttaaagtacttactggcaggcgtgcgcggtagatattactgttatcaatcccatttacagatgagaaaaccgaggcacaggaagatttaatgacaaacctgaagttacacagtcggtaaatgatgggctgggattcagatcaaggtctgactaacttcaaagcctggctcttttcactggactccctgattcccatgcctgtcacatctagtgttttcaacaggattgca

SEQ ID NO: 70794 - DNA, 1160 bp, Homo sapiens
ttgttacgtgggaccagccatgaagtaccgcactgcaggtgttttggaaagtcgcactaaatctaagcagaggatgtgaaccccgtgcaccctgcagcaagagtttggcgaggtggcttgctactcactctcttccctgactgatgtctggttctgacatccagagcatgacacatgacagatgacagcgacacatctgcacatgcccaccagcacacccaggttttacaaaagccaatgtcattttttcagtaagtaaacaaaatagtggcacaagggatgtgcagaatttcacttgttcatttgctttgacatttttagggaatttcttgtgatagtcctaaaaatattttacaaacacatgaaaaatgaaattagccatttttctcaggcttcgacttctaacaaaaaagattatcaaatataagcttttgaagaacaagcataaataaatgttattttatggcttaaagttacaatttataggcttttactcttttctgaatatgaagaaagttgccacacattttgcttttatcactgcttgcctttgatgaaatctttgtaattgttacagtaacaaccataccttgcatctttctcacatgcaaaaaacacaaatgctactccacttgatctatcttaatttactcattgtttaaaatttatccataaacaaaattaaaaataaaaaaacttaaaaattataaaatcagaggactactcctgggagccagcataaaataaaacaaaagagctcagattttggacacaggcagacctggatttgtgggtgagaaacttagtcccttctctgctttgatttcctcatctgtaaaataataataataataataataataataataataataataataatacctatacctgtaacttggaaggctgatggtaccaggacagtccctgggggaaaatgtggcccagcaaatgatttcttaagaaatagaaggaaagtaaaaaggaaaggaaagaggcaaaaaaggagggagtagcagtgactctccccaggctatacaaattgggttataacccaggccttctgccaaaattctgcctctcaaatagaacacttgactgtttttattatgtgaattttccatacataacaaagtagaggaaagtgtaaagaaccccca

SEQ ID NO: 70795 - DNA, 1021 bp, Homo sapiens
tgtgtgatttcacttgcacgtggaatctaaaagagttaaactcatagaaacagagagtagaatggtggttaccagggctgggggttggggtggagggcaggtggaggtgaagttagtcaaatgtacaaaatctcagagaggagaaataagttttgagatctattgtacagcatggcaactgtagtagttaataataatgtttacttcaaaattgctgagtaaatccaaatgttcacaccacaaaaatataagtacacgaggtgatggatatgttagttagttgagttagctagctaactaaccataggtataagcataggtataagcatataaaaataccacattttatcccctaaatagatacaattattatttatcagtaagaaataataatataacataaatactatattgtttcaaaatagagggaagaaaacatgcaaatagtcctaatggattttttttttttttttttttagtctccaggctggcttccagacaaggctgtatggtggcccagactggttgaattttttcacttaactttttgttgatctgccttaatttccaataactagagattctgataagaactttaagaataggaatacttctgagaatcttaagatgttattagccatatataagtaaccatacattttataaaagcatttttctcttcacaatagctggaagtggaacatcctagagaataactcatttttgaaaaatagaatgtcttaggggagaactggcctgctaagtattacaggggaggactcaggacaaaatcaagttatcagatacctggggcttagaaagcaaggagttagaaggtagaagaggcttacagaaaggaggaaagaagatgctggagaccctctttcatctattatagaacattttctatggctggcctgtattcagagaaggatacctatcttgctgctttctgcaccaaatagttccaagatccaaaattcaagctagtgctcttagtgaatagtttggttatattacg

SEQ ID NO: 70796 - DNA, 1161 bp, Homo sapiens
aagaacgaggcagccagccctccagctgatgaccagagacatttattatctaccatgtgctaggcactgtcctaggtaccagagacatcctggtaatcaagacaaagttccacgtttgtgaagttggggatcagggaggtggagagacagagaaaataaacaaatctatgagaatctatgagaggtagagataaatgctatgatgcagatcacctgagtgatatgactggaatggcacctccagcttggctggtcagaagtggcttctcaaaggaagtagcagctaagctgagacctaaagccatccaaataaaaaccaatgagtacatccatcagtcagcaagtatttatcgggtgcctgctatgtgctaggcactgtttaggtacttggtttacattggaaaacaggcctggggatcttacattctaactgggtgagaaggggtctgacaggcaataagcattataaataagtaaattacctggtatgttagaagatggtaagtgttatgcaaaaaaaaaaaaaaaaaaaagtatagagcaggctaaggaacagaggtagcatgggggtagtgtgtgattttaattagggtgggtggggaggcccccattcagtgggtgtcctgggagtgaagacttgaatgaggtggaggagtgagctgtgtagaaggagctgtgtgaagggagagctcaggctttcgctctagctctccctcacacagcctgttctcatgctgctaataaagacatacctgagactggctaatttataaaggagaggtttaattgacttcacagttccacatggctggggaggcctcacaatcatggcagaaggcgaatgaggaacaaagtcatgttttaattgctggcaggcaaggagagcctgtgcaggggaactcccatttataaaaccattagatctctcgagacttattcactaccatgagaacagtatgggggaaaccgcccccatgattcagtgatctccaccgtggggattattacaattcaaggtgagatttgggtagggacacagcaacaccacatcagttctcattttattatcccatgagaacatccagctcccctttattgcagcactgtgcccacccagtttctcaaggaagccaatgagactagcagacattgtcaggtcac

SEQ ID NO: 70797 - DNA, 1002 bp, Homo sapiens
acaaggcaatgtgtataaactaactgactaactggcataaataaatagtggacttcaaaaaaaattcataatcctagcactttgggaggccgaggtgggtggatcaactgaggtcagaagttcaagaccagcctggccaacttggcaaaaccccatctctactaaaaaaatacaaaaaaaaaaaaaaattgtattctaagttccaggaatgtcatttagacatagtttcttttggggctagatgtatcaattttcattaaaggtgatattattatttaaaaatccagctggttgctaaatgagaattagctaccctttataaccagggattgtttcaaagaaatgtagttattttctcccctgtggcctatcttgtgcaaagttagtaatagtttgttgccaaatccaaggaaagcaaactctggctcaggcatgagatttatttttctcaccatgatttacaactggtgtaaaattcaggtctggacttggttagttataatgctatcgcaatataccgcatcttgagttgattttgccatatcctgtattgttatgtaaaatgctaactttaattgagaattgccccagtagaatatccttatttgtcctgcatgaagtttctcctcttttgtatcaattttttgtatggttcaaattagtgcgggaagaaaaggcaggaaatacaaatttaagggatatgtgttatatcataaaagaattgtatcacaaagcattaagacaatgcacagaaaactttgccaatagctgatagagcagaagggattgtataattaaataagaactaacacctattttgtaactggaaattgcattgtcagagtccctttccttttatcactagatgctaagaatctagccatgtaaaaactcccaaaacatccaaattcaaaaaaactggaatctaacgtggtaatgcagttgtcaagaacacgcaatagtctttgggcttttacaaagcactgaaaactaaatgttgca

SEQ ID NO: 70798 - DNA, 1056 bp, Homo sapiens
attaaaacctagctgcacaggccgggaaattgtcaaatatcagagagtctacagttgaagcagcttgggaacaactctctgcagtaaaaatgctgagttgtggagaacacagtgacccaaactgacaaaataatgaaatacatggcgtttccccagtgaatggaaagctgctttttaccgtgttccaaaacactggctccgtttggtgtgtgttttgtttttatttgtaataccctactttgatgtttcctggaaactctcctttgagtctgtgagttttggtgtaagctcagtggcaatgttaccctcacctctaggctgctgtaggacacaccccggtctcattttcagtgtctcagcatactttccaatgcttccagtaatggattgtgcaaaacacaaagccaaaagcagatgggacatatgtagataagctgtttcatttttcatccctataatttcctaggtttgatagcacttcaattttctaaccataaaagctgcttctgtgctctttggaaaacacacacacactcatacacacacatacacacacacacacacacactaccaggaagcaggctaaaagaatattacatggggtttttgtgttgttttgcttatttctttccttttaaaagaagtaccttgctgctggaaaagaagtcaaaaaattgctttgaagagtatatttactagagttcagtttacttagggaactgtcgtgttaacaccgaagaatgcattagaatgcatcattctatgatacattatccgagctgaagctgaaacctagccttctgccgagtggtattcctgaagccagtcactcttagaagtgataatgtttatttaccagaactttaaatgctgattgtggtgtctgtgtctcctgcccagggggaatggcccttctgtccatggaatgtgatagcccagcaggaggtaaaagctgcccctggacagagtgaagcatgcagagggaggcggagtgaattacagctgtctctttggaccacccgtctttttgccaattaaatgtttacattatctttt

SEQ ID NO: 70799 - DNA, 1032 bp, Homo sapiens
ggtctgtagcatgacttggctggcagagattgaaagcaactgagaatatttgttctggtggtcagtgaattctctctaagcctcatctacatagctacaaccccctgtgcagaatttggaaataccacccagtgggtggaatagtacctgtattgtcctcttaggttttaagcagaccacttcttcctccacagttttgctgatatctatgtggtcttccacatcgaggcccttatcaaagctcccaggcccttttggtggctgacaggaaaaagaaatgagccagtcttctttctagtctgctgatgagtagatggttgaaaaaagattagaggaagagctgtttaataagttcgcattggtgctgagagatgagttggacacagttcaatcaacatgaaaagtctctctgacatggcacagttaagacgtggctgaaggaactcagtgcctcatcctctctgcccacccaacatggccccagacgattgctgggcattcttatgcttggtgatagtgcccccatgccatggtttaaagtgaggaaggcttgtggtgttccttcagtaggtgggacttgggggtcactcccaacattacagttgtcatctttttctttgtcatgatttaatagctcatggtcattcgccagcagagtgcaaatgtacactggagggtggagtggaacgtacaagaaaatgactctttactcaaagtccaatgactgtctttaagctaaataagagcattcactctgctttagggagggatgagctattgcctaaaaagacataacatagcatagcatagcatagcatagcatagcatagcatagcatagcatagcatagcatagcatagcatagcatagcatgccatagcataatataatgtcagatatgtttaagagactgcgaagtctaggacatcaccttagcattctagcaccacacttctcagagagtatgtttagtgtcatgaagtttctctcgagccttttctccaaaacattcaccaaaaccatcagtggtta

SEQ ID NO: 70800 - DNA, 1030 bp, Homo sapiens
gttcctgcttgtgccgggatggggaggggcagtggcagaggaagtcgcggagcttctgcgagagagctgccccttggaaatcaagcaaaggataaacacatgctgccaaaaatctggaactggaaaaataaataattaaaatgggtccctccacagcatttcttgctgctatttatcaagaactcccagtgtgctcagagctgtgtgttctgaaagacagggtctgtaccccctgagcttgtcagccaagttaaataatatactctggttcaaacaatagcatgtcatggctgcacaggtgggagcttggagctttgcatttttttttcatttaagtaaattccttgctgctagtatgcattgaaaagccttaatggaattgaatttcaagaggagtttgaatgaaaaagggtggtagttttgatgaaaaagctgacaattttctaacctattaaataggtagagaagatactcaattcaacaaatatttgtttgatgcctgctagtgtaagcaatgctctgtgctgggtgccactgattttgccactgaaaggacgatagcagattgcaaccttgtgtaatggggtcatgggatcagtgtgcccctggctgtcactcagaagaatgatgtcatttgattgcatttgttctgcattttattttcaggtcttgaatgtgtttttgaaaaggcatgctgaattataggtgcctaaaacaggagcaggacttgaaacactctagagggaacctcaatagattccaacagcaattcctttagagcagacacagtaattttaacagtaatccacaggctgcaaggcacaagcggctggatttgcttgccttctttctccctctcctcctagctggctcttattttccgtcttcaatcagccataggtagaaaagtgacaggactgactgggttgtattttcccactttctggttctcttatctcttgtcactgatcctcctctccttcagcttctgctaagcagtgatttacgagatgcttgtgtaatgagtgtg

SEQ ID NO: 70801 - DNA, 1039 bp, Homo sapiens
tgggaacagtgtgtggccagcatgggtctaacctgttcatcaaagtggggccatggaatggtaggttttcttattatgttttttatgaaatgtgcttatcatttttcttagttttaattttctatcttgatgaaatgctaatttttacatgatcacaaaaacaaatagaactgtgacattcatttttcagtttcagtagctgattttcatgttggttggattgtctgttcaatagctacacatagtgctttccttagagaagttactagggggatgtggccctatttccatcccaccaccctggtcaatgctgttatgcaggggtcagcaaactctttctgtaaagggccagatcatcaatattttcggctttgcaggctgcatacagtctctatcacaactgctcaattctgctgctgtagtgtgaacacagccatggacaatacataaatgagcaggtagggctgtgttccattaaaatgttatggacaccgaaatgtgaattccctgtaattttcacttgtcatgagttattctttttttgattcttttcaaccattttaaaatgcaaaagctattcttagctcatgggccgtttgaaaaacaggcaacaagccagatttggcccacaggtggtggtttgttgactcctgctattatagaaagaatgagagtaaaacaaacctttcccatacagtctgatgctcatggcaagagagacgtgaccaaaagctgccgtggaagtcccaaaaagaggcactactctcagcctgggaggatctgggaggcttcagagaggtaatgcttgagctgcatcttgaagctgagtggagaaggcagagaagggagttctagagagaaggcacagcttgtgcacaagcaggaagttgagtaagcctgggagccacaagcagctcaccaggctgcggaatgtccagaaacgagtgtgcaggtccagatggtgaagggcttaatgagacgggcaaaggtggttggattttatcctgatggttggtcctctagactttccaaaccttgc

SEQ ID NO: 70802 - DNA, 1398 bp, Homo sapiens
tagggactctgggcccaagcatggggaggtggcagaggcctgtgtggtgtcttctcctattgctcacattattttcagtggcctacggccattgagaatgaggtgagggaggaagcactggaggtttgaggagaaaagagagagaaggagtggactggaagactaggagggagaatagaatagggaaatatcgagcggttgccaggaagcattagggcccacttgaggttgatggtcctgtgtttgaagtgagagctgtaagcatggttttgtctttctcaagctgcgttcagctttggtggtatagctgtagactcagaaaaagttagctttagccagtttgggggctttgccggaaaatacatcaagaaaggagagagtggccagggagctgagggagcatgtaaggaatggatgatgatatcgatatggatgttgattcatataatgatggcacttgggctctaaggagggaaataaggacctgataggggtagggatgtgaaaaggtggcagggtctgtgttggaagttcaagttgagtttaaagattgttaggggcaggcgcggtgactcacacctatattcccagctttttgggaggccaaagtgggtggatcacttgagcccaagagtttgagaccagcctgggcaacatggcaaagaccccatctctacaaaaaatatgaacattagctgagtgtggtggtatgtgcttctggtcccagctactcgggaggttaaggtgggaggcttgcttgagtcccagaggtagaagttgcagtgagctgagatcacacctctactttccagcttggatgacaaagtgagaccctgtctcaaaaaaaaaaaaaattgttggaactagagaattggaaaggggaattattggactgtgggggcttgatattgaggtcatggagggatggagttattggcaatgacagggtctgccatatgattgtcaagatcattggcagagaggtgtcaaggaactgaggtggttaccagagtactaaatggctccatcatctgtgtggaaatcgcagtcaccaagagagtgaggagctacatattcaaggaacgaagggaagtggccagggctggggtggtctgtaatgatcacaatgaggagggacctggggtggtttgagctgacagcatgggctttgaagctggggaggaagtgttggaaagagagaagaaggatcttccagaagaggctgcaagacacaaataggacagctagatgagggagaggaagcagccaggccttgagaggggcctggggaagctgtggcctcgaaggagagctggtttcagtaatattgagaaggggaaaggaacaatcagagaagaggttgaagacatgggggcttctgttgataactggctgtga

SEQ ID NO: 70803 - DNA, 1095 bp, Homo sapiens
ttaattgtctctgttattagcataattttatcatgtagactgactttcagcttcagtgatgaagatccaatttttgagctttcccagcaagttattttggtcttatgttttggcattcccctcttaaagagtctggaggcctttcatttgaagtttagtttgtcacagacttcctattctcgtccattcagtagactttggtttcctcatctcatggactggcaattgtaaagaaagtcccccgattctggagaccacctcgcccctccactgggctctgtgccttccctaaaaatgcagacatctgtttcaaatcacttagcaaaagaccttgggttgctcttatagcaaagccctcccccagcatggatgcagtctcttgtttcctgggagagagagaagctggattgtttccttgttaaaagttttctgatattatatcagtgtagaatctttggaacagttcacactaacccccacattcaagccacttacctgatatgtagttatcagattccttcagggactgtctgctcttggtgaacaattagattagaggatgctgatgaaatttgagtggcaggaagtagaagttacatttctgagttcagagtttctatttcaaggttgagtaagtggtaaatttttactgcaagattctagcctaacagagttggcttctcaaggtcccccagcccggcccatgggtatttcacctgcttggaaacttcagctccttttcagaggtgggcctccctgttctttatgttggcatgaaaacaattaataatttaagccatgcccattaaaaaaatagaaatgctgtataaatacaatactgtaataataaatttaaaagtcgatccagctgggcgctgttcccacactaccagctgagcagaaacacaaataagtaaagaagaaaactgctatataatgcaaatggctgcaatctcattgttttctgctattgtttattgcaaatatatagtagtaaagttacattatggataagtaggttttgtgggctaacctggaaacctaatcactgtttataacattatttctatgggggaaaaatgcattttatattag

SEQ ID NO: 70804 - DNA, 1062 bp, Homo sapiens
acattagggaaaagcaacgtgatagtaacgggagcaaactttacccgggcatcgaacatcacaatgatcctgaaaggaaccagtacctgtgataaggatgtgtgagtcgaaatactaataatttatcctcggtaacgtaacgctcaaacctgtgccaaaggaatatcagtgtgattataaccttaatatagtcaaattattgccatgccccaaagcaggccaattagtcagagtatttgacataatataattccaacacgtaaaataattttcacaacagatctgaagttcattgtgagagaatctgttctgtgttattccccaaaaatctcagtatatagtcatttcaggatgttgcctgtttggggtcttgattcattttcagtaacaaaatcaagtatatggagtagcaaacatcattctttaggtgatgcacttggaaaaatagttgagtaccttgaaatttgatgaggaattttttggagcagctcttccagtgtgccacccaaagttgaaaaaacaaaacctcttggatccattttatgtggacattttattctttgtagccttctctttactggtttggtttcagcctccaaaaattaaattactactacatataatggtagtaaaaaagaacaccccaacataaatatctggtcaatgtatctcttgaacattattatttctgtcacttctttcccaaactcatcacatcggtgaaacttggagaaagacttttcaatttctaccgatgtccttgtgcaaatggttactcccccttcgaaaaaaaaaaagtgatgtgataactgcagttattaaataacacaacagattatttgagttttctgcttgttaactcatataagtttgggctaatttgaagtaaaagatgttacagtctacatagagtataatactaagcttattttcatcatggaaatgcatttaagacaatctgctgaagcgtgatgttttgatttttaactactaaaacagatttgtacagcattctaatctgctatgcttatttactgaattttcttctttaattcattttct

SEQ ID NO: 70805 - DNA, 1041 bp, Homo sapiens
tgctttgtaataatagttgttttcaaggatggttctattttcatcacactatgctatgttgggggtattttttgtttctgtgactttggtgttataaacttttacctatgctatcatatattctatccatgctagaatggaaataataagaccttatccttgtagctgagtatttctagttgcagcaatgaggaaagagaaatgaacttggtacgataagacctgacattttctttttatgtgatttgtggcaagtcaccctaatgaggcaatgcttatgaatatgtgtgaaaatgctccgtgaatggttaaggtgtgatataaagaattgcatttctgtgaagagtaggtggtattgttcccattgcacagagagagttgggttcacagaggttagatgacttgccaaggtcccagaaatcttgtcatgtgcttctccttctcttcgacccaatttgttccctaccatctgatgtcaccttctcttacctttcgtctccccacaggagaaatggtaggaggggtctggtttccacctttgcccgattctcccactggtgcctccagatggggatcctctagagcaggggtgtcaaccttttggcttcctgtggccacattggaagaagaattgtcttgggccacacataagatacaccaacactaacgatagctaatgagctaaaaaatggtttgtgcataatttccgtgatatccaccaccacagataagcaaaaaagtcctcacattcaaaaggctggacacggctgctctagatggaagcttctgatgccaagaggggagatgagggatttcacatacaagtcaggcctccaagtgtacttgcacacacttctaaatatccttccccattctttcttcccctttttccctctccttgatgagatatgtgaggtggctgcctctctggggccctgcctgaccacttcctgccaaggctgacacactccctcctcaggagcagtgtgggttcagacccaaattccgggggccgcctgataggccgtccttacagccttg

SEQ ID NO: 70806 - DNA, 1057 bp, Homo sapiens
gaaaaccctgtctcctgccttactgctgtaaacagaaactttaattctttggaaagtacagtggattccacagaaagctaactgtcacttttgtgtcttttccaaggagactgtcggagagcccttctatttgctggtgacgactctgaaccagaaaattaacaagggtcccgtggatgtaatcacttgcaaagccctgtacacacttaatgaagactggctgttgtggcaggttccggaattcagtactgtggtatgttttcaataaagctcccagccagactcccaaataaatctggcggggaattagagggtgaggtgggtcatttacaatgaaacggtatcatctctactgcgggaggccctgtgtgtttagttaattaaaaacagtagttgataaaactgttaacacgtgttcacataatagattttaattactgagattgggggagaaaatattgtaatgatgcctggggtactcatcaatttccaaagattttaatatcaggattgcttataactttcagtgtcgtcaaaggaaatgcaaagtactccctattcagcacttataattgcaatcagaatttctcaaatggctctgctctgggaagacaatgtgtgaagatatatttcaatcaaattgaggccgtcttattttagaatgataacacaagacaaattccaccacgttccccatgcaacgtgacgccctttattttcatggattagttacaaatgtttggtgtcatgcacttaatgtactgtgatctcatagatatttttagaggaacgctgtaaatcactacaggaagatgattgcctagctgctggagggtttcacccgcttgagaacttctttctaattcatccccaccgcacccaccccatgctcttcctaaagaaagaaagaaagcccagtttggggcacatttgggaatttcagagagggagccaagcagggaaggtaactttagaattaggaattttctatgcttttctgttagtagagacttggagaagagattgctgtgttttggtttgatctttagctttatga

SEQ ID NO: 70807 - DNA, 1040 bp, Homo sapiens
tttaaaaagaacatttattgcccataaaaaagtgtttttgttaaagacaatagtgcctttaggtagtaatagaatgctgtttcacaaatatttataaaactattaaacaagctgagattgctgaagctccgattaaaaggtgcctcccattcatctttccctttagaaactgaagtagcttaactgcaattacccgccaccatgagaagatcaccttgcagagaaataaggcaagaccccaacaagatcgtaggtggtggcaccagcattgaccccttcacacccacccctcccactggtgtggggaatttagcttaggacattgcttacagcctgagctaagccagggtttctggagggtcaggagggctcctgggctataggtggaaccagaaggagggagggagggcgggtggtaaagcggggatggcatagccgaggggtttgtggcaccaattgtgcagttaggcaaatctggcttcaattcctggttctgccactggtgagctgttcctggagcaagttactcagcccctctgtgcctcagttccctcactctacaacagggatgggaataataatccaggaaacatttctagaaaagggaggtgaggagagggctcgggtgtgaggcttcacatgttggttccttctaggcactctgcccaccagctccctgccttctctcctgtctggtattttttgtttcttgtttgtgagcagacaggcctttgaaccccttcctagtcggtggctggcccagaacataaaggttctctgagagcaggcaagggagtgactctgttgtaggagggaaactcgtacaggccagacggagatcaccggcttacctcagagttcagattccactgattcggagttttaatcatttggttgagaccagaacaaaatttactcttgcgtaattatcaacaggattataagggcaagatttagtggtgtttgtctcagctctttataaacaccataaactgggtggcttataaataatagaaacttatttctcacagttctggagg

SEQ ID NO: 70808 - DNA, 1047 bp, Homo sapiens
ctccttgggtaacgcttctgctgtcttcccttcagattttaccagattcggaagcattccaagatgtgcaaggaaagagacatcgagggaagcacaagttcaaagtaaaagaaatgtatctgacaaagctgctgtcgaccaaggtacacttactgttctgggagcactttatggctacctagggggtgtatgatatgtttgacttaatttccactgaagtgtgaaaatgttacaaatcccttgtgccttctagcaaagcaaaatgaaagtttaaattgtaaacacttcctacccagttcctcttctttttatacactacaaagataacagcactttacagatttgtactgtagtatcttcagtcagggatttaatattgttcccagtctctttctccaccatttcactattattgttattttttaggttgacagcataattattccttttggtttacttgttattatagatgagcaataaaactccctttttgaattgcgaataaaatgaaggggatgggaagggtcaatgactataaacctagtaaatcttaatttttgtttttcattttaaaattaagaattctgctcacacataaaagtgtcagatgtgaaagccggtggaataccaaaccgagagcaaattttactttatctggcttttagtggaattaacagaagtctgtggtgatcttttttttcctccccctctggaatgatgagcactataaatgctatgatctacacttggccccaggaacttgatgggcatgcttcttcagattataacaaagaatctgcttagagcttaggagatttgtttagtgggcagaggacagcccaagcctcttgattttctcagctgtcccatagagcccagcctatttggcttttgtgaaatactcaaatgctttggaaagtacacaataaaactttatgatagaaatatatgcaacaggaaaaattctgggaacagagcagcatcacttgagcttttccaggctgaacataactaataaaagccaaatatccatggcttcctggttta

SEQ ID NO: 70809 - DNA, 1047 bp, Homo sapiens
taataattttagttcttttatgagaggaaggcagaatatattagcatttaatctgcctgaaaataacagtgactcaccagaactatctagatagcagtcagtcattcagtcaacaacatttaaggcctactgcatgaagccttgttagcaagaggtaaaactggttggtggtgggggttcagctacattggaatattataaattcctccatctttttttttttttttttttactcttttggtgatggttgctttttttttttttttttccccaggaagcaccaactaataagcttctctatgccaaggatatcccaacctacaaagaagaagtaaaatcttattacaaagcaatcagggatttgcctccattgtcatcctcagaaatggaagaatttttaactcaggaatctaaggtatcattagaaagcagaaataagcttatatttggttactttacgtcatttcagaatctctcaacaagtctttcttttagaaacatgaaaatgaatttaatgaagaagtggccttgacagaaatttacaaatacatcgtaaaatattttgatgaggtaagattttaaataacattgtttttaacctttgaatcaggcacaaggatgtggttatagcattctgtcagtttcagaacagctctggcatcccaaaaggccagaaagggaagccaggaagcctgtctgagatgggggatcctggcactgagccagaccctgtacatggctgccccccttacagttttatcatgctgcccacatttggaccagcctgaatttacatttgagttcatggggcctacagccaccctgactcaagttaactttgatgagtaagtagtggccctattaaatggggtcagcttatgcttgattgtaatttgctaaaaatgaaagctaagcttgttaaattgcctagattctgtattcaatcgttatatgaaattatgacatatttctaacttaagcgactatttcaataaaccattctcctttatgattaattctccttaatctgggtttttttctttggaa

SEQ ID NO: 70810 - DNA, 1067 bp, Homo sapiens
attctcaccattgacatggatagcctgtcccagcatgattgggggggaatcagggaagggggagttaacatttgtttggaaacaaagcatctgatgaatgtgtctgtttgaatttccaaagaaaaaaacccagattaaggagaattaatcataaaggagaatggtttattgaaatagtcgcttaagttagaaatatgtcataatttcatataacgattgaatacagaatctaggcaatttaacaagcttagctttcatttttagcaaattacaatcaagcataagctgaccccatttaatagggccactacttactcatcaaagttaacttgagtcagggtggctgtaggccccatgaactcaaatgtaaattcaggctggtccaaatgtgggcagcatgataaaactgtaaggggggcagccatgtacagggtctggctcagtgccaggatcccccatctcagacaggcttcctggcttccctttctggccttttgggatgccagagctgttctgaaactgacagaatgctataaccacatccttgtgcctgattcaaaggttaaaaacaatgttatttaaaatcttacctcatcaaaatattttacgatgtatttgtaaatttctgtcaaggccacttcttcattaaattcattttcatgtttctaaaagaaagacttgttgagagattctgaaatgacgtaaagtaaccaaatataagcttatttctgctttctaatgataccttagattcctgagttaaaaattcttccatttctgaggatgacaatggaggcaaatccctgattgctttgtaataagattttacttcttctttgtaggttgggatatccttggcatagagaagcttattagttggtgcttcctggggaaaaaaaaaaaaaaaaagcaaccatcaccaaaagagtaaaaaaaaaaaaaaaaaaagatggaggaatttataatattccaatgtagctgaacccccaccaccaaccagttttacctcttgctaacaaggcttcatgcagtaggccttaaatgttgttgactgaatgactgactgc

SEQ ID NO: 70811 - DNA, 1585 bp, Homo sapiens
caagcccctgaggtattgaaggaatcagattgattctttttcagaagatgggagtattaataagtaattatgttttataacataagcacagaagattttaatcactgaattgaatctcaggccaagtgctttgtttataataaactgctgttaaacaccagtgttgttggaaagttaccatgtaagtatacctgggccctgcattagtattttctaattcactccctggtgaattttatacctagagaagaacagactacgggttttgcttaaggctagagcctgaggcaggagagaagcaaaactagatggtagtttagcccatgctactgtttttagactgctacagtggtcagcatttccttgccagatgttataggcatatataaaagaggcagtccaaggttgctacctaacagtttttctaatagtttcttttgctatgctttctctacatcattttaaggaggaacaacatcaaagggaactctctctacttcgcaaaagactagaagaactggaaacaacacaaagaaaacaactagaggaacttggatcttccggagaatgatgttcttggagaacaggcagatcaaaagaggtgaagttggtgactcagtaaaacttgacattttaacctgtggcatttagatactttttactgtttgccaaaacacttgaatgtgcctcaagaaaaggtacctactacatgctgtattgtatgactgtcaggattttaagattatacaagtgaagcattaaaagagaaattctcagagatatttagaatatttgacaatggtttgagaatgtaaaacaaaaaggaactagttagagtcaagttttaaaatttttactttgttgaatttttttttttggcattttgagtgaaatataactatcattaattctctcttcatctttgagatgcttggccataacagggtccatacacatcttctggtttactatatacaaaaactgtagttgaaaaaagatgacaatttaaaagtcagcctaaagaatgtaaaggtatctatatacaaaaggctaccttttctaaaatctgtgtgcacataattaaagagcttaatttttttttaatcgtgtgtttaattttacatcaaccatatagcatatatttagcaatatgacagtctactgattttggctttgttagaatagagaataagtgcaaataattaaatcctatggctgtattaacaagggggccattgattataaaacttgaactcaggtccttttataaacattgttggtatttaactttacttcccattactgtggatctaaccaaataattatgtgttttgtgtccctaagtatgctctcattttttttggtctacacccattggaagcctttttaatgtgacatcttttagaggaattctgctggaataatttcatgttaacgaggctaaagctcaagtctcccaaattaagtggaatgttcattatcccaaggtgttcatagtcaaaagtcccagttgatagtgaagaaggccaggactgtaattgagcagtccttagcaccatttagcaaactaggtttacttactaca

SEQ ID NO: 70812 - DNA, 1033 bp, Homo sapiens
tagctaactgtagccttgaactcctaggcttaatccatcctcctgcctcagcctcccaaagcactgggattacaggcatgagccactgtacctggctcagttctcttaaacacatgctatcttctggaacaatggagagctcattatttcttaccagatgtacaggcagactcagtagtaaaatttgactccttccctttgtagattttttttttgcagcaattattgataacagtttttttgtttggcattcataattaattgtcacattgagaatattagatagatttgtggtttattatctttgcaattttcagtaagagccatgtctactaacctttgtttctagtattcactgaaaacattcatatctaaacacagtttttggtgagtaaaatattttctatatagttttgttcaaataagagattatgtattaacatacttgttcatatttctctttttagagaaaatctcttcatgaaaacaaattgaaaagactacaagagaaagtagaagtcttggaggcaaagaaagaagaattggaaacagaaaatcaggtcttaaataggtaatgtgtttgtatgtgtatcttccccatgtggttattttgatgtcatagaactttgtctctaagtataacgtaccttcttttcttttaaaatatacattttaaagatttctaaaacagcttgataactcctaatgtactatcctttttttaccccctaactgaatgtttctttaaaccaaaaggtctctgtcacataccaggtgtttgccttatgattgggactaacagaaaatgtcactggctttggtagcaaggagtggtgttagttgttgctgctgtacaagacagttgtagctattgcatagttctgaaaattgtgcctacaactttgaatcaaaggtcagttttggtttcctggtgtggagattttattgagctgtagtttcgggttttgcagtcacattcaagcacatctgataatcaggatcatcagcatttttaaagcagagatttgtcata

SEQ ID NO: 70813 - DNA, 2002 bp, Homo sapiens
aaaataacttgggtactaggcttagtacctgggtgatgaaataatctatttacctataaaacaaacctgcacatgtacctctgagcctaaaaaaagttttaagaataaagaaatggacataaagagtagacaggaatttaaaattattcacagatgtcactgtgcatgcataaaagtcaaacctatcaaactattaaaattaatatgaatttttaaaatttctaagtacgaagtcaagtaacaaatactagttatttttctttacacacacaattagaaaatatttaaatgccatttacaatagcataaaaatacctaaaatacctaggaacaaatctagtgaaagatgtttatgacttctacactgaaatacaaatactgctaagaaaaatggaaaaatgcctaaagggaaaactgtaccatgttcatgacttggaagattcaatattaaggtgtcagttcttcccaaatttatccataagttgaatgcagttctaatcaaaatctcagcaggtttctttgtagaaattagaaagtagattctaaaattcatctgaaagtacaaaggactagaatacccaaagcaatcttgaagaacaataaaactagaggacttaaaactaccaggtatcaacactaaatataagctacagtaattcagtgtggtattggcataaggataaacaggcaaatggaacagtatagagtccagaaataggtttacactaaaggtaccactgcatttcgataaaggatgttccttcaaatagtagtgagtcaatagattaaactcagcctaacctcacaacatagataaaaatgaaccatacacctaagtgtgataggtaaaaaaaaaaaataaagcttctagatgaaaacttgggagaaaattttaggatcttgggataataaagataagcaggatgcaaaaagttcctactataaaatacatgattgatgtaattgattttatttaaattaaaatctttttattaagggatactcttaagcaaaagaaaatgacaccacaggctggagaaggtcaatctgcaatacatatatatctgacatacgattcatatcttgaatatataaagaactacaaatcagtaggaatcaggttactcaaaagttttaatggacaaaagactaggatggacacgtcacaaagaagggatatccagatgactaacatgcataaaaaaagatgctcaatacctttagctatcaggaaaatgtaaattaaaactacagtgagatactgtatttcaccaaaacaggatgcaaaagctaaaagaccgaccataccaagtactggcaaaaatgtagaacagctagaactctcacatattgctggtggaaatgtaattggtaaaactgctttagaaaactggcagtatctactaaagctaaaacatgtatacactatgacccattcataggtatatactgaagagaatgaggtacttaatctgcgaaaaacatgtttaggaatgttcgtaaaatatttatgatatccccagactggaaagaatttaaattttcattaacaggaaaatgtataaaatgtggtatatttgtacaatgaatgacaacattgcaatgaaaaagaagtactgtgacaatacataaccatggcttagtcatatagataaaatgttgagaaaaaagtccagatacaaaagagcataaatttatgatttctttcatatgaatgggtggatggatagacagatggactccttaactgcctataaattcataaataaatacttatggtgataaaaaccagaagagtggttcctttgccagggtagacaggagcataaggaagccttctgagatgttggaggatgtgggacaatcaaagcatgagaatgaatgctcgtagcagagttatttgtaatagtcccaactggaaataatgcagataacccttaacggtgtactgagtgaatatactaggttatgcaataatcgtaagtggaatataatatgtggg

SEQ ID NO: 70814 - DNA, 1049 bp, Homo sapiens
agtattttagctgtgagaagatgtaagtggagttatgataatggattgaagaatgtcagttgagtagaaagataaaaaacacatgtcagataggaaatgatggcagtgcatccatgtagacatgacgtagactcttaagtaaagatattatataggtaactagaaataatagaatgtgaagtacagagatgaataattcaaattagagaaatataattagaaactcaggattttgcagatcactgaagaatactaagtttacttagaacgaggagctaggtgtggtggtgaacagaggtagaagctatattgtgatgttatgggaaccaaaggtaaagaaagttatcaaagataaatggtcattaacatgatcattgaaaaaaagttaattggatttgactagagggtggtaaaaggggaatcccagccttaattcttatatctatattgttttaattgttctattagtcctttgtgtcatattgtttataacactaaggcatcgatttgactatcctgtgattgtgttggaccactcaagtaaaaattagaatcattcctttccactaattttacctctggactttgcatttctttcagtagaagttattcttccagtcacttaggcttcaaacctgtgattcatcctgaggtctgccttatctccaaatttagtcaggcactatattagtttcctagggctgctatgacaaattaccacaaaccttgtggcttaaaacaacaaaagcttattctctcacagttctggagcctagaaatctacagtcagagtgccagcaggagcatccttcttcaaaaggctctggaggaggatcttttttcatgccccttgtgtagcttctggtagttgctggtaatccttggagttcttgggttttagacaggcacatcactctggtctctgccttgtctttacatgatggtctccctgtgtatctgtagctctgtgtccagatttcactcctgttatgtaaggacaccagtcatagtggatttagggcccactcgaatccaatctaacttcatct

SEQ ID NO: 70815 - DNA, 1011 bp, Homo sapiens
tgtggagaggagagaagatctgaggtgagaggaaaatgcttctaggtgcaggaaccattatcttaatatctgtttattggaaaggttaactgtttatatttggataagagaaaataactgtagatcgttcagttattctgaatttgaaaaccacacagcagttcctagacccctttttatgtaattggatatcactgccaaatgttgctgatggttggagtgacaacatgagtagtctaaaagtcattccttctctactttcttggtctctgaatattacttttatcttctcataatgctagaagtagtattattggaaaaacagcatttattatatagggatcccagtgttttatacccaaatatgcacacttgtttgtttttctgtatatgtcacttttcttcctttctgtcgatgtaggtactgaaaagtgtatgaatattaatgggatttcagaggattgttttatgacctatgaactcagaaatcctactgatttttgtttgcactgtgtttgaagcctagaaacatctgaagccgtgttacagcaagaaattttaagagctaaattttgaggctttaggaataagtatcttacagatcaaattctaattattaaggttagtttgggttgaattcttttgaagcaaaagtgacacccagtggtgagattatcagctaatcataagtataccagaaggagtggaggaggttatatttttaaaaatctacaaaatatagccagaccccatctctataaaacatgaaaaaactgtgcatggtggcacatgcttgtagtcccagctacttggaaggctgaggtgggaggattgcttgagcccaggagttcaagattgcaaagagctgtgatggcaccactgccctccagcctggatgacacagcaagaccctatctcaaaaaaaaataataattaaacaaaaaaaccccaaaacactacaaagtaacatttcattagtattgtgacaggatgaatttttttttctactga

SEQ ID NO: 70816 - DNA, 1120 bp, Homo sapiens
tgctgatctcagggtatgtgggaagaggaggatggatttttttttttagctgctttcccagctgacttgcttttaaaatcagttttttttcctaggaggtgaggagaaggctagagtggtaggagactcactctaatcactggattcccttttctcatctcactgctaatccccctgataacccttctctccattcccaatacctctcctggcctgcatattttggaaagaagagggaggggactcagtgactgaggaatatagttcttgatagtctctgattataataagaaatgctcctgggtgctgctatttgttatttcctttaggggtcatctccaaggacacaccagcttgagggagcatttgcaaagggagatgcttagtatcttctgcttctctcataccttaccgcatttatttagtgggctttaatttatcttctttcttctcttttaagcaaatcagtagtttgcagatccaagtgacttcacttgcacagtcagagaatgacttgctgaattcaaaccaaatgctgaaggaaatggtggagagattaaaacaagaatgccgaaattttagaagccaagctgaaaaagcgcaactagaagctgaaaagtagagtttgctctttatgtacaaactattttttcttttttctatataacatgtacttattttagtaatgattccaatgttgattatattttagaaactagttacaaatacactttaatagtgtacaatggtctactgaggtaataatgtactttatgtttttatagaatgaactatactgactcttgaattgtttttaaaaaaattaagacattaaaattctgacagtatagtattctgaaaaacctcaaagaaaactttttttattcattgattaaaccaaaacatttcttcaaaaatctattcttctgaatgccagagaacagaatgggttttttgttttgtttttgatgtgcaaaacttaattccttgaattagaactatcttggattttctttgaaaagctaatttatttgttttttttttttttttttttggtcttaaaatttgttactagtagacagtatggagtaaaactggtagggataaaatgattgtggtg

SEQ ID NO: 70817 - DNA, 1131 bp, Homo sapiens
gtggggtgtggtggcagccacctatagtcccagctactcaggaggctgaggcaggagaattgcgtgaacctgggaggcggaggttacagtgagccaagattgtgccactgcactccagcctgggtgacagagtgagactctgtcttaaaaaaaaaaaaaaaaaatctagagacaagtttgggtctagttcacatgctcatccctggacctaccactgcgaccgtggtatcaggcactctggctcagccaaggttatatgcccatgtctctgtgtggagtgggtgaaggaggaggaagtaaatgatatgcagtttgatataatagcaaataaccaaggggaatagcaataaccaagggaaagggaagctgaacatttatgatatcctgtagtcaatacccccttaatttattttttgcatggcttaaagccagggctcttatttcccatttggggctttctgtttttttcttgagcttttaatgaacgtttacatttcatcagtttggatttctttgctgccagtgttggatatttgcttttttaaaaacaaaccaaaaaactatcatttaatatatccacctttctacttagactccatcttgaaaagaattatattggcccattggacacattttctcccaagaatttaaactgtgaagtaagggatgaaaggatatgtgtcaatgtttgaaggaccaggcagggctgtggcatgtctttgcctgtgattcctatcaattattgtatcctggtttcagttttctagttctcttttgagtgggttcttatattctttcaggaaagtttatttttgctaataatggccagtgtcaatttccagtgctcacaagcaagaaccatgctttcagaaggttggtataagaaggctactgccattctcatgagacttgtaggactctttgacagtagagaaatcacagtagaaaaatacaacttctattgtttgccctgtatgttgcttccctttgatagcagggactcacattaaatgaagccaagaagttacattagagcctttgctgcccaatatgatattactagtcacagatgactgttgaaacctaaatttaaattagaattttaaaaaattaaaattcagtttcttcagt

SEQ ID NO: 70818 - DNA, 1048 bp, Homo sapiens
atcctcaacacttggaaatgctttatgtctgcttttcaaattctaatatcttagtgacgtctctaattatataaagtttgagtggcttttaaaaatcatgttcattaagtggtaggctatgttttgagacagagttcttgatctgcattacttaggaaagaattacttcaggcagaggtatacttattacttacttaggttttataactttatttaaattgttagtggctgtgattctaaaagcatgaatctgtaatagattttaagaaccaatcttgtctgtccttttgcttttagatgggtacattttttaggacatattcaagacaggtcgtttttaaatctctctttgacagtctccagaaagtaggggtagaccctccccaggcatcctactctaatgttttatcctatgataatcccacagtttggccagttagaatcttttctgttagaatttaagcctgtttctcctgctttgggtttctgttgccatagtgataaaatgttcagcattctgtcattacttgaacacaataatgaacttgacccttaggttttgttttgttttgttttttagttttttgctatataaaacagctttcattcctttagcttttcttaaatgtgaataattttctattctgttagtcacattgataatttttctttgattcctctggagtttcacttacaatgtgtaaatgacctcaacttattttaaaataaagacatagtaaccaacataaaatctagcaggattaaattcacacgatttgcatggctttttttttttaatgttcaacaattgtggtattttttccttgacagttatgatttactgatttataagtccagctacatcaaccaggtctattttgatcattcattaaaatggtcataattgcagcacctcctatttagataacccgtgacagattggagacttatctgtgaagcaaaaggtcttactaaggaaatggaaagtataaatcatgcaaagcagaaatatccatttatttacaaataatatatatctgtgataagt

SEQ ID NO: 70819 - DNA, 1787 bp, Homo sapiens
tgtctcatcagatttcctcattatttatgttgtttctaacttgaagtatttaaataagcttacctttggcctgtagctatgcttgagttgatctgtagttgaactcatttcagacagagtttatgatgaatgcctttcatgttttgaaatggggtctcaccatgttgcccaggctagccttgaactcctgggctcaaatggtcctcctgcctaagcctcctcagtagctgggactacaggtgctaacaccgtgtctggctgctatgaatgattttttccaattgttaatttctatttattgactcatggatttccatagagttaagaagtaaatttttttaggaacttaaagaatgctgcattttgttttcactttgagttagatgtgaatttgctttagttattccatctgcaaagtatttgccatttcattgcaaagatttctgaattcattgtacaaacttgaaagtgtccatgttatttatacttctgctagagatctagcaattctgctagaatcaataggttttgaagggttttgtgatttatttcactctgctatcagccagctttttctatgaggcttaggtcacagaacctctttagaggtgaagtaagtaaacctctggttatcatccagtttgatctcaactctcaatgttcgaatgagtaaatgtatacagcttttattaaagtttttatatgtgtatgcactaaataaacagtgacaggaaaatttgctctgagttttagcctgtttcattcttattttaagagtgtttattaatgatgtgagtattgttgagaatatatatttgtagagactttctacattcatttgtcttaccagcttatgaatgcttgctgttaaatgtgatttttcatcttaataacattgaatatagtacacttttctccttgaaaaacactaggattacagtcagacaatgaaattctcaaagcagctgttgaacatcacaaagtgctcttagtagaaaaggatcgtgaattaatacgtaaagtacaagctgccaaagaagaaggttatcaaaaacttgtggtattacaagatgaaaagtaagtacttaattaccttagtttgacttaaatatccttgcaaatgaaaacattttgctgtcatatcatctttattatagttcttgtaacataattatgatctcttgttttaggttagaactcgagaacagattagcagatttggagaaaatgaaagtggaacatgatgtctggaggcaatctgaaaaggatcagtatgaagagaaattgcgggcttcacagatggcagaagagatcaccaggaaggagcttcagagtgttaggttatatatacatatatatttaaagtttttcatgttgaaataaggtcagagttaacaaaatgatgtacaactagtacaaagaattcccatgtgctcttcaccctgatctcccaaatacaaatacctatgtaaccatattataataatcaagattaagaaattaacatgaatataatcaggaaatcaggcattactattataaaatctattaactgtacttaaattttaccagttgtcccactgatgtctttcttctggtctaaaacccaattcaggatcacatgttgcatttagttacttttaatctggaacttatgaacactttgacaaatacttgtcagtattttgtatatcctctctcattttggttttgtattgcatttttcatggttaaattcaggttaggcatttttagcaaaacatcaaagtcatgtgtcctcagtgaat

SEQ ID NO: 70820 - DNA, 1025 bp, Homo sapiens
agctatgatcgtgccactgcactccagcctggatgacatagcaagaccctgtcttttagaaatattaacaaattttaaaagtttcagggttttttcccctgcagattttccaatcattgagtagttgattttagatacttgtaattaagtctttaaggcaagattaagccaaaggaccatacacagatattcgtaaagaaatgcctctgttctgttaggaaagaacagtattttcttaatgtctccttacttgaagtactgttgcaggcactgacacttctttcttcttggaagatacttagactctactttactaccagagcgttttcttgtttccacttatgttttggggtaagtattgaatggcaagaaaatgaccaatagtaatttcagtttttaattatcaacaggtaaaagaacttaaacattcaaacaaactggaaataacagacatcaaactggagacagcaagagctaagagtgagctagaaagagaaaggaataagattcaaagtgaactggatggtaatatgtgatttcccttgctgctgctgctgctgcttattttcagatatgaactcaaattattaaaatagttgaatctgaatttttatttccaaattttcaacttaatttagttttaattttggagtacatatgaaatgtttattatatgttgagtgttttgttcattgtaagatttaataactttaaaaaaatcagtcttatgtttttatcatagttattggatacataaatgaattttgtaaatgggatgccatacttcctgatttataaattttaaatctatttatggtgtagttattagtcccaggacattttaagtctggagaatgtgaggaagataattgggttccaggcttaatttttttcaattaaaaagatttttttatgtagacctcaggccagttcattgtagcctagtgcagagtaggcttatttatttattttttatttttattttttatttttgagatggagtctcgctctgtccccctggctgg

SEQ ID NO: 70821 - DNA, 1573 bp, Homo sapiens
accaagtataatacttttcatgcagtacattttacctgagctccctagctcacctgtgtgctgaccctgatttttcttctttttttccatatatatatactcttccctattgctctttcctcttagagttagagcctaggtgatttctcctactccgctgaagaaagaacagcaatctagtatagtatttatttctctgtgcttgtttattaatacacattgctaagagttgcctgtctttttaaaggcacacttgccttattttgcatataaatggagtattaaataccatccttcaactttaaacaaaccaagtttcatttgaagtcttgtatgtaaagattccattggaagggtagattttaaaataatatttcaaacatgactgccacagttttctttgcaacttgaagttttcatcaacattttgcaattctagcaaatggttgtttgcagtgcaaaggaacacctggggtgtgtttgtcttagttactcaaattcataaatgtttgtcagattttagaacaaagttatgtcagtgtgagtatcagtgtcttggattaaaaggtattaccaaagatggcctgaaaatgatgaccttaaagagatttcacattcagtgaggtaaattcttctagttccctcataaggtttttcattttcagaatgccaataaaaggtagttttaagaaagccacccaacagagttgtccttatttacctaaattaattgggtaattacatctcagaactttgaaaaagatcaagatttaagtaccatctctttggaatctgtatccagagcttcttaggtaatacatattgtcaattatatttccatttcttgcttatttatgctgtgctcttgtgtgtctttctgtgagtatgtgtactttaacagatactgaccccctgtaaaatgcccagttttgccagttttgacatttattaaagttttgttagtaatatctgaatacttccattgtgtcaaaacataaagcaaattcacaacataaaggccagaatctatatggcaaacattctgtgaagaacagggtgacttggtccagtggagctttaggagaccatgaattgcttgaaattttatgcaacattttaacatgagcattttatttaaaaaaaaaatccctaattttcctaggatttgggacttgatcacaaagaagattaagaaccaaggatctaggggcagaaagaaactttactgtaacatttggaatttggttcagattactcatagaaaagtgctattatttgtcattactgggtaatacattttcatacgttaagtaaaattccttttagtatatttttaggaaattaacagtgttcatataagtgatgcatcagtgatgttaggataatagaaataaggcaataaagaaaaactttagatccataaatgagtacatttgaatgcagagaggacaggtaaattgcttgagcatataccactggtttaacagcaaaagtaggcctgaagacagacctcacttgttgcttgacttcctattcggtgttctttcagtttcaataattgtagtttagttaa

SEQ ID NO: 70822 - DNA, 2113 bp, Homo sapiens
gatcaaacagttgtttcttggaccacttttgcctaaggttttggagcatttctttagttttttctgtttttgttttttgtttttttttttttttttttgcagggccggggagcttacagtgagtctttgatgttcatcctggctacaaacaacctcttgtcctgttttgagcagtggttttcaacttcttcttaacaaacaaaaaacccagctgaatcatttacttaagttgaatcatttgaagaaaccccagaaagagactaaaaatagaagcgtatggttaatgccagaaatttggtgggggtggtggtaggggatagatagttggggagatcaggaaagggaaagaatgagttctagaccctgattgcttgcccctggtctccagaggtgaggagcttctgaaatgcctcagaggttaggaaacagtttgaaacccactgatttggaggcccacgaagtccagcagtgataattggcatgaatgacaagaccactggtgtctctgctctgcaagttccccagtgactttaacacctgccctggagtaatgatttttcaattcttcttgaatctaagaactaagaactaggccatcattacaattaggactttaataaactctcagctatcatttaaaaactctcatcaatcacatttgcttttatgtacacagacaggcagtttttgtgtgaattaagttgccctgacatagataattttattagtatagactagctcaagaattacagtcatgtgaggaaaagctttggagtagtcagagttttggtcatgaacccctataatgttatgatgaattttaaaatacttgatgtatgtttagtacttacagtattataattttaaattttagtcagcaactgattaagccctgttctagacaccacgtggagatacagggaaaacaggacacagtccttgacctcacatttgagtcccactaagaacaaaaagatagtgatacttaaaattttttcctttgtactttgtttcagcacctgagctttgattttgtgcattttttaattttactgacttgtaaagcatgttcatgactgaaaatttaataatttaaccttgtatgctttctttaaaattattattagattgcaagactggaggaagataaagaagaactacgtaaccagctgcttaatgttgatctcacaaaagacagcaaacgagtggaacaacttgctcgagaaaaagtctatttgtgtcaaaaattaaaaggtttagaggctgaagtagcggaattaaaggctgaaaaggagaattctgaggctcaggtggaaaatgcccaaagaatacaggtgcggcagttggctgagatgcaggctacagtcagatccctggaggtaagattctaattacttcccagtagagtatggcatacttttttaaagtgcagttgacaagcctttgatttttagagcataaatgtatgccccccaagctaatgctgatgcatttgtgtaatcccaagagtatttattcttttagtaaagaagaaagctattgattcataagcaatacgtatgctaccacatttacaaaggggtatttattctttgggagtcaagtcacctatctgaaatgtcttaactcttaaaatgccacataatagaatatgcaaaataaaaatatatgtatttgagtttctgagcgtaaagtcatctcaaaccagaaagaataatttctttcaagatagtacattccttacactgggatttgaggtcttaaagtcacaaatcctgtttgaacagaaataccatactgatgtatcttacgacagcttcttgccagagtagtaaaatccaactgtaaaggtatacatgcctttacagaattatttccctgggttcattagagaaagataagtgttggcagacctgactggtactcctacgggtattgccttatgaaaattcttggtttccattttattcagatacacttattcttcttagttcttagtgcctaacttgtagcaaacatacctgtttaattgtttttatttattttgtatagttcaaagtgtttctttttcctttggaatagttataaaatgatttgggtgggggggacatta

SEQ ID NO: 70823 - DNA, 1621 bp, Homo sapiens
ttaataaaggggacaggataagactgcagataacaagtatattagatacttggtagacattttatatatgttaccttatttaacaaatatacctggccttatacatacaaatgattattgtccccttcaaaatgggcccctttggagagctgtagtctagtgatgcggtaattgcccaaaacagttgtagaatcgtcttttataatggcttactggcttgataatatgatctttctaatacagtcctaatggcaagccattatggtttgggagtaggtttaatttttgtaaataaacaagatcagacccaagataagtgaccaagttcaataaaaacttttttttttaaatcaaagcaaagtatatctgcagtaaaataatgaaacccattttcttggtttacaaactggcttagaaatctttgaactaaagatttatggtgagctgggtattttaggagacatgctttccttgttatcgaatttcctgttagtgtctcctgtatctttctgctttgtggcctgagtttcttgttgggtattcagaatgccagcagctttcatagagtactgttaggaagcaggatgagaacactccagggaattgcatgtgttcctggttagtcagtagagatgatgctgcacgtattcttcaggttggtctgttgagttaaactatcattgtaatatttaattagatgttaaaatgctgtactaaatattacaataaccttacatctcttttgaatttgttttacttatactaaattatacatttaaaaaatctatattttgaaaggtgtgctacattcttacatgttattttatttaagtccagagatcaacactttcctcatactatacactttatcataatgagaaccagtgaagaaataagattaattgaatggtaatttactttttggatatcttttcaggaatgtactacttctgtatgtaggatacttgttatgaagacctttccaaattcatttgtatttctgttaaatttattttttacttttagagtggctatcattataatgtaatttaaaattatatttgtaaaagtgactattggagtgagtacgaattttgtttataaatctatgataaatgcattctccctttaggaggtagaaaagtatagagctgtatataataagcttcgctatgaacatacatttctcaagtcagaatttgaacaccagaaggaagagtatgcacgtattttagatgaaggaaaaataaaatatgaatcagaggtaagtgattgattatacgagtttctttgttattgttctggtcaacacaattttataattatatatttttaaaaatttcaaattagagtcgattgtatagttttattcattaatggtggagtattcatcatgattttcatcagcttcgtatcaacagtttttttgtgaaagttctgttttgggtgtagatcttttaaattctatttatcctttattttgtccagccaatggagatagacaactttggggagtttcattgtacaaagtcttttgtcttatgtagccacagagatggacttctctctgcaaatatagttagtgtgattccttacttagcattgttctttctgcttcttg

SEQ ID NO: 70824 - DNA, 1803 bp, Homo sapiens
tccgtctcaaaaaaaaaaaaaaattagccgggtatggtggcaggcgcctgtaatcccagctattcaggaagctgaggcaggagaattgcttgaacttgggagtggaggttgcagtgagccgagatcacaccattgcactctagcctgggcaacagagcagactcctctcaaaaaaaaaaaaaaaagaaaaaaaaaagaataataaaagtgataaaaatatgtaacattaaaggaggcttacgtttactgatcgcaaattatgtaattatgtttatttctctgtgcaggtataatttggcttcctgagattctgccttagcaagaaaggagtgggaaatacccttggaaagaaaactaaaacagtaagaaagccaaaacttatttttacatggttgtcagcacatttaccgatatggacacttttcccaataattttcctcctggtggagacagtggattgacaggttctcagtcggagttccagaaaatgttaattgatgaaaggttacgatgtgagcatcataaagctaattatcagacactgaaggctgaacacacaaggtaaattacttaaatctagaagtggggtttggttttaaaaagttattggcattatcttggctgaatgtttgctatagaatatagtataattttgttattttgcaatgtatacatttaaaacttttttaatatagtaaaatttttactttaaaattactttgttccaaactaagtatgatatcaagtgggttatgaatttataagccttattttgaaagtagcaggacgtataagattaaatgtatccagatggctaaatgtgttccccatctcccaccaaagtaaaattgcattccaaaactacagtgttaataattaaatgaaactctgtaaataaaagatacttgtgggtttaaaggaatgtgtgatattggtcttgtttttctgtggtgttgattgactttacataaagtaatgcaattagaaagaaaggatttactcaaaattgaattctctttaaaaaaaaccaggttgcagaatgaacatgtaaagttacaaaatgaactcaagcacctgtttaatgaaaagcaaactcagcaggaaaaacttcagctcctgcttgaagaactaagaggagaattagtagagaaaactaaagatttagaagaaatgaaactgcaggtgagaaaatatatttgagttttgagttagtataaaagcagtcagatacgtagtggaagtaagtagttttggtgaatatggcaatttctgtctatatccttaatgattactttgctgtatctccaagtggtacaatttaatcttctttcatatattttagaatgttagctaccatgtaagggagccatgaaactgttattttatgtaaattggtattatattgcctattctgatataaataatatttaaccattaagaataattagggaaaaagtgagtttgaattgataaaaattcagaattaaagaatttttttaaaagagttactagtatttgtatatgcattataactgaaagctaaaaaaggacagctattcttaaagagcttcttaaaagagactgtaaaaacagtatgtgaacataatttatgtgtacattgtaacacaaatgggtttgtaaagcaaaagatagttgtctccaaagtgctgaagtacagtttctttagatcattttcacgctattcattttttcatttgtctggaaaattgagcaaagccagactttaaactccagtcaaatttcctgtaaatttcagattagtaggttctcacgaataatatt

SEQ ID NO: 70825 - DNA, 1228 bp, Homo sapiens
taaatacaagagaaagccattgtattagttacttgtggctgctgttacaaattaccatataataggtgtctcaaaacaacaaaaaaattattctttcaacattttagagattagaagtcagaaatcaagttgttggccaagccacgttccctctgaaggctctgggttagaatcttttccttgccttttccagctttttgtggctgtaggttttccttggcttatggctacatctttccagtctctgtctccgtggtcacattgcctcttcctcttcagtctcaaactccctctccttctctcttagaaggatacatgtgattgttttggatacataatccagcataagcctctcctcttaagatccttaatttaatcaccccaccctttttttaaaagtatataaggtaatattcatagcatccagagattaggaaatgacatattttgagggctagcattcagcccactattgtttggaagactgtttctgaatttggaggagaaaagtgaatcgaggctaaagtagcattagaatggtgagcacattatttgttcatttgttatttttgagctcttaatatgtgcctgtggttttttaggtgttgggattatgaacatgagtaagacatgtttcttgtcatggacaaagttacattccatgtgttgtatatactaaaatgcaagataaaacacagaataatgaactatttgggagggtctttacttcatggaggaagtaatgcattcctgagctgggttttgaaggctgaataggaattcactagatcagaatacaaagagatggaaaaagccttctgagcaaggaaattagcatttacaaagccatggcggtagaaaacagcagtatgtgctcaggaagctaaatggtaattagtgcaatgagacaaattttagatttgttttcatttcttttttttttttttgagacggagtttcgctctgtcacccaggctggagtgcagtggtgtgatcttggctcactgcaagctccacctcccaggttcacaccattctcctgcctcagcctcccgagtagctgggactacaggcgcctgtcaccacgcccagctaattttttttgtatttttagtagagatggggtttcactgtgttagccaggatggtctcaagctcctgacctcgtgatccgcccaccttggcctcccaaagtgctgggattacaggcgtgagccaccgcactggc

SEQ ID NO: 70826 - DNA, 1137 bp, Homo sapiens
tgtgccccagcgtgagctccctctctggagcaatgctgttgtgcactcttcatgcagttccctttgttagtttcagggcctgtgagggtccagggcctctactgtggctaggattgcaagtatccatggtgggaatgtggacccctgggcatctctcatttaccctttcccctgactgggaattctctccaggctcttagctaatctcggataagcaggctgcctcacttctctctctttccttgatttaggtgtttcctgtcacctctttgttgaattccttaatgttttacaatttaaaaacttcctgaatttatgactttgtataggtaatatgtgcacatggtaaaaaaattttaagtccagaaagtttaaatagtccattttctctcatccttattcagtcagcaattgttggttaacaagtatattccactgaccatcataaactccttgaggacaaggattttcttttatttatttctgtattcctgtatccaacaaagtgtctagcatattaaaggtacttagaaaatatccatggagtactctgaatatgggcaggctcttctttcctcatgagaagtgtgcttgacttgatggtctgtatattttttatatctctcaaaacccttttactgtaagtagaccattcagtaaatgtggtatagcagtcacttaataaatattggttgtttaatcagttttttaaagtatatggttttaacattaacctgtgtgtcttgaggatggcttttatttatctcctttttctggctgtgaaaaattttatacttgctttgtgacagattcaaaataatgaagagaatgtttgtgttaactgcagtaaaatatcagttaaactcagttttaagtatcaatttctctttaacttttcagattacggcataaatctcatagaagtaaaattaaatcaggatttatttaaaaaacaattttcaggatatgctgttgcatcagtagataatctttattgtgtattagcagccatattatgggtagccttttctatttcagaagaaaggtgggactgtgagcaaagaagaatatacaactcacacagaggtgctaagtgctcataaatcttctggaaagtccccatgttattgtaacaga

SEQ ID NO: 70827 - DNA, 1072 bp, Homo sapiens
ttcagaaatggtatgcttccaatttaaagcaaattttatttctcttatatatgggtttaatcaatatttgagtgcctattatgtgtctcatgctatgctaggcactggggagattgtgaataagacatagtgctaagtctcaagcaccttattctctgatgggagaaatggacaaagtaattagtaatttgtaataaagcatgttaaatgctataaggatagataagaatgtgttttggggcatgtaggaagaatacctggcctagaactagaaagaatacacaaaaattgaggaatgtctctttagaatcttgtaagtgtagttgtagggtgtacagagcagtattcaacttggcccggaggaagttagtcaaagaaaactaggaaaacaattcttgaagttggagagagagaagagtcatcaacgttagtggtagttgaaataccaggtatagatgaggttcctagtgagagttgtgtagaatcagaagagagcttgtgaacaccagcatgtaataggaagggggagaaagaaggtaggaaaaccagagtagggtaacgttttggaaaccaaagaaagaatgcacatcacatttagtttattgattaaatggaaattgttgctcaagaaacattgagtgtgtagtcctataaatgtaaacctatctaaataaagatgccctctacaaagatctgaacttgcaaatgggggtagtttaagtccttgtttagcagcgtaacagaggaaagagtatgtactttggagcctggatcctgagagtgaaggttagattactagctgcgtaactttttgaaccagttacttaattttttggtccttaatgtatggattaaaataaggtaagctgtaaacttgacttttagtgggcattgttgatttttatccttgccattattaatgactcttctgaactacatacccttcttttccttccccatcccccgtcatattctttcatccttcaagatccaccaaaattcctgccttttctttgatatcttcctctatggatgatattacaaattttctgtaatggaatgaacatgtcct

SEQ ID NO: 70828 - DNA, 1035 bp, Homo sapiens
ctagagcatcaataatcttatcacagattcacccctgttctttctcgtttagactctgagggtcccacttcattgtcaatttcatttgcagtcacaggtttagcataacagctaaccttatttttagttgatgatctggaacccttcacctgacttacaggcaaactcttgtgtattttttgttagaaaatcttcatatcgccattagcaaatgctgtactagtttgattacttggccattagctgcttctcaataggccaggttgggaggcattttcttggcatttttgttttgtatcttgagttttggaggtgaatcactgccatttttaatggatgctggaggcattttgtcaaaggattcctttttggttccttcatctttgtcatctgcttcatcttcatcagtattatttcctgatatttctgtaactttagaagcattttcatctatattgtcttcttcatggtttcctcaactctatttttcctttctagtccttccagcaggttctctgttgaacctctcatgttctgggagtagcttttctgattcctctggacctcacttcttgagggaaaacttagacaaagggggttattgggacaaaccataatccctgtcactcagttggtttcaaagctgcaactgctacttatcttcctcttccataccaatttcaagttctcctctccttcagcagtcacttccacagatcttagtggtgtaacctgggtgtgacccaaatcctcattcctgatgagaaatatatatttattggcaattacacatacctcatgtgattgttgtacatgtccttccacagttacaagtaagtctcaaaagactcccaagtggatcacctaggggctacatatttttctctgcccattgtgtaaaagaagcccttctgcttcctgttgatctaggtcagttacccctgccaagatggggattcctcttcctgcctgctggcaccttgacacaaagggtccaaaatgcccaaacagttgccatagcttgtagttcagtgg

SEQ ID NO: 70829 - DNA, 1047 bp, Homo sapiens
ggctcaggtctgttctatgtgtgatcattattgggttttttttttaatttactttttaaatgtttacaatttaataaatctcttcattgcagacatgtatggctgtttggtagtattcagaaacatcacagcaatggcagtttttccaattggtgtgtagtcctcaataattatatataaaattgctgtcaaatcagtaagactgcatttatgcatgcatcattttcaggattgttagtaacctgggcataatttccccaaataactttgcctccttgcatcacaaggcccaattcgctcatatttacttcaatgacagtacctttggtaataacatcgaaagttgtatacagtggggacaaggggctcttctttacaccaagtattcgtaggcaaaaggtggctttcatttcaggatgtgttacatgggctttcttgaaatgcaagcccattggcctgatgaatctttcatatttaggtggttttcttgtaaacccatctccaacaaagcagactttagtaaccatcctcttccatgccttcttctttctctttcctgttcgaataacttttaatacttctgtttctccctgggcacgtactttaggcagagggacttcccattttcccactttctcttttcgtttctgtttaatcctattggaaagtactttagctcgagattgttcctctctgtccagcagataggcaggtactgctccctgtggagtcttttcatcattcttttgtttgatgtttctcttttcatgcatcttgatagtcttttcatttgtattttctcagcatggcgctgtttatggtaaagcttagccttcagaccaatcattttctttcccttctttgaacattcatgagcctctcgactttccttctttccctttttctcatggtaatccaaatggtatccatagtgtttacagtgtaattcaatatattcgttctgtggcatggtgacagccacagagctgccaggagcagtccctggggtgcgaaaacgctctccatttttgggtctcagagacccac

SEQ ID NO: 70830 - DNA, 1058 bp, Homo sapiens
tagtggtgtgcacctgtagtcccacctacttgggaggccaagaggagaggatcacatgagcctatgagtttgaggttatagtgagctatgattgtgttcctgcactccagcctgggcaacagagggagacactgtctctctctctctcttttttttttttcttttttcttctctttctttttctttttgagacagagtcttgttctgtcacccaggctggagtgcagtgttgctatctgagctcactgcaacctccacctctggggttcaagcgattctcctgcctcagcctcccaagtagctaggattacaggtgtgagccaccatacccagctgttttctttatttatattttgttttaaaataaaaagtaaaaacaaaaccaataatgctttcctgtcccggcctgtgcggcgtgggctcgtgggtctctgagacccaaaaatggagagcgttttcgcaccccagggactgctcctggcagctctgtggctgtcaccatgccacagaacgaatatattgaattacactgtaaacactatggataccatttggattaccatgagaaaaagggaaagaaggaaagtcgagaggctcatgaatgttcaaagaagggaaagaaaatgattggtctgaaggctaagctttaccataaacagcgccatgctgagaaaatacaaatgaaaagactatcaagatgcatgaaaagagaaacatcaaacaaaagaatgatgaaaagactccacagggagcagtacctgcctatctgctggacagagaggaacaatctcgagctaaagtactttccaataggattaaacagaaacgaaaagagaaagtgggaaaatgggaagtccctctgcctaaagtacgtgcccagggagaaacagaagtattaaaagttattcgaacaggaaagagaaagaagaaggcatggaagaggatggttactaaagtctgctttgttggagatgggtttacaagaaaaccacctaaatatgaaagattcatcaggccaatgggcttgcatttcaagaaagcccatgtaacacatcctg

SEQ ID NO: 70831 - DNA, 1098 bp, Homo sapiens
accagtcctgcaatggccccatgctggtgggcagcccccaggagggcatcgacattgaagaggtggctgcttcaaacccagagctcatttttaaggagcaaattgacatttttgaaggaataaaggacagccaagctcagcggatggcagaaaatctaggcttcgttgggcctttgaaaagccaggctgcagatcaaattacgaagctgtataatctcttcctgaaaattgatgctactcaggtggaagtgaatccctttggtgaaactccagaaggacaagttgtctgttttgatgccaagataaactttgatgacaatgcagaattccaacaaaaagacatatttgctatggacgacaaatcagagaatgagcccattgaaaatgaagctgccaaatatgatctaaaatacataggactagatgggaacattgcctgctttgtgaatggtgctgggctcgccatggctacttgtgatatcattttccttaatggtaggaagccagccagcttcttggatcttggaggtggtgtaaaggaagctcaagtatatcaagcattcacattgcccacagctgatcctaaggttgaagccatccttgtcaatatttttggtggtatcgtcaactgtgccatcattgccaatgggatcaccaaagcctgccaggagctagaactcaaggtgccccttgtggtttggcttgaaggaaccaacgtccaagaggcccaggaaatactcaacagcagactccccattacttcagccgttgacctggaggatgcagccaagaaggctgtggccagtgtggccaagaagtgatgtctttgtcctgatccgatggagaaacaaagccatttttccataaaaagggatggttcatcattgtgaaagaaatggttatctcgttggggaggaaaagggggggtgaaggcaagaatcactgaaaaatcttaaatctgtgttttctggaataagctatctagacagcctaaatctgattttagtctttataaaaataatatctcgtattctcatacttttctgtcactgtaagcctgcccagtaggcagtgttttgcagactttggggagcggtc

SEQ ID NO: 70832 - DNA, 1331 bp, Homo sapiens
atgcttcaattaaagttttaaagtccttatttgtatttgtgtatcttgttgcacattgatactcggaaaaaaatctctgtttagttgaatcagtttcaaatggtgccagatttattatccaggtattgggaagccatcttcacctggaattgtcagggctatgcgagcagaacttctgaggtgattttttggctcaatggaaaggtgtcttaaatgattccagggcagactccttggaataaagaatgatggcactttggttcagtagacaaacatttattgacagcctcctagggaagtacgtgaacttcaagttaggtacagctatgacatcatgcctccccaaaggagcttgcagtctgcagggggttaaagtgcatgggtggtgatcaaaggaggagtcaggaagtgccacaagacaagcacagagcaacaggcatgtcacagaatggagagggggtgttccactgggactgggaaaagcttcatggcagaaggggcatttgaaatgggttttgtttgtttgtttgtttgtttgagacggtgtctcgctctgtcactcaggctggagtgcaatggctcactgcaacctccacctcctgggttcaagcagttctcctgcctcagcctcccgggtagctgggactacaggcacgtgccaccatgcctggctaatttttttgtatttttagtagagacagggtttcaccgtattagccaggatggtctcgatctcctgaccttatgatccacccgcctcagcctcccaaagtgctgagattacaggcgtgagccactgcgcctggcccttgaaatgggttttaaagaatacgtaggattttgataagcatgagtaaatgggtggcaggcattgtgaatatcatgcatatgagaaaatccatagaaaattcatatacattctgggaatttaggttgtaagatattcttaaggggtccttcaggtgaggtgacgcctgaaaggtgggctagggccttatagccctataaggtccttcctaatgcctgctaaatgaaatgatgtgccaggttatattatttcatttagtagccattaggaagccaaaggaagtttctaagacatagagtagcatgatcagatataatatctccagcaaaatcaaatttttagcctcagtgattgtacagttaccattaattacccatctgcccaaaataaacattttctaagtttcatgcattctctgttgctataatttgaacctgttcctgtttgggtccactaatgagccacagatactagattccttgagcttcctgtggtcgaccctctaggacttaaagattgttgt

SEQ ID NO: 70833 - DNA, 1020 bp, Homo sapiens
ttcctatagtacttattacttctttttttttttttttttttttgagatgaagtctcactctgtcacttaggctgaagtgcaatggcacaatcatggcccactgcagacttgacctcttaggctcaagaaatcctcccacctcagcctctcaagtagctgggaccacagacactaccacacgcagcattttttttttttttttttggtagagatggggtctcactattgtgccctagctggtctcaaactgctgggttcaagtaatcctcctgcctcggtccccagagtgctgggattacaggagtgagccactgtgcctggccttgttacattttttaattctgtacgcctccctgccccaagagtgacctcttagggcagagcttatcatatttctctgactccagttctttcagcacaggacttagttcacaaaagatgcccagaaaaacattttcaagtagcaattctgtattttagggggcttggtttgcaacctaaattaatcagttccattagctatcataaaaacaatttggtctaagtaagcaagccctaattgtactttgtgtgcttttagttaaattcagcctcattgagaaacattggctttctaaatgactattatgtaataaaacaaggcattagcaatctggatcaacatggtattaggattttgctgcattttgcagaattctaaattgcatatttttatgtctaaatctgatgtattcagttaaaccacagatattaatgccttgctagtagtacacgtgtggatttctgctctttttcattggctctttagtattctaaaaacaaatatttatgagacagtgtcatgaaagtttgggaaactttaaaaatgttaaagagctgacaaaatgcattacaggttgacatgctaatgaaatttaagtggttttttttcttgctagaattgagcaatactgtatgttaacatttattcattgtgcatttgtaatgttacaggtactataaagataatagttttgacag

SEQ ID NO: 70834 - DNA, 1064 bp, Homo sapiens
tactctctcaaaaagataatataaaacaaaaagtatctgtgtctgcagattcccagtcctattccccagaggtaactaccatccacagttcttaagacagcttctagaaatgttcatacacatagagtatacaattgtacatatctatcataaatccctccacccctcgtttaagcacagatgagcgtgcacagtaggcatagccctgcgtcttgcttttctctcttaacagtttagattgaatagcttcccatggtagcccattcagatccgtttccattttagtggctgcatcatttcccattgtactagaattttaaaaagaggttctctattgatggatgtctatgctgtttgcagaattggcagcagatggggtggttggtggtggtggtggtggtaggggtggcagactatcatttttttagaagcagcatagaagaatcagagaaagaggcagaagacttgtaaatattttcatctccatttctgttctttatatctcttgaaaaaaaaattttttttttttttgcctgccttaaggtgttttcagaactatatggaagcccaaaagggctagatggttttttcttcctagcccttctttccttgtggtgatcatgatggtgaaggagattatgatatgtaaccaaaacactggggaaaaggaatgtatttacacttggtggctaaagaaggttccgattccctttcttctacctccagtgcaaatacactctatggtaactggattatttgtttgtaacctgattagcaaggctttctaatgataatctatttggatgggggagttttccttatacagagtaggtcgttgcataatatccattcgaggtggtgtttgcaaaccctgtggagtgcctttccaaacactcttttccttccctttctccctggctggcagagcctgttcctggagtggaggccgaaaatgttatctgctgcctccccagcctcccttgcaactagggcatggacatgggactcagccccggccaaagggacccctgaggagcttctggaaaatgttttccttcctaata

SEQ ID NO: 70835 - DNA, 1041 bp, Homo sapiens
tataacccacattcaattaagatgtagaatatttctatcaccccggaaagttctctttcgcctctttatagtcagccttctctctgcttagcacctgacagttactgatctcatttctgtccttacagttttgctttttcataatgcagtataaatggaatcatgtgatacgcagcctttttgagtgtggcttctttcatttagcataatgcttttgcaattgcatgttgttgcatgtaacaggagttcattcctttttattcgtgagtagtgtcaatatacttttaagagtaatgcatctatgaacagagatgaagaaggctgaaatcccacacctcatctgtttttctgaacttacctgttttttcatgttactactgcagcattatgaaaagtttggagcgtcagtttccacagttagaaagtaggttagtttgtaatcctgttactttttaaatgttgttttgttacttcagaatagaaaaggttatacattaaacactgctatatatattacatgagattagggccagtgttgtcttaacctaatgtgataatttgctagggctgctttgacaaagtatcccagactgggtagcttaaacaatacatttattttcatgcagttctggaggctggaagtctgagatcaaggtgttggcagagctagtttcttctgagaaccaggagggaaagagctgttccaggcctccctcctgggcttgtaggtggccgtctttctcctgtcttcacatcattttccctctacgtgtctgtgtccagattttctcttcttataaggtcatcagtcaaatggcattagggcccaccctaatgatctcatttgagcctaattacctctttaaagtccctatcttgaaatacggttacattgtgaggtagtgggggttaggatttcagtatgaatttttaagagtacacaaatcagcccatatcccctaggctttgtggatttgatgtgtgtgtgtgcatacgtgcatatttctagggagaggttccatagctttctttggaatgatt

SEQ ID NO: 70836 - DNA, 1134 bp, Homo sapiens
gatctgtactgggaaatttaagttggtttgtcacttatgttaggatggcgaatataacaagatttctgatttgtaggtaacgatctgtttccttatttggcttaattcttacttgtatgttactcctgtgccttcctaaatatcactagatgcgcttgtgttaattattgaacggtccacctgccttgtatctctgcatctgacacagaaggaggttaaaactgggctgtgcccagaaactaacacttaacattttataacctgattcaagagcatattaagagtggaatgaatatgctatttacatgtgctttcatttgggaaaggcaccatgcttgtagaagcctcctgacttaagcaaattatcaagtactatgtgttgcataaagccagccaaagcttacctcatgtgctgggcaatttagaggcattcacagaattggtgtctgttaggcatgtgggcaccaaaattaaagtgagtctctttcattcaggtggctcatttatgccctacctggggagcagtagggacacttacttatgcaaaatcagcatctgtttctaccacctagaaatgcttttattgtttgggtaggtgggagcacattaaattcaactattgagaagtttgactcgcactctggctgtttaaaatgatctaataccaagaaagtttttgaagtactcagggctcaaatgaagctcttatttttaaagaaagacttaaaatgagaggtcttgagacttgttgctgtttaaggacagttttgcaaagtgagcctaccattccaacagactttttttttttaaacttttgtttttttggccaaataggaaatggatgaaatagtcttgcattcttgtggctttctttaaattaaatgttgatccttcccaaccctcatttcttaaataattttttgcatgtttggggtaattagaatggtaacagatagataaataagaataatacatatactgggccaggcacggtggttcatgcctgtaatcccagcactttgggaggcccagccgggcggattgcctgaggtcaggagttcgagaccagcctggccaacacggtgaaacctcatctctactaaaaatacaaaacattagctggtgatggcgggc
